United States Patent Application Publication US 2006/0134663 A1 - sequence listing, part 100

SEQ ID NO: 304723 - DNA, 363 bp, Homo Sapiens
  misc_feature (37)..(37): n is a, c, g, or t
  misc_feature (70)..(141): n is a, c, g, or t
  misc_feature (322)..(322): n is a, c, g, or t
  misc_feature (330)..(330): n is a, c, g, or t
  misc_feature (341)..(341): n is a, c, g, or t
tccttcccagtttgatcccttgaagcatgacattgangcttctctatccttcttcccccatcaacccctnnnnnnnnnnnnnnnnnnnnnnnnnnnnnnnnnnnnnnnnnnnnnnnnnnnnnnnnnnnnnnnnnnnnnnnntgcaagctcagttctccccaggctaggttgaggacccccctccccctcctcaggtagaaatcagccacatctgccatctggacaattgccggcctggactcgaagagcaagagcaaatctgcaagccagcagaggaacccagctcatttgagtaaaatacctgtcaaatcaattcagcggnagaacaantagggtgacgnaggggaattaatatgagtgtta

SEQ ID NO: 304724 - DNA, 601 bp, Homo Sapiens
  misc_feature (383)..(383): n is a, c, g, or t
  misc_feature (390)..(390): n is a, c, g, or t
  misc_feature (464)..(464): n is a, c, g, or t
  misc_feature (477)..(477): n is a, c, g, or t
  misc_feature (522)..(522): n is a, c, g, or t
  misc_feature (528)..(528): n is a, c, g, or t
  misc_feature (536)..(536): n is a, c, g, or t
  misc_feature (543)..(543): n is a, c, g, or t
  misc_feature (554)..(554): n is a, c, g, or t
  misc_feature (566)..(566): n is a, c, g, or t
  misc_feature (581)..(581): n is a, c, g, or t
ttttccataatcggttgtactagtttacattcccactagcagtacgctaagggtttccttttcctcacatcctcaccaacacttgtgatcattttggcattccttgcagttgcaccactccagtctctgcctccttggtcagcttgtctcttcctcttagtctgtctgtgtcctctcctcttttgtttcttataaggacattcgtcattggatttagggtctacctgagtataatctaggatgatcccatctcaagattttaaacttaattacatctgcaaagacccttttcccaaataggttacattcatatggtctgggtattgggatatggacacatctctttggggggccaccattccacccatataggtacatattcntttttgntgtggttttgaaagacaaaaagcatagatttattgaagccaaaaatacactccacagtgtgggagtggggctcnagcaagtgggtcnagagcgggacataatcctaattttcccaatttataagggatacantgaggnagccgtgnagctggnactgggccagnaattatgactangggctgcgcattttnaacaacaaactgtgatggga

SEQ ID NO: 304725 - DNA, 484 bp, Homo Sapiens
  misc_feature (130)..(130): n is a, c, g, or t
  misc_feature (136)..(136): n is a, c, g, or t
  misc_feature (184)..(373): n is a, c, g, or t
  misc_feature (428)..(428): n is a, c, g, or t
  misc_feature (441)..(441): n is a, c, g, or t
tctatcctgctagtggaaaggttactgtttgaaaaatgtagttccaacacagccactagtttgtgctactttagacaagtatttaaatctttgcaatagagatattataatagagcattccttgccttgnacaagntcgttgttaaattggaagactaaggatatgaaagaattttgtaatgtnnnnnnnnnnnnnnnnnnnnnnnnnnnnnnnnnnnnnnnnnnnnnnnnnnnnnnnnnnnnnnnnnnnnnnnnnnnnnnnnnnnnnnnnnnnnnnnnnnnnnnnnnnnnnnnnnnnnnnnnnnnnnnnnnnnnnnnnnnnnnnnnnnnnnnnnnnnnnnnnnnnnnnnnnnnnnnnnnnnnnnnnnnnnnncagtctggggtgacagagtaagacccctgtccttattaaagaaagaaagaaatcntatgtgcattatnaagattttgcccccctaagattgagtgccaggatccatggtac

SEQ ID NO: 304726 - DNA, 334 bp, Homo Sapiens
  misc_feature (27)..(27): n is a, c, g, or t
  misc_feature (283)..(283): n is a, c, g, or t
  misc_feature (303)..(303): n is a, c, g, or t
gggcgaaggagagagtggaaactaganaggcatatataagaataggaaccttgtggaatgagggagttgaaaggacaggaattattaatagaggaaagttttggaggagcagtgaagaaaaagggatctagtgcacatggttgcttcttttcttgagcccaaagaggtaaggataatttttacctgggaaaggaagtatgggaaatttatgtcctatacatttgctgtggagaaataaacagtcatttgccaagaatgatagatacaggatagtagccttaanacgaatcatcatgaggaacntggggagtaaagctgataaggaatactttga

SEQ ID NO: 304727 - DNA, 254 bp, Homo Sapiens
ggtgacattgaatataagataaagtaaatatgtggttaatgtattttcctcattagccttttaccctaatgagtacataggggtcgcagttgcagggtcaggagagggatggttgattttgtgctgcctttgtgcttcatccaataggcaggttgtaatcggtgcctgtcagtgtgatatttgacagactctggccttgcaggtgaggttcagctttcgttcataggcccggtttctattacccatatggccaa

SEQ ID NO: 304728 - DNA, 547 bp, Homo Sapiens
  misc_feature (78)..(78): n is a, c, g, or t
  misc_feature (224)..(224): n is a, c, g, or t
  misc_feature (246)..(246): n is a, c, g, or t
  misc_feature (435)..(435): n is a, c, g, or t
  misc_feature (454)..(454): n is a, c, g, or t
  misc_feature (470)..(470): n is a, c, g, or t
  misc_feature (496)..(496): n is a, c, g, or t
ccctccggcagacacattttcactcagcaccctgaggatgtttctccaatgtcttcaacttcccccgttgttactgancagtcttaggccattctgattcataattctgtgacctacacccacccccactacccccgtgttctaaaatttcacaggggtatgcctaggtatggatctttttcattcactgtcctgatcacttgtaggacctgctcaacctaaangatgaatgtcctttagtactgnaaattttttttcttaagcaattccctctgcttttattctgtccacaactattaagctggtagtacagttcctggactaaagttttttaaaaatccttctgtcgtactggcccaatattccagtaaatttccttaaattttattttcaaaatctttctgggggagtttagttctattttcttcagttttnaatttctaagaagctggtntttcagaaaatggttntttcacttttttccacaaggttcccnctttatgggcatcggaataatggctgaagaatatagtggtcttctcatatg

SEQ ID NO: 304729 - DNA, 566 bp, Homo Sapiens
  misc_feature (262)..(262): n is a, c, g, or t
  misc_feature (389)..(389): n is a, c, g, or t
  misc_feature (514)..(514): n is a, c, g, or t
attttgagttgtgattagaacgtactactgaaatgttggcaggcctttgaggtgtggcagtgataaatttaaatagtttgtagattttgttactaggaattatatccacaaatgctttgactgcagatgagtagttgtcagttcaggaatataaagaactgctagagcttgtatgttaagtttatgactatttgtcaatagaaaggaaattaacttacttgtgtcttagggctggagagaattttgaaataatagtgtaaangcacactatggaatacagttcaaaagtagaaaataatatttgcttggaacaggttgctgggaattctgccctctttcaacttcagctttaaacccaaacgttgccatgtttaaaccaaggacagctncacatcttacagcactcccaagttctatagagatttctggttgaagagagctctgactggactaggtgggggtagaaaggtatatagaacttaggagtagatagtgaaacctccgtatacatcgnggggatcccttggtacatccatggaccccccagagctccctcctttttctct

SEQ ID NO: 304730 - DNA, 383 bp, Homo Sapiens
  misc_feature (83)..(83): n is a, c, g, or t
  misc_feature (365)..(365): n is a, c, g, or t
agacgagccatgatacctgttcttaaaaacactctcagagctgtcacatgtgctagatagttctccacagagaagaccttggnttcaggatgtcaggcaaacctcctgactcaagcactgaaataaacacaaatcaccattatgaagtcaaatctataaacaagcttggaaaccaatccaaaatccctcagatccacacctatacactcagtgactcatgtctatgagccatggtgaccatgcccagggttggggtcagaagaatcaggggaagtgcaatagcaacggggactcttccacagccttttttgagggttcttcaagtcctggctaactctggcattcattttatggatggctattgngggaattacaaagaggag

SEQ ID NO: 304731 - DNA, 387 bp, Homo Sapiens
  misc_feature (356)..(356): n is a, c, g, or t
gaagcacaaacaggaagaacaaagctgctagttggtctttttcgctgtccctttaatctgtaatctgacaagatttggtagagagataacttagtcaccaactctgttttcttttttgggagaccaaatccagatatacagcttgagacttaatcccatatgaggtgttcattctacctaatacagcacccattaatttgtcatgagctgggtggtttgtcaagaaaacctaatacacatgtgcatggaaaaacacacatcaatgtgtactttatcctttggtttactttaacttatttgcttagagaaacatgctatggttattaggttaaccatgcatacattgcgttagtctnggaaaagaggttttaatgtcttaaccagtga

SEQ ID NO: 304732 - DNA, 504 bp, Homo Sapiens
  misc_feature (291)..(291): n is a, c, g, or t
  misc_feature (415)..(415): n is a, c, g, or t
  misc_feature (429)..(429): n is a, c, g, or t
  misc_feature (443)..(443): n is a, c, g, or t
  misc_feature (471)..(471): n is a, c, g, or t
  misc_feature (489)..(489): n is a, c, g, or t
gttgggaattcaaacctaggcagaggttggggtcttataccctgccccaccctgcctcctcctatgtagtggctctatttgctcaagtggtggcttgatctgacccatcttttctgtggaaggatctagaccagtctctagggagataactttacccattttgctacaacatcccaagagattaaaatcttacatgaacccacaggagactggcgtttctcttaagtgtgttcttcagagtgctagccctgtaaaatttttctcaaaaagagagttctgttgtagaatgangttgggaaacactgcatgctctaatctaatacctcccacccacttttgaagagatactttgttgatgacatattaatagctccagaaagtcttttcaagaaaaggaacctgaaacacgaatttngggagatgctaccnaaagactgggggtncataagggaacagctgggcttttaatcnaataatggggtttaaaangtccaggggtcccaa

SEQ ID NO: 304733 - DNA, 541 bp, Homo Sapiens
  misc_feature (28)..(28): n is a, c, g, or t
  misc_feature (204)..(204): n is a, c, g, or t
  misc_feature (206)..(206): n is a, c, g, or t
  misc_feature (210)..(210): n is a, c, g, or t
  misc_feature (213)..(213): n is a, c, g, or t
  misc_feature (218)..(220): n is a, c, g, or t
  misc_feature (228)..(228): n is a, c, g, or t
  misc_feature (231)..(231): n is a, c, g, or t
  misc_feature (235)..(235): n is a, c, g, or t
  misc_feature (242)..(242): n is a, c, g, or t
  misc_feature (281)..(281): n is a, c, g, or t
  misc_feature (283)..(283): n is a, c, g, or t
  misc_feature (316)..(317): n is a, c, g, or t
  misc_feature (358)..(358): n is a, c, g, or t
  misc_feature (495)..(495): n is a, c, g, or t
gtagaatgtgttgttttctctttctgtntttcctcccccagtcacctatagattcctggaattagagctagcacttcacagaacagagctggacttgctctgaagcttacagctggaacctctgagtgtgtatacgtgcacactctagaatcagatgagccagactgcattccagctcagcacctttctcgctatgtgatcttntncaanctngcccnnnccctcggnaantaanccctttncccaactgtatgataggggggaaatggtacccatttttnancaagtagctgtgagaattaaatccattattganntataaaagcagtagagcctagtgtataatgaacactcaatnaaatgttacagttatttttcatattgatggggagtacccaatacaagactggttatcaatcgcgtaattctttacctccagctgaactacaggggtgataatgggttgaatggagagttttgtggtttggaaactcnagagtagaagacagatgaccaaggatgctgggaaacctccctgacc

SEQ ID NO: 304734 - DNA, 438 bp, Homo Sapiens
tataccctaagttgccaccctcttcccaaaaagtgaaataaaagaactggcaagtgtgaaaaagctagctttaaagttttatggaaaggcatattaacatctagaaattttctcttagtacatagttaagaatatgtgtaaacatttagcttcaaacctagccaccaagcattcttttctagtatcaaaatgatggaaaccacctcactgtgtagcaataggagactgggcaagctgataccaagcaaactctcaaaaagaaattcagttcattgaagggaattcaaagaaataaaactgtagaagtatatcatggaaagatgttcatggtttaccaaagagtatgtggaatacaatctcgtttttacgttaaaacaccagaaccataaaagaacttggtggattaggaaccccagagcattcattggctgtgaccca

SEQ ID NO: 304735 - DNA, 478 bp, Homo Sapiens
  misc_feature (235)..(235): n is a, c, g, or t
  misc_feature (293)..(293): n is a, c, g, or t
  misc_feature (372)..(372): n is a, c, g, or t
  misc_feature (449)..(449): n is a, c, g, or t
  misc_feature (454)..(454): n is a, c, g, or t
ataaatatttgcatttgaaaatcattctttgtcttaactacattcttactcttctttttacacaacccaactaaaacaaagaaatctttgccttatccacaaagtgtccttcctccacagaatttaaattgtttcctagtgatataattacttttctttagtaactctgtgaaagtcctgccactttgtttttcataagataattttccaaataaaatacacataactggggcanatggccctggcccacggatatgggcccaggtgtcatgaggggtacaaatgaatatggngacaccccccaggcttaagaagcttatttgaaagaggcttacttgatggaaagatggtatggtaatggaattccagtcnccatacagtcaacaaatggttccacaaagaatggtgggaattttggggttgggatattggaatgttggggtatcagntttgnggaaagggggtgaagggcttttaa

SEQ ID NO: 304736 - DNA, 442 bp, Homo Sapiens
tcctgtttttgctggttttaaatattgcttttgccacactcatcaaaagtcttattgataaatcaatatattcagtcctcttatttgatctctctgcagcatctgactaccacctagcagtcattctctattcctttttgcaggtagtctttcctcctcttttttcctgtaccttgcatgcatcttatctactattcaaatcttacccatttacatttgtgaaatatctctgggagtctttccattcctcctctctaccttcactggtctcagttcagaccctcaatatctctcacctaaacaactctgggtggctcctggactgggctttctggcctttgggttcactctggctcaaatccatggctcccattacttagaggtaacctttggaagaatggcaaccagatcaattcacattcagggtcaaatcttaaatagg

SEQ ID NO: 304737 - DNA, 498 bp, Homo Sapiens
  misc_feature (398)..(398): n is a, c, g, or t
cctatcaattgtccctatttcaacacctccttctctgatatttcttatttcttatcatgctttctcctttaatccaccccttaagaacactttggattttctctctccctcattgtcatttccgttggtctccaagtcaccacagaggcgtctctgcatcccagcgcagcggcattcccctctgcttcctaattacctctgggctgctgagttcccaactgcagttggttctccctacagctgtcaaggttagcttttcaaaaaatcaatgtcatcattccactccacctaaaaatctccaatgggccttgtcacctccagagtcatttgtgttcttagaggatttcttgtgttcttagaggatttatagagacataaatgggcttgctttccttgcntgtcagacacatcatggaacatatgtgaataattacattttaagatatatgtagatacttcttatgctgaagaaaacaagtttcaaaatctttactaaat

SEQ ID NO: 304738 - DNA, 508 bp, Homo Sapiens
  misc_feature (14)..(14): n is a, c, g, or t
  misc_feature (261)..(362): n is a, c, g, or t
  misc_feature (436)..(436): n is a, c, g, or t
  misc_feature (451)..(451): n is a, c, g, or t
  misc_feature (488)..(488): n is a, c, g, or t
taaattagtataangcatcttagaaaaagaaaaagaagaatagcgtgtgggacggttgctctacccaagattaaaattgactgtcaagttaaaatggtgggtattggcatcagaatatgtagataagtggaaacacaatagaaagtctagaaatcaaggctggtattcacaaactctcaactgatgcaggccagccaaaagagaaagttaagaatgtttcacattttcttttcttttcttttgagacttagtttcattctnnnnnnnnnnnnnnnnnnnnnnnnnnnnnnnnnnnnnnnnnnnnnnnnnnnnnnnnnnnnnnnnnnnnnnnnnnnnnnnnnnnnnnnnnnnnnnnnnnnnnnataggcgcctgccacccatgcccagctaagttttatattttttaagtagagatggggatttcaccatggttggncaggctgggtggtcnaactcctgacctcaggtggatctgcccgtctcggccnccaaagtgctgggattacag

SEQ ID NO: 304739 - DNA, 261 bp, Homo Sapiens
  misc_feature (199)..(199): n is a, c, g, or t
  misc_feature (226)..(226): n is a, c, g, or t
  misc_feature (248)..(248): n is a, c, g, or t
aggcttttactcctgagagacagaagactagaaatttagtcctgacttagagttctaaaacaatactttattgaacatcattttattgaccttggtcaggtcctttcgcctctcagaacatttgtctccccccgtctgttccagttcttagaacagtaaacacagaccacggagaaactactccagtatttaatagtanagcaaagcaatctgtcagggctttgcnttgccctgtctcggtcttatcngacctcggttttc

SEQ ID NO: 304740 - DNA, 429 bp, Homo Sapiens
taccctggtcatgcaaaatacacaaattgatatatattctttctagaggaagatgaaagatgaaagagccaatgaccattttcacacatatgaaaagagaagaatttaagtacagttcagtttcactgtttttccctcagttcagcaagggttaagacactgccaaatctatgcatcacccaacagagtgatttttcttaagctgagacaggcctcaaactcagtctaaaactaggagaatcctaacagaggagcaagcagggaaaataatacaattttgcaatatacccactgacctcatggtcattattttccaaacttgtgtagactacatcatggcctgtgagattatccgggatccaggtggaaacgtactattttccctttattccacctacacagtcatctattattccctaagtccaagtg

SEQ ID NO: 304741 - DNA, 249 bp, Homo Sapiens
  misc_feature (34)..(34): n is a, c, g, or t
ttgctttttaaagccagcctgctttttccagttnggaggcctcggggagaaaagtctgacccaagtgagaaacacctgtaatatctaccagatgccagcagggtgtcccatggtgctgtctttgatccatgttcttaccctgtgtgctgagggttgttctagagtaggactacatctagtcacagtggccatgttccagagcctggcagcaagaaagagggatgcctagttccttggctttccagtgtg

SEQ ID NO: 304742 - DNA, 131 bp, Homo Sapiens
ggtcacacaaaatttgaatagatcttttcatgtatatttcttagccacctcattaggaaatgttttaaagctgaattatattttgtatctgggatcccatttatagccctagagatgatgttattcttctg

SEQ ID NO: 304743 - DNA, 472 bp, Homo Sapiens
  misc_feature (61)..(347): n is a, c, g, or t
  misc_feature (368)..(368): n is a, c, g, or t
  misc_feature (406)..(406): n is a, c, g, or t
  misc_feature (421)..(421): n is a, c, g, or t
  misc_feature (428)..(428): n is a, c, g, or t
  misc_feature (441)..(441): n is a, c, g, or t
atttcggcacagcccaagggagtttcagatgcctttgagaaatgaatgaagtagagagaannnnnnnnnnnnnnnnnnnnnnnnnnnnnnnnnnnnnnnnnnnnnnnnnnnnnnnnnnnnnnnnnnnnnnnnnnnnnnnnnnnnnnnnnnnnnnnnnnnnnnnnnnnnnnnnnnnnnnnnnnnnnnnnnnnnnnnnnnnnnnnnnnnnnnnnnnnnnnnnnnnnnnnnnnnnnnnnnnnnnnnnnnnnnnnnnnnnnnnnnnnnnnnnnnnnnnnnnnnnnnnnnnnnnnnnnnnnnnnnnnnnnnnnnnnnnnnnnnnnnnnnnnnnnnnnnnnnnnnnnnnnnnnggaatctgaaaacaattggancatgccttcataattctagaaagttattttccacttgntaaatctatattccncccaatnatccagggtggangttaaattatacatttttagacaagccaaga

SEQ ID NO: 304744 - DNA, 431 bp, Homo Sapiens
  misc_feature (48)..(48): n is a, c, g, or t
  misc_feature (59)..(101): n is a, c, g, or t
  misc_feature (331)..(331): n is a, c, g, or t
  misc_feature (345)..(345): n is a, c, g, or t
  misc_feature (406)..(406): n is a, c, g, or t
caaatgtggcttgttatacagtctcttctctatttacttcctgataangtccttgatgnnnnnnnnnnnnnnnnnnnnnnnnnnnnnnnnnnnnnnnnnnnggggatcaagaattgtgacttctagaatttctgcaggcaatcaaagattattaataagagaaaggagatgaaccaggggaaccagaagaccatttgaaggaagataatggaaaattttcttttaggtgaaatagagatgagataagcaaagcgagggctaccattttgaaattctcctctgtgtgtaagaattcccactcatgtctctggtatggacttctcaccattgnggtaatttgcctcnagtggtccccttgcttccctcctggtcattgaccctggaaactcctttttagggttgtggntccagtaccaatgaatgaggtagtg

SEQ ID NO: 304745 - DNA, 158 bp, Homo Sapiens
  misc_feature (141)..(141): n is a, c, g, or t
gctcctggctgaagttttcccttctggatgtccctcacccctcaccccaagctcgtgagccgtgccactcatctcatatttgggccacagggtggggccaaggcttgcaataagcacaaaagtcccgatttttcctcaatnagcttgggccggccaag

SEQ ID NO: 304746 - DNA, 397 bp, Homo Sapiens
  misc_feature (303)..(303): n is a, c, g, or t
  misc_feature (312)..(312): n is a, c, g, or t
tacttttcaaatcatatccatcaatttgcaaactctgtgaactccaacattactggcacaccaaaacccactttatcttaatacttaaaaattccagttcatgttgcttggataactttgaatgaaagacgttgtcttgtttcatgttacagtgaaagagcttatctcatattatagtgaaataatactgacaatgaatgaagattaagctgattccacacattacagaaaatacacaaaactgcacaaaaatttttctcaaatggttttgcaaggagagaggataaaataagtgccagaaangcagtttgncaatatcatttgtcattctgtgttcttgtgatattcatatgtaaaatacatgcagtttggtaagggaataatgggggtatattcc

SEQ ID NO: 304747 - DNA, 472 bp, Homo Sapiens
  misc_feature (314)..(314): n is a, c, g, or t
  misc_feature (320)..(320): n is a, c, g, or t
  misc_feature (425)..(425): n is a, c, g, or t
gtttttacagtacaaccatacctcagagatactgcaggtttagttccaataaagtgagtatcgctataaagcaagtaaaagtaagtgcaataaagtgagtatcgctataaagcaagtcacacaaatttttgtttccctagtaagcatgagttatgcttaaactatattgtagtctattaagcgtgcaatagcatgtctacaaaaacaatgtataaaccttaatttaaaaatatttttactaaaaaatgctaatgatcatctctgctttcagtgagttgtaatctttttgctggtggaagggtcgtgccttaatngttganggctgctgactaatcaggggtagtggttgctgaaaggttgggtggctgtgacaatttcctaaaatatggaaaccaccgaagtttggccatatccatccactcctncctttccccaaaaaatttccctggtgacatgcagtgcaatttcatag

SEQ ID NO: 304748 - DNA, 333 bp, Homo Sapiens
  misc_feature (318)..(318): n is a, c, g, or t
taatatgaagcatatattttactttagagctttaaaatgatttaaagtaacaattttagtaacctttgggtttgtcttgaaagtattttcatttcatttgtttctaaaatacttgtttctctgaagagagaagatggctcaatctgatgacatacgtaaccgtgatgactgacagtttaaactgaaatcaataaagggagaatagtttttaaatgcattgagacaaagcatacaggaaagatataattttgtataatccttttgttgaaggcctcaaaaccaggtacaagtggttatttgcctcatggccatggaaantccccagtaaccaag

SEQ ID NO: 304749 - DNA, 374 bp, Homo Sapiens
  misc_feature (116)..(116): n is a, c, g, or t
  misc_feature (126)..(126): n is a, c, g, or t
  misc_feature (195)..(195): n is a, c, g, or t
  misc_feature (212)..(212): n is a, c, g, or t
  misc_feature (230)..(230): n is a, c, g, or t
  misc_feature (294)..(294): n is a, c, g, or t
  misc_feature (352)..(352): n is a, c, g, or t
actgtgcctggcccccaacccctttaaagaacatcctccagtacccatttgacctggggtctttccaagcaagaggctggcatgcttgccttcaaggcttccaaccaattccggcntgtgccttcncacccatctcatctcaccagcagattcaatttagctgatttgatgctacaagctgcagaaaggccaagnaaatttatggaacacangaccaggtggcctttggnatccggttctcaaaagaagggggtcttgggaagggcctccagacaagaacaggcaggggcgaanaagggaaagttggaaaaagttagaagggcaaagattggggcaaacccaggccttgaanaagagggggccacctggggagc

SEQ ID NO: 304750 - DNA, 476 bp, Homo Sapiens
  misc_feature (321)..(321): n is a, c, g, or t
  misc_feature (435)..(435): n is a, c, g, or t
  misc_feature (458)..(458): n is a, c, g, or t
gaagacacttgctctcttatctcctagcctgagtgctccctcctctgtgacaatctgtctcttccttgagggctgcatggaacagggatgttaataaagagaagaatgggtgtgtagtaagtttcctacaatgaaaccctctggttttacatgctccagtgacttcctgctgatcataaggtaaagttcagaactcttaatttggcttgactccttgccctgtgctccgctgtctatgccttggtcctgctggccttcctgtttgcccctgagttacactcacatccactcctgagcctcaaagcctgtgaattctcctcnggaactgacacttgctctcccccatcccaccctggtaccaggtttggttttaatttctccaatctggcaatcaagctaaaaagtcaacttcctcaaggggagtcctccctggancaatcctgggctctcagggcttnggaatgaagccccaaagg

SEQ ID NO: 304751 - DNA, 467 bp, Homo Sapiens
  misc_feature (351)..(351): n is a, c, g, or t
  misc_feature (385)..(385): n is a, c, g, or t
  misc_feature (415)..(415): n is a, c, g, or t
  misc_feature (430)..(430): n is a, c, g, or t
  misc_feature (435)..(435): n is a, c, g, or t
aattggtgataattgaagaaagatccatttcttaagaataatttgatctaaattattatatggaaataaacatacttgtgttaactaaattgatcataaattcttgttcctgcctcacccctcaccccccagagaatagtgagtgactcgtttagattctctgctttttttcagttatgtacaagacttcagcatacattaatgtctttagtttataaatttgccaatgctttaatttccataatttgaaagttaaaagatgtaactaaaatactagcttttttaattcaatttccttttggtggaagttggtatgattggaaacctttggctttttcctgggttaattcntcccggccaaccccctcttttgagaggaaagggnaatccgtgggaatggagttataaattaatnggccttttttttccnttaanttccttcattcagtgggcaaaaaacattttta

SEQ ID NO: 304752 - DNA, 441 bp, Homo Sapiens
  misc_feature (219)..(252): n is a, c, g, or t
  misc_feature (266)..(266): n is a, c, g, or t
agtcttcaactcatctctcttcactcctccccaacagcttcttatccaccaaaacatctgcacacaagactgactgaactactttcagtttctttgatggcccatgttctctctgtttcccctgccacatcctctcaattctccaaccccatcccatatatccctgcacctggataatgtttacgcattcttcaggctctggaaagccttcctgccaannnnnnnnnnnnnnnnnnnnnnnnnnnnnnnnnngcatgtgtgcgcantggctcaggtcatgccacgcttcctccatagcatcctctacatccccggcacagtgcttatctcctttggtgtaaatgatatcatctattttcctcaataagactctaagcaaggtctggtatgtacatgggaccaagacaggcctgctcacagttatatccctggaatctagta

SEQ ID NO: 304753 - DNA, 155 bp, Homo Sapiens
tgacccaccgcacccagccggattctaatttcttcatgataaccagtttaatccctacagttgggagtaaagttctgcacttggaatatcatgactaatttgggccataagtgaattctattactaatcctaactatgtacgtttaaatgatcac

SEQ ID NO: 304754 - DNA, 624 bp, Homo Sapiens
  misc_feature (371)..(372): n is a, c, g, or t
  misc_feature (448)..(448): n is a, c, g, or t
  misc_feature (456)..(456): n is a, c, g, or t
  misc_feature (470)..(470): n is a, c, g, or t
  misc_feature (482)..(482): n is a, c, g, or t
  misc_feature (494)..(494): n is a, c, g, or t
  misc_feature (503)..(503): n is a, c, g, or t
  misc_feature (508)..(548): n is a, c, g, or t
  misc_feature (559)..(559): n is a, c, g, or t
  misc_feature (572)..(572): n is a, c, g, or t
  misc_feature (580)..(580): n is a, c, g, or t
ttttgtaaggcacttgcaagattaaaaattgttccttctccacttctaagaagatcaaaatatgagaaataaaaacttagactctacagggaaatatttattaacacgtttgtatctatttataatatatacattcagagtgattatatttttggcaagaaatgccttcttgaagacccccaaaattaaagtgtgcatgcataatcgagactgattttgaaagatgataggaatttttatgagaaatttaaattgattctgtcagctctgaaataaatacatctttactatattttaatatggaagtttgcataattccagtatgtatgcaaaatgcaagactttattatatgagtttatgggccagaaannattttgctcttagaattaatttgattttggcaaatctccaatttctaagattcctctttaagcctgttcctggaanctgaaaanaataacactttggnttgagagggagntggcattgatantcactgagntgccnnnnnnnnnnnnnnnnnnnnnnnnnnnnnnnnnnnnnnnnngtcgggttganaggaggagttttnttacaagnccctggtggtctgctggccattggaccaatttatgccacctgtt

SEQ ID NO: 304755 - DNA, 379 bp, Homo Sapiens
  misc_feature (22)..(22): n is a, c, g, or t
  misc_feature (24)..(24): n is a, c, g, or t
  misc_feature (359)..(359): n is a, c, g, or t
aaatatgtgtgtgtacaccagntnttttaaaaacgattggaattcatccaaaccttaagattaggaaactgattggctgtaagtgttgcctcaagtaatgtgtcccccgccccataacatgtcttttctgtgccaagtatcctctcctagtgtcagtgtctcaaattatatttatgaagggttatcacataatatgctttgtatttaactacctgcttcccaggcgtccatgacatgaaatgggtgaagcatcagccatgactttcggtcagttcccaaaatacccaaatgatagggaggtaaagattgcaaaaattcctccttaaaaggccatttttacagcttgctaaaatacagtnggaccttatgggttggtaat

SEQ ID NO: 304756 - DNA, 373 bp, Homo Sapiens
  misc_feature (215)..(215): n is a, c, g, or t
  misc_feature (339)..(339): n is a, c, g, or t
  misc_feature (344)..(344): n is a, c, g, or t
aatgtccattttctgttgactgttcccagttttcattttccatacagtctgtatgtaaagtctggttttcattaagctgtggccagtatttgccactacaacagaaacacactgtcacacttgctagaatataactgtacttgggcttctcctttcctgtgaagtagtgctgggctttctagagtttaattctcaagtggcacaagatagcaganccatgcattttaatggctgagactgctaagacgtgaacctaaacacttacaagttgcagagagaaatgaaaaacgtaattacatgctattagcattgagaaatgttgacaaattaatttgttgnggaancaaagatagcatttctgatgacaactccc

SEQ ID NO: 304757 - DNA, 389 bp, Homo Sapiens
  misc_feature (59)..(72): n is a, c, g, or t
  misc_feature (321)..(321): n is a, c, g, or t
  misc_feature (336)..(336): n is a, c, g, or t
  misc_feature (345)..(345): n is a, c, g, or t
tcggcacagaggctccagggtctaaagctaggatttagctccaggcctggctctttcannnnnnnnnnnnnnggaaccacttttttaggtggaaacttccttggaagttgagaaatttgtcctaaggcttactaggaattggcaaaagggcaataggatatgtcattccaggacagtgtgtctgccagccaactggaatgcgaacagggcactctgcctgggaatatgagcagctgcgtagatctatccacttttgctggggatcaccagtgaggaaccatggtcaggctgcctgggtttaaatttagggtcactactcantagcaagtaaagagncaatattcnaacggctctccagacacagtttccttcaaccaataagaatgggg

SEQ ID NO: 304758 - DNA, 216 bp, Homo Sapiens
tttaaatgggccatcattttatgaatcagtcattagagaggtttgataatcttctttaatgttaaagtagttcaggctaatcttaatacatgtatttttattgctgaccagtcttgaatatatactggtttgatgattgatttgcccctctaaaaaaatttgaaacatatgacattggctgttttagataatactttgtgtcattaatcatttttg

SEQ ID NO: 304759 - DNA, 328 bp, Homo Sapiens
  misc_feature (309)..(309): n is a, c, g, or t
ggcacgaggttgttaggtttctagtggaggaattacagaaggtagagagctgagccagtcatccattacaggaaattcagaaataagaattttgctttgactgtaatgtttaaaatttgcagaaacaaaatttacttttatccattacatcaatagagagggttgctgtaagtcttaaaaaggaaggggagtatagatatctaacatgtagccaactgctggctattgtagctgtgacaataagcatgtattgatgaccaaggtagaatatacagtttgaattaactaccttaaaataccacaggcccncaagtggcatttgttgtgg

SEQ ID NO: 304760 - DNA, 103 bp, Homo Sapiens
ttcaatctcagctcactgcagccttcacctactgggttcaaatgattctgcgtcagtctcctgagtaggtggtattacaggcatctgcaccatgcccagctaa

SEQ ID NO: 304761 - DNA, 425 bp, Homo Sapiens
  misc_feature (156)..(156): n is a, c, g, or t
  misc_feature (277)..(277): n is a, c, g, or t
  misc_feature (359)..(359): n is a, c, g, or t
taaaagtctatactttcttgagaatatgtataatgaggcacaatactcttcactgtctgtattgtactctacttatcaagcctagaaatgggctaaatgttaaatatgtatgtttcaggttatacagaactcaataatgtcagttaatcgagaaanttccttactttgtccttttaattcattgaaataaaactcatgctttgcttatctggaggttttaaaagttagattgtgcaaaactcattgtcttagtctattcctgttgctattgcaaaantacttgagactgggtgatatataataacagaaacctacttctcacagtttttgaggctgggaagtccaagattaaggttctnacagatttggtgtctggtgaggacttgctctctgcttccaagaccatgtctggttgctgcttcttc

SEQ ID NO: 304762 - DNA, 107 bp, Homo Sapiens
cttcaataaataagaaacattttccatagtattcatattttgaacatgatgaacaagatttagccaaaaaatatgtgcatattcttatgactcagggacatcacaca

SEQ ID NO: 304763 - DNA, 138 bp, Homo Sapiens
  misc_feature (83)..(83): n is a, c, g, or t
  misc_feature (92)..(92): n is a, c, g, or t
  misc_feature (113)..(113): n is a, c, g, or t
ggtaccattatctccgcagcactttaaaagttgtatgatttctgacactaactttaatgttaaatgttattctatcacatagntaaggttcnttaaaaacaatgtccaaaccnaaaatatttaggggtattttcccca

SEQ ID NO: 304764 - DNA, 310 bp, Homo Sapiens
  misc_feature (216)..(216): n is a, c, g, or t
  misc_feature (238)..(238): n is a, c, g, or t
  misc_feature (257)..(257): n is a, c, g, or t
  misc_feature (269)..(269): n is a, c, g, or t
  misc_feature (276)..(276): n is a, c, g, or t
  misc_feature (290)..(290): n is a, c, g, or t
  misc_feature (295)..(295): n is a, c, g, or t
ccgttaccatcagcaccagaaactccaggtgccccaagcttaaagtaaaaatcctaaagtacgttggctcctcccatgcaatgtgctgggtccaaaccatgctgttaaatatcagaagtttctatggttatgattaaaaaattaaatgacaataatagccccaaaactatatatttttgatactatttaaccaagattatcacaaagacacagtantttgacacattgttattcttcnatgttttataaatattttnatgtggcagggnagaatcnggaccttttccggnggacnggaaaatttggaggg

SEQ ID NO: 304765 - DNA, 198 bp, Homo Sapiens
attataattatataattttttcccttttgtgcctggcttatttcacttagcaaaatgttttcaagattcatccatgttgtgacatgcatcagaatttcattcctttttaaggctgaataatatttcactggtatgtatatacccgcatatctttatccatttatctgttgatgggacatgggtcgtagaaccatttgg

SEQ ID NO: 304766 - DNA, 433 bp, Homo Sapiens
  misc_feature (239)..(239): n is a, c, g, or t
taatgatttcagtaaggtttcttgtcaaagtggatttattgaattggaattccagcatatttatcattaagctgagaagggaaaaatgcagggctttaccagtagaatgtcttcttagtgaggtccatgggtaaaagatttttgtgtcagaagacccctttttttgttgttatggttgccttaatgtgattcagattgatatggagcaagtttcctactctccaggctactactttacngcaactttggggcaccatttattttggagtaagtgcaaataggacgcctcatgctatacacatggaacaactatctctaaactgggagccaatagctctgtcaggattattaaaaggattaaagcagatcatacattatgtaaaatatctagcataaaaatgaaaattgggttatttaatattatagagccttc

SEQ ID NO: 304767 - DNA, 448 bp, Homo Sapiens
  misc_feature (213)..(213): n is a, c, g, or t
  misc_feature (222)..(222): n is a, c, g, or t
  misc_feature (227)..(227): n is a, c, g, or t
  misc_feature (232)..(232): n is a, c, g, or t
  misc_feature (238)..(238): n is a, c, g, or t
cttcggcactaggggttttgctttatggaaacaaggatgaaaaacatgatacctttaataacaactgtctcttagaagataatgtgccctggaccgaatggcaagagaaattggatcatttgttctgaaatgaagtcagttccagcaactgtggtctttgcattcttgtggccctagtcccatccatttttcacacaacagcaagaaaaatcntttggaaantaatnggaancaggtnactcccttccttagactctcctaatgactgtgttcactttagcacttaggattaaaattcaaatatccacctttgccctccagctctggctcttccctaactcattcctgccattcctccctttgcttactgtgctccagccacactgggtgtttggaactcattgggaacaggcaaaattatttcctacctgagagggattgcatgttt

SEQ ID NO: 304768 - DNA, 189 bp, Homo Sapiens
  misc_feature (48)..(48): n is a, c, g, or t
  misc_feature (116)..(116): n is a, c, g, or t
  misc_feature (124)..(124): n is a, c, g, or t
  misc_feature (135)..(135): n is a, c, g, or t
  misc_feature (158)..(158): n is a, c, g, or t
atcactacaagaaaaagcagtcttaatttttatttattagaaaaggtnttattatattatttatgtaaataatgataaatacaacatttaaactataacatatttgatagtcttancagcatantcttttggtancataagggtccccctaaagcatnccaatttaaaatttccctcaaagcaaaaagc

SEQ ID NO: 304769 - DNA, 296 bp, Homo Sapiens
  misc_feature (169)..(169): n is a, c, g, or t
ctcagaaattccaaggaaagtgcaaagaataaattcatcaggaagccaagcagagcacagtaaaatgaaatcacattagcaacgatggcaacaagaaaaattgatttcagaagtgtccacatactcatttcaaaaaaatataaagctgaaaattgtctcctgggcaatngaacatctggaagtgatcaagatgggacaaggtagttgcccatggagcaccttgcagagtgcttagtacatgggtgtgttggggaagggggccttgaaccaaaaatggtccttgaagggtgtcccat

SEQ ID NO: 304770 - DNA, 375 bp, Homo Sapiens
  misc_feature (143)..(171): n is a, c, g, or t
  misc_feature (174)..(174): n is a, c, g, or t
  misc_feature (178)..(178): n is a, c, g, or t
  misc_feature (316)..(316): n is a, c, g, or t
  misc_feature (331)..(331): n is a, c, g, or t
  misc_feature (350)..(350): n is a, c, g, or t
  misc_feature (358)..(358): n is a, c, g, or t
ttgtgtatttcatgtataattgtgatctcaattataaaagtttaattcagcatgtctttgagccaatataattactgcacacccactaaattgggatcagccattataaataatgtagttttagaataataaaacatgacacnnnnnnnnnnnnnnnnnnnnnnnnnnnnngtntatnttggcacatcggtgaaagtttatatgtgcagaagtttttttctttctcaagttaaaaattattttttgccatatgtaattttgtgttgcaggctgtcgagagataaaaatgattttaaatccgtgtactgatgattcnttccggtggtaaganacacccggggtgacggacntccccttnttatgggcctatggatt

SEQ ID NO: 304771 - DNA, 483 bp, Homo Sapiens
ttttgctcagttctacctaatgattgtaaaatctcgtcctctcagtagtgacaattagtatcctcatacatattagtcatatatatccccgctcaaaactttcagacatgtgttgtaggctgaaggagaaaagaccatgattaaggtgttagcctgtcaagttataaaaaaccaaatggcatagtatagtaaagcagctgtgatttttttgtctgaggcgccactcagaaatatcctgttttcccgttcattttccctttccatagatgcccttgcagtcaccttccaggatgccccttgggctgtctttaggtgtcagaaccttccactttcctactgactgtgaagggcatgtaaatgcctggggcatccattaagaaagccaggggagagctccattttaacctggatgtgtcagtaagaattttggaagcagataatttgaaaatgtggtaataataccccgccaaatcagatcatttg

SEQ ID NO: 304772 - DNA, 404 bp, Homo Sapiens
tgataagctgctggtggaataagataaattttaaatgactaggctcttgcatcagaatttgaatgtcaagaaatgaattgtcacaaagcaacaatagattcctggtttgttttacacaaaaacaacctctttccaggtttttagattacttctcagactgtgttactacgggtcagaaaaaaggtaagagaaaaaaatttgccaatactcctaatcggtgactttgaggatttaagaacaaactccaaaaactattccctgagacggaaagttacgctgattctcatcctaaaaaataaggaatgtggcacaaatttaaaagataagagggaaaaaatcaccaacattcaaatagagagattccagttccaattagatattttaagaactatagcagacccatc

SEQ ID NO: 304773 - DNA, 105 bp, Homo Sapiens
ggacctcttggatgttctttgggctcccatgcaagtaggagtttgggctaagacagaattgtaaggcagccttagctaattggaatgattacgcagcttcagagt

SEQ ID NO: 304774 - DNA, 390 bp, Homo Sapiens
ttattcttaaataagcaagcaaaacctgcacattggattcacgtgagatgataatgaaaacttttagtttaagagtgaagggttaagtaacctaacagagctttgatgttatagctgcattaaagaaggtgattgtcaatattacagaaaacaaaaatggattgcccctccaaggaccaaacagattcaaggagcatcatttaagctaagaagagacctaagtgatgaaactagctgtaagaatgtaacaggggttgtgtttgaaatatttatattcccatcggtgtgtttaagtccctagaaaattgcctaagcagcagtcctcttcacagtgctttggggaaaagacctttcaagagggaaacttggataattttaaactcctttccc

SEQ ID NO: 304775 - DNA, 441 bp, Homo Sapiens
  misc_feature (347)..(347): n is a, c, g, or t
ctttagttaccatcctgtttagttggtaagaaataggaggcaaaaaggtaatagtcacatttaaatgacttagtaattaaaagaactaaattattcatagttgagtcattatctgttcagatctgcagtgttcttataataataggaaacatttatgtaatactatgtgttagataatgttttacctatattaacttatcctcacaatagcactgaggtgtttttatagataggcaactaaagcaaagagaagatagtaaatataccaaaggtcatgtagctactacatggtagtactgagtgtcagagaagacaagatcaaaatcctgtaatcctaacatttattngagaacctactgtgtaccagccccacagctgggtgctttcattatgagttagtcatttgtctttacaactaccttatttaaaatggaagttcag

SEQ ID NO: 304776 - DNA, 443 bp, Homo Sapiens
  misc_feature (325)..(345): n is a, c, g, or t
aaaaataaataaataaaatataggttcaaattccattaaaacccagtacaagccgaaatgattgtacttgccagttcagtttcggctgaagggccaccagcttgcggtctttctatattaccatcccatcatatcctcaggagcagagaatcagcaaatttctcctgtaaacagcctgatagtatatattttaggcttttcaggcttgatggtctcaaagcaggcatagacagtatgtcaacaaatgggcatggttgtgtattacaaaagctttatttatggaaagtgaaatttgaatttcacctaattttcatgtcatgaaatnnnnnnnnnnnnnnnnnnnnnccaaccatttaaaaatgtgaaagccattcttagcttgtggtccccacaaaaacaggtggtaagtgagcctccctgggctgtgattcgggtggtctctg

SEQ ID NO: 304777 - DNA, 273 bp, Homo Sapiens
  misc_feature (256)..(256): n is a, c, g, or t
aataaaaagattagcttaaaataattgaaatctgagaagttaattttgttgaccaacgaataggtttatgaagcatcccattttggaatcagaaaatttatatttccaaactcgaatctgcctaaaaatgctacttttccaggcatggcagttgttctgattagattttgtataatgtacatgattagactatcagtttcatgttggattctatataggtttataaattgtaaactctcagtatataataaattanaaataagaagggtaagg

SEQ ID NO: 304778 - DNA, 152 bp, Homo Sapiens
  misc_feature (64)..(72): n is a, c, g, or t
agctccttataaaccaagactgaatcttgtgcctgtcattgtgagcgctattctgtaaagggannnnnnnnnctggcataccaaatccagagccataattggacaagtttaattggagtcatttctattcaatacatggatggcaaagtggg

SEQ ID NO: 304779 - DNA, 382 bp, Homo Sapiens
  misc_feature (97)..(212): n is a, c, g, or t
  misc_feature (256)..(256): n is a, c, g, or t
  misc_feature (275)..(275): n is a, c, g, or t
  misc_feature (296)..(296): n is a, c, g, or t
  misc_feature (316)..(316): n is a, c, g, or t
  misc_feature (323)..(323): n is a, c, g, or t
tcttttaagagtggtggagactaaagagacgtaacaaaatgcaatgtgagcacttgactatgaaggacactgatgggacaactggcaacttgaacgnnnnnnnnnnnnnnnnnnnnnnnnnnnnnnnnnnnnnnnnnnnnnnnnnnnnnnnnnnnnnnnnnnnnnnnnnnnnnnnnnnnnnnnnnnnnnnnnnnnnnnnnnnnnnnnnnnnnatcatgagacagcactggctccatggttcagggaaaaaggttcnttggaccttaacttttccnggtaagtttgggattatttcnaaattttaaaattccaaatnggatccntaaaagtaataatttttccataattaacccaggggtaacccttggttaaaaaatccgga

SEQ ID NO: 304780 - DNA, 274 bp, Homo Sapiens
tttacaaaattcagttcttttattagaagaactcccagtatatctgtttcttctttcaattatttccagccaacaggacctcttctcttataatctttgtccacacaccattcagccccatcccttcttcctttacaacacagagtagcctttttctgcccaattcatcctaactcctctccaccctaccccaccacttgctgcaaggaaacttgggcctaaggttcacttttactgtacaaaaagcattttctaacaaaagccagtttctttg

SEQ ID NO: 304781 - DNA, 415 bp, Homo Sapiens
  misc_feature (262)..(262): n is a, c, g, or t
  misc_feature (319)..(319): n is a, c, g, or t
  misc_feature (336)..(336): n is a, c, g, or t
  misc_feature (344)..(344): n is a, c, g, or t
  misc_feature (356)..(356): n is a, c, g, or t
  misc_feature (364)..(364): n is a, c, g, or t
  misc_feature (376)..(376): n is a, c, g, or t
ggtccactttcatagaggagtgaacagagactcagagagggtgggtcactgtgccacagtcacacagcacttaggaccaccctatcctctgaatctggcatgctcaaaatgaccttctttggatgagttaggtctgctgagcactttcaaacagaggcagggcatctctgacatcaggctcgaacgttctgtacactaggaagagcccaacccctccccccatgacgcatgacagttatcaccattaaagaaacactgactntcttccaggggcgtcacatgcataggcatcttgaaaaccatatgaggtaggatgctnttattgtccccattgtnttgacagncaaccatcgagnttcagggngtcaaaatactngtcaccccaaggcatgggcaggtaaccagaactggggag

SEQ ID NO: 304782 - DNA, 436 bp, Homo Sapiens
  misc_feature (13)..(13): n is a, c, g, or t
  misc_feature (21)..(21): n is a, c, g, or t
  misc_feature (46)..(46): n is a, c, g, or t
  misc_feature (51)..(55): n is a, c, g, or t
  misc_feature (57)..(57): n is a, c, g, or t
  misc_feature (62)..(62): n is a, c, g, or t
  misc_feature (65)..(65): n is a, c, g, or t
  misc_feature (69)..(70): n is a, c, g, or t
  misc_feature (96)..(96): n is a, c, g, or t
  misc_feature (98)..(98): n is a, c, g, or t
  misc_feature (108)..(108): n is a, c, g, or t
  misc_feature (112)..(112): n is a, c, g, or t
  misc_feature (120)..(120): n is a, c, g, or t
  misc_feature (130)..(130): n is a, c, g, or t
  misc_feature (137)..(137): n is a, c, g, or t
  misc_feature (146)..(146): n is a, c, g, or t
  misc_feature (153)..(153): n is a, c, g, or t
  misc_feature (159)..(160): n is a, c, g, or t
  misc_feature (174)..(174): n is a, c, g, or t
  misc_feature (212)..(212): n is a, c, g, or t
  misc_feature (224)..(224): n is a, c, g, or t
  misc_feature (238)..(238): n is a, c, g, or t
  misc_feature (269)..(269): n is a, c, g, or t
  misc_feature (282)..(282): n is a, c, g, or t
  misc_feature (299)..(299): n is a, c, g, or t
  misc_feature (313)..(313): n is a, c, g, or t
  misc_feature (337)..(337): n is a, c, g, or t
  misc_feature (401)..(401): n is a, c, g, or t
  misc_feature (410)..(410): n is a, c, g, or t
ttgactatatctnaaatgtangatgagccaagtaacaaagcccaanttttnnnnnanttttnggnaggnnagtccattggtacccaattggagggncnagaggaattntttnggaggacntaaggagaanttggccntcagagggncctaganctggtnnccataccatctctntttttttcagatgacacccctaagacctgagccccttntgggccccacantccacctgtagaantctgatggggccttgtgcggccgaaccacantccaagagaggtnttcacatcatgtgtcgntagccacagccatntcaagggggaattgccccaattgnaggatgtatctgacaccgggattggggggttggaagcactgggatgaacagcgtgtgttgccanttttttcantgtgcaccgtcctaaggaagaagcct

SEQ ID NO: 304783 - DNA, 369 bp, Homo Sapiens
  misc_feature (160)..(253): n is a, c, g, or t
tttaattaagcccttaaatatgactttgaaagaaatcctagaccatcctgcttaatttcactttgtctatgcttcatatctcatgcgatttgacacaaatgttaactgtgaactctcttttttcctgaatttgtaaacccgcatctataaattattagcnnnnnnnnnnnnnnnnnnnnnnnnnnnnnnnnnnnnnnnnnnnnnnnnnnnnnnnnnnnnnnnnnnnnnnnnnnnnnnnnnnnnnnnnnnnnnntatgagggattaaggccatttttatatacacatacactgcttgggaataggtgctttgcaggtaggtgccaaatgagggatttgctatccattatccatccataattaatctgggg

SEQ ID NO: 304784 - DNA, 334 bp, Homo Sapiens
  misc_feature (44)..(44): n is a, c, g, or t
  misc_feature (183)..(183): n is a, c, g, or t
  misc_feature (221)..(221): n is a, c, g, or t
  misc_feature (274)..(274): n is a, c, g, or t
  misc_feature (280)..(280): n is a, c, g, or t
  misc_feature (286)..(286): n is a, c, g, or t
  misc_feature (306)..(306): n is a, c, g, or t
  misc_feature (314)..(314): n is a, c, g, or t
ctcctcctggctttctagaggacactctgagctacctccaagtntccaagctacctcaccaaggttcagatacctccttggtgaggggggcagtccctacctccctcattcttggccagagacatggggaaaggagtctttaggggttcttagcagaggtgaggtgggtatacgcccttgggntcaaaacaagccatgggacttctaggaaacccaggggncatccatggccaatgccctgtggggattcagtacagctgggttttggggcaanggggangggggngacaagggacaaagggaaantgggaaangggagatcttttggggcttg

SEQ ID NO: 304785 - DNA, 469 bp, Homo Sapiens
  misc_feature (195)..(301): n is a, c, g, or t
  misc_feature (303)..(327): n is a, c, g, or t
  misc_feature (368)..(368): n is a, c, g, or t
gatattctcagggattttcatgagggtaggggaaactcaactttatgagacaaattttcatagaaaatgcaatctcctttatacacacacagacatatattagtttttaaaagccaatttcttcatagtgtttttaccattaaattctcaagaaacacttagatctttaagcatggaacacaatcgtgatgttannnnnnnnnnnnnnnnnnnnnnnnnnnnnnnnnnnnnnnnnnnnnnnnnnnnnnnnnnnnnnnnnnnnnnnnnnnnnnnnnnnnnnnnnnnnnnnnnnnnnnnnnnntnnnnnnnnnnnnnnnnnnnnnnnnnatagccattagggaggaaataccctaatgttaaatgacccngtttaatggggtgcaggcacacccaacacgggcacatggttattacatatggtaaccaaacctggccccgtttgttggcacatggtacccctagggacttt

SEQ ID NO: 304786 - DNA, 430 bp, Homo Sapiens
  misc_feature (88)..(88): n is a, c, g, or t
  misc_feature (124)..(124): n is a, c, g, or t
  misc_feature (200)..(200): n is a, c, g, or t
  misc_feature (221)..(221): n is a, c, g, or t
  misc_feature (295)..(295): n is a, c, g, or t
  misc_feature (299)..(299): n is a, c, g, or t
  misc_feature (348)..(348): n is a, c, g, or t
  misc_feature (356)..(356): n is a, c, g, or t
tatattgtgagcagtttattaagcaaaccaagattgtgcataagaaagtcaagacagagaacatgtggacaggaaaagtgaaaggaanttaaaagtgagaacttgagcctgaatggtagcagtntgaccaagaacatttactagaagcaggccacacattactagaggcaggccacacattactagaagcaggccaaacnttactagaggcaggccacacntttggctctgtgctttttctaacaggattcatttttgattaaatcatttacatagtccttaggattgtaccaantgantcagcatctctgaggggtggggacctgggatgttgggtattttaaaaantatctccnggggtggatctttgctgaggaacccattgggcaggaaccactggaaactgttgttctggaggaagccaaaaaaa

SEQ ID NO: 304787 - DNA, 454 bp, Homo Sapiens
  misc_feature (77)..(77): n is a, c, g, or t
  misc_feature (157)..(157): n is a, c, g, or t
  misc_feature (188)..(188): n is a, c, g, or t
  misc_feature (261)..(261): n is a, c, g, or t
  misc_feature (264)..(264): n is a, c, g, or t
  misc_feature (389)..(389): n is a, c, g, or t
  misc_feature (401)..(401): n is a, c, g, or t
  misc_feature (404)..(404): n is a, c, g, or t
  misc_feature (421)..(421): n is a, c, g, or t
  misc_feature (436)..(436): n is a, c, g, or t
ttcagcccagaagccagccttgtaacaccagtttccttttgattggcccttgcatggtatatcttctctcccatatntttacttctacatttctagagcttataagttagatctgtcttttgtagatagcatacattgctttgtgtattgggttttnaattttttggtccattctgagaatatctttnaattgaaacacgtagtttgtttacctttaacatattgattcattttatttcgcagacacttatgtgccaggcnggnttccaagcatgttatgcacactgacacatcagcagtagtaactgatagagccagatttgaccccaggggtatctgggagtgcttggggatttaacatctatcatcctactttgtgcttttttctngggagacggggnctngctctgttgcccaaggngggaatgcagtgggnataccccttgaggacaga

SEQ ID NO: 304788 - DNA, 502 bp, Homo Sapiens
  misc_feature (195)..(195): n is a, c, g, or t
  misc_feature (395)..(395): n is a, c, g, or t
  misc_feature (482)..(482): n is a, c, g, or t
atagtcttttagccttttttcctggagtgtttatgtcccaagcccactgatcacctgcatgcgccaggtatgtggtcggggtgtgatggacgtgggtttgcagcccctccactgctcgataaaaggcagatacagctgaaacaaagatgcttttcacttgtgctttctgaaaatctccgttttgaagggccagangtgttctgtgagggctgagcgcctgaatcacagggggcagagttatgacagtacctttctgtgtggcttttagcaacgcctagagattctggtttttcacctgaaaaactgccttgatacaaaaatcagggcaaagcttaaacaaacacggcacacaacagattctctacaagcctgtggatcacggatgttggaatagnctcacttatttaacagttttggataggcagttttaggatttaaaagtggacattgtggtattttatggaaaaaaactcggaaatttngaatagcccccattaaatta

SEQ ID NO: 304789 - DNA, 136 bp, Homo Sapiens
  misc_feature (17)..(17): n is a, c, g, or t
  misc_feature (36)..(36): n is a, c, g, or t
  misc_feature (48)..(48): n is a, c, g, or t
  misc_feature (60)..(60): n is a, c, g, or t
  misc_feature (105)..(105): n is a, c, g, or t
actttatttggagtttncacctaagcagctcccagntgagctcatganatgtgcaaaagnccctagaaagctgggctcgagtgtgtaaaaaaggcccccatggangagcgtgcaaccattttaaaaaaagagacag

SEQ ID NO: 304790 - DNA, 314 bp, Homo Sapiens
  misc_feature (147)..(147): n is a, c, g, or t
  misc_feature (150)..(161): n is a, c, g, or t
  misc_feature (172)..(172): n is a, c, g, or t
  misc_feature (191)..(191): n is a, c, g, or t
  misc_feature (271)..(271): n is a, c, g, or t
taagaatacaaaatttatcttccttttgcaaaatcattttatataaaccatgtgatctaattgctagccctcctcctagggtcttgaaaggggctctaaattttcagcctcctgagtagttaggtctacaggtataccgtgcctggntannnnnnnnnnnnagagatggggncttgctatgctgcccaggntggtcttgaaattctggcctcaagcaatcctcccatgtcagcctccccaagtgttggcattacagggtgagccaccacanccagctggtttttaaagtatgggccacagacagaattaggtgt

SEQ ID NO: 304791 - DNA, 467 bp, Homo Sapiens
  misc_feature (429)..(429): n is a, c, g, or t
aagttattaaaataagaggtccttgatggcaaaaataataaaatggctctttggtggttaaaaggaccaatttggtcaatctcaactctttaaataaaaaggaattttgcttgaggtaagtaatttagttcctttgtggaaagttctttgacttctaagatgattcagagtttggaattactgatttagtcttctgactgtatcaggagtctttaaatatacattttcaattcaattaataagtcatgagttcagttaatttatcatcagtgcaatcagaaaccatcaaagtagactgagttgccagcctttacttctggctaatcctgacacatttcacatgtcatggggttcctgaaattctgaagctgaggattgctaatgggttcaggattgggttactgggatccattgtgttccccaaagggnaaattatacagctcgcttccaatggatgccaggttccc

SEQ ID NO: 304792 - DNA, 320 bp, Homo Sapiens
  misc_feature (144)..(144): n is a, c, g, or t
  misc_feature (149)..(149): n is a, c, g, or t
  misc_feature (156)..(156): n is a, c, g, or t
  misc_feature (162)..(162): n is a, c, g, or t
  misc_feature (168)..(168): n is a, c, g, or t
  misc_feature (196)..(196): n is a, c, g, or t
  misc_feature (221)..(221): n is a, c, g, or t
  misc_feature (243)..(243): n is a, c, g, or t
  misc_feature (246)..(246): n is a, c, g, or t
  misc_feature (248)..(248): n is a, c, g, or t
  misc_feature (253)..(253): n is a, c, g, or t
tgtctgaaacttcacatacttttaaaaaaatgtatgttttgcagacatacagacatggcaacccctagcatgtgtatcctaagagtaagacatttttctttataagcacaataccattgttgcatctaagaaaactaacattantgtantaccaantacatnttcagntttacccccgttcccaaatgtgtctttnttgtagggttttcctttctagggancgatttatggattatgtctttnggncnctttncagcggggataggtatactcaacattataggtatattctaggaacactttggaggttggttattaaa

SEQ ID NO: 304793 - DNA, 445 bp, Homo Sapiens
gctgcagttctcgtcatctgtttatgtgtacattttccatgtgatctctccaatgtggtgccttctgggttactgcactaagtataggttgactcagggctcccacagcgcttgtcccaaaagagaaccaagtagaagccattttgcctttctgactgccccttggaagtcacacagcatctgccacattccgttggttgaggcaggtgggaaggtcactctaggtacaagagaacatagaccccatgtctcgatagaggagtgttaatatcactttgtaagaaggtcatgtgggatgagatatatattggtgctatctttggaaaatacagtctgctacaagtaaaacccgttcagaattctaattgggattttttgaagaaatcttatttttaaatgcatttgggattacctaagttaaacttcagaaagaagagaaaagggg

SEQ ID NO: 304794 - DNA, 419 bp, Homo Sapiens
  misc_feature (69)..(228): n is a, c, g, or t
  misc_feature (230)..(369): n is a, c, g, or t
ggcacggaaaaaatattgcaaaatggaaaatgagggcagagaattaatttcagtaacaaaggactgatnnnnnnnnnnnnnnnnnnnnnnnnnnnnnnnnnnnnnnnnnnnnnnnnnnnnnnnnnnnnnnnnnnnnnnnnnnnnnnnnnnnnnnnnnnnnnnnnnnnnnnnnnnnnnnnnnnnnnnnnnnnnnnnnnnnnnnnnnnnnnnnnnnnnnnnnnnnnnnnnannnnnnnnnnnnnnnnnnnnnnnnnnnnnnnnnnnnnnnnnnnnnnnnnnnnnnnnnnnnnnnnnnnnnnnnnnnnnnnnnnnnnnnnnnnnnnnnnnnnnnnnnnnnnnnnnnnnnnnnnnnnnnnnnnnnnnnnnnnntgacaaaaattgaaaaaaatctgtaatattatattactgccaggctcatt

SEQ ID NO: 304795 - DNA, 370 bp, Homo Sapiens
  misc_feature (41)..(41): n is a, c, g, or t
  misc_feature (328)..(328): n is a, c, g, or t
ctctctaaatgtgtaactgtgtgtattttaacgttgtgagnggtaagggaacaagtatcagaaaaaggtactttccatgtgcttttgcttccagtgagatttcaagtaaaaagtgtgatgtcatccttagagcccatgccagaggtaaaaacaaacagaaacctgattcatggggaccatacatcaaaggcctaaaatcaaaagtgaccaaatgtgttcgttcttctctcaataatttaacatctttcagcccctttcctgggctttataaaataagggacaaattccaatcctgtaaaacagacatttaaggcaaagcactttcatngtatcattatccagtggccatatatctttgggcaagccactt

SEQ ID NO: 304796 - DNA, 391 bp, Homo Sapiens
tgggtttctgtttctgtgttagttcgctaaggataatggctttcagctccatccatgttcctgcaaaggacatggtcacactcttttttatggctgcataatattccatgatgtatatggactgcattttctttattcagtctaccattgatgatgccctcctcatttgactgggatccagcaggagactaaaaaggggcttcctgtttgatttacacccttttgcattcttttcacctccaatcaccaaggagtgaacagcaaaaaatgtctgagcagctattaagtctccaaccagcaggggagcacaggaggccaggggatacatggaaactaaacatcagggctgcaccagggtttgggtcccccggggtggggtgggagtatgttc

SEQ ID NO: 304797 - DNA, 315 bp, Homo Sapiens
  misc_feature (149)..(149): n is a, c, g, or t
  misc_feature (169)..(169): n is a, c, g, or t
  misc_feature (194)..(194): n is a, c, g, or t
  misc_feature (197)..(197): n is a, c, g, or t
  misc_feature (220)..(220): n is a, c, g, or t
  misc_feature (232)..(232): n is a, c, g, or t
  misc_feature (235)..(235): n is a, c, g, or t
  misc_feature (249)..(249): n is a, c, g, or t
  misc_feature (269)..(269): n is a, c, g, or t
  misc_feature (274)..(274): n is a, c, g, or t
  misc_feature (281)..(281): n is a, c, g, or t
  misc_feature (288)..(288): n is a, c, g, or t
tttgtacctcagtggcacctggaaccccagtaagacagaacccgtttactcccctggaaaggggcttaatgcagggagccaagtggtctcactcagtaggtcccactgtcacggagcccagcaagctaagaaccactggcttgaaattntcacagccagcacagcagtntggagtcaacgtgggatgaccgagnttngtgggcatccgcattactgagtnttcaggaggctnttntaccttgacagtgntaaggagactgggaggtttngactnggaagantttaccncagcacagcaaagcagttttgggccag

SEQ ID NO: 304798 - DNA, 480 bp, Homo Sapiens
  misc_feature (414)..(414): n is a, c, g, or t
  misc_feature (426)..(426): n is a, c, g, or t
  misc_feature (441)..(441): n is a, c, g, or t
  misc_feature (464)..(464): n is a, c, g, or t
taaatatttcaatgcactaacattcatcagacctaagtgtcctctaagaattattaaaagttttacctttctcctttaaaacaccaggagctagtaggacaatgttaaatttatatttttagattattttctagatatctggaataaatacaaactatatttcagagttttcaaaaaataacagttgtactcgttttttctttgagagaggtttggccatacaattatagtatgtatttagctaaaaagcaattaatataattatagcagagttaagaatttatatcagatcacgaataacattttaatgtttcaacaaaatatcccagaatttgaattgggaagggattgttttgagttgctcccaatccaaagtgcttttttacatatctgaggggtaaagggtaaaagagngggccatatganttgcccttaggccanctaattccatggccatatttatnccttattccggctttt

SEQ ID NO: 304799 - DNA, 395 bp, Homo Sapiens
  misc_feature (31)..(31): n is a, c, g, or t
  misc_feature (43)..(43): n is a, c, g, or t
  misc_feature (65)..(65): n is a, c, g, or t
  misc_feature (126)..(126): n is a, c, g, or t
  misc_feature (202)..(202): n is a, c, g, or t
  misc_feature (237)..(237): n is a, c, g, or t
  misc_feature (247)..(287): n is a, c, g, or t
  misc_feature (312)..(312): n is a, c, g, or t
  misc_feature (326)..(326): n is a, c, g, or t
  misc_feature (350)..(350): n is a, c, g, or t
tcgctctgttgcccgagattgtgccactgancccagcccaggngacagagagaaaaaagcatgtntgcacagcctccagggaggccttgcccaagggtctgaggataggccaatgccctccctggnctcgggatcccacctgggccctgttgggatgactaccctggggctgtgtggcaaaccagcaaggaggcggctgctntgcgctgagaccctgggacaaggcccaggaggctnccgcagagannnnnnnnnnnnnnnnnnnnnnnnnnnnnnnnnnnnnnnnnatcagcatccctggggagaccccancagcagcccaaganttccaaaaagggcattaagtagtngtcaggttggaaaaatttcaaaaaccagggccaaagaggagagaa

SEQ ID NO: 304800 - DNA, 427 bp, Homo Sapiens
  misc_feature (367)..(367): n is a, c, g, or t
  misc_feature (400)..(400): n is a, c, g, or t
  misc_feature (409)..(409): n is a, c, g, or t
ccttaataaacacacattgtggcacactgggcaacactattagattcctaactaacttttttcacatgtccatttctaatataaaccaaatatgtagaaccatatgcttaaataccactcctgacttaaattgtgaacagcatatggtttgtgttacttttccagcctcaaggacaattgtgcgttcaccttcccttatccttttccactttcaatcgtaacatgaacaataataaggtggtcagtaggagataggggttttatttagaatgatcaaattctaactgatcaaattttaactgatcaaatcagttaaaggataactggatccatggaaggttctgggaaatcacatttaaataaggtnattattttggaagggagccttatctttcagccngggggattnaaaaaataccaaaaagtt

SEQ ID NO: 304801 - DNA, 347 bp, Homo Sapiens
  misc_feature (54)..(54): n is a, c, g, or t
  misc_feature (198)..(198): n is a, c, g, or t
  misc_feature (242)..(242): n is a, c, g, or t
  misc_feature (291)..(291): n is a, c, g, or t
  misc_feature (301)..(301): n is a, c, g, or t
  misc_feature (321)..(321): n is a, c, g, or t
agaagcatcaaagccaaaaaggcaaaactggctgaggctctgttgatgctcctnagcctactcgggaacgtgaaggggcagctggcgaaagggcattcctggggccacttgctctgccccactgataaggcacacccgcggtcactgtgagctctttaaggactgaggccaggggatgcctcctggaacctgccaggnctctctgttctgtgaaggtcagtatccacttgattcctccaggnggcgctccaggttggaggagcagggtcttctgctgtttccaaaggaatngccatgacantgcttttaaccttagaagtngatcccagggacccagcaaaagagcc

SEQ ID NO: 304802 - DNA, 293 bp, Homo Sapiens
  misc_feature (29)..(29): n is a, c, g, or t
  misc_feature (142)..(142): n is a, c, g, or t
  misc_feature (146)..(146): n is a, c, g, or t
tgtctcacgtcccgtggacacaagatacntttcagggtgagtgcagacctcacaggtgtgggcacacctgcccccgaccctcctgcctgcatccgggcccctgctgcaggtaacgggtggcagaggttgctgggtgcggganaggncagctgaatacccgtcctggggaggcagctgagactctgtgctgccagcatgtgctccattattccaccagactccacttaacacagattcaaagatgacatgaagcatttcaggacagtgaaagcacagcatgaagccctacggct

SEQ ID NO: 304803 - DNA, 408 bp, Homo Sapiens
  misc_feature (273)..(273): n is a, c, g, or t
  misc_feature (360)..(360): n is a, c, g, or t
  misc_feature (369)..(369): n is a, c, g, or t
  misc_feature (383)..(383): n is a, c, g, or t
caccatgtaccctgtacagttattatacatgacatacatagcatacacattacacactctccataaaatatttctactggaaagaaaagtaaactgtaaaataatgcctatgtctaaggttacttagacataacaagagttcatgacaagagatctttgtaaactttattgacttttcaaaaatgttttctttgttattaaattaggattacaaatttgttaaatatctttggctaattttcaagattaaaaatttttaaatatacacttgancaaacatgtcctgggagaagcaaattaaggtacaaaatatagggcagtttataggataatgcatctcatttcaataggaacttttgnaaatgactngaaatgtttggggnttaaatcttcaggtcgtttgggatt

SEQ ID NO: 304804 - DNA, 414 bp, Homo Sapiens
  misc_feature (279)..(279): n is a, c, g, or t
  misc_feature (331)..(331): n is a, c, g, or t
ttcctccattactatgtactaaataccaactgtatgccaggcacataataagggaacgtgactgacatgatcattggctaaatgcagcttctccagtaagaggtgagagggtgagagttgtggggcttggggttggtgcaaggctgcctctgtccaattcaataagcttgatttggctctttttcgtccaagtaagaagaagctcagtagtttgtactcagctttcatttctatttcctgagtttattaaataactttccataaaaatagctaagcttnacaagaattaaaatgatgcaagcagtttgtaggattaggtaaacgtagtganccaaaacatgtgggggaaaggttcagcctctgttaattaattacggggaaaaacagttttaaaaccagtattgcatatttgat

SEQ ID NO: 304805 - DNA, 384 bp, Homo Sapiens
  misc_feature (32)..(32): n is a, c, g, or t
  misc_feature (101)..(185): n is a, c, g, or t
  misc_feature (241)..(241): n is a, c, g, or t
  misc_feature (338)..(338): n is a, c, g, or t
  misc_feature (356)..(356): n is a, c, g, or t
ttccaataagtacagtcagttctccttatccngtgagttgcacatccactatcaaaggcaaggctactttttgtgtatgtggttctggcagggcaactgtnnnnnnnnnnnnnnnnnnnnnnnnnnnnnnnnnnnnnnnnnnnnnnnnnnnnnnnnnnnnnnnnnnnnnnnnnnnnnnnnnnnnntacatatttgtcttgtccttccagaatccaacttcataccaaactaaatacaatgntacagaagttcttccacatactacattacagttaatatttggggagttggcatttgtattttaagcagagggatctaggtttttttaataacttgangatggggaaggaaaaatnggtgcagcttcaaatggaaagttatttt

SEQ ID NO: 304806 - DNA, 321 bp, Homo Sapiens
  misc_feature (40)..(40): n is a, c, g, or t
  misc_feature (111)..(111): n is a, c, g, or t
  misc_feature (132)..(132): n is a, c, g, or t
  misc_feature (206)..(206): n is a, c, g, or t
  misc_feature (306)..(306): n is a, c, g, or t
ttttctcgtgtttcggctctcaaaccgtggtccctccttnctccactcaagtgatccttctaaaatggtggctctgcaggacctgcctctcagccagagggaaggtcggtngcctcaatgatgaggcaatantggacccagctctgtcctctgccctcccctctggctgtccctcgaatgtggccagtcctggtgcagtctgtccngggacactcgggtttgctgctgctttgcctaaaatgctcttcctgggtctgcgcagggctgccgctcacttcccgtcagctctaccttccccggccttgnctgtaagacacattc

SEQ ID NO: 304807 - DNA, 460 bp, Homo Sapiens
  misc_feature (285)..(285): n is a, c, g, or t
acaactttcacctgtttcattgcactttgcatccgacctcgccttcattccttagttgtctggaaatgctccaggcctctgctgcttctcacctcattccccagaaacagtcaggttctgtctcttaccagaggtaactgagctgctgctggcctcatagctcctgtcgccctcactgcgggtttggttttcctcttatcacagtggtctgaagtgcttggatagtctaggacatccagccccctccccagacagggactccttagggcgtctctgctcccaggntggccttggcccttctggggtgctcaggaaatgggtatgctgtgtgtgggcagtggttggctttaacactagtcatcatgtgtaaggtgatttgaataagtctaaggaaaattgcacttatttttgggtgtatttcctttcagggttattttgggagctgttgggagcactccct

SEQ ID NO: 304808 - DNA, 391 bp, Homo Sapiens
  misc_feature (120)..(120): n is a, c, g, or t
  misc_feature (128)..(128): n is a, c, g, or t
  misc_feature (130)..(130): n is a, c, g, or t
  misc_feature (164)..(164): n is a, c, g, or t
  misc_feature (177)..(177): n is a, c, g, or t
  misc_feature (180)..(180): n is a, c, g, or t
  misc_feature (194)..(194): n is a, c, g, or t
  misc_feature (199)..(199): n is a, c, g, or t
  misc_feature (221)..(221): n is a, c, g, or t
  misc_feature (241)..(241): n is a, c, g, or t
  misc_feature (243)..(243): n is a, c, g, or t
  misc_feature (276)..(276): n is a, c, g, or t
agcacaaataacaaacagaaggactaaccccaaagaacttcagattattagcattaaagttttataattttaagattttagaagctgggaaacagatagtctagtgacaactgatttagnaaacaggngnaacccgtactgtaaaactgcagagaggggcactngcaagagggtctntgncccttccctgcttnggctngaaacacttacagcctgggtcnctcttcctaaattgggggtngncaggtatacctctgggtaaactgagcagtcggnaggatgaagtcatgtgggggtgatcctcaaatgaaaaaattcattccttatcttgccccccactcctcacctaactgccagtcaactatttaatgtgaaccaaaaagccaggtat

SEQ ID NO: 304809 - DNA, 432 bp, Homo Sapiens
  misc_feature (18)..(18): n is a, c, g, or t
  misc_feature (347)..(347): n is a, c, g, or t
  misc_feature (359)..(359): n is a, c, g, or t
  misc_feature (419)..(419): n is a, c, g, or t
acttcatgtttacctgtnagccttatctgcgcacctgaacttcagagagggtctctctctgttcttttgctacttctctagtagtcgaatgctcttacttaggtgttacttggagctagtttgtgttgttgtggtgggcatggggccttggatgctgtttagctttgtggtggtaggaattgagctttctcttttgttctagaccagtattagtcttaggcaggctctgttttcctctattcttgataatcctccttctccccagtagtaggagacctctattgttttggtcttaggttactttcttgtctgtccttcagaagtacatacagtatcatctaattttncaggaatttatnagggaaggtgttttcacatccctgtattaaaagggaatatatttggaaagcccatttttnacaaagtacccga

SEQ ID NO: 304810 - DNA, 294 bp, Homo Sapiens
atgaaccactgcacccggacgcacaatgcttttacagtacataaaatacttaaaatacagttgcttatttcatttcctcagtaatcctagagagcattttctgtatcttattgatgaggaattgaagctgggatagctcctctcctaactcttgaggtcagaaaacaagtgcaccgagctgtagaatgcacaaatggcaaacattaaaggggaggtccagaaaagttgaatggagtgcagggggagtttctgaagtgactgaaggtggggaataaggaggctcaggatgaaaat

SEQ ID NO: 304811 - DNA, 264 bp, Homo Sapiens
  misc_feature (106)..(106): n is a, c, g, or t
  misc_feature (154)..(154): n is a, c, g, or t
  misc_feature (179)..(179): n is a, c, g, or t
  misc_feature (206)..(206): n is a, c, g, or t
agctgagcccctgagtttgttgcactgtgtacttaaagtctgtgacagtttagcctctttctaggctgcccatatctctcaccactcggttcatttcccggttttnaccactccccacggtccccagatgatcattttcatcctgaggcctctnattcccaccttcagtcacttcaganactcccctggcactccattcaactttntgggaactccctttcaatgtttgccatttgtggattctacaggtcgggtggcacttgt

SEQ ID NO: 304812 - DNA, 130 bp, Homo Sapiens
  misc_feature (59)..(59): n is a, c, g, or t
  misc_feature (68)..(68): n is a, c, g, or t
  misc_feature (101)..(101): n is a, c, g, or t
  misc_feature (117)..(117): n is a, c, g, or t
gcaggcaagtacttgatgggaaaagcttgcaggaaagcttatctaggaaggattaactngatttaggntgggcaacacttaaatagggttttgccatgggnggacaaaacagccttnttacttggagggg

SEQ ID NO: 304813 - DNA, 455 bp, Homo Sapiens
  misc_feature (26)..(26): n is a, c, g, or t
  misc_feature (284)..(285): n is a, c, g, or t
  misc_feature (357)..(357): n is a, c, g, or t
  misc_feature (445)..(445): n is a, c, g, or t
atcaaaatgggatcaaaatggggaanaaaattcgtacgccgtgtaagcctgtgcccttacacatcagggacttgcgcggagtacagagcggacgacacactccctcttagtcagcactggcccatcccggccactgtgccatctgcttgtgtcagcaagggcctttgaagagcagtgttgtgtgactctcattttcatctgcctctgtaattacttttatggttttgaacaaccatgtcagggaagtttagatgataatacatccaatgcctgaggaaggcatnncagattctcaggaaggaagggaaatgggatcccagggcagactagatcatctttaaatgtcccagaatcttnaaatttgtttacccctaaaaagtagggcatgatttttagggacttgaagatcagggatagcctagggctttatttgaatgtgtacccnggggctgggg

SEQ ID NO: 304814 - DNA, 142 bp, Homo Sapiens
  misc_feature (52)..(52): n is a, c, g, or t
  misc_feature (62)..(62): n is a, c, g, or t
  misc_feature (73)..(73): n is a, c, g, or t
aaggaaggaggcaaataaaaaccaaactggatgttcaggcatagctattatnatataaaatnatataataggncccactatccatctacactggaataatggtttaaaataatacttggaatcttttgtccccattcctata

SEQ ID NO: 304815 - DNA, 481 bp, Homo Sapiens
  misc_feature (30)..(30): n is a, c, g, or t
  misc_feature (156)..(156): n is a, c, g, or t
  misc_feature (222)..(222): n is a, c, g, or t
  misc_feature (420)..(420): n is a, c, g, or t
  misc_feature (453)..(453): n is a, c, g, or t
  misc_feature (466)..(466): n is a, c, g, or t
atgagaagaaagtaaatgggtcatacttanttttggttccctcccaaatattttaggacagaagtaatatctagtataataatgaaaagtgataacaaacatcataaatgctagacagatgaaaatctattctatttgagaagacctccacctggnagccatcccacaaatcacccctccaaggaaaagacaggttttcccctgccacaaggggctgagctnccagcctcaagctgctgtagctgctatacacagaggaggccatgggtgagcaggctgcagaggcctccttcccaggggcacagacaggtacctctctaacagaaagagataggaaacagctgagtccccctcagcatctttaattttaaaagcatggatatgtctaaggtcatgcttcaccaacaagttttcttaggnagggtctggggctgcttagctcatctgttttancaataggaaattnttcaagcttccgtgt

SEQ ID NO: 304816 - DNA, 456 bp, Homo Sapiens
  misc_feature (15)..(15): n is a, c, g, or t
  misc_feature (37)..(37): n is a, c, g, or t
  misc_feature (66)..(131): n is a, c, g, or t
  misc_feature (145)..(145): n is a, c, g, or t
  misc_feature (154)..(154): n is a, c, g, or t
  misc_feature (268)..(268): n is a, c, g, or t
  misc_feature (342)..(342): n is a, c, g, or t
  misc_feature (374)..(374): n is a, c, g, or t
  misc_feature (402)..(402): n is a, c, g, or t
  misc_feature (418)..(418): n is a, c, g, or t
  misc_feature (423)..(423): n is a, c, g, or t
  misc_feature (444)..(444): n is a, c, g, or t
ggatgtctgaaggtntgtgttaagagcagtatgggtntctattaatatgtgtgtataggtaagtcnnnnnnnnnnnnnnnnnnnnnnnnnnnnnnnnnnnnnnnnnnnnnnnnnnnnnnnnnnnnnnnnnncgcgcgtgcatgangttgcgcgngcttagggggcctgtgtatacgaaccctgtgtagaccatctggagctgaagaaaaagtccccagacatcagccatggagctgagagcccttcgcctcccaaaaacctgcagatntttcagaggaaggaacctggagcctgggtgtctagctcagtccagcctgccttggtctttaatgagcacttggnccttttggcctttccctgcggcccctcaaggnttctggccaagtcctcagggcaggcctnggtttgccaacgactntcctnctgcgtaagaaacggtcccanagagcaccctgg

SEQ ID NO: 304817 - DNA, 352 bp, Homo Sapiens
atactgtatttttctgggacagtccctctatatgatgtgattcctagaaaaagaatttatagcacaaacattcctttaaaaatatggctctttcatgctactctgccataattaaccatagacaattaatatttaaagctgttatcaccccacgaggcaatgaaattccctgaaattctctgctgcacattcagacacttttacgggcaagattgaattagtggcagagggcaacttgatttttcaaatcatcttacaatcacgattgattcttcatagatcccatctgatgaatactcaaaaccatttgtccaacacgtgtaagagaaaccactcaggatccgttgaaaat

SEQ ID NO: 304818 - DNA, 404 bp, Homo Sapiens
  misc_feature (148)..(299): n is a, c, g, or t
  misc_feature (338)..(338): n is a, c, g, or t
  misc_feature (350)..(350): n is a, c, g, or t
tcttgggtggaaaaaagaaaactggctcctttctttttcttctccaaagagaatccactgaggccaagcactggagagttgtaaccacattgactcctcttgccagagcctccactccccagtttcttgtaggtaattcttctggagnnnnnnnnnnnnnnnnnnnnnnnnnnnnnnnnnnnnnnnnnnnnnnnnnnnnnnnnnnnnnnnnnnnnnnnnnnnnnnnnnnnnnnnnnnnnnnnnnnnnnnnnnnnnnnnnnnnnnnnnnnnnnnnnnnnnnnnnnnnnnnnnnnnnnnnnttctggatggcagggtaaggagtttaaggaactactggntttaggggcaanttggctctttttcatcccttcttaaatttactccctagtttctctttcaccccc

SEQ ID NO: 304819 - DNA, 359 bp, Homo Sapiens
  misc_feature (266)..(266): n is a, c, g, or t
atatgacacaccagtatggaaatccttattcttctcacagccaccagctattggcccatccactgactatcccaattccacctgccttatcagtggaaaggtgaaatgtatgcccactttttcctcacaccattcccctttctatcaaaaactaccaagagaaacccaggacctaccaaaatagttaagatgtgctccactgtgtctactgccagccaaacctgttgaaggctggcttcaaccctaatctgtgccttcctgtcttnttcacaaacgtagtctggatttgctgggctaggatttctagttaacaggccacaggggcaggaaatgttgttccctttccccaatatgttcac

SEQ ID NO: 304820 - DNA, 353 bp, Homo Sapiens
  misc_feature (312)..(312): n is a, c, g, or t
taaatttatgtggctatttgactatttgtcttagaccagccttttgctcattccagtaaccacacataccacacagttcactgatgcaaatcctctgcgatgaacaggagatggggacagaaaaaataaatggcgatattttaagggtttagagcactctgaatgttcattcagacaatgcttgccccaaattctaatctccctctgattttgttccattttgtaatgaagactttggggaagtgggtgaggaggtcctggggcagtgggggggaaacagggtacagccctgtgggaccactggaatgggantgttcttggagttggacaggcattaacttttgggtccaggc

SEQ ID NO: 304821 - DNA, 555 bp, Homo Sapiens
  misc_feature (337)..(337): n is a, c, g, or t
  misc_feature (362)..(362): n is a, c, g, or t
  misc_feature (387)..(387): n is a, c, g, or t
  misc_feature (402)..(402): n is a, c, g, or t
  misc_feature (419)..(419): n is a, c, g, or t
  misc_feature (435)..(435): n is a, c, g, or t
  misc_feature (451)..(451): n is a, c, g, or t
  misc_feature (467)..(467): n is a, c, g, or t
  misc_feature (473)..(473): n is a, c, g, or t
  misc_feature (483)..(483): n is a, c, g, or t
  misc_feature (503)..(503): n is a, c, g, or t
ggatacataaattctcatgtaggtatcagtcccttatcatctctgtgctttgtcatcactaaataagtaacataatatttggtcctttcaaatctgtttttttagatgtatttctgcatgttattgacattgttcttcctcttctaacccactaatccattaaatattcagctcctcctaaattatacattttttgtcctctatagatatatttttaaatttcccttctcaaaataagcttgcattttgaagtacatttgttagaaacaaggtagaataattctactttctagtctcaaggaacagtcttctaaatgtaaagaataggaacctggtnggaagtatatactatgtgctatttncactggggtacatatttagtttatnctgtttaggagaccnataattcaaccactagncaggggaaacctgccntaactcccttttctgncaaagttaataatttntttaanttatttattngataggacccaagtttttanttttttaatgtcccaaaaagtttcccctggaggttagcctttgcaccaaaat

SEQ ID NO: 304822 - DNA, 207 bp, Homo Sapiens
  misc_feature (46)..(46): n is a, c, g, or t
  misc_feature (56)..(56): n is a, c, g, or t
  misc_feature (99)..(99): n is a, c, g, or t
  misc_feature (120)..(120): n is a, c, g, or t
  misc_feature (145)..(145): n is a, c, g, or t
  misc_feature (153)..(153): n is a, c, g, or t
ttttggagtcctaccagtgatctatttttaatgatgtatggatcancaaggaaatnataatctgtaaaaagtgcttcaagctgttttggtcagcagcanatagatttgggcttagggttngtgtaggccatgactctaacagagnttgtggtntgatatctaccttctccagaaaggaatatccttggttacttcccttgtcttaca

SEQ ID NO: 304823 - DNA, 303 bp, Homo Sapiens
ctcatcacattcctgttgctaaggaaaccgtctcctttgtgtagcatattcagagaggcacttgaggtagactccaactcaaagagtgtgagctccttgaattgtgtcatttttaacaatgggaaattaaaaagacaaaagcccttgacagaaggtgggaaaaatacttcaggaaacttctatgggcattgtccttgtttggggggagaggaagcaggcaaaaccaaagtttattgtggaaatatttgttggaatgtaggaggctaaaggaggatacatgaggaggtttggaagctttagttt

SEQ ID NO: 304824 - DNA, 337 bp, Homo Sapiens
  misc_feature (286)..(286): n is a, c, g, or t
  misc_feature (291)..(291): n is a, c, g, or t
atttcggcacagtgagaagttgaataagatgaggatgaggaactcatcactggctttggcacatagaggtcactggtccacggtttcattgaagtgttgggatgagagcccatttggaacgggctcaaaagagaacaggaagaggactggagacaaggagtccagacaactctttcaaagagtttagctgaaaaggggtacaaaggaaatggggaccatatctgggacacggtatatgggtcaagagaggggagctcttgcagctggccaagtgtttcttgaagtnctctntgggtggggacactttaggttacttttttagccaccattatttttt

SEQ ID NO: 304825 - DNA, 421 bp, Homo Sapiens
  misc_feature (274)..(274): n is a, c, g, or t
  misc_feature (380)..(380): n is a, c, g, or t
ttttacattactgctccctatcaatgttacttctcatttgaaatgtagttcagctgtgcacactaaaaataaataagtcatatttgtcttaccttataaatatttatggtcatgccacagaaaaaatgcttttaatattaagcaaaatgtacaaaatattttaaaatatgagtcaaacctcatattttcatttaatacatgtataaacagagaaaccttatttctacctaacaccttttctaggttccactccttaaattccttaaaaattttnggcttatacatctgtctccaccctcctactgaccagttatgcttctctgaaatttaataacaatgccatcactcttaaggaagggtctggtaccccaaataagggnacaaaaccaggggacaactggaattcaggtatttaggggga

SEQ ID NO: 304826 - DNA, 498 bp, Homo Sapiens
  misc_feature (319)..(319): n is a, c, g, or t
  misc_feature (360)..(368): n is a, c, g, or t
  misc_feature (444)..(444): n is a, c, g, or t
  misc_feature (463)..(463): n is a, c, g, or t
  misc_feature (482)..(482): n is a, c, g, or t
acctgtttggaatcctaacttctgctcattcccaccctgcattcttaggcttttgagtttggtctatttcagaatgagacattcttcacttgcttttaacttctaaacattaaacctttttggttatagtaaacttaatttctctaacaagtacaaaactcaggcaccctttagaccaccacggagactctggcatagtgctttttgcctctcttgagagcaaggatcattgaacctgagcccaaccactgttgcccctacctgcaacttcaaactcacttgttctatcccatccctctcccaaggacctattctgggnacctggtacatttcaaaggccgtaaggaaaaggaaccatannnnnnnnnaaaaaaacaatggaaaatgttaggagggcggaatagggggaaaatagggggagttaggttacagggggaggagggntaaaaatttaattctaggntccaggaggtggataaggnaattttgggggtaaat

SEQ ID NO: 304827 - DNA, 339 bp, Homo Sapiens
  misc_feature (37)..(37): n is a, c, g, or t
  misc_feature (325)..(325): n is a, c, g, or t
ttttggagaacagattctccatctgtatccgaaggancttggtaatggaagcaggctggctgttgaccctgtccattcctggggcacattcacaaccccaaggacaagccgtgtccttggtagaggggggtggtaggtgaaatttttaagtctagccctccagcgctctcccacaagggggcggcagtctaccctcttcacataaagaactgcgtatgaaatgcagcctgcttacagggtaaaaggcagcacctgggaagaccttgaattgttacttccctcctttgccgtgattttgctgcctgtttacttgcccctcattcantgtctttgtttcta

SEQ ID NO: 304828 - DNA, 330 bp, Homo Sapiens
  misc_feature (22)..(22): n is a, c, g, or t
  misc_feature (33)..(33): n is a, c, g, or t
  misc_feature (36)..(36): n is a, c, g, or t
  misc_feature (47)..(47): n is a, c, g, or t
  misc_feature (52)..(52): n is a, c, g, or t
  misc_feature (59)..(59): n is a, c, g, or t
  misc_feature (79)..(79): n is a, c, g, or t
  misc_feature (129)..(129): n is a, c, g, or t
  misc_feature (190)..(190): n is a, c, g, or t
  misc_feature (213)..(213): n is a, c, g, or t
  misc_feature (237)..(237): n is a, c, g, or t
  misc_feature (239)..(239): n is a, c, g, or t
  misc_feature (243)..(243): n is a, c, g, or t
  misc_feature (247)..(247): n is a, c, g, or t
  misc_feature (249)..(249): n is a, c, g, or t
  misc_feature (275)..(275): n is a, c, g, or t
  misc_feature (308)..(308): n is a, c, g, or t
acttgcaggccccatccaggtnagcccctcagntgngcgcccgtggnacganctcgggncttgggttggctcggatggnggcggctcccttgccctagccgttgtcgctcctgctgaaggatgcctctnttggccctggaggagagggcacctggggtggttgggatagggatcccgaagtgtggttccngggacagggagcagggagcagantagagcagggacagacctggcccntncccncgtntncgttgtaggaaggctgtaatgatccnatccttttcatccatgaagttaaggtgcatctnctttcaccttcctgaaggcaat

SEQ ID NO: 304829 - DNA, 422 bp, Homo Sapiens
  misc_feature (391)..(391): n is a, c, g, or t
tcaaaaaccgttatggaaggtgaaagtactcattaggagataaaaccaattcttctctccctaggtattattacttctaacctttcaaatttaaagacacagagtattgtagtttgaaccaaatggcacttaaagataggtttataatgaaatacagtttaggaagaaacaatctcataactcgtttctatatcctctcctttcctttcagctgagttgccaacactcagagggaaacccaccttccttctaaattccattccacttacggtatgggaggatttctctcctgggatcccgaaatggggaaaagggctgggccacacggctccacccattcttttttaacaggtgtcaggaggtaggggtaaggccttagggtacggtaggnggtaccattggaggtaatctagggggaggtt

SEQ ID NO: 304830 - DNA, 114 bp, Homo Sapiens
agacgagagagaagggcagagtctaaaaatacaatatttaggaaggaaggattaccataagaaaattggacccatatacccttttgcttaagcttataatttgggcagtggata

SEQ ID NO: 304831 - DNA, 235 bp, Homo Sapiens
atcaaatgatttttaaatcagatcaaacaaaatgggttagtgggcaaaatctacacatcaggctatatccagcctaggagtagaaaaaggctcttcagtcatgacccactcttgggtggttaaatgtaaccaagtagcaggaaggcagagatcccacatgcaatgcgctccagtggggccttccccaggcaggaagtgtgtctttattcactctccagaggcttcaattattaca

SEQ ID NO: 304832 - DNA, 380 bp, Homo Sapiens
  misc_feature (168)..(168): n is a, c, g, or t
  misc_feature (304)..(304): n is a, c, g, or t
  misc_feature (311)..(311): n is a, c, g, or t
aatttaagttcaggatacatgtggcattaatttcagtctttccttctgaagcaccacttaaataacttgacgtgactgttctcacacagtgcattcagcctatagaataaagtcagtgtctaacaataaaaactagaaagatatttgtgcaatatgttatgctaaatntagaacttggctaaattgaaaattttctgaaatactttatgtaaataaagaaacagagcagtccctacaaataggaaatgactcctgaaatttttatgtcaaaagtcattgtgtcaatttatgtgtaatattccangtgaccncccaaatgggccatcatttgactcactcaaacctattgtggtttccaaaggttcatccccatgccggat

SEQ ID NO: 304833 - DNA, 278 bp, Homo Sapiens
  misc_feature (131)..(131): n is a, c, g, or t
  misc_feature (208)..(208): n is a, c, g, or t
  misc_feature (229)..(229): n is a, c, g, or t
  misc_feature (252)..(252): n is a, c, g, or t
acatatgttatatactgtattcttataataaagtaagctaaagaaaacgttttaaggaaatcatgaggagaaaatatatttactctccattaagtgtaagtgaatcatcataaatgtctccgtcctcatanttttcaccttggaataggctgagaagcggggggttggctttgctggcccagggggtggcagaagtaggaaggagggnggaaggagggaaggccagganagggggaggccaccaattaaggngtaatcctgatggggggatcccaccc

SEQ ID NO: 304834 - DNA, 139 bp, Homo Sapiens
  misc_feature (98)..(98): n is a, c, g, or t
  misc_feature (105)..(105): n is a, c, g, or t
  misc_feature (122)..(122): n is a, c, g, or t
tctcccaggggccatcttcacaaaagactactaaggcagaggcattgatgcaacttcaactaagggaattgttctggggatggcatttcattgtcttncaaaggnccagaggacataggttnatccttgttcaacagtt

SEQ ID NO: 304835 - DNA, 181 bp, Homo Sapiens
  misc_feature (16)..(16): n is a, c, g, or t
  misc_feature (63)..(63): n is a, c, g, or t
  misc_feature (73)..(73): n is a, c, g, or t
  misc_feature (117)..(117): n is a, c, g, or t
  misc_feature (159)..(159): n is a, c, g, or t
atttctgaaacatttntgaaatgttactaattcacaacaagattacaaatatattcctaaganctggataaancgacttcataccacagtagggaaagagctgagctgagccacagnagttataattgaccaaaatcacttatcttttagttacaggtnagactcactttaaagagattaa

SEQ ID NO: 304836 - DNA, 440 bp, Homo Sapiens
  misc_feature (154)..(154): n is a, c, g, or t
  misc_feature (208)..(208): n is a, c, g, or t
  misc_feature (305)..(305): n is a, c, g, or t
  misc_feature (334)..(334): n is a, c, g, or t
  misc_feature (347)..(347): n is a, c, g, or t
  misc_feature (376)..(376): n is a, c, g, or t
cttgtttactagactgatcccacagaaatcccagtaggagtcacaagatgctgggatcacaacatgtgaaaattctggctatgctattgaaagaaagactctgatagatacaaatgaaacacgtctttggggcatcctttgtttttgaaaatcngaatttacacagcccaaaaggtatatttccttgtaccatatccttatttatttncctttgtatggaattatactgagtactactgcttttttattttgtaggccttggcattgtattgattagtgtcatgtaaatttgggttagtctttgnattttatagtgttgacagaccttaaaaanaaaatctgggccngggctgggtgggcttcacacctgttaatnccccaacactttgggggagggctgagggtgggttggaatcaccgagggtagggagtttcgagga

SEQ ID NO: 304837 - DNA, 445 bp, Homo Sapiens
  misc_feature (268)..(317): n is a, c, g, or t
  misc_feature (361)..(361): n is a, c, g, or t
  misc_feature (396)..(396): n is a, c, g, or t
  misc_feature (414)..(414): n is a, c, g, or t
  misc_feature (423)..(423): n is a, c, g, or t
  misc_feature (434)..(434): n is a, c, g, or t
tctctctggggagcaaatcctgcctgggaagccttcttgggaacaaggctgactccagcaacctgttagatggccaggatagccctggggtgtggatggttgaccacagggcatgtgcctctgtcttgctgtttgtgacctggttctctgaccctcctcatctcatgcttccttccaagaactttctggaagagatgctggctttggagatgatatagggttttctcttcagaccacctgttctgcctagcaaaaagggcctaccttnnnnnnnnnnnnnnnnnnnnnnnnnnnnnnnnnnnnnnnnnnnnnnnnnnttgagacggtgggatggctttaagcccaggggagtttcgaaaantaggcgttggggcaactttgggcgaaaaccccatnttttggccaaaaaaatancaaaatttnagcttggggtnttcatgggttt

SEQ ID NO: 304838 - DNA, 413 bp, Homo Sapiens
cttcatttccaatgtggatttctcctgatctcatgaacaatacatccaactgctaaatcagtggctatctccagttgcatgtcccaccataccacagatttcacctatcattctgtcccctgcttctgcttccatctaagccttgctttcattttttcctgcctttggtatcttgtgagatctcaaaccacttaacttggttaaagttttatttttatgtttctttcacactcaatataaattgggtacctaaaatctcccctttaactcatgggtaggatattaaaggacatgtggcttggctaaatcaggtggaatggaacataaaatggacagggatggctggcttaatatggtgggggctttttttaattaacctctggatttaattatccgggaacaagggtttccaa

SEQ ID NO: 304839 - DNA, 405 bp, Homo Sapiens
  misc_feature (340)..(340): n is a, c, g, or t
tcttgcgttgctataaagaaatatctgagataagttaatttataaagaaaagatttgtattggctcattgttctgcgggcttcacaagaagcatggtgctggcatctgcttggcttctaaggcggcctaggaagcttacaatcatgagcaggcacatcacgtggccaaagcaggaacaagcaagagagagtcagtgggtgtggggagggacatgccacacacttttaaataaccagatctcacaagaactcactatctcaaagacagcagcaagccatgagggatctacccccatgggtcaaaacaactcccaccatgccccaactccagcatgggagantgcattttaactttgaatttggggtgggggttaattttcccatttttttccgggggggctttccc

SEQ ID NO: 304840 - DNA, 366 bp, Homo Sapiens
aatatacttaaaactgaaaatcaaaggatcaataaaaacaataggatatttttaagtacatgaaacagattatgcaaacacacatgaaaaatgcacacttctttttttcgggtgtggaacattaacataattagacatgaattttccttcatccaattgacagttgttcacgggattggaagaatgtggagatacagataccctcatctactctgggaaagggagtaagatatccttaagacaaatttagtaaaaactggcaaggaaattaatgggagcaattttacttctacatatctatttatcctacatatctatttacatgtgttggtagcagttatgctggttacagtattgtttggaagg

SEQ ID NO: 304841 - DNA, 218 bp, Homo Sapiens
  misc_feature (32)..(32): n is a, c, g, or t
  misc_feature (58)..(58): n is a, c, g, or t
  misc_feature (61)..(61): n is a, c, g, or t
  misc_feature (91)..(91): n is a, c, g, or t
  misc_feature (151)..(151): n is a, c, g, or t
  misc_feature (192)..(192): n is a, c, g, or t
  misc_feature (202)..(202): n is a, c, g, or t
taggtttatatataacatccctaaagtgaagngatttaaataggagcaaggagaaatntcntaccttaatgatatgcttaaaataagtttntttcaagcgtgaaacatatgagcataagtctgcatattgaaagagaaattggaatgtctntcattcctttcaaattttatacgtaccatgtggaaggcacnagcacaaaanaattatttcagcacta

SEQ ID NO: 304842 - DNA, 376 bp, Homo Sapiens
  misc_feature (323)..(323): n is a, c, g, or t
gtctacaccccaaagcttgttgggggtgctttaaaattttgaagacagactttggaatcctgataccacaaagcagacttttaattcacatacacgcccagaagcacccaagaactcatgagaggctctttggcctacagcaagttggtgacacggacaagtggacaaggggatggataattcacgaccccataaaagactccaaagaagtcacacttgactgtggccaagggtcttcaacaacatgtctagagactctcagggcctttccaaaagggatcttaggagttccccactttcttccatttcagagggttaggggntttttgttggcccaaggtatttggaactcatggcttttccggggttttcacaa

SEQ ID NO: 304843 - DNA, 224 bp, Homo Sapiens
  misc_feature (65)..(65): n is a, c, g, or t
  misc_feature (77)..(77): n is a, c, g, or t
  misc_feature (148)..(148): n is a, c, g, or t
  misc_feature (171)..(171): n is a, c, g, or t
  misc_feature (182)..(182): n is a, c, g, or t
  misc_feature (187)..(187): n is a, c, g, or t
ccagctagcttgtaatttttaaaattcccaagagtaatcaaggttgcgaacaactggtgtaactnatgaatattttnagactctgtacctgaaaacaaatcaaactaatgtgaatgagatgagactctaaacaaggaagaaactttantaaaaacaagactttaaaacctnttatatcagantaatnattttctagggtttcttgttatcccaaatccagtggg

SEQ ID NO: 304844 - DNA, 245 bp, Homo Sapiens
  misc_feature (32)..(32): n is a, c, g, or t
  misc_feature (91)..(91): n is a, c, g, or t
  misc_feature (158)..(158): n is a, c, g, or t
  misc_feature (176)..(176): n is a, c, g, or t
  misc_feature (178)..(178): n is a, c, g, or t
  misc_feature (180)..(180): n is a, c, g, or t
  misc_feature (220)..(220): n is a, c, g, or t
ttatctctggtctgcttatgcctgagtaattnatgatgtaatctcaacagaggcagtgggcggctgtgtcacaaattcaaggaagcaaggnagagagcagctgtgattgagatggcccgaccttctccacctcaaagcgatggccctgcttaccactnagtttccctgtgtactancntncacttcctttaacgtcctggggggaattggaccatgtttnatatacaagctgcccaagcaggacg

SEQ ID NO: 304845 - DNA, 123 bp, Homo Sapiens
  misc_feature (112)..(112): n is a, c, g, or t
cagggatcataagcttaataggaactcattattatgtggggttttaaatcaatcctgttatgttgtttgcccaagggttactcatgcctcttttgcatctaggttgggaatnttcattggaaa

SEQ ID NO: 304846 - DNA, 219 bp, Homo Sapiens
aggcaagatgctgctgttacaagttttctgttctgaattatgtcttccataggaatgaagcatccacacagtccatccaagcatactgtgaatcaaaacacatgtcatagctggaacgaaagcattaggaccatctaactggattccactggaatgagtctctgtgaaaccatgccgaagtctttgtaaacaaccaccctaaagaaagctacatgaaga

SEQ ID NO: 304847 - DNA, 417 bp, Homo Sapiens
  misc_feature (240)..(240): n is a, c, g, or t
  misc_feature (303)..(303): n is a, c, g, or t
  misc_feature (356)..(356): n is a, c, g, or t
gcatacagggttcacatttataatagcgctcgtctcattctgccatgtattatgattcacagtttacacagtttatcataagtttctaaaagacaggtactgtatcttttaaaaactaacatttatatattgttttacaaagtgttttcacatctactatctcatttctcacaataaatctatgatgttaatacaactgctaactgcattctattggtaagaaactacggcttgggaggngtactaagccaagggccaggaacacaaaatcagggtcctaacactaagtgcccatcctctttngtttctacccggattgctttctttattcaccattcttccggggctcagtgggncaacctggtaggggtcctgctccatattgggggcgggggcttctggggtctcattttgttt

SEQ ID NO: 304848 - DNA, 237 bp, Homo Sapiens
  misc_feature (117)..(117): n is a, c, g, or t
  misc_feature (154)..(154): n is a, c, g, or t
  misc_feature (168)..(168): n is a, c, g, or t
  misc_feature (175)..(175): n is a, c, g, or t
  misc_feature (184)..(184): n is a, c, g, or t
  misc_feature (192)..(192): n is a, c, g, or t
  misc_feature (214)..(214): n is a, c, g, or t
tattgtgacaaatttactgacaaatattttctaatagattttaaccaacaggcagtttttgttttctttactgacagaccgtaaatgtacttctggttggcagcagctgcatcattntaacacaaaagcaaccttggctaacttcagtaccttntgtaacataagaantaaagantaacttgantttaaaanacttttaatatgtttactaacnttaaacttttttcaatgcaggaa

SEQ ID NO: 304849 - DNA, 156 bp, Homo Sapiens
aagatggggtcttgctctgtcacccagggtggacgtgcagtggaaatcatagctcacctgcagccttgaactcatggggtcaagtgatcctcccacctcaatgtcccaagtagctgggactacaggtacgtgcaaccacactcagataggtttttt

SEQ ID NO: 304850 - DNA, 221 bp, Homo Sapiens
  misc_feature (124)..(124): n is a, c, g, or t
tcaactgcttagaaaggggcagaaactgataaaaacagacaccccttgtaccccacactaaagagctgtgttaatattgacgggtatttgcagtgtcccttgcccacggcccatccgccacccntgactggggcacttccctcctgccctctggccgtcagcctcttgcagcaagcatttccatgaacaccaagtcggagattcgtccacgttggtgcctg

SEQ ID NO: 304851 - DNA, 314 bp, Homo Sapiens
  misc_feature (175)..(175): n is a, c, g, or t
  misc_feature (200)..(200): n is a, c, g, or t
  misc_feature (244)..(244): n is a, c, g, or t
  misc_feature (266)..(266): n is a, c, g, or t
  misc_feature (281)..(281): n is a, c, g, or t
  misc_feature (287)..(287): n is a, c, g, or t
tttttattaaaagttaaaaacatacttcaaagtttacacatgcaaatagataattccaccataatatgaacttctaagatcaatgacaagcagatacaaaccggtctggaaaacatgcatcagccacctaacctcccctaagttcctatactcagggttagcctgctcactgggngggaaaccacacacttaccagaatnttcctgctgctgtcattgcccccaaggactggcctgacagaggnacagcccttgccgtaagtgggntggagagaacagttntagggntctctgcttcatcccagcaacacacca

SEQ ID NO: 304852 - DNA, 356 bp, Homo Sapiens
  misc_feature (257)..(257): n is a, c, g, or t
  misc_feature (289)..(289): n is a, c, g, or t
  misc_feature (296)..(296): n is a, c, g, or t
  misc_feature (298)..(298): n is a, c, g, or t
cagtgaaattaattttaaaattcttaatatcaaatacgtatattagcagttttttaagattaaacatagtctatttatttatgaagctgtttggacattttactatttttcaggtgaactatctggattctgcttacctagacaatgtacattggacttttgacaggaattattacactctttatctttcatggtgaaatagttcttattacattagactactggtttaaattttaaaaatattgtaaatgtatganacaacaacatacatgggagagttctataaatnatatatnangccaaagcttggggagataattattgacaatgttactgatgctatacattaggttgga

SEQ ID NO: 304853 - DNA, 168 bp, Homo Sapiens
  misc_feature (70)..(70): n is a, c, g, or t
  misc_feature (117)..(117): n is a, c, g, or t
ttgaacaccttttcaggtcattagaaccaacaattacccaatgatttttatactagtctagcaagatgtntgtaacattcactggctgtgattgctgtgaggtgaaacagtaaattnacagcaattggggccattgttaccttaaagtccaagcttacaaggttcaaa

SEQ ID NO: 304854 - DNA, 306 bp, Homo Sapiens
  misc_feature (258)..(258): n is a, c, g, or t
tgacactaattttggcctttggacaatttggcttaggacttagaagggcaggacctgggtccaagaccgttgtgctgggtgaggtgctgcagtaggggatgtgtgcacccgggagtgcagcctcctgaccacacagacaggatgcaggaagcatgctgttctccgaggcacggagcctcactcgtgtccgcctgccacagtgtaccgcaagcctgacagtcacggatggcactctcaccgtgtgcctcgccgtggctnggggtttctgtgcatcgcgttcaccggccagccttagggtcaggtcct

SEQ ID NO: 304855 - DNA, 401 bp, Homo Sapiens
  misc_feature (56)..(64): n is a, c, g, or t
  misc_feature (342)..(342): n is a, c, g, or t
  misc_feature (376)..(376): n is a, c, g, or t
  misc_feature (382)..(382): n is a, c, g, or t
catacattcagtgcgggggatggaacacaaatgtcaatgccagtgtctccacacannnnnnnnnaactcctttttagtgtctgacatgggcctggcatccaggaggcaatgggaatacgaagatgaatgaggcctgggctcgtgcagtgaaggtgaccctctggatggtcctgaaggcttttgaatgatgtaaaattttgagtgactttttgagacgggagtaattgtataaacacaagtttggccagttgattctaatgttttctactgcttaaaatatgggaggtaaattattaagggctattagcgaattgtgtttataggggattgggaaatgggccnattaccatgttcagcttctgtgtttaaaaaatgncttgtnccttttgttcaacggaaaa

SEQ ID NO: 304856 - DNA, 405 bp, Homo Sapiens
  misc_feature (315)..(315): n is a, c, g, or t
  misc_feature (387)..(387): n is a, c, g, or t
ttttatttgccaaaataaattggtttgcctcaaaccacacactaggtgctaagtatcttcaaagcaaaattcaatgaaacttgaaagtgctataggactgaggttgtaagtgacagaaacccaattcagactaagcagaaagagagctttgtctccaggatccgagggtgcattctggaggcccgagctaggatgtggagcaagggatgtggctgagcccacagtgcagctggaaccaggggatgcaaatgccgccagggcctctctgtttctcacctctggcttccatccgcatcttctggcctcctccagggncaaattttggtggaacagtggactgtgtcccattcttttatatctccatcatttaaattatggggaagagtncctgcgtgcaaagttccc

SEQ ID NO: 304857 - DNA, 178 bp, Homo Sapiens
  misc_feature (34)..(34): n is a, c, g, or t
caattagctattatggaattttgagaaatacatngacaagagagaagccctcataatttcactgcctatgtgcaacctctgttagcaatttgctgttttgaaaaggagtagcacttctatataggggctgtaagagtcagacccatttcaagaaacggggttttattgagccaggacc

SEQ ID NO: 304858 - DNA, 245 bp, Homo Sapiens
  misc_feature (182)..(182): n is a, c, g, or t
  misc_feature (190)..(190): n is a, c, g, or t
gcaacttcatccatcaagttaagaacagaatgtctgtcacaggccatgcatcctgactctcagtgttccttacccaaccataagttttctcaggtactttctccagcagttaatgctgttacttgagctgaaagaataaatgcctgatgtactgtaggaatttaatccagcacagggttttngatgattncccttaaagccgacccaaataggctcatgatggcaagggttgcttaaggcactgc

SEQ ID NO: 304859 - DNA, 384 bp, Homo Sapiens
  misc_feature (203)..(240): n is a, c, g, or t
  misc_feature (363)..(363): n is a, c, g, or t
gtttaattcagtatagatattaggtcaaaaatggattaaattattgcttaattttaaactagttccttggagctcagaatgctgtcgtaattgatagctgggtgctcgggctgacccacagatcatagccttcatagagtgaatacgtcacctatagcagcccccatcccttagccgtgatggtggagagcctctgtcactcnnnnnnnnnnnnnnnnnnnnnnnnnnnnnnnnnnnnnngtcattcagctagcaactcacagaactctttaagggcaatacttctcaaactatctttgggcaaaggacctggatattccaagtttctagtctgttataggactgggcattttttgtggcgtncaaattgtatggcatacattt

SEQ ID NO: 304860 - DNA, 444 bp, Homo Sapiens
  misc_feature (308)..(308): n is a, c, g, or t
  misc_feature (426)..(426): n is a, c, g, or t
accgttagtccccccatccatctagaagtccattttgaaagatttttgtaaattcttttaacactgatgtttcagcctcgtctttgtttcagttaagctcaatggcgaacatgggaaccacctttcgccttccctgggggagaaaccctcttggctgatggcttttccccggaattatcaaacagccaccgggtgactttctggcttccagatccatctgcctgagacccccgaactcctctcctcccaagcagaggcgagtgagtggcattagctcccggacccattcccggtcctagctgggcatnggggctgacggagatgaccaagccttggtcttgttctctagcagctttccacagacttgggttcgtgggctttccttattatccattggggaacaaaacagccttggggttttattancaaaacagccttggggtt

SEQ ID NO: 304861 - DNA, 507 bp, Homo Sapiens
  misc_feature (48)..(48): n is a, c, g, or t
  misc_feature (247)..(247): n is a, c, g, or t
  misc_feature (359)..(359): n is a, c, g, or t
  misc_feature (367)..(367): n is a, c, g, or t
  misc_feature (378)..(378): n is a, c, g, or t
  misc_feature (393)..(393): n is a, c, g, or t
  misc_feature (416)..(416): n is a, c, g, or t
  misc_feature (434)..(434): n is a, c, g, or t
  misc_feature (446)..(446): n is a, c, g, or t
  misc_feature (494)..(494): n is a, c, g, or t
tgtaattttttagtagagatagggttttccacgttgcccaggatggtntcaaactcctggacgtcaagcaatccacctgcctcggctcccagattgctgggattacaggcatgagcacccatgcctggctttttctagtttcttgacataaaagctgagggcattgatttgagacttttaaaatctacgcattttaaaagaaaagcattttattgtcctgtatatttccatgtaagtattgcttcanagcattacatgaattttgaaatgttattgttttcatattcatgaagttcaaaatactaatgtctcttaatttcccctttgacctataagttactttgggagtgtgttatttngctcccanttatttagggnattttttccaggggntctttttgctgttggattttccnaattaatgtttccattantggccaagaggntttttgaaatgcttttacaataaataattttacttgtaaaccttgtgnccaatgaccccag

SEQ ID NO: 304862 - DNA, 365 bp, Homo Sapiens
  misc_feature (121)..(121): n is a, c, g, or t
  misc_feature (124)..(124): n is a, c, g, or t
  misc_feature (184)..(184): n is a, c, g, or t
  misc_feature (217)..(217): n is a, c, g, or t
ttctggaaaagccactgttcagtgggttcctgctgctgagttgaaaacttaggggaggcagctgctgctgtgataaacacgagagccaccgtcgccgggttgtgcttagctctaggaactnctngcttcacagagctgaatgctaaatatggcatttgagaaactccagtcagcagcagatgtnaaaagcatgtttcaagtccccatttgtgccctnggtattcacagagcagtcagcctgtcctcacataggtacatgtgggaggagttggagatcagaacttcacggaccacagtcaacaaacctttcaggaaatacggagttgccccttcattttctctttggagcctggggaaaaccaggt

SEQ ID NO: 304863 - DNA, 154 bp, Homo Sapiens
gagaccctgacacgcgtataaacatgcactcacacatgaactcatgcaaatacagatgcagtcatacatggatatacgcacacgccatctcacccacacgcgcgcacacgtgcccttcacccacacacatgcgcccttcacccacacacatgcg

SEQ ID NO: 304864 - DNA, 397 bp, Homo Sapiens
  misc_feature (51)..(51): n is a, c, g, or t
  misc_feature (68)..(68): n is a, c, g, or t
  misc_feature (143)..(143): n is a, c, g, or t
  misc_feature (145)..(145): n is a, c, g, or t
  misc_feature (305)..(305): n is a, c, g, or t
  misc_feature (320)..(320): n is a, c, g, or t
  misc_feature (332)..(332): n is a, c, g, or t
  misc_feature (345)..(345): n is a, c, g, or t
  misc_feature (352)..(352): n is a, c, g, or t
ggcacgaggagggacattcaacaaacaaaagaattccaacatccatccaantagcatttaagaactgnccccactcccttgcctttagatttttccttcagtgtctgtctcaaatgatggggtcagactgttcattatgtctnanttctcctccccagctccattgcctgtatccattccttccttcttcttagagttggtggtggccagactagaccaggggagggtgctgctgacaatgacattgtaattgtaggaaatcgtgtgcctggacacaggtctaagggactttccaaagtattagntcagttcagtcagtncctcacacaggnttgtagggtactngtccatnaactcccttttcataggtttgaacggaaacccaggggacccaagg

SEQ ID NO: 304865 - DNA, 367 bp, Homo Sapiens
  misc_feature (11)..(11): n is a, c, g, or t
  misc_feature (73)..(73): n is a, c, g, or t
  misc_feature (82)..(82): n is a, c, g, or t
  misc_feature (101)..(101): n is a, c, g, or t
  misc_feature (129)..(129): n is a, c, g, or t
  misc_feature (143)..(143): n is a, c, g, or t
  misc_feature (188)..(188): n is a, c, g, or t
  misc_feature (212)..(212): n is a, c, g, or t
  misc_feature (217)..(217): n is a, c, g, or t
  misc_feature (258)..(258): n is a, c, g, or t
  misc_feature (346)..(346): n is a, c, g, or t
  misc_feature (351)..(351): n is a, c, g, or t
ggcaggtaggngttactcttggcattatgatctaagagtcgtagattagagtttgaagacataatgagtagtnttattaaanatagctattatcattctgnatttaggtgcaatattcagaattcaganttggtaataacttnctttgagcactgtttcagcagcttttatcctattcatatgactgncagacatattccagggaactattntactnagccttgttgattgtccctgcattaaataaaatccacaggngcaaaattgtaaagtaggccttttagttcaatttgggcatctttttttcccgggggtgatattctcagtcccagggggtttggaattnccagncatccttggaatacca

SEQ ID NO: 304866 - DNA, 429 bp, Homo Sapiens
  misc_feature (35)..(35): n is a, c, g, or t
  misc_feature (314)..(314): n is a, c, g, or t
  misc_feature (334)..(334): n is a, c, g, or t
  misc_feature (354)..(354): n is a, c, g, or t
  misc_feature (381)..(381): n is a, c, g, or t
  misc_feature (419)..(419): n is a, c, g, or t
agaattttaatttccccctgtgagtattgtgagtnggggtaggggctctggggtctgttttgctctgacaccaattttactcacttaaatttgtctttattcatagagatttttgttcaccaagaatgggtgctgatggtagcatgtaggggtaaagtgggtaatagaccagtgaagttgtggattaaaaagcatatatcctcaagacagttggtgggcaacaccatttctatataaggaaaactgtatctcattactgttagggagtttgttaatgggaattaaggaaacacagtctattcgttgtgctaccnattaaacttctggaagtccntctgtttatgtataggtgcntatccacatgttaaaggtccccaactngaccaaaattaactttaccaagggaactactttttttncttccactag

SEQ ID NO: 304867 - DNA, 265 bp, Homo Sapiens
  misc_feature (224)..(224): n is a, c, g, or t
actgtggggttattagtacatatatcaaattcatgaggctcctattcctgtatattgttacagagctgttcttgtatattgatgtttaatgatatggggccgaattgttattcaaataattacagcccattcctgattatttagatgctgattaactagtcaatgacttattccctttgacaaaatttcccaccctctgggctttcctttgatgttaatgaggnaaggagggatccagttttcatcccatttgggcaaggttggg

SEQ ID NO: 304868 - DNA, 391 bp, Homo Sapiens
  misc_feature (48)..(48): n is a, c, g, or t
  misc_feature (56)..(56): n is a, c, g, or t
  misc_feature (59)..(59): n is a, c, g, or t
  misc_feature (118)..(118): n is a, c, g, or t
  misc_feature (132)..(132): n is a, c, g, or t
  misc_feature (165)..(165): n is a, c, g, or t
  misc_feature (181)..(181): n is a, c, g, or t
  misc_feature (200)..(200): n is a, c, g, or t
  misc_feature (255)..(255): n is a, c, g, or t
  misc_feature (336)..(336): n is a, c, g, or t
  misc_feature (353)..(353): n is a, c, g, or t
  misc_feature (361)..(361): n is a, c, g, or t
ggaatgcagtggtcaatattgactctgtgcagccttcgcctcctgggntcaaacanttntcacacctcagcctccagagtagtggggactacagacacgtgccaccatgcctgcctantttttgcatttttntggggggtgggtagagatggggtttcaccactntttcttaagcagcatntaagggagcttcatatttntttgtctcagtcccatcatgatgtaggtcaaaagcaagttacattcagctagctntatgacaaagatgcctccttttgaacagtaaggattttagggctttgttgttttatacactcagggcaacttgaaaagggntaaaaggaaagggtggnggaaaagntttaggtaaaagtgaggccccaaattaatt

SEQ ID NO: 304869 - DNA, 272 bp, Homo Sapiens
  misc_feature (207)..(207): n is a, c, g, or t
  misc_feature (235)..(235): n is a, c, g, or t
taaaatacaccagaaattacgtggtcacactcgtgcagtgaaagaaggctttggcagtagcataagacattaagcagaagtaggaaatgcagtgaggaagaagttgtaatgttttcaacagctgccactatggatctaggatgagagctttccacatgttgttaagaatgagagacagattactccaaggtagggcctgcctgggtngccctccctgttagaaggtattcttccngctcccttgacatcaggcttattagccatgtttctgg

SEQ ID NO: 304870 - DNA, 293 bp, Homo Sapiens
  misc_feature (14)..(14): n is a, c, g, or t
atagtcttgttttnactgtgatcggtagaagtatgttgtaaaatctcaaagctatgtaaatatgtacagcaagcagtatgatttatggaaagattactcagattcatgagacctctttgttcttgtctcatttctactaataacaacctgagtgatttttttgaacaaatgccttaaccttctggttaaggttctctgatctgtctaatctggaagttgatgtttacgatctgtctgtttgggccagatgagggaatctggggctctcaaatgtgttgcttaaaccacagaaa

SEQ ID NO: 304871 - DNA, 408 bp, Homo Sapiens
  misc_feature (368)..(368): n is a, c, g, or t
  misc_feature (380)..(380): n is a, c, g, or t
  misc_feature (395)..(395): n is a, c, g, or t
aaccttcaaagtgtttgttattttgattagtgtttatacattcagacagattagtgaggcaataaataggagtaaatgctaaaggacagctaatcaagtgagtgagaagcaaatagccacttactatagactacggttataattcaaaagcatgtgaagcattatcattttgatgtagtgtttttagaccaaacgttgtaactagaacaaacaaatagttacacactagcacactgggaggatatgggtcattaaggaccaaaggttttctaattagggacggtaatctttcttcagagggccacaggcagttttttagtgcccctttattggaaaatgtagtgccacctttttaaaaagtccaggcnccaaaccttttntttgtaccggggtcntagggtccgagga

SEQ ID NO: 304872 - DNA, 407 bp, Homo Sapiens
  misc_feature (390)..(390): n is a, c, g, or t
tttaagacaggtttaattggtcctgcctggaaaactgaaacataaaacaaagtcactgatttctctgactgtgcagatctcttggatgtgctctttaaattcctctgcttctgtatctcattgctgaggacatttgcaagaaaacataatatttattgtgtttgagtacatctagtcttgctgctttttcttttcctacatcataattgtctcttttcaggcagaggtggacagttaagcaagttctgcacgtacccaaataaactctgaacagattgattccctctgcaccccagtaagggtgtgctccactgtgttcccttgtccccagggcccagatttcttcccaaagtaaactggggccactggaactgtggcccattagtgagncaaaagattgggcatct

SEQ ID NO: 304873 - DNA, 298 bp, Homo Sapiens
  misc_feature (180)..(180): n is a, c, g, or t
  misc_feature (188)..(188): n is a, c, g, or t
  misc_feature (283)..(283): n is a, c, g, or t
ttcttatgttttgtacagttattgggagcatgcatattatttgaaaatattaataacctgaagttgttttccttgtttattcttcatctggtgccatagtcttcactcatttttggggggacaatgaggatgcaaatagaagtggtagagtaacgcaacctcactctgcaggcagctttngacacagngcatcttgaaaaaggctcgcactggaggaggtagggtcatctctggaggacatttgggcttcctcatggcacacagattattctggggcctgccnaaatgccatgatgcc

SEQ ID NO: 304874 - DNA, 117 bp, Homo Sapiens
tcagattgccaaatggagtctggggaggctatttgggctttattttggaagggcctcaaagtaggggcttattcttttattattgctgctgttttgtttcagttttcaagcaggtct

SEQ ID NO: 304875 - DNA, 416 bp, Homo Sapiens
  misc_feature (260)..(260): n is a, c, g, or t
  misc_feature (361)..(361): n is a, c, g, or t
  misc_feature (385)..(385): n is a, c, g, or t
tttttcagatcaaacaccaaatctagtgtctctcagctaaaatgatccattaattattgacattcaaaccacagtgttttcaaaggttctaaggttaggaaagagccagaaatctcgttattcacaattcccaaccttctaaataaacttggtggtgactttcagacaacaaatttattctattatttaaatgaatacctattattttgtggggccttctacaggggccagtggagcagaagggacccaggcctgggganttacacagattcactttgaatcctgggctgtgccattttcctcacagctttactttaacctctctggggcctcagtttttcctacttcaccaaaggggggngataatccctatggttaaatgttngatggggaattaccagtggggtttaaaaaaa

SEQ ID NO: 304876 - DNA, 167 bp, Homo Sapiens
  misc_feature (124)..(124): n is a, c, g, or t
taaaagcttctatacagagaaaatcacataaaaaagataaatgacaaaaatatttgcaaatacacattcttaatatacaagacaaaaaagagccaacaactattaggcaggataattcacaggnggattgttaggtgtttccaaccttttttccccaatttaaaagg

SEQ ID NO: 304877 - DNA, 538 bp, Homo Sapiens
  misc_feature (125)..(125): n is a, c, g, or t
  misc_feature (390)..(390): n is a, c, g, or t
  misc_feature (465)..(465): n is a, c, g, or t
  misc_feature (483)..(483): n is a, c, g, or t
  misc_feature (502)..(502): n is a, c, g, or t
  misc_feature (509)..(509): n is a, c, g, or t
  misc_feature (526)..(526): n is a, c, g, or t
ttgctttctctgtttttttccatctcctctttcatctaatcattccatcattttaaaaatagttactgagcccataagtcaacgaggataaaacagtgaaacagacacgcaccacttcagtgggntttccatctagtgaattcttaagtcactcactttgcatttcaactctaagccacaggtacaacactccttctgttcgggcaccaggcacatgacatctgggtaactctgctcagctctggatgccacatttcccaggggacaatgggaaaccagagcaccttcactaggaatgggtgtctgggaaatgggtatcaaatactcagggatccaattgggagggaagccaggggctggttttacacagaggaaggggaaggaaaaatnttaaacatgggggaaagccttcccgggggagccaggggaacttccccagtgcagagcttgttccgaccccttttnccccacagcggtcccctngacattgaggagcgcactncacattngggggaaccttgggaanttttttaattgt

SEQ ID NO: 304878 - DNA, 447 bp, Homo Sapiens
  misc_feature (188)..(188): n is a, c, g, or t
  misc_feature (231)..(231): n is a, c, g, or t
  misc_feature (418)..(418): n is a, c, g, or t
  misc_feature (429)..(429): n is a, c, g, or t
tttttaaaggtgggggcggcaagggacagacagcagagggcagatgctgacagaggggacacttcaaggcagcaaggaaatttggaaggcaagggggcaggatgacagcacagaccaccaccaccactgcctgggcatcaacctgggccacgtcaggtgctcaggggtgcgggcgccacccgtgactntcacaacctcactaagtctgagcacacggcctagccctggcgnaggatggatcccggacacgttctttctggttcttgcttcttctagggctcagcaggacagcacacagccttaacccaaggtccttctccatcctgggccagtttgctccttagcacgtagggaacttgcatgttcacctttcattatgtttgcctggggcacctttgtttcagcgccttggatcccnccaattaagtnttcagggacttggatttt

SEQ ID NO: 304879 - DNA, 389 bp, Homo Sapiens
  misc_feature (280)..(280): n is a, c, g, or t
  misc_feature (318)..(318): n is a, c, g, or t
  misc_feature (337)..(337): n is a, c, g, or t
  misc_feature (347)..(347): n is a, c, g, or t
  misc_feature (359)..(359): n is a, c, g, or t
gttcaatagatatttatagagttaaatgcactaaacttaggaggcggaagttgttttttttggaggcctttgccatttcaccccctccttcccgttccaccttctaggtttctcattccctctgcttcttctcttttgctggctctggcctgcagccctcttgcccctggggtaaagggctcaaaacgccagacagctctgccgccatggggaggagaccctgactgagaagccagggccccggctccagggtcaccagtaccttgggcaggccggggtntcgctggggcttggggtgactccaccagggcatgggangggggtggggtactcccanctgggctcgncaaccctttcgntttcttgccttcgcaaaggcaacctggggc

SEQ ID NO: 304880 - DNA, 347 bp, Homo Sapiens
  misc_feature (261)..(261): n is a, c, g, or t
tatccacatgaagtttattctaagatagtaaagctgatccacagaccactacactttctattatatgtgagattagaaataaaagattcattgatgggaatctttaggaatagggataacttctccctgcaagacaaaggagtagtgcactcccttcattctaaactgagtgaggagggctccaatagaaccatttgtagatatttagtgttcccatgtgagggagaggcattacattcattcagcattatattctctagnatagagacttggtaagctcaggaaatgtacagacccatctccatctggccaccaggggtggaaatgtgggcatgggaggattcttg

SEQ ID NO: 304881 - DNA, 416 bp, Homo Sapiens
  misc_feature (256)..(256): n is a, c, g, or t
  misc_feature (337)..(337): n is a, c, g, or t
  misc_feature (349)..(349): n is a, c, g, or t
  misc_feature (391)..(391): n is a, c, g, or t
  misc_feature (396)..(396): n is a, c, g, or t
ttccaccttattaactgaggaaaatggatgcctctcaaatattttctaagattaggcaacaaaaaagaagtcagaagaagctaaatcaggatggtaagatggatgcctaataatttcccattgaaactctcacaaaattcttttttgatgacagaaatgagcaggagcattgtcatggtggagaactctctggtgaagctctcctggggtgcttttctgctaaagctttggctttctcaaaatactctcataatangttgatattattgttctttggctttctgggaaagtcagccaagcaaaatgctttgaggcatccccaaaaaactgtttaccnatgggccggggnacagtgggctcatgccctcttaatccccagcactttgggggngactnaggggcaggtgggatccatg

SEQ ID NO: 304882 - DNA, 283 bp, Homo Sapiens
  misc_feature (98)..(217): n is a, c, g, or t
  misc_feature (219)..(227): n is a, c, g, or t
taaaacaatattcatgttagaacacgttaaaactctatttcttccgtgcaaagtttagaactttaaaggtaattctgaaaatttgtttatgggggaannnnnnnnnnnnnnnnnnnnnnnnnnnnnnnnnnnnnnnnnnnnnnnnnnnnnnnnnnnnnnnnnnnnnnnnnnnnnnnnnnnnnnnnnnnnnnnnnnnnnnnnnnnnnnnnnnnnnnnncnnnnnnnnnccatttaaaattttctcagtttctcctaggtgtgcagtgcgctctcattgtcaggg

SEQ ID NO: 304883 - DNA, 174 bp, Homo Sapiens
  misc_feature (87)..(87): n is a, c, g, or t
  misc_feature (138)..(138): n is a, c, g, or t
  misc_feature (160)..(160): n is a, c, g, or t
ggcgtacacccaacggcccagcaaaaaactgggaaccttaaaaaaatgggcaaatttcaaaatttaacactcccaagtttcaggggnccaactaccaaggtttcataatggattttatttttgaggggcttgacttgncaaaattttacttttctggatnttaattaaaggggc

SEQ ID NO: 304884 - DNA, 402 bp, Homo Sapiens
  misc_feature (37)..(37): n is a, c, g, or t
  misc_feature (39)..(39): n is a, c, g, or t
  misc_feature (86)..(86): n is a, c, g, or t
  misc_feature (159)..(159): n is a, c, g, or t
  misc_feature (178)..(178): n is a, c, g, or t
  misc_feature (208)..(208): n is a, c, g, or t
  misc_feature (238)..(238): n is a, c, g, or t
  misc_feature (278)..(278): n is a, c, g, or t
  misc_feature (302)..(302): n is a, c, g, or t
  misc_feature (309)..(309): n is a, c, g, or t
  misc_feature (331)..(331): n is a, c, g, or t
  misc_feature (344)..(344): n is a, c, g, or t
  misc_feature (362)..(362): n is a, c, g, or t
ggcacgagctggtctggttctgccatggctaatcctncnctctccaaggatcccctgttttctcttgcagatttgctaaatgaccncgcagtctgtcatctgcggtgttcgcgtgaccctcagcgccctccccacccggcagccctttcccgccgaatnggtggcggctggattattnagggagtggagggtcgcttagggcacgggnacgagaggcgagggcgagacgtggctaatngggatcaagagtcagaatggacccgccaaactttgccccnagccagaacgggctcccttacccncgttctngacccatgggtccttcaccttncagggctggtgtncctcatttttacagtggnaggtaggccgagaccaaggttcacacagagaagcaagggg

SEQ ID NO: 304885 - DNA, 277 bp, Homo Sapiens
  misc_feature (220)..(220): n is a, c, g, or t
  misc_feature (232)..(232): n is a, c, g, or t
  misc_feature (243)..(243): n is a, c, g, or t
  misc_feature (260)..(260): n is a, c, g, or t
ctcccaaacacctcattttaatactttcatattaattccgtgattcttaaccctgacccacactttagaatccctggggagttctttaaaaaagctactgattatattggccccaccctaaaagtaactggatcaggatatgggacagagttgggaaattcgctggcgtcggggattgctttttgttagttagggatgggcagctggctttttatgggtngcctttgtgttngatttttgctnacatggaaatatggatnctgttcagggaaaggga

SEQ ID NO: 304886 - DNA, 118 bp, Homo Sapiens
tccaatttaccaatctcagcagcacttaaaacagtgcttcatctgctgttttcaacccaaccaaactattaaggattttcagtttcccttgggtaagggccctggaatttaggcaagg

SEQ ID NO: 304887 - DNA, 245 bp, Homo Sapiens
  misc_feature (151)..(151): n is a, c, g, or t
  misc_feature (184)..(184): n is a, c, g, or t
gccctcttcatgcaaataacatcaggcagaacagagatttattatgtgcaaatgacagtaacctttataaaatctagaaaataatttttccccaatttcccctcgaatccaaacattcttctgcagtctgagtggggttgataggctgccnagatgttgaagggcctcagtgggaagggacttngctaacagttcccagtgccagtgttctctatagcgtgtcttgttgagcactggtgccctgg

SEQ ID NO: 304888 - DNA, 412 bp, Homo Sapiens
  misc_feature (86)..(357): n is a, c, g, or t
agctggatttagggagaggcataagaaaggatagggttatcatggacttggaaaatgggagttttttactgatccatgtgtgggtnnnnnnnnnnnnnnnnnnnnnnnnnnnnnnnnnnnnnnnnnnnnnnnnnnnnnnnnnnnnnnnnnnnnnnnnnnnnnnnnnnnnnnnnnnnnnnnnnnnnnnnnnnnnnnnnnnnnnnnnnnnnnnnnnnnnnnnnnnnnnnnnnnnnnnnnnnnnnnnnnnnnnnnnnnnnnnnnnnnnnnnnnnnnnnnnnnnnnnnnnnnnnnnnnnnnnnnnnnnnnnnnnnnnnnnnnnnnnnnnnnnnnnnnnnnnnnnnnnnnnnnnnnnnnnnncagcctggggcaaacagagttgaggaccctgttttcaaaaattaaaattagtttt

SEQ ID NO: 304889 - DNA, 457 bp, Homo Sapiens
  misc_feature (78)..(78): n is a, c, g, or t
  misc_feature (102)..(102): n is a, c, g, or t
  misc_feature (169)..(169): n is a, c, g, or t
  misc_feature (223)..(223): n is a, c, g, or t
  misc_feature (269)..(269): n is a, c, g, or t
  misc_feature (340)..(340): n is a, c, g, or t
  misc_feature (364)..(364): n is a, c, g, or t
  misc_feature (431)..(431): n is a, c, g, or t
ttttttagctcaaaacatcaggcttttaacctgtgcatgatcttccctatatctattctcatagtatagacaccaggngccattgataccttgcacattggnttctctctacataaagctattgtggagacaattttgtgtgatgcttagtttaggtattgtctttggntgataatttttactattgaattaacgcaatggttacagacaacaaaccctgggnaatggtcaaaatcggtttgtagatagggtaatcaatcatcctgggntttcccagactcttccttcttatctgtaaggatttgacttcataagctctgttgggcacatcccataaagncacaaaaggaaggctctggaaggnaaaaggtaccaattatggaagggccaaagggccaatttactccattaatacgggcctaggctcctgnggcggctccttctaattctctagggg

SEQ ID NO: 304890 - DNA, 416 bp, Homo Sapiens
  misc_feature (16)..(16): n is a, c, g, or t
  misc_feature (271)..(271): n is a, c, g, or t
  misc_feature (395)..(395): n is a, c, g, or t
ctgtcagctatgatangtacttcaggttttttaaaggtaactgcattccctattgcaaacaggataatataaaacttttttcagctgcctcttgtgaaattttgttccatattttagattagagacctagcttagcagtacctttagtaagggtaaataactttgcaaatcatggcacaactccctaggtgggactgtactatggatcagtcattctcatgggaagtagaaggtagctttaacccctacgggacaatacatgtgggaaatntctgggagacagtcttgggttgtcactgtcatggggcagggaatgaatgggcagagggcaagggatgcttgctacacatccccaccgtggcacagcaaggacccccacaaccaaggactttctnggcccccaaattttcaacagc

SEQ ID NO: 304891 - DNA, 391 bp, Homo Sapiens
  misc_feature (176)..(176): n is a, c, g, or t
  misc_feature (269)..(351): n is a, c, g, or t
  misc_feature (359)..(359): n is a, c, g, or t
  misc_feature (376)..(376): n is a, c, g, or t
ggccaggcacttgaactttctgctatcccccgccatcagtctcagcttaaggaaacatacgttctggttgggaattattcctttaccccaatgcctaaacatttataaattcttaaccgaagagtttatgcttggttttaaatatattaaatagtttagtttaatggagctctttngagcattagttcgaataatccccatgtcagaaaaccccagggatgcctccacatgggaagtgctacctataccagtgctagggaattcaatcnnnnnnnnnnnnnnnnnnnnnnnnnnnnnnnnnnnnnnnnnnnnnnnnnnnnnnnnnnnnnnnnnnnnnnnnnnnnnnnnnnngtaatttnttcagtggtataatatnttttatacacagggg

SEQ ID NO: 304892 - DNA, 472 bp, Homo Sapiens
  misc_feature (384)..(384): n is a, c, g, or t
  misc_feature (396)..(396): n is a, c, g, or t
  misc_feature (411)..(411): n is a, c, g, or t
  misc_feature (416)..(416): n is a, c, g, or t
  misc_feature (422)..(422): n is a, c, g, or t
  misc_feature (428)..(428): n is a, c, g, or t
  misc_feature (433)..(433): n is a, c, g, or t
  misc_feature (445)..(445): n is a, c, g, or t
cacggacaaccacaggtaagaactggcattatgtgaggtcgtgaaactgctcagcctcaacaatttctccttgtcactacatagggtcccagtgcacagggcttgggctttgtcttagtcccttttcctaagtcatgagtggatccctggcctgcacattgttcctttatcactgtccttatgacatttctgttttctgtgctgccttgttccagcctgtccctctgtacaggaaatgggaattttgtcttatgagtcatcttgggtgtttgagccttttctcctacgggaacacttcccagtgctaaccgttgggcttgcctcactcctgaggcaatcagccagtttcccggaattttctctgtggttctggaattggccccntaggattgggtnctctaggtatgggantaaantttggnaatttnggganccgaggattgtngggcataggcaaccctcttaaaacaat

SEQ ID NO: 304893 - DNA, 480 bp, Homo Sapiens
  misc_feature (307)..(307): n is a, c, g, or t
  misc_feature (318)..(318): n is a, c, g, or t
  misc_feature (346)..(346): n is a, c, g, or t
  misc_feature (354)..(362): n is a, c, g, or t
  misc_feature (370)..(370): n is a, c, g, or t
  misc_feature (399)..(399): n is a, c, g, or t
  misc_feature (407)..(407): n is a, c, g, or t
  misc_feature (417)..(417): n is a, c, g, or t
  misc_feature (424)..(424): n is a, c, g, or t
  misc_feature (429)..(429): n is a, c, g, or t
  misc_feature (440)..(440): n is a, c, g, or t
  misc_feature (445)..(445): n is a, c, g, or t
  misc_feature (455)..(455): n is a, c, g, or t
caaggtttgagaacactggatgcaagcattttccatacagagaagagaggaaggagcattgcacaccattgaaaaagtatcccccaaatcagaggaaaggtcatttgtagcattctgtgaagtttgtcatggcttgaacttaaagtaagttgaacatagtaagctgactatactaggaatttcccccaaattttgctcagatccatgtatttttattgttccggaaagcttaatctttcccttttagggtcattgggatcattaattacatttaaaggaaaaagctttgtgtttgggttgtatttantttatttttcnggaaaaatttaaattatggaagttggcnggaacacnnnnnnnnnattaattngggatgtttattaactgggaggtttgccntaggaaangcctgggggnggacctnaaggnttgggggaccnccccnatttggcccntttaaaaaagggcccggttttaaat

SEQ ID NO: 304894 - DNA, 119 bp, Homo Sapiens
  misc_feature (11)..(11): n is a, c, g, or t
atttcggcacnagaagacaaggtaccgcttttcgaagtgtcatagttttcacagtacaatggcctcttagctgggatgtgaaggatacacaggaattcatgaagtcttctttagtaaag

SEQ ID NO: 304895 - DNA, 402 bp, Homo Sapiens
  misc_feature (173)..(173): n is a, c, g, or t
  misc_feature (230)..(263): n is a, c, g, or t
  misc_feature (317)..(317): n is a, c, g, or t
  misc_feature (345)..(345): n is a, c, g, or t
  misc_feature (353)..(353): n is a, c, g, or t
  misc_feature (363)..(363): n is a, c, g, or t
  misc_feature (377)..(377): n is a, c, g, or t
ttgatattcttgatttgaagaatttgattttagacaacagtgtatttgaggcaatggatgggatattcatgcaggcacccagtttcaatttgtccctagagcctgaaaaacagatcaaggtcagagcctaaaaagtgtagagttcttccatattgttgaagccatgaaaatgntaaagcttcaataaggtgaacttatagtggtaaaaacagaaggctatgaactcaacnnnnnnnnnnnnnnnnnnnnnnnnnnnnnnnnnnaaagtagtataattaaggtaaggaaattaaaacagttcaaaagtatataaaggngagggcaactactatctttcatttttcnttcttccnggaagtgttnctttggcaggtacntggcacctttttcccttttttatcc

SEQ ID NO: 304896 - DNA, 158 bp, Homo Sapiens
  misc_feature (13)..(13): n is a, c, g, or t
tgagttgtaaganttctttttatattctggatactagtcacttgtcagatatatgatttgcaaatatttttctcccatgctatatgtcgtctttttactttcttggtagtgacctttgaagcagaaaaaggttttaattttgattgagtccaacttgt

SEQ ID NO: 304897 - DNA, 183 bp, Homo Sapiens
atttattaaaaaacgggcacttatttctaacagttctggaggcaggagtctaagatcaagacaccagcagattgggtgtctgatgagagcctgctgtttacctccaagatggcaccttgttgctacattctctagaggggaggaactctgtgccttcttcatctggcaaagggatagaagggc

SEQ ID NO: 304898 - DNA, 411 bp, Homo Sapiens
  misc_feature (43)..(43): n is a, c, g, or t
  misc_feature (378)..(378): n is a, c, g, or t
agcaatgttagctggcacaaattatgccagcaagtcctctggntctcccttcatcccacctttactaagtattgcctggttgccaggaactgtgctggattctaggaatgtctccaaagcctggcatgaaacccactggcctccctctggagaggctgtcacaggcctctgggcatcctttaatctctgcagccacagtgcctgatgcaatggctgatcctgcattagtgagcagtgtttaggaaatgggtttatgaataaatcacatatgaataaacaagggatgagtgggcagctggatagatggacagatggatggatgtacaaataggagtatattatgttggcacatacattttaaggcctcctctgggagtnattctctcatagtggcctttaattttattaggt

SEQ ID NO: 304899 - DNA, 206 bp, Homo Sapiens
ttcagcgaaatgagaaattgatcacattattgcgtatagggggagcctgattcattgcaatcagcttggaattggcagttttgactgtaggcaatttggagacattacttatgcctgaataggcagggaaggtcatttatagcttgttaacacctttccaacctccagcatggccagctccgactcccctaccctatttgccctgg

SEQ ID NO: 304900 - DNA, 467 bp, Homo Sapiens
  misc_feature (118)..(118): n is a, c, g, or t
  misc_feature (137)..(156): n is a, c, g, or t
  misc_feature (158)..(253): n is a, c, g, or t
gtcttgctgtgttgccaaggctgaggtgcagtggtcaatcagagctcactgcacccttgccctcctgggtcaaagcgatcctcccgcccagcctcttgagtagctgggaccacaggtncttccacatgccctgctannnnnnnnnnnnnnnnnnnnannnnnnnnnnnnnnnnnnnnnnnnnnnnnnnnnnnnnnnnnnnnnnnnnnnnnnnnnnnnnnnnnnnnnnnnnnnnnnnnnnnnnnnnnnnnnnnnatgagcactgtgcccagcctcatataatttttaatagtgatatggagacaaagcaagacaagttctatagacaagatcagtgagggcgtctctgagcacgtgaagctgaacttgagacctgaaccacaggaggaagcattcatgcaatgatttgggggcaagaacgtcccaagtagagagaacagccagtaggaaaggccctgagctggggctg

SEQ ID NO: 304901 - DNA, 281 bp, Homo Sapiens
  misc_feature (134)..(166): n is a, c, g, or t
  misc_feature (179)..(206): n is a, c, g, or t
ggacagcatcttactatgttgcccaggctaggcatagactcctgggctcaagtattcctcctgccccagcctccacatagagttagtcatttacaaggctttctgtttagaggcattttctaagaagatacaannnnnnnnnnnnnnnnnnnnnnnnnnnnnnnnngagatggagtctnnnnnnnnnnnnnnnnnnnnnnnnnnnntctaggtgtcggggaacaggagccacgtccactccagaaattaggcatcaggactaggagcccttagaaatttag

SEQ ID NO: 304902 - DNA, 479 bp, Homo Sapiens
  misc_feature (157)..(157): n is a, c, g, or t
  misc_feature (405)..(405): n is a, c, g, or t
  misc_feature (424)..(424): n is a, c, g, or t
  misc_feature (444)..(444): n is a, c, g, or t
cccttcttctgctctctataattatttatctcagcagcctggtgacagctaccagtaagagtacggcagccgtatttctggctggaagattcagaatatccattctatttcaccagggcagggccaggaccaattttctgcccaggctgaatggccngaacagacacattgctgggtttctacagtgccatttcctaaatctcattttggcagacaccctggctttgatttcaggtcattttagacctgtgtggttctgctggcagccacccatcctgctaaaataactacagcttaagcacagagaggactaacaaaattaaaaatgggaaataaaataaaaccaccccgcttcagtggctcacgggtcaaattaggcaagcaagaggaagtcacaaggaaaanatactttgatgctttgtgnaaggttgaaggcacccgggnaccggtgttgctcttcctatttttcacttccgctg

SEQ ID NO: 304903 - DNA, 537 bp, Homo Sapiens
  misc_feature (13)..(13): n is a, c, g, or t
  misc_feature (25)..(25): n is a, c, g, or t
  misc_feature (37)..(37): n is a, c, g, or t
  misc_feature (41)..(43): n is a, c, g, or t
  misc_feature (45)..(46): n is a, c, g, or t
  misc_feature (125)..(125): n is a, c, g, or t
  misc_feature (291)..(291): n is a, c, g, or t
  misc_feature (398)..(398): n is a, c, g, or t
  misc_feature (434)..(434): n is a, c, g, or t
  misc_feature (479)..(479): n is a, c, g, or t
ttcttttcaacgnaaattcactcangttctatatatngcannntnnggttggacatacagctctacaacctttaactgcttttcaaaaatctgaacgctatgaaaatgaaaaatcttcataattnactgatttggtacaaagcgtaaagtgaacagatgtgagagtatttgtaattgttaattttacgtagaggaaatagtaatttgttcaattagggttgctacttcatatccttttagtgtttcaatataggtgtaccacactacttttccctttaaaaatgttctcangaatttaacattctgcaacactcttgaaccctgtgattttgggagaatgggaccctatagtaggatgctcagcaaattctacatgatgccaaattaaaatccagggntatgaggtatccatgtccttaacctgtttaaggggnggggtttcctatggaggggtccccttaggtaaggggcattttggnatggaactttttccctaacttccctcttttttttaccttgtgtgtgtggagggtatgt

SEQ ID NO: 304904 - DNA, 253 bp, Homo Sapiens
  misc_feature (20)..(20): n is a, c, g, or t
  misc_feature (42)..(42): n is a, c, g, or t
  misc_feature (79)..(79): n is a, c, g, or t
aactctggtttaaaaaatgnatctgacaaaataaaaatgctnatactcagcaaatagtttcaacaggccttacagtttncccttttagtcaaagtaggcctttaaatcattagtggatgctttttgtatttactgtaatatgtattcatgttacctctgttctcccccagcacaccagggtgttctttatagaaattggtctgttttgacttttggagaatcacagagttctcagcttttcatgctccctaac

SEQ ID NO: 304905 - DNA, 412 bp, Homo Sapiens
  misc_feature (36)..(36): n is a, c, g, or t
  misc_feature (56)..(56): n is a, c, g, or t
  misc_feature (199)..(199): n is a, c, g, or t
  misc_feature (252)..(252): n is a, c, g, or t
  misc_feature (254)..(254): n is a, c, g, or t
  misc_feature (289)..(289): n is a, c, g, or t
  misc_feature (351)..(351): n is a, c, g, or t
  misc_feature (384)..(384): n is a, c, g, or t
actctactgggaatggtggtaaatggtggtggacanattatctgttaaagatagtnaattacatattttttagcttccaacaagtatattacaccattgttttgtctttctgtcaccaaacaccaaatgtattacaagcaaaatattcctataccacccgttcacattttaccaataagagatgattgatttcatcaangtatctttgaattgtttggagggtgtctttgcaaaccggataattattttggngnccctgaaatctctaaacatcatttttatttcaagnaactttaaagagtatatgatccataacacttcaaacttcttttggaggggaaatattctttncatgtgggcaggagtatggctcatgtttaaggncaggtttccatatttggcttcccgggcc

SEQ ID NO: 304906 - DNA, 372 bp, Homo Sapiens
  misc_feature (33)..(33): n is a, c, g, or t
  misc_feature (122)..(123): n is a, c, g, or t
  misc_feature (141)..(141): n is a, c, g, or t
  misc_feature (176)..(176): n is a, c, g, or t
  misc_feature (203)..(203): n is a, c, g, or t
  misc_feature (230)..(230): n is a, c, g, or t
  misc_feature (346)..(346): n is a, c, g, or t
atggcaggagtgtctctctgacgtactcgtgtnaggtatgacaggataggaagtgcgtgtctattttacttctggacacaggccagccacaccagcaggttctggactctggagtgagttannaatggaatctcaccaggncccactgggtctgaaagctcactatctcctagccnctggtgttggacatcggtgtactcaancacattcagctgcttctcctgctgcanaccctgcttctctctgctctcctccaatcctcactacttctgctagcatcttctctgtgtatcctttgatttctacttcttaccactactgcaaagagggggccactttattcggncagcactagtcgctttaaaagtactg

SEQ ID NO: 304907 - DNA, 493 bp, Homo Sapiens
  misc_feature (24)..(24): n is a, c, g, or t
  misc_feature (33)..(33): n is a, c, g, or t
  misc_feature (82)..(82): n is a, c, g, or t
  misc_feature (106)..(107): n is a, c, g, or t
  misc_feature (230)..(230): n is a, c, g, or t
  misc_feature (286)..(286): n is a, c, g, or t
  misc_feature (330)..(330): n is a, c, g, or t
  misc_feature (384)..(384): n is a, c, g, or t
  misc_feature (419)..(419): n is a, c, g, or t
  misc_feature (433)..(433): n is a, c, g, or t
ataggcttttgtgaagagaagtgnctaatttangaatatgctagttgaatctggaaacctgtgtcagagattctatggaagnaatgcttctaccacctaagaggtnnggaattatttcatggctccataactaaaggctcagttcatttcaattcagcaagcagtttttgagcacatacaatgtgtggtcacaatgctaggcattggggaatacataaacatggataagnagttatacccgctacatccaaggggctctcagtctagtaagggagatgtcttaagnaagtaatttagtcaaaagccgaaaggatgcttgggggaagtagnccatctctgcagttcatgggaggttgggaatggcctcctgtgtgggatgtaggntgtaggggtagccctttatcatttgccactgtagnttaattgggatttncattgccctaggggtttttaacctccatcccttgtcagccgttcccctaccccaaatttt

SEQ ID NO: 304908 - DNA, 488 bp, Homo Sapiens
  misc_feature (49)..(49): n is a, c, g, or t
  misc_feature (69)..(69): n is a, c, g, or t
  misc_feature (71)..(71): n is a, c, g, or t
  misc_feature (87)..(88): n is a, c, g, or t
  misc_feature (95)..(95): n is a, c, g, or t
  misc_feature (102)..(102): n is a, c, g, or t
  misc_feature (106)..(106): n is a, c, g, or t
  misc_feature (178)..(178): n is a, c, g, or t
  misc_feature (217)..(217): n is a, c, g, or t
  misc_feature (370)..(370): n is a, c, g, or t
  misc_feature (388)..(388): n is a, c, g, or t
  misc_feature (432)..(432): n is a, c, g, or t
  misc_feature (438)..(438): n is a, c, g, or t
cactgaccctggttcagttctctaaatgcttctactggttgctctggtncttccccttctactcttagncnattttaaaatatagtnngtcatgnatttctnagtnaaaaccttctgatggttgctctctcacttagaggcaaagttttacagtggcctacgatgcctccattatgtnccccaccttatcccactcccaagctctctgacctcaggnctcctactgtccttcaacccagtgtgctctagtcacattgacatccttgctgttcctcaaacaaaccaagcgctcatggctaggggtctttgcaggttgctcttttcttaaccgggaacactctgtactcgggctgtgtgcctctcggaactnccttctatcacctggggnaagaggaggcttctgggggggaaaatcatataatcatataaagnggggantttggctttaattattctccatcacgggagggggggaaataacattcctg

SEQ ID NO: 304909 - DNA, 288 bp, Homo Sapiens
  misc_feature (269)..(269): n is a, c, g, or t
gtggtacctgatcatcatcacatgacttgaggacaatgtagcagaacctggttgttagagctaagtgtcttagcttgttaaagacagttttattcaaccataaaatggaattaatggaactagatatgagacatgcttaggaatataacctgactttgcgcacaccagggcactgcagtcttaaggattcaagcaaccctgtcccaaagcttttatccatgtctgcattcctagccccgggacttcattcggaagctctttatgagagnttttttgccagaggcctcc

SEQ ID NO: 304910 - DNA, 267 bp, Homo Sapiens
  misc_feature (90)..(90): n is a, c, g, or t
  misc_feature (116)..(116): n is a, c, g, or t
  misc_feature (177)..(178): n is a, c, g, or t
  misc_feature (232)..(232): n is a, c, g, or t
acgctgaaaactattttttgtttaggcctgaaaacctgttactacttactgcctcgtcacatttctctgctttaattatcttgatttttnttcttttccaaactaaggctcaactntcagttaattctgctccgatgtcactgcacagttctgttttatgtgacctttattcttttnnctttccccttaattcacccaactatggatttcactaaaaggttttaaagtaatncttaggtttcatgtttcaacagcctcagctcatgt

SEQ ID NO: 304911 - DNA, 267 bp, Homo Sapiens
  misc_feature (21)..(21): n is a, c, g, or t
cttggagcaaacttatttggnggcaatactacctgaattgtaaccctatcctactagtgtaaacagtctatcattttgccacagaaatataagtttgcttttggggtagtgccccaataactaggtgttatacattacaaagtacaggtacccttctgtaatctgtaatcttaatttctaagacacatctggctccaagagttttagataagaggctgtgggctgacaaagcagttaggagctagatacttttttcatttacatacc

SEQ ID NO: 304912 - DNA, 358 bp, Homo Sapiens
  misc_feature (329)..(329): n is a, c, g, or t
ttagtagagatgaagtcttgccatgttgtccaagctgatctcaaactcctgagctcaagcaatgcgtccacctcagcctcccaaagtgctggcatgggcaccacgtgagccaactctgatatatttttattaccgttaattggcataatttttttcaaatgtgcatatcttgacttgcataccaaaatgtgagttttccgaagatacagtaaaactgtggttttatttttatttatataactcttgtatttatacaactcatctactgcataactgctatgaggaggaaggtattgtgtttgacattacataggggagaagtattgggnaaaaatgtggggatttatcttaacctaaa

SEQ ID NO: 304913 - DNA, 181 bp, Homo Sapiens
  misc_feature (85)..(85): n is a, c, g, or t
  misc_feature (92)..(92): n is a, c, g, or t
  misc_feature (147)..(147): n is a, c, g, or t
gcagctaggaccacagtcacccgtcaccacacccggctaattttctgcatcttcagtagagacagggagacagggtttcaccatnttggccnggagaatcttctcatgttactccttcagctgtcttccggccgggattttctatcnctgctacactcctcaccctcatgctactcgtgcc

SEQ ID NO: 304914 - DNA, 249 bp, Homo Sapiens
  misc_feature (172)..(172): n is a, c, g, or t
  misc_feature (180)..(180): n is a, c, g, or t
  misc_feature (192)..(192): n is a, c, g, or t
  misc_feature (198)..(198): n is a, c, g, or t
  misc_feature (210)..(210): n is a, c, g, or t
  misc_feature (225)..(225): n is a, c, g, or t
tttttaaatcagcatctagatgacaggtaaagtatactgtttttctctggcatagataacaccctaacagcttatttcccaacactgtctaactcaaaccatcaaattaacttgggcattttacattttcattcccacatagggcctttgctcaatactcttcttccttgangtcttccntattcttctctngccaantttgccggggangattgtcagaagggnattaataacattaataaatactta

SEQ ID NO: 304915 - DNA, 292 bp, Homo Sapiens
  misc_feature (20)..(20): n is a, c, g, or t
  misc_feature (128)..(128): n is a, c, g, or t
  misc_feature (132)..(132): n is a, c, g, or t
  misc_feature (208)..(208): n is a, c, g, or t
  misc_feature (264)..(264): n is a, c, g, or t
  misc_feature (269)..(269): n is a, c, g, or t
ctggggatggccaggaggtncctcaaccatctgtaacccgagcccacagtgaccgggacttgctgcttccccatcccagccctctcctatcagcatccgctaagcgtcagtcagcaggtgccggcacnttanaggcaggcctgcagttagaccagcaccgggggagggaccgggagagagacctctagagtggaagccacagcccctnttcctcctaggctgggcaacagaccaccattcccagccagccctggggaaggggtnagggntcagctgggtcgcaggtacagcg

SEQ ID NO: 304916 - DNA, 401 bp, Homo Sapiens
  misc_feature (53)..(53): n is a, c, g, or t
  misc_feature (332)..(332): n is a, c, g, or t
ggctggttccagtttcttatctcaggagggaagagctgcagatgtctttactntgaatgagggagagaaacgctaaagcacagaaatgttcagaaccaaagagctggatcactcatgcttctagaaaagacattggcatcttctcattgctcatctactgtgcctggcaaccttattttctagctttctgaatgtgagttccatccatatcctttgcataacggtggtactgggctgtggagagcttggaatgtgtgtccatggggaaatggggctgttctggttattataaaacggccaagggagggctccatgggcacacctctggagtnaacccaggacactcctgtttggggaaatggcaaaccatccatacggcaggggggcacaattattaaagg

SEQ ID NO: 304917 - DNA, 286 bp, Homo Sapiens
agagcactgggctgggtggaagagggtgagtttaagtcaggtggccaaacttctgtagcctgaaagcctctctggtctgcgaacttctccgaacctcgtcttctttcttatttcacattttcaagatgaaaatattagaatacattagatcttgttctggtctgaaaaatgcctctatgggtagccaaataactcagttgtcaagaagaaaaacggatatataaattagtctaataagacatgtatttctccaagaattcaagaaatgcaatttgctggccctgct

SEQ ID NO: 304918 - DNA, 409 bp, Homo Sapiens
gagcgtcctgcaaccccagccctcaccaggatttcttgcgtttttcaggaaatcggttgtgattggcatgttccttaagcgtctgcaggaagccgaggcctttttggtatttcaggaggggttgctaaccccctccttgtaggatcggggtatcccagctgctaattcccctcctaacagccctgcagcgcctggattggaggtgtgacaggtggcatttttggcccgaagtccctaggcaggacgggtggctgtagctggcgcgtttgtgtaaattaacctccctttttagttctgtgaagggagaacgtgattagtttaaaatcacctgcgtgaaagaggctcttgattagtttaaaaatcacccacgtgaaaggggctctttgattagctttaaaatcaccggggt

SEQ ID NO: 304919 - DNA, 205 bp, Homo Sapiens
  misc_feature (79)..(79): n is a, c, g, or t
  misc_feature (155)..(155): n is a, c, g, or t
  misc_feature (165)..(165): n is a, c, g, or t
tgcccaggtagtcatgtaggtctgtgggccgtgcttccaggctggaccgagacccggtgcatggggtgcttctggtctnagctgaggcccctggaagccacagccaggaggagcaagggacggctgtcatgtcccctctcccctgtctcccaggntccctgcggnagtaatttccctgcctgagcctcctggttgcccataccct

SEQ ID NO: 304920 - DNA, 469 bp, Homo Sapiens
  misc_feature (359)..(359): n is a, c, g, or t
  misc_feature (404)..(404): n is a, c, g, or t
  misc_feature (414)..(414): n is a, c, g, or t
  misc_feature (422)..(423): n is a, c, g, or t
  misc_feature (426)..(426): n is a, c, g, or t
  misc_feature (436)..(436): n is a, c, g, or t
taccctgtcttgtaaataaatatagaaagcaaattagagtgagtcctgcagatttctgagaatttaattatacccttaaattgcaataccaatgatatatacggttagatttctgtactgagtaattacctgaattaacttcgttttacaatgcttaatttattttgtactaaggaaggcttttaactatttaagataaaccaacctaattttgattttttacttgcttcaacgtgtttcagttcattaatgtttcaataataaggaatgaattctcttgtcttgacaaaccaaggcatgggaaatttccccataaggaggaaaaggaaggaaattaaaatggatttcccatatttcangtcacaggcacgctggaaaggaggaactttggggttcttaggggnaagggcctcngtttaccnnccnaggggggggncccactcctttacaggtttgtggtaatttttac

SEQ ID NO: 304921 - DNA, 298 bp, Homo Sapiens
  misc_feature (28)..(28): n is a, c, g, or t
  misc_feature (31)..(31): n is a, c, g, or t
  misc_feature (52)..(52): n is a, c, g, or t
  misc_feature (59)..(121): n is a, c, g, or t
  misc_feature (129)..(129): n is a, c, g, or t
  misc_feature (133)..(134): n is a, c, g, or t
  misc_feature (222)..(222): n is a, c, g, or t
  misc_feature (237)..(237): n is a, c, g, or t
gcaattggccaggactcaggagaccccntangtctccctcctcaggtcatgnccaggannnnnnnnnnnnnnnnnnnnnnnnnnnnnnnnnnnnnnnnnnnnnnnnnnnnnnnnnnnnnnntacatganctanncattcatccatctacccgctcatcaacccatccatccactgaacattcaacaaatatatattgcatacctgcccggtgctcagggccntgtgctagggtattnggggacatattgtgatcaaaacataggatccggggtccatgggggaggtttattttgcagt

SEQ ID NO: 304922 - DNA, 583 bp, Homo Sapiens
  misc_feature (74)..(74): n is a, c, g, or t
  misc_feature (474)..(474): n is a, c, g, or t
  misc_feature (500)..(500): n is a, c, g, or t
  misc_feature (551)..(551): n is a, c, g, or t
  misc_feature (557)..(557): n is a, c, g, or t
  misc_feature (569)..(569): n is a, c, g, or t
taagtgcactgagaaggcctacattttctttactcaaagagatgccagaaaatcattttagaatcactgaaagngcccatctaatcaaagctttgtttacatgcagtcactttcagaagggtggtggggtaaatggttggctctactgtcaaagcaggagagaaatcagaccccttgcagtttgaaattcaaaaagaaaagttacccaacccctagatataagcccctggggaagtaagggggacaaaggtttggggctcactggacccctggggaagtgggctctgtgtatgggattgggaagggctgagcaccaggaagcagaggaaggcagtcctctgttgggagcctaggcagccacaggaagtaggagctgtctttgcttgcaagggaaccccccaagttgctttgccctacttttaagttttattattttaaccaaccaggaaccagccagctactttttgggacttnttaaaagcttggggtttttttaattnccacacaggcaaagggggaacagcgggttattgacttgttccaggcttttncttccngtttcttgaccnacttgggtaggagg

SEQ ID NO: 304923 - DNA, 421 bp, Homo Sapiens
  misc_feature (163)..(255): n is a, c, g, or t
  misc_feature (273)..(273): n is a, c, g, or t
  misc_feature (281)..(281): n is a, c, g, or t
  misc_feature (321)..(330): n is a, c, g, or t
  misc_feature (340)..(340): n is a, c, g, or t
  misc_feature (353)..(353): n is a, c, g, or t
  misc_feature (359)..(359): n is a, c, g, or t
  misc_feature (385)..(385): n is a, c, g, or t
  misc_feature (406)..(406): n is a, c, g, or t
atcttaaaaaaattaaacatgaaactttaccatggcaaaggaactacaattgtaagagctgctgaaagaacagataatgatgagacataaaggagcaaccaaaatatagttaagttttgttaaggatggcaaaagatcttcgaatgctcttatgcattaactnnnnnnnnnnnnnnnnnnnnnnnnnnnnnnnnnnnnnnnnnnnnnnnnnnnnnnnnnnnnnnnnnnnnnnnnnnnnnnnnnnnnnnnnnnnnngcccagaggtttgagganctaccatngggccaccatagttaggaaccctgttctcttccaaaaaannnnnnnnnngttaaaaaantaaggcttaggcntaggtngcacacaccctgttggtccccggctnccacaggagggcttgagggcnggagcctttacttcg

SEQ ID NO: 304924 - DNA, 361 bp, Homo Sapiens
  misc_feature (139)..(152): n is a, c, g, or t
  misc_feature (181)..(181): n is a, c, g, or t
  misc_feature (300)..(300): n is a, c, g, or t
  misc_feature (319)..(319): n is a, c, g, or t
  misc_feature (325)..(325): n is a, c, g, or t
  misc_feature (344)..(344): n is a, c, g, or t
gagtattgactttaatctctctaagtagcttccttcaatattccaagatgactgacaaaatttggggcattaagagccaacatgacaacgctcaacctttagtattcaacaaaatgacatttacctaaagaagagctannnnnnnnnnnnnncctttttttcttttggaactcctactttnagcaaggaaacctttcccagaagccctccagtagacatttttgtgtcctgttggcaagaaatggattatgtccccacccttaaatgtatcccttgaaatgagtttaccttgaaggactngacttgctgcaggtgaccntcgggntaaggcaacttcaatcctntcttaaaccatcagctt

SEQ ID NO: 304925 - DNA, 491 bp, Homo Sapiens
  misc_feature (152)..(152): n is a, c, g, or t
tcctatatttattaggaaatttaaaaataatcttaaggatgactgccacatgccagccataatggaggatggtctttcttctaccctagacatttcacactgaacaggcctcacttggatctcggacatcttcctttctgcactgtgcagancccctcagtatatgcagagaacagaaaatcattttgctgccagtggaaggtagacagaagctacgtttattggggaagaaaatacccttgctgtcaaaccatggcctgaaaataaaggccttggattactcccacccatctccactccatgggtgcagagaatgctgagggtgcttgcatacgagaccataaagttgtaaaggatgccttccagcccccatttggtttgttatgggtgagagctggggcctctgtgagtggcaagcatcaaaacccacgaccacagccgttggtactgctttcaaaagcatagcacccaccctaatgccctgataaagg

SEQ ID NO: 304926 - DNA, 314 bp, Homo Sapiens
  misc_feature (258)..(258): n is a, c, g, or t
ttacagtcaggaaaaaaaggtttagttcaccttgagaggttagagaaagaaaggttatcattgaatgaaatgcatggcttgatgccatttgtaaaacaggttggtgctggctcaagaaggcaggaacaaattctaacttggttgaaaagtatgattggcggaggggtaaaggaaaatctccagaattagtcattcaggggctctgcaatgtaggatctcgaaggcagtgcgcaggaaaaggctacccaatccaccttncatctttaggcaagcaaggcacttgttcctctttctttggattcccgggggagcta

SEQ ID NO: 304927 - DNA, 190 bp, Homo Sapiens
  misc_feature (57)..(57): n is a, c, g, or t
  misc_feature (99)..(99): n is a, c, g, or t
  misc_feature (106)..(106): n is a, c, g, or t
  misc_feature (116)..(116): n is a, c, g, or t
  misc_feature (128)..(128): n is a, c, g, or t
  misc_feature (135)..(135): n is a, c, g, or t
  misc_feature (155)..(155): n is a, c, g, or t
gcattcagagaaggcaagtaagagaagagctgaaaggggccccttgggatttcgatncatctccttgccagctcttgcttttgtgggaacttgtgggtnggaggtnggaaaacagntttacaacaggntgggggngaagccagggttagggaagncaggttttaaaaagcccagttacgggttgacccag

SEQ ID NO: 304928 - DNA, 226 bp, Homo Sapiens
aaggccttttaccagcactcttcaagctcagtaggggaaagacttcaagcactcaggaagcatgcattcactttatttggaacaatacccttacttgtaactgtgcctcaggtgccatagtccacagagacttcttttacctgtccagagaataaaattagttgtctgttggggtaacaaaaagtgtggagctgaagagggtacctataaatgaagttgttttctg

SEQ ID NO: 304929 - DNA, 442 bp, Homo Sapiens
  misc_feature (286)..(286): n is a, c, g, or t
  misc_feature (357)..(357): n is a, c, g, or t
  misc_feature (387)..(387): n is a, c, g, or t
  misc_feature (400)..(400): n is a, c, g, or t
tcacagctgtgctaagccccagcatggattgtaccaggacttatctgccaaccctgctaggctgggcgtgtccagcattggctagaaccgctgctgccgccatcccacactgttcacaagacccttcagactcaaatcctagagctgctattcagtgcccaaaacgctatcaaagtgcaggcctggctccacactgccagctgcagatgctcggcagactctgcctggggcttcccggctgtgctgcccaggcttcaccagaacccaccgcagctgccctgcagcncaccttttggcctgttgttcttcacagccttataacagcaggcaaggaaagtgaggggaggcaatgccagnaagggactttgccaggagggtgaacccagnttcgtggagggtnggtaacggcaatggggggaacaggaatttccaggagtcaggg

SEQ ID NO: 304930 - DNA, 538 bp, Homo Sapiens
  misc_feature (225)..(225): n is a, c, g, or t
  misc_feature (227)..(227): n is a, c, g, or t
  misc_feature (229)..(229): n is a, c, g, or t
  misc_feature (433)..(433): n is a, c, g, or t
  misc_feature (439)..(439): n is a, c, g, or t
  misc_feature (444)..(444): n is a, c, g, or t
  misc_feature (463)..(463): n is a, c, g, or t
  misc_feature (485)..(485): n is a, c, g, or t
  misc_feature (500)..(500): n is a, c, g, or t
  misc_feature (516)..(516): n is a, c, g, or t
gagctagcacctgacattttatttaacatgatatagtgcgatagtctcggcacaaagtgaccttaactgcttccaaattccttccttatttttcctgtaacaaatcatatggtgaaggaagaccttcatcagggtcacgtaacttggaggagcttcttgggggaagtgcacaggcatctctgcgggctgtggaggaaaaggccccggaattggccccagtgggtntntnttcccaagaggatctgtcccgtttccctgttcatgtgttccgtcctcagtagctggggaccccattttctctgtcgtatcccacccccaacacctggaccaacttcaaattcaggcacatattatttttaaacaggtagtgggatatcccaacactgtgttcaggggcatggggaggaaaatggggaaaagaaaccgaattgtnggtccntagtncttgaggacacagggtaancttcatccaggcattttggggncagaggctgagttanccgggggtattatttnccgggattcctggattttcttt

SEQ ID NO: 304931 - DNA, 458 bp, Homo Sapiens
  misc_feature (139)..(139): n is a, c, g, or t
  misc_feature (197)..(283): n is a, c, g, or t
  misc_feature (364)..(364): n is a, c, g, or t
  misc_feature (376)..(376): n is a, c, g, or t
  misc_feature (419)..(419): n is a, c, g, or t
gcatggaagtcaagccagggcctctggggaagatatggcctgagctgagatttggaaacaaatgaataaaaacctggaaacaagagcaatctggacagaggaactctcagctgacctccaggagactcagcctccaggnctcaggaagtagctggcagacagaggcaagcgagcaaacagagtcaccacaggggtannnnnnnnnnnnnnnnnnnnnnnnnnnnnnnnnnnnnnnnnnnnnnnnnnnnnnnnnnnnnnnnnnnnnnnnnnnnnnnnnnnnnnnattcttcacctgttaaaatgtgggctaaataagtactactttcccttatggggttggaaattaggggatttgaataagttncatgttatttgnaggactgttttaggaattagttgttcttgggccacctggcccntgttgttgttgttatttccctcttaccaggaaccttccc

SEQ ID NO: 304932 - DNA, 157 bp, Homo Sapiens
  misc_feature (32)..(32): n is a, c, g, or t
  misc_feature (64)..(64): n is a, c, g, or t
ggagagatgaggtctctctatgttgcccaggnttctctcaaactcctagactcaagcgatccgnttcctttgccctgccaaagtgctgagattacaggcatgaggtactgtccctgcctatggtttctcttttatgcactctctttctaaatagaaa

SEQ ID NO: 304933 - DNA, 376 bp, Homo Sapiens
  misc_feature (52)..(52): n is a, c, g, or t
  misc_feature (63)..(63): n is a, c, g, or t
  misc_feature (65)..(65): n is a, c, g, or t
  misc_feature (86)..(86): n is a, c, g, or t
  misc_feature (97)..(97): n is a, c, g, or t
  misc_feature (115)..(115): n is a, c, g, or t
  misc_feature (170)..(170): n is a, c, g, or t
  misc_feature (191)..(191): n is a, c, g, or t
  misc_feature (214)..(214): n is a, c, g, or t
  misc_feature (222)..(222): n is a, c, g, or t
  misc_feature (281)..(281): n is a, c, g, or t
  misc_feature (292)..(292): n is a, c, g, or t
  misc_feature (309)..(309): n is a, c, g, or t
  misc_feature (320)..(320): n is a, c, g, or t
  misc_feature (330)..(330): n is a, c, g, or t
ccttactcaaaatcagacagctgatccagggagctatttccttactataggngtgaggacgantncaaacctccacttgtttcagnaggaggcaganttgggagcagacaacttnagttgtcttcagttaactctgatgggttttaattttagtaggaccatcatgactnaaacgtgccttgggtcttgtnatatcaccaatacttctgacccnttatgtgntaactcttgagttatcactgagactctgtaaagtaggtgggaactcagtccctctaaantatacttaacngttctgcggtattcctntgctcgtagcnatggggtttnggccgcattgggagggtcatggcaagccgtgcaggcgtacatggga

SEQ ID NO: 304934 - DNA, 458 bp, Homo Sapiens
  misc_feature (351)..(351): n is a, c, g, or t
  misc_feature (385)..(385): n is a, c, g, or t
  misc_feature (403)..(403): n is a, c, g, or t
  misc_feature (421)..(421): n is a, c, g, or t
aaaatgtacttagaaattttaaaagcacaaaacaaacgcattctctccccatcctcctatctccagctcttagagactggagctcagcacctaagctgttaatgaatggggacagctttcatctccactggaaaaaagcctgctctctcacttggggtccctctcccccttccacttgcattcaatcagcacccatgcaaccatcctccctgctctgagctctgtgagcccctgaaaatagagaaattgggtgtttgtgggagcaaaatatagctaagtaatttttcctgctcctttgagggccatgttctttcatgggtgaggggagggggcagaggaaaataggagggntcacaaatccctttttcctgtggactcccacaanttagggcccagggccttnctttggaggcctcataantgttgtgttgttgttaggataggggggaaagggaggt

SEQ ID NO: 304935 - DNA, 413 bp, Homo Sapiens
  misc_feature (354)..(354): n is a, c, g, or t
  misc_feature (380)..(380): n is a, c, g, or t
  misc_feature (390)..(390): n is a, c, g, or t
gaatatgttagtgcctctgagctaacaataatgttgatgctgaaagaagaagaaaggccactacttttaataaaaattaaatgtttaaatgtgaagtgtacttaaatgattaggtattatagcaataccctttgtaagtggaattgcctccacagcttggccttattagccctaagtatactaagttccttctgaaactcctgtcacccaccaaattatctgagaattctttccaccaacaccttaatcaaaccatcttctaccaagtgtgttcagaactggagtaaagtctgatcagttcattaccgctgtttctctttggctgtgtgggaattaaaaaacccatggcttttnacagtccaacagtaggctggctgttnctggttgttnaatataaaacttaagtagggcaa

SEQ ID NO: 304936 - DNA, 317 bp, Homo Sapiens
  misc_feature (53)..(53): n is a, c, g, or t
  misc_feature (301)..(301): n is a, c, g, or t
attcaagtcaaagcagggcccaaaagaaattctaactactttagagtttttanttctaaactaactctcaaatcccttgctgtttctgggaaatgagaagctaagaccttctcagctgtccagtgcatattctgccttcagatcatggagccggctgtagttcaccagttctttaactctccccatccccatcctgcagaaggaaagagctacactctgagcccaagccccactctctcaaacccatcctacatgaacatggtggtacatagtaactatgaaaacagctgtggggcttganattgtccctgcacaga

SEQ ID NO: 304937 - DNA, 400 bp, Homo Sapiens
  misc_feature (328)..(328): n is a, c, g, or t
  misc_feature (367)..(367): n is a, c, g, or t
gtaaataaaaaagagatatatcttagtccattcaggctactataacaaaatagcacaattgggtggcttataaacaacataaatttatttatcatagttctagagcctgggaagtccaagagctgggtgccagcatggttgggttctgatgaggatcctcttccagattacagacttccagcttcttgctgtgtcctcacatggtggaaggaacaagtaatctctctggagcctcttttaaaagcccaccaatcccattcattgaggattccaccccagtgacctaatcacttcccaaaggtccatctcctaatgctataaccttagnaggttagggtttcaacatatggaattttgaggggacagnaaacatttcaggcccataggcagggatggagta

SEQ ID NO: 304938 - DNA, 351 bp, Homo Sapiens
  misc_feature (31)..(31): n is a, c, g, or t
  misc_feature (293)..(293): n is a, c, g, or t
aaagcagtactgtaacatgaatgtatttatntcagtcaacagaacttatatgcccactgtatgtggagcttatttcaatgctaatttggcttagttagcagacctagaatctgcacaggtgagacctagaacaaaaatagctggggtgaaatggataagagaggtagaggtatatgtcaaggcagagcctaatgaggaaggaagagttttcaaagaatatgaggaacatagtgctgagagtgtggctgccttcagcaccgtacacctaatctagagaaaatatttcccatgtnggagggtcctgttctgcattccagtccaccctttttctgcctgccttgcttgccgcca

SEQ ID NO: 304939 - DNA, 306 bp, Homo Sapiens
  misc_feature (58)..(58): n is a, c, g, or t
  misc_feature (67)..(67): n is a, c, g, or t
  misc_feature (77)..(77): n is a, c, g, or t
  misc_feature (276)..(276): n is a, c, g, or t
tctgaagatccctgtgtcacttccagctaggacctggctttccatgaatgcggatccntgcccacgngtcacatggntgagagttaggcagtgctggaatgagaagaagccactctgggaaactcactgaagaaccagtcatttagcttttcttgtctttcatctccctctggaaacttgagacaggcccagtacacaaacaaaggtgacatgagaagcgcttaaaaaaacccaagttgaaaataaaagccactcaaggctcttgggtaatggganatgaagttgggaaaaagcccctttaccacc

SEQ ID NO: 304940 - DNA, 546 bp, Homo Sapiens
  misc_feature (374)..(374): n is a, c, g, or t
  misc_feature (381)..(381): n is a, c, g, or t
  misc_feature (408)..(408): n is a, c, g, or t
  misc_feature (419)..(419): n is a, c, g, or t
  misc_feature (461)..(471): n is a, c, g, or t
  misc_feature (499)..(499): n is a, c, g, or t
  misc_feature (504)..(504): n is a, c, g, or t
  misc_feature (515)..(515): n is a, c, g, or t
caggctctgtccctccacttaggtgttaagggactcagtcaaggatgtttacatgtgcctcagagatttttttgggtacccagcagtgtagagttctagaaagttcttttcagtttacaaatgccagttcttttctgctagtctttggcagtgattgaatgtgaattgtgaaatttgattgtggtctcactccaagttctattttatttctggtggagctggaatgttttatctttctcggaaacgatcactttttgtgtgtatggcaacaaaacagctagaataactgtcacttggggctcagcaagtacacagaagtatggggctgggggcattttaaccaatccatattcataacacaggtaaggctattnccacttnactggaaaactcttccagaattggaantcccaggcagnttttattacacaaaggcctcttcagtcctggggaaatggagnnnnnnnnnnnaacagactgattattccatttcaaaacnggggntattttttgtncttaaagggtggattaggtattgccccccca

SEQ ID NO: 304941 - DNA, 535 bp, Homo Sapiens
  misc_feature (286)..(319): n is a, c, g, or t
  misc_feature (402)..(402): n is a, c, g, or t
  misc_feature (411)..(411): n is a, c, g, or t
  misc_feature (492)..(492): n is a, c, g, or t
  misc_feature (507)..(507): n is a, c, g, or t
  misc_feature (516)..(516): n is a, c, g, or t
gcttcaatacctgataggcgaacttcaattgtaagaccaggtaaaatgttaccagtaaatagctctcagctcctgagccagaattcattgcttctgtaggggctggtaacttggtccagttctgctcagctgctcctttgttgcagactgagcccatgaccagaagcctcagctgctccagcagatgggtggctagaattttttgagttgtttttaacctggtgctctgagactggggtgaacctagggagctgaagcagcaatgccacacccccaacacatcatnnnnnnnnnnnnnnnnnnnnnnnnnnnnnnnnnncagggcacacgcattaacatgggactttacaacatggccatcatgttgggctgatggggcacgtttattaagggatggggctnggcagggcncggttgtattcacggccttattaaaccccaggcattttgggcagggcccagggcagggcagaggtttgcagttgaggttgnggttggcaccctttncacttccancttggggcaacaaggttag

SEQ ID NO: 304942 - DNA, 511 bp, Homo Sapiens
  misc_feature (126)..(126): n is a, c, g, or t
  misc_feature (131)..(131): n is a, c, g, or t
  misc_feature (150)..(150): n is a, c, g, or t
  misc_feature (181)..(181): n is a, c, g, or t
  misc_feature (226)..(226): n is a, c, g, or t
  misc_feature (285)..(285): n is a, c, g, or t
  misc_feature (351)..(351): n is a, c, g, or t
  misc_feature (377)..(377): n is a, c, g, or t
  misc_feature (383)..(383): n is a, c, g, or t
  misc_feature (442)..(442): n is a, c, g, or t
  misc_feature (447)..(447): n is a, c, g, or t
  misc_feature (456)..(456): n is a, c, g, or t
  misc_feature (475)..(475): n is a, c, g, or t
  misc_feature (486)..(486): n is a, c, g, or t
  misc_feature (497)..(497): n is a, c, g, or t
aaaaaaatgatgtagtctccaggcaataagcaaagtaacgtaggcctgaaggatagaagccgccaacccaggaggaaaagcaggccagggaccaagaagaaaaacaggctgagcaaatcgagtttnggttngttgaagtagggcctcccnggggagctgtccttcagaacctgggaatgtnggagctgcagtgactacagaggttgcttcctgatgacaaggtctnggccatttctgccaactctgcacctcgagcccaaccagcatggcagctggtgtggtctngagggatttctcgagttggcactagggggattgggaggagaattgaaatctgattgtgaaagactntagtttaaaaatacattttcttgctnggcatnggttcctcacgccttaattcccaagttagctgtgattacaggttgttttgccaccacanccagnttaattttntatttttagttagacacanggttttcaccntgtccgttcangctttgtctttaaa

SEQ ID NO: 304943 - DNA, 373 bp, Homo Sapiens
  misc_feature (176)..(230): n is a, c, g, or t
  misc_feature (305)..(305): n is a, c, g, or t
agatggcatagaatcttctgtctgtctagagaattttgtttcttgccaggcactgtcaggaattagtattcattcctccctgctatcttcctgaagagctgtgaacctgctggtagcctgatggataagggtacagttgtttgtttatttattgagacagggtctcattctctcannnnnnnnnnnnnnnnnnnnnnnnnnnnnnnnnnnnnnnnnnnnnnnnnnnnnnngctcaagctatcccccaaccttagcctcctgagtagctgggaccacagtcatgtgccacaacacccaggcaaatnttttgcgttttttgtagagacagggttttccccatgtttgcctttgctgggtttttgaactcccgggg

SEQ ID NO: 304944 - DNA, 304 bp, Homo Sapiens
  misc_feature (43)..(43): n is a, c, g, or t
  misc_feature (77)..(77): n is a, c, g, or t
  misc_feature (87)..(87): n is a, c, g, or t
  misc_feature (157)..(157): n is a, c, g, or t
  misc_feature (251)..(251): n is a, c, g, or t
  misc_feature (266)..(266): n is a, c, g, or t
  misc_feature (284)..(284): n is a, c, g, or t
  misc_feature (292)..(292): n is a, c, g, or t
ttcctctcccaccggttgcctgtccagaggtctgaaggcaccnacgagagccacgatgaccctctccccagggactngggctgcctnctggaaattcgagcctacagagaagctctgaaagctaaaataaaaccaggacctaggcctgaaaagctcnaagattgaaaaaagtgtggctgtataggagctgaccttcccccacgtaacgtagtcagatggttttcggccgaccaaccgtcggcccaggtgtncagttcggagctcgngcacttttcaaagcgagngaggagtnaggcacagaagt

SEQ ID NO: 304945 - DNA, 362 bp, Homo Sapiens
  misc_feature (147)..(147): n is a, c, g, or t
  misc_feature (207)..(207): n is a, c, g, or t
  misc_feature (223)..(223): n is a, c, g, or t
  misc_feature (281)..(281): n is a, c, g, or t
  misc_feature (332)..(332): n is a, c, g, or t
aggtacgcatacttccacctactagacatgggttgaggggtatggaaacacccagaggcctaactacctcttgaggcatgggtgtccttcagatcaaacacgcaaaacgggagcccagattgctggcaatcacgctcggggagcttntgtgccaggttgggatggagaactcagcggcctccacccccttgttcgttgacacccttnggcgccactgtgattncccagctcttccaagggtggggcacactctgtgggggaaatgggaatgctttagcttnagctgttgtggggaagggcactttagggatgtttcgtgggcaccctttttnacagggttgaagggttcaaccagggatttt

SEQ ID NO: 304946 - DNA, 306 bp, Homo Sapiens
  misc_feature (50)..(50): n is a, c, g, or t
  misc_feature (200)..(200): n is a, c, g, or t
  misc_feature (246)..(246): n is a, c, g, or t
  misc_feature (295)..(295): n is a, c, g, or t
agacagccttggcagacggatggggagtctggcagttacaggggcccttnctttcctaggtgcaaattgcctgtccagcagctttatcttcagatgggctggcactgtcacttcacaccttattgcttctctgttatcaccaaccaaacccccacagaaggggaggccaaaaccatgtggggaacagatgctacatcctnaacagcaagcctgttctatatgtgttttggctgggactctcctttncaacaccctctccttgccccaggggtgggtttggggggtactatggtgncaaccccagat

SEQ ID NO: 304947 - DNA, 408 bp, Homo Sapiens
  misc_feature (47)..(47): n is a, c, g, or t
  misc_feature (346)..(346): n is a, c, g, or t
  misc_feature (356)..(356): n is a, c, g, or t
  misc_feature (378)..(378): n is a, c, g, or t
  misc_feature (395)..(395): n is a, c, g, or t
atatatttacgggatgcatgagattttgatacaggcatgtaatctanataatgacatcatgaaacatggggtattcatccccttcaagcatttatcctttttgtgttacaaacaatccagttatgttcttgtagttatttttatatgtacagttaagttattttgactatagtcaccctgttgtgccatcaaatagtaggtcttattcattctttctgactatcctttttgtacccattaattatcgtcaccctcctcctgccctgttccccccacttaccctttcccaccctctggtaaccatcctcctaacagtctatctccttggagtttcagttgtttttantttttaggancccacaaataaatgaggaacanggcaatgtgtgtctttnctgtggccggggt

SEQ ID NO: 304948 - DNA, 392 bp, Homo Sapiens
  misc_feature (105)..(105): n is a, c, g, or t
  misc_feature (134)..(134): n is a, c, g, or t
  misc_feature (146)..(146): n is a, c, g, or t
  misc_feature (314)..(314): n is a, c, g, or t
  misc_feature (366)..(366): n is a, c, g, or t
  misc_feature (381)..(381): n is a, c, g, or t
caagaagtagcaattgggaattatgggctatacccagccttcaccctggtttttctagctcacgggcgcactgtttcccctacttatgaaaacaaaacttgcctntaaacgtcttcatgtgcagtttcttaatnagccacaaggtnaggatgtggctccgtaagatctctgtctcagcaagatttgtcactcttctctttgtccctccaccagtcttctctctcttctgctttgtgggcttaactgtttgatcacttattccccagttgggctcataaacagcttggggctctggagttggggcagtcccgggnctttgtctcactcagagggcttcgttttccccatctgtgacgtggagggttnaaagaccctggggtnccctggggaac

SEQ ID NO: 304949 - DNA, 266 bp, Homo Sapiens
  misc_feature (165)..(165): n is a, c, g, or t
  misc_feature (228)..(228): n is a, c, g, or t
  misc_feature (242)..(242): n is a, c, g, or t
tacggtcttaaaaaaaggacatttagtaaaataatagggaaatctaaggacattaacaagtgagtcttctttattttctaccttagttgatttaatggaaatccagtgatttccatattctccccatttgcacaaaacaaaattcataggtactttggagggttngggaggggactgaggagggcctgtatccccaggccacttttacagtaccggttcttggggggnaagctttgcccttngggggtggaccctttcggggtttt

SEQ ID NO: 304950 - DNA, 341 bp, Homo Sapiens
  misc_feature (305)..(305): n is a, c, g, or t
aatctttgagatatatgaagtcatccctgaatactgtttaatgctctggttaaactccatttcactctgaccaatcagagtatgtgagctgatcataaggagctattatcaagagacttgtcagaggattcactgcccaatatgtttttatgaccctttttatctgtaagagttgctggtattgctttttagaatgaaatagactaattttgtccattacagtgttgatagtttgataactcactgtggggaatcaattgatcttatcaggaataatataaccagtaggagggaaatgtaactgnaggcatataccagtttttatttaatataatggttta

SEQ ID NO: 304951 - DNA, 420 bp, Homo Sapiens
  misc_feature (262)..(262): n is a, c, g, or t
  misc_feature (332)..(332): n is a, c, g, or t
  misc_feature (344)..(344): n is a, c, g, or t
  misc_feature (353)..(353): n is a, c, g, or t
  misc_feature (393)..(393): n is a, c, g, or t
  misc_feature (410)..(410): n is a, c, g, or t
caagatcttccagggtaagttcatggagaaaaaagagaaaggatgaaaagaaagtgaagaacttcagaaaatttaatagatttcagagacagagtcccaattcaagacgaaaagcaaagtgacaagaaaaaaagttaacatagtttagaaacgaggttatttgtgcttgaactaggaaagaggcaggtggaaggaaaaggaaattaattatagagaatatttagggaggtatccaataagtcttgggtgggctgagtgtacnggaaggttaaggttaggaagggagggaaaatagggggattctcaagttcctagtttttgggccagatacnttgggttggccnaccttcacntcccctttaccattggaattggtttctttttgggcccaantgggttggccccccagnccgccttttt

SEQ ID NO: 304952 - DNA, 349 bp, Homo Sapiens
  misc_feature (57)..(57): n is a, c, g, or t
  misc_feature (329)..(329): n is a, c, g, or t
caaaagattaagtcttccttcctcgtgattgtactgctttattgcactgcttgcaanctgcagtagaaaataagcttttaagactttctagattttcaggctttctactaagctgttgtagcttctccatcccacatctgggtttgctcactttatttctatgtgccaaatcatgattgagactcgttgagacacacagtagaccacaggttgccatatttagcagagcaggggaaagaactctgggagagtttgcctttttgattaggggagaaacgctgttgggagggtattttgttgagcagctactctgggggcagggacccctngaggaacttatccaattttt

SEQ ID NO: 304953 - DNA, 359 bp, Homo Sapiens
  misc_feature (310)..(310): n is a, c, g, or t
ggacttctttcacccagcataactcatccttttttggaaaatttccttccacccatacacctgatttgagcattaacacctttcagatgattatatgttcaccacaagcctcccgctcttaaggaaaccgataaagtatcttatcgtaaagggtttttctctggagtgaagttgcaggctctgggtagttctgttgtgctgggtttttgttctgtgcctcccgtatgtgcatagggaaatgtgtctttgaaatgatgggggagctgtgggaaacgcactgccaaaaggaggtttcataccctgtttcacngattgtggtcacaggaatcagaaaagggaaatctgtgttcagtggaatt

SEQ ID NO: 304954 - DNA, 316 bp, Homo Sapiens
  misc_feature (305)..(305): n is a, c, g, or t
gtgcctggccctgggttgattttgatgcttagctaggtttgggatccattggattatttaacacccgaggtgccttttgtttctaatgatattctctcaacgtgttttaaaaatgaagcccatgagatagttatgagatagtagaacttttccctacattgggtgaagtaaaaatcttggggattttgatagtcagattatcttagggcattaaaaaatatccacaccgatggccctctcattttatagggggtttcggcagagggcatttttgggaacatctttggggaaaaacttggcagggntcccaaggtaa

SEQ ID NO: 304955 - DNA, 339 bp, Homo Sapiens
  misc_feature (74)..(74): n is a, c, g, or t
  misc_feature (76)..(76): n is a, c, g, or t
  misc_feature (105)..(105): n is a, c, g, or t
  misc_feature (137)..(137): n is a, c, g, or t
  misc_feature (178)..(178): n is a, c, g, or t
  misc_feature (258)..(258): n is a, c, g, or t
  misc_feature (260)..(260): n is a, c, g, or t
  misc_feature (276)..(276): n is a, c, g, or t
  misc_feature (291)..(291): n is a, c, g, or t
  misc_feature (323)..(323): n is a, c, g, or t
ttgagacaggatcttgctctgcccattgcagacttggagtgcaagtggtgcgatcacaagctcacttgcaaccntntaactcctggcctgaagtgatcctcctgnttcattttcccaaactgctgagattataggtntgagccactgtgcctgacctgacttggttctgataagcctntggcctggggtcatatgtcttattgagaccccgtaaagcagaggccttcgcagcccttaccaaactgggcaaagcagcantntgggtaaacagaaatntgctcagagctagantttactcataaaccagacatgagaagggtcgntccttcccctcaccag

SEQ ID NO: 304956 - DNA, 140 bp, Homo Sapiens
  misc_feature (77)..(77): n is a, c, g, or t
  misc_feature (129)..(129): n is a, c, g, or t
cctcaatttataattttaataattctccaagggagatattggatttttcataggaaaaaggagcccaaactcctccnaccctatcaaggacttgggggaaaatgggcctcatttggacatgtgtagggntgggagtaggg

SEQ ID NO: 304957 - DNA, 365 bp, Homo Sapiens
  misc_feature (226)..(226): n is a, c, g, or t
  misc_feature (237)..(237): n is a, c, g, or t
  misc_feature (267)..(267): n is a, c, g, or t
  misc_feature (307)..(307): n is a, c, g, or t
  misc_feature (342)..(342): n is a, c, g, or t
gcctgggaacataaattcagtatagaatagaatgtgttctcagcattctcatcagagatagagtttgctgtgttgtccagggctggagtgcaggggcaagatcataactcagtgcagattctaattcctgggcctcaaacgatcctcccacttctgcctcccaaggtaggctaaggactacagggctcaagtccacactgggattaggcttctgggcaagagggantcagggaaagntcatcagagtttaggcatggggaaaagagncagggtaggacttttcttaggctatatcataaaaggcatnggtcagggatgtgatatgggtttgggctgtatggnccctatccaaatcctcatctttg

SEQ ID NO: 304958 - DNA, 486 bp, Homo Sapiens
  misc_feature (337)..(337): n is a, c, g, or t
  misc_feature (420)..(420): n is a, c, g, or t
  misc_feature (443)..(443): n is a, c, g, or t
  misc_feature (467)..(467): n is a, c, g, or t
tgcaataatttataatttttatattatttatgctaactgagcatgaaagattagatggaccatttcagacttctctacctgacctatatcgtctgaacaaactgaccccttttaacataaacactgaaaaggggagcagtcctagtttttgctggcattggtcttaaaggagtgccttagctacttggctccaactcatcctctcatctctggatgaggagctgtcagtggcctcttcaggaccactgattatcagtaggtcccaagtcgtctctatggggaatcagagggcatatgattattcagggcatcattctggaacaaggtgttctatccntaaactggagtgttaacagttcctgttcccctaaacccggggtttaggtcccttttctaatgttttcctttccccacctcccnttcttcttgtgttccacagggcnggacttgctcttaataaccctttntaagggtgtgacattttag

SEQ ID NO: 304959 - DNA, 419 bp, Homo Sapiens
  misc_feature (122)..(160): n is a, c, g, or t
gaggtgggtgtctctgttgacttgtctgttctgttaccatgctgctacccaactgtgcaaagtagtttagggtggccagaacccagggaccattggatttcaaagcttgctttttctgttgnnnnnnnnnnnnnnnnnnnnnnnnnnnnnnnnnnnnnnnctgcccatgcatgaaaggatcctccaccttcttcccacccagagctccctccagggcctttctctatatatttatttatctgacatacagaacacgactttagtgaggcagagtgctggacagtcatgggtccccttctttggggtctgtcttttgaggagaggttgagttcaggggcaagacaggcctggccacacattccaaggggtacggaccagtgggggacctgggggcttgagttctgtttcttccgaggggg

SEQ ID NO: 304960 - DNA, 392 bp, Homo Sapiens
  misc_feature (338)..(338): n is a, c, g, or t
  misc_feature (371)..(371): n is a, c, g, or t
  misc_feature (378)..(378): n is a, c, g, or t
ggaaattttattctcttcattctccctccctttcaaataagtaataaataaaaagtggctgatcttccacttggtgcggtaagaagcatttaaatacactcccggccctcataattggtggcttcttggagaaaggtacttattagaagaaaaacacttccctatgtgttgttgttcgggcccttctcgttgatgaaattacacggtgagttgggtgaggcgaatttaccttgcccctttttaaaggtatttgtgggcagctcttgttgtaggggaatcagggggagagggagccacttctcttttaggtaaggaaatgcggaggagtgggccctctnccatcctttcaggagttttccaaaatggagttncactctngggtggggtgaggt

SEQ ID NO: 304961 - DNA, 393 bp, Homo Sapiens
  misc_feature (246)..(246): n is a, c, g, or t
  misc_feature (263)..(263): n is a, c, g, or t
  misc_feature (344)..(344): n is a, c, g, or t
  misc_feature (368)..(368): n is a, c, g, or t
gagtcttcaacattttgaattaaaaagcatctggggcaaaaacaaataaatacacacatatcagtgaactgctttaagttcagttagagaaggtgagattaaagaccagaagaaactcgagggagactgctgtataagtcccagttatctttccaaacagacaggttcatcacagcagtgaaggctagtcttcatctcccttcttgtggggattttctacatttaatgtggcagatcttgcccttnggaggatggggggcgtngcattgattgggggctgtgggttttgctgggagttttcatctttacttggaagtttgcaggacactgtgggggttttcctngtggaccattgggttttaccactngaaagtagggccaaagttcaagggc

SEQ ID NO: 304962 - DNA, 383 bp, Homo Sapiens
  misc_feature (122)..(122): n is a, c, g, or t
  misc_feature (345)..(345): n is a, c, g, or t
  misc_feature (354)..(354): n is a, c, g, or t
  misc_feature (371)..(371): n is a, c, g, or t
atgttgactctcatatctgggcttagaaccacaggaaagattctggagctccttgtgcaaaggtcatagaggattatcaatcttgcatattgtataaagtcctcaggtgacacagagtgctnctcgaatgcacacccaggcaacagtaaagattgtcattctcccacataaacacatcccactgttgaagttctgaatttcacagagggctgtcaaaagttgggataattgcctcttcgtgtgggatctgggtccacaggtggggttagtggactttcccaggaccaaggtttcaggcggcacatgttaagggctgtggacttacactaaggaaggatacagttntggcagganggaaactgtggggctcntttttggcacac

SEQ ID NO: 304963 - DNA, 369 bp, Homo Sapiens
  misc_feature (356)..(356): n is a, c, g, or t
ttttccaaaagtaagcattactgtattatagaaggaatgcctaaggaagatgtcctctataatccttagtggactcatttataagattcataaattgttttgtttggtcattgtatattaactctttcaggtgagtctcctgaaacttaaacatcttaggacgtgtttaagattattaggcacacatgttgggaattaagttgaaatcctgggtctttttattcaagagcgtatgttcctccctgtgtttgtctatttatgggaagtattcaggaattaggaaacatgggaaaggaaggcaattcaggtaattaccattaaaataggatgggatccttttttggataatggagtcnttttatttttttg

SEQ ID NO: 304964 - DNA, 169 bp, Homo Sapiens
tcagcaggtttctaatggctgtgagtctgttttcttactacaaaatatatcagtgtgttaggattatagagttgatttttctgattcaataaacaatcatcttgcattgcatttctgggacagtttctccttatcacttaaactacccttaaaacttcccaaatacttt

SEQ ID NO: 304965 - DNA, 129 bp, Homo Sapiens
  misc_feature (94)..(94): n is a, c, g, or t
tgcctgttggaattttgcataaaaggaagtccacctgagtatacatggtaccggagccctgctgtttgagagcgcctgctgcctgccggggctncacagggccttgctggagggagggccagggcttgg

SEQ ID NO: 304966 - DNA, 151 bp, Homo Sapiens
  misc_feature (34)..(34): n is a, c, g, or t
  misc_feature (43)..(43): n is a, c, g, or t
  misc_feature (45)..(45): n is a, c, g, or t
  misc_feature (54)..(54): n is a, c, g, or t
  misc_feature (57)..(57): n is a, c, g, or t
  misc_feature (61)..(61): n is a, c, g, or t
  misc_feature (63)..(63): n is a, c, g, or t
  misc_feature (74)..(74): n is a, c, g, or t
  misc_feature (83)..(83): n is a, c, g, or t
  misc_feature (90)..(90): n is a, c, g, or t
  misc_feature (95)..(95): n is a, c, g, or t
  misc_feature (111)..(111): n is a, c, g, or t
  misc_feature (118)..(118): n is a, c, g, or t
  misc_feature (121)..(121): n is a, c, g, or t
ttcttttttctatttgtggggttgcttattgtcnccggctacntnggggcctcngangtcncnttttttttgtnccttgtganccggggnttttncgggactgctgtgggngttggtnccngggggtttgctaccgggcgtcttgggctgg

SEQ ID NO: 304967 - DNA, 381 bp, Homo Sapiens
  misc_feature (339)..(339): n is a, c, g, or t
acatttctctgccagaaatcttggacttacaaagcttatttaaaaagtagtctgttgtcagaaaagatggtagcctagtcttggtattcctgtggagaacttagaaaacctgaagagtacttgtacccaaattggattgtgttttaatggacaatggctatattttccccatgtcaaaagaataccaatgaaagcagctgtttttcaagttcctagggggtccagttgtccaggaatccccaagggataaggatgctccctataaggagcaggaaccttaacctcactcaggtggacatcgtaggggaacctctaggctgtggggaatttcttaggggnacctcaaacttttcaaaaggcatccaggaggaggtcaaagct

SEQ ID NO: 304968 - DNA, 252 bp, Homo Sapiens
  misc_feature (80)..(80): n is a, c, g, or t
  misc_feature (131)..(131): n is a, c, g, or t
  misc_feature (211)..(211): n is a, c, g, or t
  misc_feature (228)..(228): n is a, c, g, or t
tagttaagacttctaataggatgaggttttcaatatgagccaccaaagtcaagctttgttttttccaaagccaaccaganttcccaggggccatacaggaaaggctgtgccaagtttctctagggtagggncatcttgggctggaaagctaatttaggtaaggaatctttggtttgtggaaacaggtaactcaggcagcttgcagggcatntttctcctaaaatgggnctgacttggggtacaatgttaacc

SEQ ID NO: 304969 - DNA, 516 bp, Homo Sapiens
  misc_feature (178)..(213): n is a, c, g, or t
  misc_feature (309)..(309): n is a, c, g, or t
  misc_feature (371)..(371): n is a, c, g, or t
  misc_feature (380)..(380): n is a, c, g, or t
  misc_feature (393)..(393): n is a, c, g, or t
  misc_feature (425)..(425): n is a, c, g, or t
  misc_feature (433)..(433): n is a, c, g, or t
  misc_feature (439)..(439): n is a, c, g, or t
  misc_feature (455)..(455): n is a, c, g, or t
  misc_feature (488)..(488): n is a, c, g, or t
  misc_feature (497)..(497): n is a, c, g, or t
ttcaaattaaatactttcttttaccagaatcccaataggtcaagggacagcttgtttctgccttctgaaggactagaggtggcctcttaccagaaggcccacgtgactgagggtctggttacctgggtcctaggtctgcctctaactaactttgtgttctacgcaagtcacgttctgnnnnnnnnnnnnnnnnnnnnnnnnnnnnnnnnnnnnaacagattgggctacggtccataatagagttcttagcctgagactgcttcatggggtgggtgactgtgtatacagggttcctgggggagggggttntacaaatccgtcagactctcagagggggggaactgtgaccttttcaatgtaaaaatcaactnggattgcancctctttgagggncttttcaggggccaacagttgggttctgaagntctttttncctccnggtcaccatggggggnttaaggccatgaggaaagctactttaggagtanggtttctanggggtttcccttttttggg

SEQ ID NO: 304970 - DNA, 518 bp, Homo Sapiens
  misc_feature (431)..(431): n is a, c, g, or t
  misc_feature (442)..(442): n is a, c, g, or t
  misc_feature (470)..(470): n is a, c, g, or t
  misc_feature (476)..(476): n is a, c, g, or t
  misc_feature (481)..(481): n is a, c, g, or t
  misc_feature (507)..(507): n is a, c, g, or t
gaaattggcaccaggcaggtgacagctagaggccacggtcttaatgaccacacaacatggtcttcatcagaatagattccatctccatgatgctttgcactaattaattctttccgcagcagcaccatgaggttggcggttcctttatttgccagctgtttattatttctgtgctaccaacattatgccaggcatggattggagtgtggaatcattcctggaagccaggccatgttcctgagttgtgctgctgtaagaattgggatttaaagttccaaatgtgtggcttccagtattttccttctaaaacagacacacgtcttatcccatttttatggttacatcacaagaatgattcacatttaatcaaacaagttcagggcagaatggataggctattctatctccggggttttgttggccaattgttntttttacacantttgttgattatacccgattgtgtcttngggctnccctngaaaccaaaccaaaccaatttttatngacccgtaggt

SEQ ID NO: 304971 - DNA, 417 bp, Homo Sapiens
ggaagaggatggcgaagaagtccagggcaagccttttcagttatacgcatcactttaacttccacttacattgtattggccaaaactgagtcacgtggacacagctagctaaagatagtccctaactaggcagccatgtagccagtgaatacagagaggtagagagggatttgggtctgttattaaaaggaagaaaaggagtgtgattcctgctgacagtttaggagtcttcaccacaaaaggattccagactctcaggctggaacctccctgccactttgttcatgcctgcaacaggctttattttttcacaaattggcaaaatattgaggaaagtaggttagtttatgttacatgtgggccacaattaaacttggaagggttaggacccaacagattttggggaaatttcaattt

SEQ ID NO: 304972 - DNA, 357 bp, Homo Sapiens
  misc_feature (336)..(336): n is a, c, g, or t
atgagcaccgtgcctctactcttttgttttattttttaatagagaggagatgtcattttgtcacccaggctggagtgcaatggccagacatagctcagtacagcctcgaacccctgggctcaagcaaccctcttgtctctgccttctgggtagctgggattataggcacttgccaccacacttgggctaatttttttgttgttgtttcaaatatttgtagagacagggtcttgctatgttgaccaagctggtatgggtactctgatcctccagccttcagcctccccaaaggcaatgaggttatagggaatggaggccaccgcacccagccaaaantaacattccggggggagcgtc

SEQ ID NO: 304973 - DNA, 511 bp, Homo Sapiens
  misc_feature (482)..(482): n is a, c, g, or t
  misc_feature (495)..(495): n is a, c, g, or t
ttctatattgtatatacagccaaaggacaaagtattcattatgaaatgctcattaatatgggtaaaaagcatctcaactacattcacccaaattgtgccaaataaaccatatatttagaaaaaaatgaattcattctatctggcataaggcaaggtaggataattaattttaactagcttaaagtagaattatttttgtcatacatacccagccagttaatcatgtgtccatatgctaccactcctcacacctgcctcaccttggcggggaagacttctcacattttgctgctccttgcacatgctgtcaaggccaatgccacttaaacagccaccaacctgttctccaggcacagagcttcaagcgtgaggtggcagcagatgggggaaaatatactttatttgtggatatctactttaaatgtaactaggagggtattataaaataggccttggaaaatacatcactttagggttacccnttaccaaattatntttatctcaatcgctg

SEQ ID NO: 304974 - DNA, 258 bp, Homo Sapiens
  misc_feature (87)..(87): n is a, c, g, or t
  misc_feature (98)..(98): n is a, c, g, or t
  misc_feature (100)..(100): n is a, c, g, or t
  misc_feature (118)..(118): n is a, c, g, or t
  misc_feature (157)..(157): n is a, c, g, or t
  misc_feature (186)..(186): n is a, c, g, or t
  misc_feature (195)..(195): n is a, c, g, or t
  misc_feature (209)..(209): n is a, c, g, or t
  misc_feature (215)..(215): n is a, c, g, or t
tccttagatcttaaacctggctgggacaccctggttgggacatccagggagggggaccagcaggtggcctaggcatgcctgagccantcctggctgantnatgcctgggtggtggttnattcacccaaggaggaaggggagagagaggaggaacggnttcccatccccagggcctggcccttcgantgactagantcaagtcatggggntgcctntgtcctctctatccttaccctccatcccagcccatcccaaggg

SEQ ID NO: 304975 - DNA, 498 bp, Homo Sapiens
  misc_feature (475)..(475): n is a, c, g, or t
gtcacagaaaatagaaactcgacggaaattcttttatcacctctcatcagtttccttttttccaacatgggagaatgtatccttgttaccaatccctcatcttcccctgcagctgtgccctttgcactgtgatttcagagttcctcccactaaaactggagcctatttctctgcttcatttacttatgtggaatgtggccacatgattactttagccaatagaatgttggttgatacgactcaagtaaaggcttgacatatgcttgcgagtggggcttgcctctttgcttgtccgtcttaggcatgctaaggggcatgccctgggggtaggcccgttactccaacaataatgaggagggcaagtggggaacagacctggggaccaaatctgtgggcctaggtgttcaaggcccaacctaggatcagccaaccagcaggatacataaggaggaggataaatagtgggttgtttttnaacttcactgactttttgggagt

SEQ ID NO: 304976 - DNA, 342 bp, Homo Sapiens
  misc_feature (286)..(286): n is a, c, g, or t
  misc_feature (309)..(309): n is a, c, g, or t
  misc_feature (320)..(320): n is a, c, g, or t
tatagtttttctgactttttataattaccttacctacctctaattaaatagcagtgaatttaaaaacacatctgtgctgggcctttcacattcagtttaggtgttacagaaaaactaactctttatacttttatttattactttgaggcatacgtaattaaattgtgcaattataataacaggttgtgggcaaatatgataggattgggcttaacatctgttgcaccttccttttaatatggccttcctgtattgcagagggctgggaaaacttaaaaactagttncagggatatggggtttgggttcntgcttaatggntaacccacttgttacggttacc

SEQ ID NO: 304977 - DNA, 269 bp, Homo Sapiens
  misc_feature (29)..(29): n is a, c, g, or t
  misc_feature (60)..(60): n is a, c, g, or t
  misc_feature (207)..(207): n is a, c, g, or t
agagctaggaaaacaggtctgagtctgtncagggctgggaggaaaagtgactttggcggngatgtcacaattatctcctggtcacctcagaagtccagggaaccttagggcatactgtatggatcagtaggaacagctgggtggcagagcagcacatggcagctgacccctggccccttacactctgcagagaatatggccctaccnttccatgaaggtgggcacaagaaggcttaggggagccctttacgggagcaggggtatttaag

SEQ ID NO: 304978 - DNA, 316 bp, Homo Sapiens
  misc_feature (29)..(29): n is a, c, g, or t
  misc_feature (38)..(38): n is a, c, g, or t
  misc_feature (142)..(142): n is a, c, g, or t
  misc_feature (145)..(145): n is a, c, g, or t
taagtactaaagaagggcttgggcagacngtcttacantttatcttggcaatagagcagtggcatacatggaatgaagcccagagccaaccagccagtacacacatactagacaaacacaggcagttcaacactgctgggcngantacactgttgccctgagtttaggacaagggatttatatccaaaaattgcttccaagtcctcttaaggcttggcttcctgggcttcctctcaagcaccccatctgtctgcaaggaataggaaacagacagcctggaacagctggaacggagtcccaacacagggggctgcgg

SEQ ID NO: 304979 - DNA, 333 bp, Homo Sapiens
  misc_feature (77)..(123): n is a, c, g, or t
  misc_feature (175)..(175): n is a, c, g, or t
  misc_feature (225)..(225): n is a, c, g, or t
  misc_feature (229)..(229): n is a, c, g, or t
cttaatataacttataatttggtatgaatgatttaatttatttcacattttaatctctttgtaggggcagcattttnnnnnnnnnnnnnnnnnnnnnnnnnnnnnnnnnnnnnnnnnnnnnnntgagttcctttccaattgcttattgtgctcttagatctattcaatcaccatnggcaatcagcattgaaagccaatctgccctctgggttagggagctaactngggngctctaacctatctttacaaaccttgctatatactgtaatcctttcaaatggcaactgtggacacaaggtattacaggactttttaaaaacctggttctcttgg

SEQ ID NO: 304980 - DNA, 505 bp, Homo Sapiens
  misc_feature (122)..(393): n is a, c, g, or t
  misc_feature (398)..(398): n is a, c, g, or t
  misc_feature (432)..(432): n is a, c, g, or t
  misc_feature (464)..(464): n is a, c, g, or t
  misc_feature (481)..(481): n is a, c, g, or t
ttaaggggagcattattaaagaaattaaattttgaaaatatcattcatgtgtcagttctcaatgtttacaaaaactctcagacagctcttggtaaacatctccccaaacaccaaccttgggnnnnnnnnnnnnnnnnnnnnnnnnnnnnnnnnnnnnnnnnnnnnnnnnnnnnnnnnnnnnnnnnnnnnnnnnnnnnnnnnnnnnnnnnnnnnnnnnnnnnnnnnnnnnnnnnnnnnnnnnnnnnnnnnnnnnnnnnnnnnnnnnnnnnnnnnnnnnnnnnnnnnnnnnnnnnnnnnnnnnnnnnnnnnnnnnnnnnnnnnnnnnnnnnnnnnnnnnnnnnnnnnnnnnnnnnnnnnnnnnnnnnnnnnnnnnnnnnnnnnnnnnnnnnnnnngccgnaaattccttgccacttgccctctaggctgggggncaacagagtgaggacttccatcttcaaaaaanttaaaaggcttcatttnttcaaaaggttcccttctattttt

SEQ ID NO: 304981 - DNA, 398 bp, Homo Sapiens
  misc_feature (157)..(157): n is a, c, g, or t
  misc_feature (221)..(221): n is a, c, g, or t
  misc_feature (286)..(286): n is a, c, g, or t
  misc_feature (315)..(315): n is a, c, g, or t
  misc_feature (349)..(349): n is a, c, g, or t
  misc_feature (355)..(355): n is a, c, g, or t
tttcaattttcaatgtaaccttttattataaattaagacccataactgtacacacagagtctgttaccaaaaaagaaattccttccattggccaattattcaaccacatgaagtctactaaaggatgatgccaagccacccatcagtccacacaggntccatcatggatggatagccagttcctttttctctctctagtttctcttccttgattccacctntaggatcccctagctctcttattgtcctttgccttgtcctcaagatcctaccaagagtcctgggnttcccacctggggaggcatgtaccagttnttcaaacctttgtgtgtttctgattcctcaggantaccgnatctacaaactaggggaaactggtactcttgcttatactgggg

SEQ ID NO: 304982 - DNA, 497 bp, Homo Sapiens
  misc_feature (99)..(99): n is a, c, g, or t
  misc_feature (345)..(346): n is a, c, g, or t
  misc_feature (403)..(403): n is a, c, g, or t
  misc_feature (439)..(439): n is a, c, g, or t
  misc_feature (458)..(458): n is a, c, g, or t
ttctttcttaatttaagccagctgggattttaataaggattccatttaacttgtagatcaattgagagagtattgtcatcttggtcgttggcaaagccngaggtcctgtcctctcactctcccgccggagagcatgagcttcaccactggctccaccttttccaccaactatcagtccctaggctctgtccaggcgcccagctacggcccctggatgttcagcagtgaggcaagcgtctatgcaggtgctgggggttctggttcctgggatctccgtgtcctgctccaccagcttccaggggtggcatggggtctgggggcctgggcacgggggaatggccgggnngtctggcagggaatggggaggcatccagaaacaagaaggagaccatgcaaagccttnaacgaccgcctggggctcctacctggggcagagttnagggagcctgggagacttnagaaccagaagcttggagagcaaaatccgggagcatttt

SEQ ID NO: 304983 - DNA, 360 bp, Homo Sapiens
  misc_feature (348)..(348): n is a, c, g, or t
cagtgattaaacaaatgatgacaaaacataggttaccacgttctctcccatggaatacccatttctgtaaacacccaaaatgttccagtggggttttcctgctttataaagcagtacatattttaaaccccttttactcttaatttcaaagacgtttgggcgttttgcaaagctaggaaaaagtaattttatctctcactgccatacctacagtcaaactattaaataggtaagggccaccttgttaaaataatggggattttcaatctacttttcaactttgagggggtccggcatttacaactattaattacttcttttagggataactcctggtccacttagggnaccccaaattac

SEQ ID NO: 304984 - DNA, 263 bp, Homo Sapiens
  misc_feature (58)..(58): n is a, c, g, or t
  misc_feature (72)..(72): n is a, c, g, or t
  misc_feature (211)..(211): n is a, c, g, or t
  misc_feature (219)..(219): n is a, c, g, or t
  misc_feature (252)..(252): n is a, c, g, or t
aaagatgactaaagagacacggacaactcaggtggaaaaggaatgcatgatcttgggnctggaatcctggantttaaaaaaacaatgctggtaagggacggttactgggggacaacttgcctggaacagggaatagggggtctgtacggttggggtaatactgttgttttcgagggtttaaactccctggatttcctggctggcctgtttnttttaaantaggtgggatttttggggctttatttgttcctnttcttaccact

SEQ ID NO: 304985 - DNA, 111 bp, Homo Sapiens
  misc_feature (77)..(77): n is a, c, g, or t
ttcaaatggtaaatggaatacctggataataggattgggggggttattattttcatggctttactcaggttaaaggncatggcttggtatattttccacattcttggcagg

SEQ ID NO: 304986 - DNA, 350 bp, Homo Sapiens
  misc_feature (51)..(51): n is a, c, g, or t
  misc_feature (81)..(81): n is a, c, g, or t
  misc_feature (116)..(116): n is a, c, g, or t
  misc_feature (158)..(158): n is a, c, g, or t
  misc_feature (196)..(196): n is a, c, g, or t
  misc_feature (232)..(232): n is a, c, g, or t
  misc_feature (238)..(238): n is a, c, g, or t
  misc_feature (289)..(289): n is a, c, g, or t
  misc_feature (308)..(308): n is a, c, g, or t
  misc_feature (325)..(325): n is a, c, g, or t
cctgacacacacagactaacaaaaactctgagagtttctgtgttcccaggnattaatcccaccagaacaagcctcggtctnttgctaaactctgattctcatttcctccccacctncctttgctacaaagctatggaccatcaagttttaatgcagtnttgagctgttgattaaaacagcatgttatcttagaatntcagacaacatatgacaataaagtaggcataaaatntcaggnaaacaaatgtgcccctgcgtctgcactgggatgcaaatgcacaaatgggcngaacttttaaaagcttccntggttcccaacaaggtnttagggggcattaggaattgatggg

SEQ ID NO: 304987 - DNA, 439 bp, Homo Sapiens
  misc_feature (329)..(329): n is a, c, g, or t
  misc_feature (338)..(338): n is a, c, g, or t
  misc_feature (344)..(344): n is a, c, g, or t
  misc_feature (357)..(357): n is a, c, g, or t
  misc_feature (407)..(407): n is a, c, g, or t
ttctagaagaagaaatttaaagccagccattgttttacagaaaaatcatcctgccattgaaacccaaagtggtccatccagtctggaggccgtgggaaccatgaatcctttcagagtttgaagcaaatgcaaaactgttcacgtcatcctgggttattttattgtctcaccaccttcctgaaatggagctcgaacttcatttagagtagctctcgggcacgctggcaggggggctcccagagctgagtgagcaaggggtgcattgagaagcaggcgttctgccccgaccggcccacctcactctccgcagagggaggcatttgtgggtngggccaatntgcatncagccccagggtngggaccaacttccagaaggaaacttcaggaaccaccaaatgttaggatgntttaacccaaaataggtcttgttccctctttc

SEQ ID NO: 304988 - DNA, 361 bp, Homo Sapiens
  misc_feature (345)..(345): n is a, c, g, or t
ttccaaacctgggggtggggagattagataaccacggtcaacccactggtcccagagcttccccatttgcaaactggggctgtaatttgaaaaagcaaaagaaggggatggtgtgagtaatgatgaaaaccagggtttctgagaccaccacttagtaattaaacttggaagcagtgggtgggaaaagaagcaaactagtggcttctcaaaactagcctgagttaactactatgggatatggccctgggatggacctggggagggatctttgccccagtatcccgcttgcataaccttcaacctgtctccttggggatgggttggttaggaacaggcctgacttcnggggagcagttcccct

SEQ ID NO: 304989 - DNA, 195 bp, Homo Sapiens
  misc_feature (46)..(46): n is a, c, g, or t
  misc_feature (89)..(89): n is a, c, g, or t
  misc_feature (125)..(125): n is a, c, g, or t
  misc_feature (131)..(131): n is a, c, g, or t
  misc_feature (177)..(177): n is a, c, g, or t
aaaaaatgaatttattggaagatatattagtttccagcagctgctntaacaaattcaaacaaacttgatggcttaaaacagtagaagtntattctctgacagttctggaggccagaaatccaaantcaagntgtcagcagggccaccctccctctggagactccaggggggaaaccntctccttttctcttctag

SEQ ID NO: 304990 - DNA, 154 bp, Homo Sapiens
  misc_feature (40)..(40): n is a, c, g, or t
  misc_feature (48)..(48): n is a, c, g, or t
  misc_feature (57)..(57): n is a, c, g, or t
  misc_feature (67)..(67): n is a, c, g, or t
  misc_feature (85)..(85): n is a, c, g, or t
  misc_feature (87)..(88): n is a, c, g, or t
  misc_feature (108)..(109): n is a, c, g, or t
  misc_feature (130)..(130): n is a, c, g, or t
gtgctgggaaacagggaaatggctgggcagcaattgagantcgcaaancaggaagantatggagggntgccagggacaacggggntnntcgggtacccagaagccttnntatgccacaagccagggcagntgccttagggtcaagaggtggaca

SEQ ID NO: 304991 - DNA, 524 bp, Homo Sapiens
  misc_feature (71)..(71): n is a, c, g, or t
  misc_feature (95)..(106): n is a, c, g, or t
  misc_feature (148)..(148): n is a, c, g, or t
  misc_feature (235)..(258): n is a, c, g, or t
  misc_feature (304)..(304): n is a, c, g, or t
  misc_feature (400)..(400): n is a, c, g, or t
  misc_feature (430)..(430): n is a, c, g, or t
  misc_feature (436)..(436): n is a, c, g, or t
  misc_feature (451)..(459): n is a, c, g, or t
  misc_feature (464)..(464): n is a, c, g, or t
  misc_feature (473)..(473): n is a, c, g, or t
  misc_feature (487)..(487): n is a, c, g, or t
  misc_feature (495)..(495): n is a, c, g, or t
ccaagttttcattatttgtcgagctattcccaatgtccctctctggtgactctccactgaagatagttttnaactttttctttacatataattgnnnnnnnnnnnngaaacttagtagtcattgctttgaccttcaacactggttgtnaggttacagtgattataggtttagactaagccatgggccctcagtccccctgaactcctgtgtttatgtagtaatccccctctctcnnnnnnnnnnnnnnnnnnnnnnnncttttcttctagggaaagtcaatactcccaggttatttacctatgnggcaattctaaggaattctggattcctctctaggggttgagggtaacacaggactggcatcttgtggggggctggaccataacgggcacatatggngggttttggactttctcttggtaaccaggnggctgntttcaacactggacnnnnnnnnncactngttaacccnaggggggtactttnactggggngggggttttccccggggttttttccctta

SEQ ID NO: 304992 - DNA, 329 bp, Homo Sapiens
  misc_feature (56)..(56): n is a, c, g, or t
  misc_feature (125)..(125): n is a, c, g, or t
  misc_feature (173)..(173): n is a, c, g, or t
  misc_feature (180)..(180): n is a, c, g, or t
  misc_feature (201)..(201): n is a, c, g, or t
  misc_feature (210)..(210): n is a, c, g, or t
  misc_feature (217)..(217): n is a, c, g, or t
  misc_feature (234)..(234): n is a, c, g, or t
  misc_feature (241)..(241): n is a, c, g, or t
  misc_feature (268)..(268): n is a, c, g, or t
  misc_feature (288)..(288): n is a, c, g, or t
  misc_feature (293)..(293): n is a, c, g, or t
  misc_feature (302)..(302): n is a, c, g, or t
  misc_feature (312)..(312): n is a, c, g, or t
tacgttcatttattgagagcagagtgggaaaacaacatttctttcttattagtggnctaaagcctattcagtgcctcactaaaagaaagctaaacctaaggaccatatgacattttatacttttnctttatgaaatttattgttagaagttgagtttaagaaggctatatggngtaaggngataacttttttaaacatagnatttaattnctttttnctaagactgtctaaagnatatccnaggggcaatttgtattataggggtttnaggtaaaattaaggcttgangcccnttaaaaaanttaaacccancaacttggccttaaata

SEQ ID NO: 304993 - DNA, 279 bp, Homo Sapiens
  misc_feature (106)..(106): n is a, c, g, or t
  misc_feature (234)..(234): n is a, c, g, or t
gtgcccagccactcagcttttgagggttaatcatcaaccgcacaaaggggaaaggaggagcagtggagggcagtacacaagcggccacctttcctccttcccaggnacaatgcccataagggaggcaaagacccgccaataaagtcagtgggggatgctttaaacatcttgtgggggtcacagtttgtacccagtctattatcccatgttgacattaattcttgggcaaaggtnggggctgtgggtcttatggaagctgttctttacggaagctggggt

SEQ ID NO: 304994 - DNA, 466 bp, Homo Sapiens
  misc_feature (136)..(150): n is a, c, g, or t
  misc_feature (376)..(376): n is a, c, g, or t
  misc_feature (382)..(382): n is a, c, g, or t
  misc_feature (387)..(387): n is a, c, g, or t
  misc_feature (398)..(398): n is a, c, g, or t
  misc_feature (407)..(407): n is a, c, g, or t
  misc_feature (416)..(416): n is a, c, g, or t
gactctgcaacatgtgttcttaaccatcagactttatttctctggtgggcaacacaggtagatgtgacaggttagaagtattagatataaatataagttatcgagatgatatgactaccgaattcactactgcacnnnnnnnnnnnnnnnaaaaacatgtatttcagcacactgctaaaccacagcaagaatctttttaaaaagaccttacaagaagcatgattacaggtcacaaaatcaagggaaaatattgtcatcattattttttaataagtgataagtgagggctgatgagtgtaggacctgttgctttatttaataggaaatttgtggcatctgggtgagggacttgttattttggcccaggcacactgcngggccnggggntttggactccncctgtgggnattttcggntccgtgttttacaccccttagttggttttacaatcttttcacaatttggg

SEQ ID NO: 304995 - DNA, 384 bp, Homo Sapiens
  misc_feature (245)..(245): n is a, c, g, or t
  misc_feature (327)..(327): n is a, c, g, or t
  misc_feature (333)..(333): n is a, c, g, or t
  misc_feature (374)..(374): n is a, c, g, or t
aagcatgcctagtaaggactccatcatcaagtgtatccatgggtacatgggatttggctcacgtagaccctaatgatgtaagttgattgcatgagaagtttgctttcaatcaagttgcatgttttctgattaaacccaatgacccacttgcaaatctattgcttcctatcctatgactctgagctctgctggacttaagagattttggtacccaagggaagaatacttctttggtactcaaggangaataccctggaatcggagactgagcctgtcacctgggactttcggagctttttcttttccctatgtgtgtattaaaggganttacantcttggatttagggtaatcaaccaccctgttcaaggggganattttgggtt

SEQ ID NO: 304996 - DNA, 502 bp, Homo Sapiens
  misc_feature (348)..(348): n is a, c, g, or t
  misc_feature (416)..(416): n is a, c, g, or t
  misc_feature (429)..(429): n is a, c, g, or t
  misc_feature (451)..(451): n is a, c, g, or t
  misc_feature (457)..(457): n is a, c, g, or t
  misc_feature (463)..(463): n is a, c, g, or t
  misc_feature (482)..(482): n is a, c, g, or t
gtaattgaaacttggttctaagtttccctcttgtcccttcctgtttaatgcagtcagctgtcctcgaatttattttttggtggtactttgaatcagccccctgtgtgagaattcaacaaaaacgcaactgatacaaagcatctgcactgagtctgcaggaggcttctcacatgctttgggatatcttcagggaaatacgctcttaatagaaactgagaatttaagaaagtctgcctgggcggaggacacctgcacttgttaccctgagttgattcctggaaacttcgggacccctgggtatttaacagagggacttcagtggggagctcctgggtcaggagggacttnggatgtttgttcatttacatttctaagttgaggactgttcccacattcatcttaggggaaaatgggtnggcccctgttccnttaaaaggatttgtgttgccgnccactngcaacnttgggtgaaggaccctggncagtttttgaacccctttta

SEQ ID NO: 304997 - DNA, 425 bp, Homo Sapiens
  misc_feature (103)..(103): n is a, c, g, or t
  misc_feature (353)..(353): n is a, c, g, or t
  misc_feature (358)..(358): n is a, c, g, or t
  misc_feature (378)..(378): n is a, c, g, or t
  misc_feature (386)..(386): n is a, c, g, or t
  misc_feature (409)..(409): n is a, c, g, or t
ggcacgagaccagatatgcagtggttaccatcacacagataaacgctgccttctgtacataccccttatgctgtactaattaacaaaccccttgccagggctngggaggtgagggtgaaggagaatcttagcagaagggcagagtcaggacttgcatctgccactgctgggcactgaagccctgggagcagcttcagatagtacctgtactttctcatgcagactccctctgaacaagagccttgtaggcccctctccttcatttcccaccagcctcttatcaggcgggctttccaccattacacccgggaggccacggttttgagggaacaaccaaacccatggcaaagggnccggngcgcggttgggttcacggcntgttaatngcccaggcattttttgggaaggnttggggggcagggcag

SEQ ID NO: 304998 - DNA, 229 bp, Homo Sapiens
tttcctgctcctggtcctcagtgtcagtttcgctgtcactttctccaggaaggctgatgtccttagactaggctatgtgttctattgcattgctcctttaaagtaacattttaaatctttaaaaataacattcatctttaacatagttgctttttaaaaatcatctctcatgggctgctcaattataacctcaaactgccatgccagagagcatatctgccttgtttac

SEQ ID NO: 304999 - DNA, 340 bp, Homo Sapiens
  misc_feature (137)..(137): n is a, c, g, or t
  misc_feature (316)..(316): n is a, c, g, or t
tggttgaaaatgaactgttttttgtgcctgctgtgatttgaaataacatttacaggaaatggaaaagcttccatgtgttaccctgtttatgaatttaaatgtcaacccccaacacaatacatgaaattccagatctncttttctgtatataacctttgttcaagttgccagttttaaaatttcacattagagagaacttgggagatctttatccaaatgtaataaccaaaagaaaaacactgtatcctttgaaatctaaaaggtgcttactttttttcttggctctctctctccctccttccgggccctcccgggnttgtagaggcacacgtaaggggca

SEQ ID NO: 305000 - DNA, 409 bp, Homo Sapiens
  misc_feature (348)..(348): n is a, c, g, or t
  misc_feature (374)..(374): n is a, c, g, or t
  misc_feature (380)..(380): n is a, c, g, or t
  misc_feature (388)..(388): n is a, c, g, or t
ccaggacagggtcagatggtgacagttttctggggatggagctcttcttcagagttccaaacctcctcatccccttttcatgatggttaggctgctaattttcacaaccactgtgaatacaaggctgctagttttcaaggttgccacagagttggctagagaggaatgagaatagggtgagttaaaacaacacaaagctcactcttcttaccaatattgagccattttcttcttaaataagcatgccttagtttgttgaaagcttcaggctaatttctaggaattctggaaaaagttgtttttaacaattttttccagtgttctcatagtttcgtgggaagagcaganttttgggaagtggcttaccctggccntttccnggaagttntcttatggtattggggtgcca

SEQ ID NO: 305001 - DNA, 350 bp, Homo Sapiens
  misc_feature (290)..(290): n is a, c, g, or t
  misc_feature (327)..(327): n is a, c, g, or t
  misc_feature (337)..(337): n is a, c, g, or t
catgatcaataccctggattatctgaaaagctgtcgatgcccttttacaggtttatggtgacagacccgtatcatcttaaagtatgttcatagttaaggcttgacttaagaaaataagagaaccagacataatggaaagacctcttcaataatgttgtcatgcctctcagtgaacgtgctcacagtcacacttggtttgggctccccaaacccacaataggaaaaggaaaaatgagtattttgtttttcatctgttttgtatttaaagggcttggggttacttcctcctngccctcttttcttccctggaacaggagtttacaactncttctggggnttctttattgggg

SEQ ID NO: 305002 - DNA, 107 bp, Homo Sapiens
  misc_feature (53)..(53): n is a, c, g, or t
tcggcgtggaggagatagtgctctctacgcagggcctctgatcacagagcgtnaagactcccttttaagcccttagaggtgaaacataagaaaagcaaaagggcctt

SEQ ID NO: 305003 - DNA, 135 bp, Homo Sapiens
ttttttgctgagacacttatttcctgtctttattcaatgccagtgaataccagaaagtttccttttcaggagctcgaaattcaggcatcaggaaggtgaacagagccgcaagcaaaggcacatggacacgtgtga

SEQ ID NO: 305004 - DNA, 123 bp, Homo Sapiens
ttgtcaataaatttggaaagtttattctgccaaggttaagtaggagcctgtgacacagcctcaggaggtcctgatgacaggtgcccaaggtggttggggtacagtcttctaatacattttaga

SEQ ID NO: 305005 - DNA, 418 bp, Homo Sapiens
  misc_feature (301)..(301): n is a, c, g, or t
  misc_feature (336)..(360): n is a, c, g, or t
  misc_feature (369)..(369): n is a, c, g, or t
  misc_feature (380)..(380): n is a, c, g, or t
  misc_feature (393)..(393): n is a, c, g, or t
  misc_feature (404)..(404): n is a, c, g, or t
tctgcccttaactaagttcccaattctctgtaaccctttataacactctttgatgagtgcatagtagctgctgagtgttcacagctggtagtacaccatttacttctactcccaccaagtgaattatctgttgcccagctaatgcattccaagatgatataaaccgtacttactattctaattatatgataaagtggggttacttaaaccaatgaaatatgagtgcaaaaggaaaaaacagagctctttttatggaatattaaggttaatgggctttggggaaagggaaggaataaatttnatattgggccaaaaatatggtccaattcacatgtnnnnnnnnnnnnnnnnnnnnnnnnncctccattnaaaaacccccntacacttgggggnaccaccctttnaaaatatggtcttt

SEQ ID NO: 305006 - DNA, 360 bp, Homo Sapiens
  misc_feature (35)..(35): n is a, c, g, or t
  misc_feature (120)..(120): n is a, c, g, or t
  misc_feature (139)..(139): n is a, c, g, or t
  misc_feature (219)..(219): n is a, c, g, or t
  misc_feature (254)..(254): n is a, c, g, or t
  misc_feature (320)..(320): n is a, c, g, or t
  misc_feature (334)..(334): n is a, c, g, or t
  misc_feature (348)..(348): n is a, c, g, or t
gggaaggaaatgagggatgacccttggaacgtttnaaggaagaaaattctagacagaggatatctccaaagaaaggtcccaaaaaggaagtgtgtctaaatttttgaagaagaataaganagctgacaaggagtaggtnatgggggagttagaagcgatgaagtcagagacatattaaggaaggcagagagtggagtagcaggttgttgtaggtcatcntaggaaatcgtaaggatgttgccttttattctgtnggataatatctgctaaaagctgttgcatgttactattattacatcatccacagcctgagacttttncaaaaacagggttngtactctgttcagnattgttaaatat

SEQ ID NO: 305007 - DNA, 144 bp, Homo Sapiens
  misc_feature (47)..(48): n is a, c, g, or t
  misc_feature (110)..(110): n is a, c, g, or t
agtcaactatcaaaacacggtacttctcttacatattacattgtgtnntctctgaaattgaatttgttatacatgtagatagtatattaagaggtttgctcttttacaangtcaattttctctttgaaaataaaaagaccatga

SEQ ID NO: 305008 - DNA, 411 bp, Homo Sapiens
  misc_feature (86)..(94): n is a, c, g, or t
  misc_feature (295)..(295): n is a, c, g, or t
  misc_feature (302)..(302): n is a, c, g, or t
  misc_feature (316)..(316): n is a, c, g, or t
  misc_feature (327)..(327): n is a, c, g, or t
  misc_feature (337)..(337): n is a, c, g, or t
  misc_feature (351)..(351): n is a, c, g, or t
  misc_feature (357)..(357): n is a, c, g, or t
  misc_feature (362)..(362): n is a, c, g, or t
  misc_feature (382)..(382): n is a, c, g, or t
  misc_feature (392)..(392): n is a, c, g, or t
agatacaggttgatgcctttacatctgagtttttgcaaaagcataagtctcatgctgtttcaagtgaacatgggcgccaatgtcannnnnnnnngttattatacttgcatttttgtaatcctagactaacctacttttttaggcaggaaaattctctaattagcattaaacattaaatactgtttattgctcccaattccattttgacaactgaggataataaaacatacttgtccagtactgtgaggacacagtactttatatattgtagctcatgttattctcatggacagtncatgtgngggtgggattgtcnggggtattgtnaatatccatncacctcgttttttnacaggntgganaaaagtggacacttcggggnggttgggggntgtatttcagtgttcacag

SEQ ID NO: 305009 - DNA, 170 bp, Homo Sapiens
  misc_feature (120)..(120): n is a, c, g, or t
  misc_feature (126)..(126): n is a, c, g, or t
  misc_feature (149)..(149): n is a, c, g, or t
tagcttgttccctctagtaaatgcatcaacactagtaatgcagggggggaatgattttaggcttacgttttcccacttcaggttaggcaggaaaggtcttttccacttcttttggggtcntatctnctacttctttgggcggtgtttancaattaggtgggaccattaag

SEQ ID NO: 305010 - DNA, 203 bp, Homo Sapiens
tttcggcacaggctaattaagatattcattgagcacttaaactgtgctagggaaaaccaaagtctgccttgaactgataggtagcaggataacactgctggatcccaaatcagagagtgacactatggaaatagagcaccaggagttggccattttcctaaagagattggctggttcccagttttttaacaagatctgtgagg

SEQ ID NO: 305011 - DNA, 243 bp, Homo Sapiens
tgccatgttactcaggcttgggttcttatttttgactgtggttttgaaagccccataaatataaaatataacttactttaaatgctgttaggtcacctttcaaatcaccaacatacctaggggttataaatttaaagaccttgtggcatctcatttgttgctaaaccagttctggttaggttaatttatttacacaagtttgccagttaactggcaacagtgggggcaaaaggcttctttttc

SEQ ID NO: 305012 - DNA, 409 bp, Homo Sapiens
  misc_feature (11)..(11): n is a, c, g, or t
  misc_feature (38)..(38): n is a, c, g, or t
  misc_feature (45)..(45): n is a, c, g, or t
  misc_feature (233)..(233): n is a, c, g, or t
  misc_feature (294)..(294): n is a, c, g, or t
  misc_feature (311)..(311): n is a, c, g, or t
  misc_feature (334)..(334): n is a, c, g, or t
  misc_feature (376)..(376): n is a, c, g, or t
tagtttaaaanaacacaaacagctaaatattgatttgnctatttncctttctaatataccatctaggtatcactgagattaaaagtcatgatttcaagaactggactcaggctcaattgtcactgttactctcctcccaaacacccctgtccgatgcatacccagggatgtttaggtagtgggtatttaacggtgtgaatcaaacaactgatgttaaaacatctgcagagganttgcttgctatgggaaactacccctacagtcccagcaggggggagcgcctgaggtattaanactgttgggctttcaanccattttgttcctttctccggtngggggctgtgtctctattctggcggtggaaaatggttggggnaattattttatttctatgggtaaatggggaagc

SEQ ID NO: 305013 - DNA, 132 bp, Homo Sapiens
taaaaggtggtttcttggtttttttccccctataggacacactaatttatttaagccataatctcttgacattaaacttttaagttcactctgtctgtaaagtatactcagattccctgctgaagggcaatg

SEQ ID NO: 305014 - DNA, 423 bp, Homo Sapiens
  misc_feature (327)..(327): n is a, c, g, or t
  misc_feature (358)..(358): n is a, c, g, or t
  misc_feature (399)..(399): n is a, c, g, or t
  misc_feature (406)..(406): n is a, c, g, or t
cctgatctactaaggttgatataatcaggctatttacaagttcactgtgggtcagacaacagtatttatattcatgcacacagaaaattcgattagatagtgccgaggaagagcacacaccgatgggccgattaccctgaattcaggcagctcagattctccattcgcttgaatgtcatattagctggggatatcccttttgtgacgcagaatcttgcagcgaaacagttgggtgtagcctcctgtgagaaagaaatgcttgcagcaggggattttccagggccggcatctcaattgcacagaaaaacattttggggaatgtttccnttcagcccggcagttctggaaggttttgagncggaatgggttgaggaaggtttctaaccggggcgttccttngggggtnggagggttgatggggcc

SEQ ID NO: 305015 - DNA, 385 bp, Homo Sapiens
  misc_feature (328)..(328): n is a, c, g, or t
tattgatttcttggccatcagctaaaagaaactaaacattcaagtacctccacgatgactgagcatgcgggaagtggtttatttacaacaggttccctggacattttatttgatgtatgctgtcctgacagactccacccatgtgatcaagcctgctatgtatgtctggggccactttgtagttttcccaaaggtgaaatcagagggagggctgaagtggtgacaaggccaaattggctacagactcaatcccttgcgggggatgaggatgtaactcacttaaatgggtgctaaggccagctggggggattagggctagggggccacnaaccctgcccaaaggaatacttttaggggaccacttacaagctggcaggatttaacc

SEQ ID NO: 305016 - DNA, 248 bp, Homo Sapiens
  misc_feature (48)..(48): n is a, c, g, or t
  misc_feature (88)..(88): n is a, c, g, or t
  misc_feature (90)..(90): n is a, c, g, or t
  misc_feature (113)..(113): n is a, c, g, or t
  misc_feature (116)..(116): n is a, c, g, or t
  misc_feature (118)..(118): n is a, c, g, or t
  misc_feature (128)..(128): n is a, c, g, or t
agagctagcaccatgagctataccctgtcattcttgaaggaaaatgangcataatttctgaataattcagaaagaacttaacaatctntncagttagtttttaaataacaatnctntntatcaaattnctgaattaacttttctgaattcacgggtttctaaaactggccttaagcaaaagtctgaaacctaggctgggaaccatgtaacccagggccaagaaggtactttaaagtgtcttaggagtt

SEQ ID NO: 305017 - DNA, 379 bp, Homo Sapiens
  misc_feature (45)..(45): n is a, c, g, or t
  misc_feature (72)..(72): n is a, c, g, or t
  misc_feature (328)..(328): n is a, c, g, or t
gcacgtgacccagagtaggcgttcagtgaataaatgggcataganctgttgtatttaagtttgcttctaatncccataggactcctacagttggaccagatttggatagaatgcgagcaaattatgccagtgggttggagttcattttacttttcctttaatctacctttttctaaggttagactttatttggctatcatccctgcagcttttatttattcataaggcttgaatagccagttataaatgtcatatgttttatttatggcaggcaatagtgttcgatttgggtaccttggaactgttgttaacaatctggacatggaantacaattaaatggcacttaacagggagtttcatttaagggtattttatttc

SEQ ID NO: 305018 - DNA, 127 bp, Homo Sapiens
  misc_feature (116)..(116): n is a, c, g, or t
caatttagggcaatgaaaaaggtcagaactatccaattcattctgtagcagttaggccacaaaatacttgtatggctttgatcatgtctttgatcttttctgagctgctttttccntctcaaataag

SEQ ID NO: 305019 - DNA, 122 bp, Homo Sapiens
tcaggtcaaatagatggaagttgaagtttgaagatttgggttaaagtactggttctgctaattgtttctctggctttgcatgagtgattctgtcactcttaaatttcagttttctcatctgt

SEQ ID NO: 305020 - DNA, 126 bp, Homo Sapiens
  misc_feature (71)..(71): n is a, c, g, or t
  misc_feature (90)..(90): n is a, c, g, or t
acactggtctctaggtcgccgggtcagagactcactggggacgcatgtgattcacactggtgcgctggccnccgggtcagagactcactngggacacatgtgattcacactggtgtgctggccgcc

SEQ ID NO: 305021 - DNA, 143 bp, Homo Sapiens
atttgaaatacatctatcacctagatattgagatatattatacatttaatatagtgtgttgctggtatagggatagacaaatgaacattggatcagaatagcactgaaacaagatctacccctatatgggcatgtccctattt

SEQ ID NO: 305022 - DNA, 114 bp, Homo Sapiens
  misc_feature (103)..(103): n is a, c, g, or t
catgttgtctagtctggtcttgaactcctggtctcaagcaatccacccgcctcagcttcccaaaatgttggggttacagatgtgagccactgcgcccagcctngttgctgtttt

SEQ ID NO: 305023 - DNA, 107 bp, Homo Sapiens
cagctgagacagctgaaggaggagaacatgaagaatagttggaaactattgaacctccaagatttttctgtctttgttaacaactagcagttacatgctagcattat

SEQ ID NO: 305024 - DNA, 272 bp, Homo Sapiens
  misc_feature (251)..(251): n is a, c, g, or t
agaactgaatgggtgtattctttgatacctagttaaccagttggtgcttaacaggagaatttttcattggagaattgctaccaggtaacattttggtgagtgaaaaggaggccctttggtacaggtatttgactagagacattgcttctacaatttcttagtcattgtgaaaaatcacatatttaaatggggattatttaaatttttaaatactgtatagtatttgtagggcgggtatagttttttatctntatttgggggttttatatggc

SEQ ID NO: 305025 - DNA, 186 bp, Homo Sapiens
  misc_feature (39)..(39): n is a, c, g, or t
  misc_feature (106)..(106): n is a, c, g, or t
  misc_feature (119)..(119): n is a, c, g, or t
  misc_feature (139)..(139): n is a, c, g, or t
  misc_feature (160)..(160): n is a, c, g, or t
  misc_feature (173)..(173): n is a, c, g, or t
catgacactactggttaatacataactgagagttaatanattttgctgtgttacagtctaatttgctctctaccaacagagaccttctttctttttctgtttagtntttcaaaacaagngttatttaatgtgcttgacnactagcacatttttcctagcntgtgttcactgcnattaggcatttat

SEQ ID NO: 305026 - DNA, 183 bp, Homo Sapiens
ggcacgagatctccgaggaattctacggtgtaaaaagggttgatctcagttttttctgttgccactttaagattcagttttctgagatacattgagtcatttattacttcaccaatttcttttcggcttctaagttttgtgcagtctcctttcctagttccattgtctgtgggtttatgaatt

SEQ ID NO: 305027 - DNA, 501 bp, Homo Sapiens
  misc_feature (269)..(309): n is a, c, g, or t
  misc_feature (385)..(385): n is a, c, g, or t
  misc_feature (419)..(419): n is a, c, g, or t
  misc_feature (462)..(462): n is a, c, g, or t
cctgctgcatgagttcccataggatgcttagtatccttcatctaactcagcccagatttccctgggcaccgcccggaagctgtactattgtcccgtgctattctatggggacctattatctatttgacttccagtaggaagattccagaagcattttatagaagcattttcaaaacttatagaatatgttttacttctcatttgagaaatctgaagtaccagtgggaatctgggtcttttcatgggacacagtgagtgtgggatgggtnnnnnnnnnnnnnnnnnnnnnnnnnnnnnnnnnnnnnnnnnacctttcaggacccatgggccttagggttattgatggggaggaggaaaggaaagggagttaccccggggtaggggnaggaggacttcaggaggttgccaaccaccagctntttaagggaaagttttttgggttcaccacttgggccccgggcnccattgggctttcacggcctttttaccattcccccggca

SEQ ID NO: 305028 - DNA, 359 bp, Homo Sapiens
  misc_feature (139)..(139): n is a, c, g, or t
  misc_feature (217)..(235): n is a, c, g, or t
gccctctgaagcagagactggttggagtgcccgtatttctgtagaccggagcgtgtaactagaaagagtttgctaaccaagtgggccagagagagccttgaaattagcatctgaaaaccccagctttggcctgaagctncccgtgcagtctggtgaatggatgcttgaaaacaatttgttttcctaattacgtaaatctagtgaagagtatttatcnnnnnnnnnnnnnnnnnnngcttacctggggaaagtctaaaatctctggtctcaagccggagagccgtatattaattctcttctccagccccaccctatgacttaccagagtgggtacctggggtagaaccagggagatgggg

SEQ ID NO: 305029 - DNA, 238 bp, Homo Sapiens
gtgtgagccacagtgcccggcctatatgttctagatcttaatctcttatcagatatatgatttgtaaatatattattccattctgtgggttgccctttcactctgttgatggtgtcttttgatgcaccaaagttttaaattttgatgtagtccaatttatctatttctaattttgttgcctgtgcctttagagtcatatccaagaaatcttggctaaaatccaatgtcatgaagctgg

SEQ ID NO: 305030 - DNA, 219 bp, Homo Sapiens
  misc_feature (190)..(190): n is a, c, g, or t
gtgtgaactattatgcctagccccaaaaattggtaattcaagagaagactgggagctgaaagaaagggctggcttcaggagctttttatagctgtcttatattctcaggatgttttttctcctccgggatttgaatatgtgttctggaggaagagatactgtttcttacagccttttgctaaaggaagangataatttatcatgttgaataggaccaaa

SEQ ID NO: 305031 - DNA, 227 bp, Homo Sapiens
  misc_feature (126)..(126): n is a, c, g, or t
  misc_feature (177)..(177): n is a, c, g, or t
  misc_feature (190)..(190): n is a, c, g, or t
  misc_feature (203)..(203): n is a, c, g, or t
ttgagcttcaataccctgtaactgtggtttctcgtctgaaaactaagggtgcctcatacggcaattaaattatataatatctaaaaagtgcttagctctctaattgttcagtaaataacagctgtnctaggttttgaggcagagaaagcccatgaatttgtcaccatttaaaaaggnaatcttctctttngtccggcagaganctcatcacatctgcattaccatct

SEQ ID NO: 305032 - DNA, 284 bp, Homo Sapiens
  misc_feature (168)..(226): n is a, c, g, or t
  misc_feature (254)..(254): n is a, c, g, or t
tagaataaaaggacattcataaatatttttagaaagcccattagaagtgtttgaattattatgtgatttatataggataaaatccatgttttggttgtacacgtctgtaagtttggataaatgcatagtcatgtaaccaccaccaaaattaaaatttaaaacaattcnnnnnnnnnnnnnnnnnnnnnnnnnnnnnnnnnnnnnnnnnnnnnnnnnnnnnnnnnnngtaggttttgagggtcagggagatccgnggaccattctgggcccaacatggggggaaa

SEQ ID NO: 305033 - DNA, 412 bp, Homo Sapiens
  misc_feature (329)..(329): n is a, c, g, or t
  misc_feature (335)..(335): n is a, c, g, or t
ttgaagagctgataaatgaattacactttgcagtctttgccccctcccccgccgccaccccatcattttagaggagaaaattgtacctaactagttactgatatacagaagatggcaataatccccctgggagagtttagaagggaaaaataaattgttacacctataggacagttctggcttgttaaagaatttcaagccatttgatcttggggtgactttaacataacttactaggtttttgggggggtacaatagttgtatttgttaaacttgttaaatttatgaggcatgggaatgatctcttcctaagctgggacttgtttganctaggnttttttttagccttccaccttccaccaaccataggtttccagtgcccagggtaaaagggcatttttgccccagtttt

SEQ ID NO: 305034 - DNA, 278 bp, Homo Sapiens
  misc_feature (240)..(240): n is a, c, g, or t
ataaactctattttaacacaaaatgtttcatactgtaggtgttgcaccttcacaggcaaactatattcatatatcatatattcatctattcatgttcaacttgtcgttttctgcttttgcatttaagtggctctaaaaagaggaaaataatgtttttccaggggttatttttctagagaaaaattgctcccctttatcctgcggatctctctatccagagtgaggcaggtgataaatccntccaccttaggaaccctctttaaccttctggggctggc

SEQ ID NO: 305035 - DNA, 357 bp, Homo Sapiens
  misc_feature (182)..(182): n is a, c, g, or t
  misc_feature (250)..(250): n is a, c, g, or t
  misc_feature (294)..(294): n is a, c, g, or t
  misc_feature (299)..(299): n is a, c, g, or t
  misc_feature (338)..(338): n is a, c, g, or t
tctcccctatgactgatctcagtccttgcctggccactcctgcctgtcctacaaacaccgaaaaccactgtccttttctcagccgtcatttagcagtcgggaagcgtgtgtcctgacgtatgggctgcagtcaaggcgggggccctgacaaacaggattcattcaccagggccctggcttcncagcttcccttcacggggcgttcacatgggggccgaatgaaaagagcagggggtgcccgccaggaggncctattccagggggctttttttccccgcgggcgccgtttccctngggcntgccaagttcccacggaggccagcacattgggagaagcnttttttcaaaagcgagggc

SEQ ID NO: 305036 - DNA, 483 bp, Homo Sapiens
  misc_feature (157)..(157): n is a, c, g, or t
  misc_feature (221)..(221): n is a, c, g, or t
  misc_feature (239)..(239): n is a, c, g, or t
  misc_feature (246)..(246): n is a, c, g, or t
  misc_feature (263)..(305): n is a, c, g, or t
ttccgatgtagaaacattgatgctagttgtagcattcaaagatgatacaagcattcagtgcagaaagtggtgtgtccatcattcctgatataaaactgactgggtccagcacgttaacccatgtgtcactgtggtagtctatgtggcgctcacaggnagctgccctggcctggcctgtaggtcctgctcagaggaccctgcttgtggcgaggaccccaggntcaggcaagctttgcgtntgccgangttccatagcacctgcnnnnnnnnnnnnnnnnnnnnnnnnnnnnnnnnnnnnnnnnnnnagtctccagtgtgggtgggtagacagtctgtgttaaacattgtgggtggggagggggtcgttaggtttctcttctctgagtcatccaagcaaaatgccatgggaccacccgtgaaaaagcattgccctctcttttttggaccactgagttgcagctttcttgtgcaaatctctgttgg

SEQ ID NO: 305037 - DNA, 343 bp, Homo Sapiens
  misc_feature (264)..(264): n is a, c, g, or t
  misc_feature (288)..(288): n is a, c, g, or t
  misc_feature (296)..(296): n is a, c, g, or t
  misc_feature (320)..(320): n is a, c, g, or t
ctgaatggcctctttggcacagataggccacccttgaaaggtgttccaagctaggaactcactaccactgttacatcgatgcaactctgtgagaagtttttatctggtgatggaaaatctcatctcttcaacacactgactactaccagtctcagaaccctgtaaacaagattcattcatctcaaattgggttaaagcagtcaccctgccttacattagtttgggaataagggatgtgggggatgggtgggtaggagggagggngagtgggatggatggatttttttnatttgttnatttggattctaaaaggaaacttnctatgacatttttgcatttttaa

SEQ ID NO: 305038 - DNA, 450 bp, Homo Sapiens
  misc_feature (307)..(307): n is a, c, g, or t
  misc_feature (328)..(377): n is a, c, g, or t
  misc_feature (386)..(386): n is a, c, g, or t
  misc_feature (400)..(400): n is a, c, g, or t
  misc_feature (419)..(419): n is a, c, g, or t
cacaacctttcagacttgaacggggccctcccctgctccgtgagcctcgccgtcctggtgcctgggttctgccatagtaactttcaggtcctctaggaaccagatatttttgtccgtatagtctctaaatcctgctcacaggggatgttagtaattaaatgatgacttttacattgccttgcaccagcaaataaaatctgtagtctaaggaacaaagcccgggggggatgatttcaccaggcacccttgttaggcagtgctgtgctcctcccccctttccttatccaccgttcatggtttcataggnttgttcacctgtgtcttttcnnnnnnnnnnnnnnnnnnnnnnnnnnnnnnnnnnnnnnnnnnnnnnnnnnacttcaccntaaagggggaaggnttttatttgttccaaactnctttttcccaccaaatgaggtgttaaatttg

SEQ ID NO: 305039 - DNA, 118 bp, Homo Sapiens
  misc_feature (59)..(59): n is a, c, g, or t
atattagcaataaatcagttctcgaagttcttggtacaaaggcagaaatacccaccttntaccaccagccaaattaaattgataaaaaaatacaagtacagacttccagttccaaaat

SEQ ID NO: 305040 - DNA, 171 bp, Homo Sapiens
  misc_feature (87)..(87): n is a, c, g, or t
  misc_feature (113)..(113): n is a, c, g, or t
  misc_feature (136)..(136): n is a, c, g, or t
  misc_feature (142)..(142): n is a, c, g, or t
  misc_feature (147)..(147): n is a, c, g, or t
aaaaatttgtatacattctaaaactactgcatcactgttaaatttccattgaccagatagttgaataagctctgatttttccttttnaatttaaagctttaaaaaaatgaagncactgtgggcactgggcaaatgnaaaagncaggntaatttacttttatggataattat

SEQ ID NO: 305041 - DNA, 360 bp, Homo Sapiens
  misc_feature (53)..(53): n is a, c, g, or t
  misc_feature (228)..(228): n is a, c, g, or t
  misc_feature (301)..(301): n is a, c, g, or t
  misc_feature (334)..(334): n is a, c, g, or t
gtttagttacaacacagcaagcaacatgagcatcagtatggtttttccagttnccctgcccccaagtgccacgggacaatgcaacaggctcagatggacgctacgcatacaggcagttgaatcacagctgaggaacctaggatcaaggggctcaggactttttgggtaatgagcaaagtggccaatgccctcccctgggaagtgagcagttaaatagtagtcagactntggtcaccttgccctacttggttgcctatgtgactgttttgctgaaagttttactttcatcattttgggtttnagggttcacgggcaaaagaaactgcaatatttncactccaaattgcagttcaaaggttt

SEQ ID NO: 305042 - DNA, 372 bp, Homo Sapiens
  misc_feature (155)..(155): n is a, c, g, or t
  misc_feature (175)..(175): n is a, c, g, or t
  misc_feature (290)..(290): n is a, c, g, or t
  misc_feature (316)..(316): n is a, c, g, or t
ctttttgacagcaggttttttatttggtggtgctatttggttgccattccagtaggtggcacttaagaataagaaccagctcacccttgagtagtctgataatgaatagaggcaactttcctgactggggagatccttttggactgcactgaggnctcttggggaaggggtggtnagggggaagttgcactagcttctcaacctgggccagcaagcatgtaatccacttccctatcacaccctagttgcattgctcatgaccttcagttcttatagacattgccctttgnactccctgctggcagtgtggggtgtnggactgcagggaatgccccttttgacagctaccaccaaagtggggctcagtggcag

SEQ ID NO: 305043 - DNA, 411 bp, Homo Sapiens
  misc_feature (343)..(343): n is a, c, g, or t
cctgaaaccctccccaggtagtgagtcccacctacacacaaaaccgccagcttgtcagacgtcagtgacacaagacagccctttacttctcacatgtttgatccatgtttatctctctgctgttaggaagtgtttcgctgtgaaacactagttcagaccttcagaagctgcttcagtacttcgtggtgagatcatgagccacagtgtggagtgttttgattttgaggggctacgatattttgacagctttgcaagtttctgcagttccttatttgggatttccggggtcagcactgactttttctctatggctgtgtttgggttttggcctccctcagggctngcagggaggaaagctggcaggacaccattcgagggccctgcaggagggcccggtattcaaagtctggg

SEQ ID NO: 305044 - DNA, 336 bp, Homo Sapiens
  misc_feature (110)..(110): n is a, c, g, or t
  misc_feature (114)..(114): n is a, c, g, or t
  misc_feature (203)..(203): n is a, c, g, or t
  misc_feature (217)..(217): n is a, c, g, or t
  misc_feature (272)..(272): n is a, c, g, or t
  misc_feature (278)..(278): n is a, c, g, or t
  misc_feature (293)..(293): n is a, c, g, or t
cattgagcttcaatacctgagtcatcttctctaagttgtctcatccattcccatcacttcaaataccatcaacatgttaataactaccaagttacacccctagcagaganctanccccatgctccaatatgactacttagctgtcacacaagcatgtcaaactcaacatgcccaaaattgggtccttaattctccaccatcancacccttggaagtncccggggtacttacctggacaattatggaaaggccaggaaaccctttcctttcancccttnattcccttcacattncaacctaacaggcaatttctgtgtggtgtggactttcacttgg

SEQ ID NO: 305045 - DNA, 106 bp, Homo Sapiens
  misc_feature (40)..(40): n is a, c, g, or t
tgataagatctggtgtttgttttacagagtttctctggcntgctcccttccaaaacaccatcacacagcagccagagaaatggggaaactagtgtgatattcagga

SEQ ID NO: 305046 - DNA, 107 bp, Homo Sapiens
  misc_feature (36)..(36): n is a, c, g, or t
  misc_feature (51)..(51): n is a, c, g, or t
aggtctcactatgttgcccaggatggtttcaaactnctggattcaagtgancctcccacctcagcctcctgagtcactgggactatcagactgcaccacttaacctg

SEQ ID NO: 305047 - DNA, 196 bp, Homo Sapiens
  misc_feature (130)..(130): n is a, c, g, or t
  misc_feature (185)..(185): n is a, c, g, or t
atagatacatgtttaactactttaaaaatataagtatagttttgtaaccctgtatcttcagttaatatgaaaatattttcaagtcaataaatacattcctataaaattattttttaactgttatagtagnccatcaaattaaacatgccataatgtattttaaccaattctttgttgatggggcntttaggattac

SEQ ID NO: 305048 - DNA, 384 bp, Homo Sapiens
  misc_feature (236)..(236): n is a, c, g, or t
  misc_feature (308)..(308): n is a, c, g, or t
  misc_feature (315)..(315): n is a, c, g, or t
  misc_feature (320)..(320): n is a, c, g, or t
  misc_feature (329)..(329): n is a, c, g, or t
  misc_feature (348)..(348): n is a, c, g, or t
ggcacgagatttgtggttaggttccagaaccttcagactttctctagggataattcactgatgaaaacaagcactgccagccccaagcttaccctaacctttgcagggacgtggggcagaagtacaaagggatgcccacataccatctgtataaatatttaaaagttattcctcaagctaacaaaccattaaataggcatgtcctcgctaaatacaacttcatcctgacacagagnggcaggttccaactgaggaattccctgttcccatcttgcaggcctgccccccaatttcccacctttttttgncctttantccangaggggggncatttgtggttggcagganctttccagccaccggggggccggggttttgttatta

SEQ ID NO: 305049 - DNA, 420 bp, Homo Sapiens
  misc_feature (341)..(341): n is a, c, g, or t
  misc_feature (402)..(402): n is a, c, g, or t
gtcttgattggcccagaaaacattcagctgtaatgatgaaagaaattaagcactctaaagaatgaatcaaatgctttcttatctttaaaattataccatatgccttaaacaggatgctttataaatatataatccagtgattgtatttgtaacttgtaataggcttagttttccttaaattgatacacttcagcatacaaaacttccttaaggaactttatgtttaacttcagtaggggataaaaaattttttgtgggctgtgaggtaatgtttacattttgaggcgatatggatttattatggtaattattagtgggcctattaactttggtattttggngggggggtccaaatgtttggaggtttttactaggttttaattaaatattatatattttctnaatgtaggtttttagggg

SEQ ID NO: 305050 - DNA, 115 bp, Homo Sapiens
  misc_feature (91)..(91): n is a, c, g, or t
  misc_feature (97)..(97): n is a, c, g, or t
cattgaaggattggttattctagacttctctgactggcgtgttttggctttaattagatatttttgcttagactttttaaataatttaccnttcttnttttccccagtagtttgc

SEQ ID NO: 305051 - DNA, 155 bp, Homo Sapiens
ggttgagcagcttttcacatgcatatgaccatgtggatatcctcttctgtgaactacctgttcaagtctgaagcagatactatttggtagtatcaactaaaactgaatataatacataccctaaatttagcaattttgtacctgtttttttctta

SEQ ID NO: 305052 - DNA, 391 bp, Homo Sapiens
  misc_feature (34)..(34): n is a, c, g, or t
  misc_feature (39)..(39): n is a, c, g, or t
  misc_feature (287)..(287): n is a, c, g, or t
  misc_feature (328)..(328): n is a, c, g, or t
gcatagggctcggcgtgggagaaggggccgctgnaccanccgcatccttcacgcattgccaacatgaaggatgagggtcacttagtgagtagccaggatccaaaacaaagggcttcagatacggcctgcaggataaatttgtcaatgtcttgtgcctccaggactcaggcctcggctgaaccctaacctccattcccaagataaataactctgtcacagttcaccttcattccctgggacacaaattcaagttgtcatccattcattcctgcccagaaatatcatancctcttacaataataaatattaactttcaagtattcatttntttaggcagttctctgttacagttcgcggggggaaacggacaggggaagggtttccttttctt

SEQ ID NO: 305053 - DNA, 198 bp, Homo Sapiens
ctttagataaagtccttccaacatcttgcaacctggataacagccaagtcctattcatccctctcaacctgggctcttccatgccctcctgcaaggccttccccagcccttctctgtggatgcccctcctccgttttgaagcagactggataccagccccaccccgccgccatgctttcttttattccttgcagcttt

SEQ ID NO: 305054 - DNA, 309 bp, Homo Sapiens
taggaactgttaacccaaggacaaaataactgctgggatagagcaaagcacagaagtgtgtacccatagagagtgggtgacaaaactgaggcaaatattggcagatcgcatccccaagcaaggagggcacccacacatgggagcactcaggtctaaggttaactctaatgtaaaatgggtacaaggctgaaatcctacaacattctaacacttcctccttataagcatccatatatctttactgcaataaggtgtggtatatgcatacaaataaaattccctaacttaggaatctggccttttaagggg

SEQ ID NO: 305055 - DNA, 193 bp, Homo Sapiens
  misc_feature (136)..(136): n is a, c, g, or t
  misc_feature (146)..(146): n is a, c, g, or t
  misc_feature (159)..(159): n is a, c, g, or t
  misc_feature (172)..(172): n is a, c, g, or t
ccgcaccacgcccgggtaattttttgtatccttcctagagacaggatttcgacatgttgcctggggctggtctcaaactcctgatttcttagtctgaccaagtcagagtttagttatttcttaccgtagcaagttnagagttattnccagtttgcgaanttctgggtttgtnaacaattctggggcttttaaa

SEQ ID NO: 305056 - DNA, 495 bp, Homo Sapiens
  misc_feature (348)..(348): n is a, c, g, or t
  misc_feature (373)..(373): n is a, c, g, or t
  misc_feature (379)..(379): n is a, c, g, or t
  misc_feature (401)..(401): n is a, c, g, or t
  misc_feature (415)..(415): n is a, c, g, or t
  misc_feature (423)..(423): n is a, c, g, or t
  misc_feature (444)..(444): n is a, c, g, or t
ggcacgagcagattgtcaaaaattttaaaatttgataataggcaatcatgtagacagtttaggacagtggacactgttgagcattattgactggaatatatagtacttatataacctttttagagggccatttgacaatgtctgtgaaaatcatgttctttatgacacggtaaattattctgcaaagaatgtgtcccatagatatattcataggaagtagggcatatatacacacatgcttatagtattaaataatagctgtgcatttatttaaaaaggaatacagtctggggggcactgtggccatgcccctgtgggtccccagctacttgggggagggctaggggnggcttgagggcagggagggttagcnttgagnccccaggggggtttccaaagcntgttaggtgttacntttggacntggcaccttgttgttaccagnccctttggcacttcccgttttgggggccacccctggggccaggcccccctt

SEQ ID NO: 305057 - DNA, 473 bp, Homo Sapiens
  misc_feature (265)..(277): n is a, c, g, or t
  misc_feature (337)..(337): n is a, c, g, or t
  misc_feature (367)..(367): n is a, c, g, or t
  misc_feature (398)..(398): n is a, c, g, or t
  misc_feature (416)..(416): n is a, c, g, or t
  misc_feature (443)..(443): n is a, c, g, or t
tcattctttcctttttccactatgttcagttagtttccaagttctgtgaattaggctttagataagtctctcatgtccatttcttcccctttctcttcattttaaattctctgtgactgctcttcttgtctgggtcttgaactttaaaccttaaacatgtgctgttgcaaccattccctgcttagcctttctggcctctcctttctatctccagtctgtcctacatattgacaatagctaattttccttaggatatcactttacnnnnnnnnnnnnnaatttggaaaatccattttcaaatcaccttctcatggcttactaggttgtttctggctcnggggcataaatatggggcataaagtggggnttggggggttggccgtggggtgcccaggttncttaatccccttggactnggggggaggatccttttccattaatcncccccattggattggacaggtattccccag

SEQ ID NO: 305058 - DNA, 183 bp, Homo Sapiens
atataattccaaataactaaaaatgttctctactctaggatgcagcaaatccaatctttccttactaattaagggtcatcattatgaacctcaagtattataatgcactaggatacgagcattctttccttcagttatcatttgattgcttttacaatcctctccttttacaatgtgtttcta

SEQ ID NO: 305059 - DNA, 177 bp, Homo Sapiens
  misc_feature (33)..(33): n is a, c, g, or t
  misc_feature (141)..(141): n is a, c, g, or t
  misc_feature (151)..(151): n is a, c, g, or t
  misc_feature (160)..(160): n is a, c, g, or t
ggaagtatctacccagggtattttaaattcttnctccaaataagaatacaatcaagcatctaatgcacagtcatattatcattaaattgatgttaaaccaaagacaaaggctctcctaggtaggtgtccattagcattttncagcagggtnaatctaggnctaggaacaattcactg

SEQ ID NO: 305060 - DNA, 132 bp, Homo Sapiens
  misc_feature (67)..(67): n is a, c, g, or t
tggcatttcagtattgcttaaattacgttttataatgaaccgtgtataactaatgagaaatagatangtgtcttattttttgggaaagcaagacaacattgttctcgtcattgttcacacacagggaggctg

SEQ ID NO: 305061 - DNA, 132 bp, Homo Sapiens
ttaaatttatgaaaggatgttgtttatttttatcacatttattggacttgaaagatatcctttagttctcaaatcaacatcggcgtgcatgtttagttctgggttgctgagtgctttaacaaataacaaagg

SEQ ID NO: 305062 - DNA, 268 bp, Homo Sapiens
  misc_feature (207)..(207): n is a, c, g, or t
  misc_feature (233)..(233): n is a, c, g, or t
cttagtgtggaaaaaattgtgtaaaaatagtggtcaaaaagcatatggtttattggtcaattatcactgcataacaaccacaaaatctcagaggcatatggctgaaagcatttatttcttgttcatggcgtctgcacatccattaaggtttgggctgatcgaggcttgggttcatcttgggcttggccttctgacctctgaggtccnaggcaggacacaacttgctccggggnctggctaggtaggggatgtgtgtaggaactcttcc

SEQ ID NO: 305063 - DNA, 404 bp, Homo Sapiens
  misc_feature (93)..(93): n is a, c, g, or t
  misc_feature (326)..(326): n is a, c, g, or t
  misc_feature (352)..(352): n is a, c, g, or t
actcaagagagaaacagatacctcatatttgggccttatttactgaaattaaccatagccaacactttgcactatcatttatgaaatcaaatngggggaaaataaaaacgaagaaataccaggacacataaatacacctgtgggctaagagaaaaagaaattccatgggaaacaatgctgactcagccaagagtccacagagccagcactccattgtttgcttagtggctgacacacctcacgcacactcctccagacttgaccacagagatcacacacccccaaatccatattttatgtaggtttaagtttactttcctcatgtnggggtttaattctttggaacctggtnctggaggcacctgtggtgttaacttacacccccttcccccaccttttacaac

SEQ ID NO: 305064 - DNA, 386 bp, Homo Sapiens
  misc_feature (26)..(26): n is a, c, g, or t
  misc_feature (30)..(30): n is a, c, g, or t
tttttgtatgcatatgtacacatatnacantgcacacacagatgtccattgagacatagaacatttcattatacagttcacaaggaaagtgcctgcttaaaagaatcccaaccagagcacagagaatgggaaactgttataggatggagatgtgtcagccatggaattacacctagcagaatggctggctgcagatggaactgcaggggaaactggtggatttgggggtcccagagttgggccccgagctagtctaatgcttcttaggccctccatctgtgcagggggaccctattgctcttctgcaagctttctgtgagggttagaattgaaggggccagtggcccttttgcatgtgccccttccagaggtccatttacttgcag

SEQ ID NO: 305065 - DNA, 233 bp, Homo Sapiens
  misc_feature (17)..(17): n is a, c, g, or t
  misc_feature (31)..(31): n is a, c, g, or t
  misc_feature (92)..(92): n is a, c, g, or t
  misc_feature (161)..(161): n is a, c, g, or t
  misc_feature (220)..(220): n is a, c, g, or t
atatctagcaataaacngtaagacaggatcntgactatttcaccatgaaaaggaagcctggatccttcagcaaataatcttttgtataattngcccacagtttaacccacagatccagctatggatgtttcatttaacagtgagtgaaaaactcaggactntcagcatcaggcctttgggtgggaatacccagatatcaaggttgggcaagtgggcattnggagtggtgccgg

SEQ ID NO: 305066 - DNA, 387 bp, Homo Sapiens
  misc_feature (60)..(71): n is a, c, g, or t
  misc_feature (334)..(334): n is a, c, g, or t
  misc_feature (360)..(360): n is a, c, g, or t
gaaaaaggaggaaagtattttttccctcttcaaagtgtgacttgtagtcttcacctggannnnnnnnnnnnctgtttaacccagtaggctttgttctcaatgcagaatctcctgtgacccttgacattttaagggattaattttacaagtcccattaataaaacttgttccttcttactctatactaaataccttcttttccttattatacagctcatacatacccatatctaaaattatttttgttcaaactccaattatcttatagggatttaaggatgctatttaattggggtaaggtctgggccccacaccaggatagggtggattaaangggtggaaacctcaggagtttaaacngggctaccccgttggggggggtggatc

SEQ ID NO: 305067 - DNA, 430 bp, Homo Sapiens
  misc_feature (41)..(41): n is a, c, g, or t
  misc_feature (61)..(63): n is a, c, g, or t
  misc_feature (84)..(84): n is a, c, g, or t
  misc_feature (186)..(186): n is a, c, g, or t
  misc_feature (249)..(249): n is a, c, g, or t
  misc_feature (314)..(314): n is a, c, g, or t
  misc_feature (341)..(341): n is a, c, g, or t
  misc_feature (375)..(375): n is a, c, g, or t
  misc_feature (399)..(399): n is a, c, g, or t
  misc_feature (419)..(419): n is a, c, g, or t
ttaataaaaatagagatagggtctaactatgttgcccaggntaggtctcaaactcctgggnnnaagagatcttcccacctcagnctcccaaagtgtgaggattacaggcgtgagtgagccactgtgcctgcccagaatgtccattttattgtacccttgcgaacaagggtacaataaaatgttaantgaaaataactagtttggttttgaatgtttgaaggaatttatagaacattcaggttgggattncataaggcaattagataaatgattttgaaacttgggaaaagtgaactgagtaaggatacatattngggagttatccacataaattgatgggnaaattgtgggccatccaaaatcataggagtctgnaatagggaaaattacctaggagtngaggaaaagagcccgggganagaaccttgaa

SEQ ID NO: 305068 - DNA, 474 bp, Homo Sapiens
  misc_feature (345)..(345): n is a, c, g, or t
  misc_feature (357)..(357): n is a, c, g, or t
  misc_feature (366)..(366): n is a, c, g, or t
  misc_feature (440)..(440): n is a, c, g, or t
gaggcagacccaaacttctcccccgtccctttgagggctgaaaactcaaatgtcacagacagacgttcacacttcatttggtctgaatattgctagccatggaatttctaaaatttgcttctacgaactatttattagtttcagtgtgctaagcctgctgggaggaaatgctggttgtgagcatcagcacagaagcattctggacggttattagcacaaagttaggcatatgattttgtaatctcttctggctaacagtgttttttaaactaactctttacgggtgtcctgtgtactagggtactgtggcctgtgctggacttccctagctttattgggaagttnccttggacagcnggacccgantccctaccccgttaactcttttctcccatcttccctctggcagtgcttgaggcccctcaaaaacaaaacaggcnaccaaaaaacacatttggcaccaggttgccggat

SEQ ID NO: 305069 - DNA, 180 bp, Homo Sapiens
  misc_feature (22)..(22): n is a, c, g, or t
  misc_feature (52)..(52): n is a, c, g, or t
  misc_feature (88)..(88): n is a, c, g, or t
  misc_feature (100)..(100): n is a, c, g, or t
  misc_feature (125)..(125): n is a, c, g, or t
atgcagaatggctgtaactttnaagagagtcccccaaggagggtcccaagancaggggctggtaatgggccccaccacaaggctacgntgctggcttttntttggaacaatagcgctcccatganacctcactcttgctgacaatattggtaatacgggagcatgaacacagctgtgtgt

SEQ ID NO: 305070 - DNA, 343 bp, Homo Sapiens
  misc_feature (71)..(117): n is a, c, g, or t
atttggagctttttaaaaatacgattgttggccacatgtatgtcttttttggaaagtgtctgttcatgtcnnnnnnnnnnnnnnnnnnnnnnnnnnnnnnnnnnnnnnnnnnnnnnnatagatgcaggtattagacctttgtcagattcacagtttgcaaaagttttctcccattctgtaggttatctgtttactgtgttgatagtatccttttcagtgcagatgctttttagtttaattatatctcatttgtcaatttttgcttttgttgtaattgcttttgggcatcttcatcatggaagtctttgcccattaggtatgttctgaatgggtattgcctagg

SEQ ID NO: 305071 - DNA, 536 bp, Homo Sapiens
  misc_feature (389)..(389): n is a, c, g, or t
  misc_feature (394)..(394): n is a, c, g, or t
  misc_feature (405)..(405): n is a, c, g, or t
  misc_feature (415)..(415): n is a, c, g, or t
  misc_feature (442)..(442): n is a, c, g, or t
  misc_feature (467)..(467): n is a, c, g, or t
  misc_feature (478)..(478): n is a, c, g, or t
  misc_feature (490)..(490): n is a, c, g, or t
gctggtcacacacattttaaccacccatctttgctacaagggaaaaaggccaaaccttgtgtgggtgaagaggcagactcaaatgctcccgatgcagaggaacgaggcggctaccactcaatcaccaattaccatttgcatgctacccaacctggacctttccagggcatactggaccactccccacttccttggggtgcaatgaattgcagacagtttaatccatgggcttttgctgattctgttttctctgcttggaatgcccttctacacagaggaagtctttcaagacccgggtcaaaggttaggctctcctgtgaacacttgttccttttctattctggtataagcaggccattttaaactatcgttaaagggtcagggtttcnttaantggggtctgcngggtcattanggattaagttttagaggggacatgtcngttatccatggtccacattgttaanctgggaggccnggggtcagaggnttccagattttcaggtttcggtgacctcaaaaaagggtcttttttt

SEQ ID NO: 305072 - DNA, 401 bp, Homo Sapiens
  misc_feature (47)..(245): n is a, c, g, or t
  misc_feature (345)..(345): n is a, c, g, or t
  misc_feature (384)..(384): n is a, c, g, or t
ttctgtgctagtcagtcagtagcacagcacacgagcaagagcgcagnnnnnnnnnnnnnnnnnnnnnnnnnnnnnnnnnnnnnnnnnnnnnnnnnnnnnnnnnnnnnnnnnnnnnnnnnnnnnnnnnnnnnnnnnnnnnnnnnnnnnnnnnnnnnnnnnnnnnnnnnnnnnnnnnnnnnnnnnnnnnnnnnnnnnnnnnnnnnnnnnnnnnnnnnnnnnnnnnnnnnnnnnnnnnnnnnnnnnnntattatcatatgcaagagtaggtgctgcagaggttaaagagagactgttggtttccagttgggcagtatgggaaagtgccagtcgtagttgcacagtggntcgaggaggtttcaaagggaaacgatggtggggcacccnggcaggaggttggggga

SEQ ID NO: 305073 - DNA, 140 bp, Homo Sapiens
  misc_feature (71)..(71): n is a, c, g, or t
  misc_feature (100)..(100): n is a, c, g, or t
  misc_feature (114)..(114): n is a, c, g, or t
  misc_feature (126)..(126): n is a, c, g, or t
ttgcataaaagggaagtccacctgagtatacatgggtaccggaggcctggctgtttgagagcgcctgctgncctgcccggggcttcacagggccttgctngggaggggaggccngggcttggtttngcagttttgggaga

SEQ ID NO: 305074 - DNA, 399 bp, Homo Sapiens
  misc_feature (75)..(75): n is a, c, g, or t
  misc_feature (122)..(274): n is a, c, g, or t
  misc_feature (379)..(379): n is a, c, g, or t
actggaagaattaagcaagaatccccattctaatttctgttcaggcagcagaatggtcattacgagtcaaaaaancagccaagccacccaggctgaactcccaacattctatgttctcctcnnnnnnnnnnnnnnnnnnnnnnnnnnnnnnnnnnnnnnnnnnnnnnnnnnnnnnnnnnnnnnnnnnnnnnnnnnnnnnnnnnnnnnnnnnnnnnnnnnnnnnnnnnnnnnnnnnnnnnnnnnnnnnnnnnnnnnnnnnnnnnnnnnnnnnnnnatatacttcattcaggcattaggctatgggctactgtttctttcacccctttggggcttacatggccaggactgttatggatttaggggagtgtggcccctattntgttcttaacgggggggaaa

SEQ ID NO: 305075 - DNA, 397 bp, Homo Sapiens
  misc_feature (75)..(75): n is a, c, g, or t
  misc_feature (81)..(81): n is a, c, g, or t
  misc_feature (189)..(189): n is a, c, g, or t
  misc_feature (195)..(195): n is a, c, g, or t
  misc_feature (259)..(259): n is a, c, g, or t
  misc_feature (312)..(312): n is a, c, g, or t
  misc_feature (341)..(341): n is a, c, g, or t
  misc_feature (373)..(373): n is a, c, g, or t
aatgggctcgtgctggggaccatcctcctctgcaaccctgccctccctgcatttacgagcccgtgcgtggcactncccgancaagctagcctgggcatcttccctctgtgtgatccatttcagggcctgttgcttggtctttctaaaactccagcttcgtgggggtgacccacacaagtgaaccttcgncccctncttgtactctgctatagccactttgaatttctcactggatgactgtgccgggttccgccacctncagggcttcacacaggctgctccaactgccaggaaatccttcacccttgtagnctttgcttgggtgggcttttttacccttnccttcagtttttcaggtgttccacgttcatgnccaggaaaaaaccttttttggggc

SEQ ID NO: 305076 - DNA, 414 bp, Homo Sapiens
  misc_feature (318)..(318): n is a, c, g, or t
tggaataatagtgagacacacatattagacacatgattgtgagaagacagttttccaccccacagcacatgaccccatacgtttaagtccctgcctatacaaatagtacagacaaagtaacagcaactttagagggaaacatgactatttccatcatatggtgattctacagagcagaatcagaaaccggggtaaagagaaaagtcctactcagtttcattcttgttaaaagactttaatgactgggagttccaaactgggccggagtccattgggccagcatttaaaggagttgggggtttgaggctgggggcaacnttttcccaccaacaggggagttggggaccaggggaggacaggaaaatttttgggggagttctttgttggccccctttcagttagggaggggaggtt

SEQ ID NO: 305077 - DNA, 147 bp, Homo Sapiens
atcaacatctggtcgagtgtctgggaaatggcagatctaggccttgagcctggtagagctacctcgcttcattcccagcaccccagtaccttactgcctccacctcacccccgtgctccctccttggctgagcgtgagaacagtggc

SEQ ID NO: 305078 - DNA, 224 bp, Homo Sapiens
  misc_feature (97)..(97): n is a, c, g, or t
  misc_feature (132)..(132): n is a, c, g, or t
aattttaaaagaggccagaagagtcaagtatgtgacatgtggttgagagtaacaaactgtctatcataagagaaataaataacatggtgcagttaantatcatcaatttgggaatccaatcactttcttcgntaacactcaattagcagatatgcaattatattagctgttattaacaaaaaactgggaaatccatttacactatttatactgctatttccatt

SEQ ID NO: 305079 - DNA, 530 bp, Homo Sapiens
  misc_feature (18)..(18): n is a, c, g, or t
  misc_feature (26)..(26): n is a, c, g, or t
  misc_feature (81)..(81): n is a, c, g, or t
  misc_feature (100)..(125): n is a, c, g, or t
  misc_feature (133)..(198): n is a, c, g, or t
  misc_feature (204)..(248): n is a, c, g, or t
  misc_feature (273)..(285): n is a, c, g, or t
  misc_feature (287)..(348): n is a, c, g, or t
  misc_feature (487)..(487): n is a, c, g, or t
  misc_feature (520)..(520): n is a, c, g, or t
gcggaattaggaccaggnacgaagtnagcctgattgtgtaagagcatctgcactcagaaacccatcatttggataagtgtnaggggtgtgtattggctgnnnnnnnnnnnnnnnnnnnnnnnnnnagagacannnnnnnnnnnnnnnnnnnnnnnnnnnnnnnnnnnnnnnnnnnnnnnnnnnnnnnnnnnnnnnnnnaggttnnnnnnnnnnnnnnnnnnnnnnnnnnnnnnnnnnnnnnnnnnnnngtgcgcaccaccacgacctgctaannnnnnnnnnnnnannnnnnnnnnnnnnnnnnnnnnnnnnnnnnnnnnnnnnnnnnnnnnnnnnnnnnnnnnnnnncgcctggccttcagccttcccaaagtggttagggttatgggatgttgaggccaccacacccaggcctggtttgttttctcatctggttgctgggtagggttgcagagattcccaggaaccccgtaggaatggttaaacntgcataggcaggttgaggcagttcatttttttnccgtgatttt

SEQ ID NO: 305080 - DNA, 486 bp, Homo Sapiens
  misc_feature (394)..(394): n is a, c, g, or t
  misc_feature (451)..(451): n is a, c, g, or t
ccagggaaggagctttattttgcaatatccctccacatctgttgagtattttccaggttacaaagtgttatcacagatattgccacattaatcctcacaataaaaccctgaggtcatctggaaaggtgttgagggaatgcaggctcagagagagcccatgtttattgcctgaggtgctgtaggactgaacccacctcttcatcctttcttatatttctgatggattttttctcttggccatttcatcttttacttttaacatttgtgatatttacagtgggacagagagggaatcttgtccactggactttatttcctaaggaaggccttggatctctccccgggcatctcccttgggacctcgtaccgggggcagcagccaccttcgtagccnttggggtttcatgggatgggcaggatgttgaattgcgcgtgttcccggggtgagctnggacgatggcggtgggttcccgtttcccgaaattc

SEQ ID NO: 305081 - DNA, 451 bp, Homo Sapiens
  misc_feature (313)..(313): n is a, c, g, or t
  misc_feature (341)..(373): n is a, c, g, or t
  misc_feature (388)..(388): n is a, c, g, or t
  misc_feature (428)..(428): n is a, c, g, or t
tttaaacttgaagtgagatatccctttcagataaatttgaatttaaaagataaatttcgaggcttctttttactccctttcaattttataattgaatattaaggaggaaattgtctgtagttgtcagccatttttctgtggtcataaactcttcagatactatcctctatacaatttttgccatctgctctgctagtgaccattacccaccccattactaaaaatcacacacataacattccattacataccctaaaacaagtgcaaggactaggcagaccccagacttactcttggcttcttgttttagggnttgattttctttattttgttatgggggnnnnnnnnnnnnnnnnnnnnnnnnnnnnnnnnngtgccgggagggtgnaggtgggggtccggaaattgggcggggttgccttttccgnttacggcccaggtggtcaagggc

SEQ ID NO: 305082 - DNA, 230 bp, Homo Sapiens
  misc_feature (52)..(52): n is a, c, g, or t
  misc_feature (75)..(75): n is a, c, g, or t
  misc_feature (81)..(81): n is a, c, g, or t
  misc_feature (93)..(93): n is a, c, g, or t
  misc_feature (105)..(105): n is a, c, g, or t
  misc_feature (138)..(138): n is a, c, g, or t
  misc_feature (198)..(198): n is a, c, g, or t
ttttgttaaagaagggtctttaagatggtgaggactgttgatataaaggaangcagccttctgtgaacattgganccagtnttaatgccaccnacccacttactnaccccttctgggcacagttggtaactgagcatngccaacataacattgatgtaattttgaaacttaacaccacaaattttaaaaagtattcantgggttacgttactacaaaaagccaaactgtc

SEQ ID NO: 305083 - DNA, 550 bp, Homo Sapiens
  misc_feature (386)..(386): n is a, c, g, or t
  misc_feature (456)..(456): n is a, c, g, or t
  misc_feature (470)..(470): n is a, c, g, or t
  misc_feature (483)..(483): n is a, c, g, or t
  misc_feature (489)..(489): n is a, c, g, or t
  misc_feature (502)..(502): n is a, c, g, or t
  misc_feature (510)..(510): n is a, c, g, or t
  misc_feature (538)..(538): n is a, c, g, or t
atttcggcacagggtatacttacgtaaaaagaaaataacaaaggaacaaggaacatgtgctgtgggagaaattcttatagtcaaagtggaacagacagagttggcaaagtcctatgatatccccaaagtatttcaaattaaacttcgatatggaaattctgattatataagtttgataccatattaggatattgactacattttcccctgctgaatgaaaatctggctttagattaaaatggctatctaagttatttggtaacctgatggggttaaggatgttagttatattactaagtaacattatgacaaaaatgaccccttgattgggtaaatttaatttgggactggggaaggaactgcaaagggaattgattaaattaccnggatggggggacactgttactttggggattgttccccgaggtttacttgttaatttgggccttacccccnttgtggtggacccntgggaggctcacngtttantattgttgggccncctgtggnaggtaccgggggcttcttagggccaggntgggcccccacc

SEQ ID NO: 305084 - DNA, 342 bp, Homo Sapiens
  misc_feature (282)..(282): n is a, c, g, or t
ttctatggcatatagaggccttaacaaataatacccaaaaggccctaaatgatagctgcatggctatctctttgctaaacaatgaggactcacgtataagaaaaaccatgctgcaaaattgtatggcgttagatatgctcactgcagcccaaggtggaacctttgccacaatcaaaactgaattttggatttatatcttagaggaatcaaatgacaaaacctgacttatgactgacataaaaacccagataaccaacctgttcagatccaaagcccttacgnaatcgactagttgagtggtttgtttgggatcctgggggaacttggtgggcagaagcttat

SEQ ID NO: 305085 - DNA, 284 bp, Homo Sapiens
  misc_feature (147)..(147): n is a, c, g, or t
  misc_feature (202)..(202): n is a, c, g, or t
  misc_feature (234)..(234): n is a, c, g, or t
  misc_feature (264)..(264): n is a, c, g, or t
  misc_feature (273)..(273): n is a, c, g, or t
tgggatcctgaatgtctcagaggctgctcccctgtgacatggaccctggcgacctgtacaccagcgtcaccagggttgttctgcaggtcaaaagagacaatgtgggtgaagcagtcccctggcgtcaggtaccttttgtcggaactnctgggagctctatggcccagggccaccccagcttacttgctgaccttggcctcgnctttcctgactttcagtctccctataaaattngagatcccacagagatctcagacccccctncagcccctngttcagcccag

SEQ ID NO: 305086 - DNA, 437 bp, Homo Sapiens
  misc_feature (204)..(204): n is a, c, g, or t
  misc_feature (209)..(209): n is a, c, g, or t
  misc_feature (262)..(262): n is a, c, g, or t
  misc_feature (268)..(268): n is a, c, g, or t
  misc_feature (344)..(344): n is a, c, g, or t
atttcggcgagagaaaaagtatttgagtgttgatgttcagtaaaaaacagattcctaatttggcagagtggtgccaaattaaaagctaagtgataagcagggcataatttccacttttgaatgtttctttaaagtttagaaccttaagaacctcatgaaaaaaatacatgaagtgaatgaccaacctcagtgtaagcaaaggtngggtngggatttattaccccggtagttgaaatgtctgagattggtatggggttgactngaattngacattttactgaacttcctaaggtaggggtcaggagtaggaggcagggctccttctggcctccatgtctcccctncagccaaaccctttcacgtatgtgggagtttggtcttttcacattccctattttcagtaggactttcagttaagcacctagttcccccttggg

SEQ ID NO: 305087 - DNA, 406 bp, Homo Sapiens
  misc_feature (368)..(368): n is a, c, g, or t
tctaaagggctaaaaagaaggtacctctccatcctgtctcctcgaggccaggcagcacatgtcagttaagaggcctcctggatccattgtcctcctgttgcttttcgttctaagtgatccaaactctattgctgatagggaataaaagcagggcaggctagtagtgggcaagtgctttgatggagcgtatctccaagcagggcccaagtttaggaggaggaagacctgatacaatgaatgaacagtgcgtcctcccaacccaaccaagaagtgtaattgtgttccgtctttaaccctgggcatggaatgggggagggaagagggcatgggacatttatttacattagtggcacatttattctacattnctctggcatgttgaccccaggatgttcagccctttccg

SEQ ID NO: 305088 - DNA, 498 bp, Homo Sapiens
  misc_feature (387)..(387): n is a, c, g, or t
  misc_feature (399)..(399): n is a, c, g, or t
  misc_feature (420)..(420): n is a, c, g, or t
  misc_feature (429)..(429): n is a, c, g, or t
  misc_feature (448)..(448): n is a, c, g, or t
  misc_feature (463)..(463): n is a, c, g, or t
  misc_feature (482)..(482): n is a, c, g, or t
gaaaattatggataatgaaagaacttaagatttttagaacgagtaagagcaaaatcacagcgaaattaagcagttttagtatgtcacattatcctaaagaggatgaagagcctggattatgtaatggggtagtaagaatgacaaagttatatgatttagtggaagagattgcaagggatagttctatagcttctatttaaataggtcactgataaatacattatgtctttctgttaaatctgtattaggaaattctgttcataattccttctaggaatttctgtgtgttatgttcagttttcagtgggaaaagtttccaaattaattaaaaatactacattacctattactagtttctggcttgttcccgtttgtatacttttaacntttttttaggantataataccaaccctattgcntaaaaaccnccaccggtagggtatcctnggggtaattaggccntaccattgccccctaaccntacccctaatttttcc

SEQ ID NO: 305089 - DNA, 125 bp, Homo Sapiens
  misc_feature (47)..(47): n is a, c, g, or t
  misc_feature (67)..(67): n is a, c, g, or t
  misc_feature (108)..(108): n is a, c, g, or t
acgtggccgccttttaaggagctgttaacatttcaccgtggaaggtnttggcagttttcattcctgnagttcaggcaaggaccacggaacccaccaggagggagggantttttgggacaggtttg

SEQ ID NO: 305090 - DNA, 371 bp, Homo Sapiens
  misc_feature (351)..(351): n is a, c, g, or t
gtcttaccagctcccctgggattgggatttagctcatgaagcatcttccacctctccacatacagctctggccccttcaccttggccagcagcggttctgccaccctgtgtatgtatgcctctgctttcagtgaacacatcccaactgtgttctgcagtgaatttaatttaattccctgggtgatagaagactgtgcattctccccctcccctttcagactgtggagtgatgcttttgacctccattggggcaaactctttcctttctaagcgggcaacatccagagtccctctgtacttcagagtttcttacccactatggggttcatcacccttaaacagggttcctgnttcttcttccggggagtggg

SEQ ID NO: 305091 - DNA, 378 bp, Homo Sapiens
  misc_feature (12)..(12): n is a, c, g, or t
  misc_feature (347)..(347): n is a, c, g, or t
agctagctagtngggaggtgaggtgttatcttacctacatagggtgtgaaaaaccccaggtgtgccatctgcgtagagcatgaatctctggcatcccccaccccacccttttattatacaggcaggtcttttgcctgagctactccacgttgctttcctactgtgtatgtgcttcaaagggggaggtggagcctccatggtggacacacctgggcctcaggtacccctttctgtctgtgcagctgcaagcattcccccgatgcaaactccagcttccttatctgtttgcagccgggtcttccagggctgctttttctgtttaggaagagggagtgatttcctggggncttgctttttgggtagaagggggaagttctt

SEQ ID NO: 305092 - DNA, 328 bp, Homo Sapiens
  misc_feature (255)..(255): n is a, c, g, or t
  misc_feature (299)..(299): n is a, c, g, or t
tgaatatagggttggactaagagtattctaggttaaagaaactgtgagcttagagttggcaaaacctcaaatggttttgctgtggacagtgagtgatataccttggcttggagaggctgtgcctgtgtactccagaatctggcagttagagaagctgaaggggtgggttactgccttgaatacaggctgagatatttatagtgtagtcattaacagttgaggcactgatccaatactgttttaattgattaatcnttttgtttgctgggtttttcccttgatggaattcctctttcccnggggtccttttcatacagtaggggtactc

SEQ ID NO: 305093 - DNA, 186 bp, Homo Sapiens
  misc_feature (31)..(31): n is a, c, g, or t
  misc_feature (85)..(85): n is a, c, g, or t
atttcggcacagaggggactcaaattagtanagccctgttggatatatgtgcacaaatcaccattctacttggttctgggggttnggggaaggggtgctgagggatggaggacaatagcatgtgaggaaatacaaaagagaccctactgggaggtgcactagaaagaagggcaagaagccaagagg

SEQ ID NO: 305094 - DNA, 352 bp, Homo Sapiens
  misc_feature (76)..(76): n is a, c, g, or t
  misc_feature (84)..(84): n is a, c, g, or t
  misc_feature (184)..(184): n is a, c, g, or t
  misc_feature (188)..(188): n is a, c, g, or t
  misc_feature (191)..(192): n is a, c, g, or t
  misc_feature (194)..(194): n is a, c, g, or t
  misc_feature (288)..(288): n is a, c, g, or t
caattcgtgatttccgtcggccaagtgcgtgggcattgatctacacgcgagtttctccacctctgccgaatggtancttcgggntgggggaggggccctcccaccgtggattgcaaggtgtttagcagcatctgtctcctccgctgactagacacatgccagggggataacattctccctcccngttnccnnanccgcggcctagtgtcccagcggggttggggagaggcatgtgaggggcgaagttgccccctgttgagaaccattgctggcgcgtagtcctttctntcttgaacttgtgcagagggactttttccaggggtgaagggttcaaggggtggggatccagctt

SEQ ID NO: 305095 - DNA, 106 bp, Homo Sapiens
attagccgggccaatcttgggatttttaatgggaatatgtggggcacaaaattgacaggaacatagggacattcttaaagtttcccttgatttggatccattataa

SEQ ID NO: 305096 - DNA, 370 bp, Homo Sapiens
  misc_feature (337)..(337): n is a, c, g, or t
  misc_feature (355)..(355): n is a, c, g, or t
gtggctgtgtctgtgagtcgttaatgggtttaatcggttgatacacagcctgctagtggcctaaccagtaacccagggcctggcagatttgcatgacatctcggagtttgattgctcttccttccacttggcaaaaggagacaccatcagccggatcaggaggggtcatggtgagatggaacccaccgaggtggtgtacagagctggcgctgccaatggccagagtggcagcctttctacctccttaaccctggcaaaaatcaaacgtgctagtacggcactgtccatccacactgggaactccagttgggtttttaggtcttgcggatggatggantctttctgggggtttgantttttcccagtttca

SEQ ID NO: 305097 - DNA, 208 bp, Homo Sapiens
  misc_feature (93)..(93): n is a, c, g, or t
  misc_feature (116)..(116): n is a, c, g, or t
  misc_feature (158)..(158): n is a, c, g, or t
  misc_feature (174)..(174): n is a, c, g, or t
  misc_feature (181)..(181): n is a, c, g, or t
gagttagcctaccgtacatggggggaaaagttagccttgtttgcctggggaaataccaaggataatctggggcttgcacgtttcttaagggantttaatgggctctgtttgacttnggtcttttggggaattttgcatattacactttctgggtaggngttctctttccccctnccctggntcccccaaaaggaaggggtcttccctc

SEQ ID NO: 305098 - DNA, 385 bp, Homo Sapiens
  misc_feature (250)..(250): n is a, c, g, or t
  misc_feature (365)..(365): n is a, c, g, or t
gcactgttgtaggtaattcagaacttaacaaagacatttcctgggttattttcaactgtgttttttttaggattataccttatccctttatttcctctaagaaatagttttagataagaaaaattactaaactgttatttgtagtgacccactatgagtttaattctttgctaggtgctatggaggtttagggaaaaatgacaactttgctcccagactgaagtacagtgggcgcaatctcggcttactngcaaggctctgcctcccgggtttcatggccattgtcctgcctcaggcctcccgagtaggctggggactacagggcggcccaccaccacggcccggttaattttttgtatttttantaggagacgggggttttcac

SEQ ID NO: 305099 - DNA, 381 bp, Homo Sapiens
  misc_feature (47)..(321): n is a, c, g, or t
  misc_feature (340)..(340): n is a, c, g, or t
  misc_feature (368)..(368): n is a, c, g, or t
tgcaagaaaaaatcttgcaaaagtgttggagcagtggtgggacagtnnnnnnnnnnnnnnnnnnnnnnnnnnnnnnnnnnnnnnnnnnnnnnnnnnnnnnnnnnnnnnnnnnnnnnnnnnnnnnnnnnnnnnnnnnnnnnnnnnnnnnnnnnnnnnnnnnnnnnnnnnnnnnnnnnnnnnnnnnnnnnnnnnnnnnnnnnnnnnnnnnnnnnnnnnnnnnnnnnnnnnnnnnnnnnnnnnnnnnnnnnnnnnnnnnnnnnnnnnnnnnnnnnnnnnnnnnnnnnnnnnnnnnnnnnnnnnnnnnnnnnnnnnnnnnnnnnnggtgttcttggaggaaggnccaaggcagatggccacccatcctcggntgttatagggcct

SEQ ID NO: 305100 - DNA, 472 bp, Homo Sapiens
  misc_feature (104)..(104): n is a, c, g, or t
  misc_feature (106)..(106): n is a, c, g, or t
  misc_feature (382)..(382): n is a, c, g, or t
  misc_feature (412)..(412): n is a, c, g, or t
  misc_feature (446)..(446): n is a, c, g, or t
ataaaatttgacaaatatatttgaagcccctatgtgttcaacagtgttagttgttaacttatgttttccttattatatgaggctcaaagacgttaaataacttngncaagtggagaaagtgccagaattctgcatctgattggctacaaaggctgtgcaccctcttgttgtatacagtgatggctctttttgaaactctctttcttatcattccatgatgtagtggtcctctttttctgtaatctcctgggtctctgttgcttattctgctcttaatccttataaaagtgccattttgcttttctgccttggaataacacttccttagtggctggacttttacagggccttatcgatgtcgttggatgttcaagtatggacngggaggctggcggctcagttgggccatttnttatttttttcagggtagggtcttactctttccntatccccatctggtttgtcaccatag

SEQ ID NO: 305101 - DNA, 333 bp, Homo Sapiens
  misc_feature (65)..(65): n is a, c, g, or t
  misc_feature (123)..(123): n is a, c, g, or t
  misc_feature (294)..(294): n is a, c, g, or t
  misc_feature (313)..(313): n is a, c, g, or t
  misc_feature (323)..(323): n is a, c, g, or t
ctgcctgaacccctcccgcagctgccatgcgactccagagctccatccacttgcccacctaagtngaaagggccttcgagggcagtcagtttgcagacgacactgtgcattcctttttctctntcggacgctggctccacaatccgggctccaggaggtggaatcgctgttcacttactgccccctagtggtccgcatttctgaaagttctttatccctgtttcctttgagatttttctccgtagatttataggtgtttagggatggggttagtaatgtgggccaagggaggtngttgtttttttcaagggtnagacctcgtnttcgattctt

SEQ ID NO: 305102 - DNA, 308 bp, Homo Sapiens
  misc_feature (213)..(213): n is a, c, g, or t
  misc_feature (277)..(277): n is a, c, g, or t
  misc_feature (297)..(297): n is a, c, g, or t
attcggcacagggtagccaatattagaatgataatttaagggtgtggttgaattttagttagttgtcacatagttattgaacctcatatgctcagtgctgtgggaatcaaacatggaagaggtatggctcctgcccctaatgagaacaagggggaaaaatccagatataatctaaatgctaggttatgtcagggtataggaacacagagaatnggggacctgtaagaactggaagagtcagagagggctccattgaaggaggtcaaacataattccnggaaagaattagggtagttnagggagattgt

SEQ ID NO: 305103 - DNA, 414 bp, Homo Sapiens
  misc_feature (387)..(387): n is a, c, g, or t
  misc_feature (392)..(392): n is a, c, g, or t
ggcattatgtgcttactctgtgttaaataccttgataagtacagtgtcctcattatctcatgtgaacttcagggcaacctcgtgagatagtgacagtacactaaccttatagtaacattttatttgatattatttagaagtttttaagttaccactgatgctctaagtcggtctatatctggggaatttcctttgtagcttatattctcagccagtgtcaggcaatgtattcctttaagtgtctcaggccttcctcctgagtccttgggtgggctgaggagtccggggatctgggagggcatacctcttgaggattaggattttcaagtgtggaaacatttaacttaacaatgtggaccttggaggcaaattattttaaaccttccngttanggatggagggtggatggaggat

SEQ ID NO: 305104 - DNA, 536 bp, Homo Sapiens
  misc_feature (161)..(161): n is a, c, g, or t
  misc_feature (328)..(328): n is a, c, g, or t
  misc_feature (334)..(334): n is a, c, g, or t
  misc_feature (360)..(360): n is a, c, g, or t
  misc_feature (382)..(382): n is a, c, g, or t
  misc_feature (388)..(388): n is a, c, g, or t
  misc_feature (393)..(393): n is a, c, g, or t
  misc_feature (403)..(403): n is a, c, g, or t
  misc_feature (410)..(410): n is a, c, g, or t
  misc_feature (433)..(433): n is a, c, g, or t
  misc_feature (441)..(451): n is a, c, g, or t
  misc_feature (460)..(460): n is a, c, g, or t
  misc_feature (478)..(478): n is a, c, g, or t
  misc_feature (490)..(490): n is a, c, g, or t
  misc_feature (499)..(499): n is a, c, g, or t
  misc_feature (513)..(513): n is a, c, g, or t
  misc_feature (523)..(523): n is a, c, g, or t
tcatacataccttggtgacttgtgtgtctagaggtaaggtctgagcttcctcctcaaggaacttaagatgtacacctgagaaacaggaggactcctccccccagacctgagccctgagactcttcccttggggcatggataaaggatccctgtggaacagntcctgagtctacctccaagggtttgaatcataactcaggtgtgtgaaggcctgttccccaccttaggacctgatttctgaacctgccctgagggtactgtcacctcacctcagacaacttacatacaccctagtcttagggggtcatttaggggacataaggacttnctggcntcgggggactttggggcctttagaanttcccaacttccttttgggggnacatgnattanggggtagggnttttttnaggggaaaaagaatttttggggncccaaagnnnnnnnnnnntttgggggncaaggtttaccccttttncctttagggganttggggggncccggggttcccantttgggggantttaaagggtttt

SEQ ID NO: 305105 - DNA, 277 bp, Homo Sapiens
aggccataattcctcagccttctctttttggctaatctgggcatcctttactggggtgctttggtcttacctctgtgtctagggatcctttagcacccactcagcagcagagattcctacctgggcccaggtctcttgagaccccttctgtggtagaaagctaagtagcatttattagtcccagctgcctccctctaggaactaaatggttaagcaccagccccaaactatatggttcagatgtgtggcatttgggagagctggggatacaaaagga

SEQ ID NO: 305106 - DNA, 543 bp, Homo Sapiens
  misc_feature (106)..(106): n is a, c, g, or t
  misc_feature (407)..(407): n is a, c, g, or t
  misc_feature (412)..(412): n is a, c, g, or t
  misc_feature (417)..(417): n is a, c, g, or t
  misc_feature (430)..(430): n is a, c, g, or t
  misc_feature (447)..(447): n is a, c, g, or t
  misc_feature (460)..(460): n is a, c, g, or t
  misc_feature (470)..(470): n is a, c, g, or t
  misc_feature (488)..(488): n is a, c, g, or t
  misc_feature (502)..(502): n is a, c, g, or t
  misc_feature (516)..(516): n is a, c, g, or t
  misc_feature (521)..(521): n is a, c, g, or t
gactcacacctgagtatctaaagacacctcacgcaccacctatcctgagtagccgtccctgtggcctcttggcgccctgccggtgtacgttgaattccagggtgtngagctgtttgctgtctttacagatgaaaacacttcgaccaagttgagtttctgctccgaaatcatagtggatggtggcagagcagtggcctaggccatggtgctgacatcacagccattcttgcaaggagatggtaggatagccactcactgttcaggcttgagctttagccagcaggcaggatgtccagcttgtccaagttgattaggagcacccggcccagctggaacctgcctcatttttgcggttcccctttaggaaggcacccacagcttgcccagggagccgtgaaggggttttnttttnttccntgaggcaacagcngttgttgttcgttaggnggggcagagcatnggggttgttnccaaattccagagggggnccgggtttttcagngtttcccaggtttnatttnattttttcccgtttgggttttt

SEQ ID NO: 305107 - DNA, 446 bp, Homo Sapiens
  misc_feature (53)..(53): n is a, c, g, or t
  misc_feature (81)..(81): n is a, c, g, or t
  misc_feature (405)..(405): n is a, c, g, or t
ggctcggcgtgggtatgggggatggagactccagctgtgcagcctccattctngagagctgcttagataaggtgcgcaaancaggcattcctaggctagcactgtcaggatatgatttgtatcacttttgttttcacattatctgtctcttgaggaagtcactgcctgtctgcttttcactctgtaccctgggtttccctgataagataggcaaacttccagcattacagagattgttaatcccctagcttgtgcttccctaatacaaattgtttttttaagaaaccctcaaatttgtgttctaacaattggcatgttttatacatcttgacctcatatccagggtttaaaaggaggtgaacacactggttcttaaaagcttccctctatgcacagacgctcctnaaataagctatctgtgggtaatctagccctgtttcatcttg

SEQ ID NO: 305108 - DNA, 515 bp, Homo Sapiens
  misc_feature (411)..(411): n is a, c, g, or t
  misc_feature (441)..(441): n is a, c, g, or t
  misc_feature (464)..(464): n is a, c, g, or t
tttattctatattttggaacaaatcttcacaaaattcatggtatgcacgccggccccttcctagcgtgtaggtgtgcactttgaccctgctgtagtgtgtaagtatgctcactgacctctgccctactgtatatcctgacacaggaagggggatgtcttttagaagctcatttctacctctttcccagctcaactgtgcttgtcttgactgtatcttaaaagtgctggttaatggtgggtgtctggacaaggtaggagagtctataaacctataccgaagtcctctcttatacacggttttgctttccatagtttcggttacttgcagttcaaccgtggtccaaaaatatggcgatgggaaaatttccaggaaataaatccttcattaagttttaaattgtggcaccattntgagtagtggggatgaatggcgttcgttcnggatccttggcctcctgcatggngaattcctccttggcccggagtccccaccggcccttcattaggtaggccaa

SEQ ID NO: 305109 - DNA, 341 bp, Homo Sapiens
ttctaagttttttggggggttggccacagatatcaggcatataggaaaaatgccaagaagcccaaattagggccaagagaaggaataatctcttggtgccaaacaagtgggataagaagaccatagacagttcaggttatttcagaagaggagattggggggaaaggaagtatgaaagcaaaagaggccatgaatggaagaagcaagagtcaagaattccaggtgttctaaatcttgctaaggaacccggtggggaattaaaggttgcatgtacagagtaaggaggctttcaaaaggaattagcctgctcccattgaacaacatgcatttacttccaggag

SEQ ID NO: 305110 - DNA, 360 bp, Homo Sapiens
  misc_feature (295)..(295): n is a, c, g, or t
  misc_feature (316)..(316): n is a, c, g, or t
tgactaaacacttggttctgacttgctttctcacccatattccaacaacttattctagtctactgtaatcccagttataaaactgtcactgacatcatctgttgcaaaaaaattatttacaactggatccatcatcaactcagtctacactaccagctttgaattccaaagcaattccataccacaatccacatctgtattctcaaatccactttgatacagtttcccaagtccactttggatacagttacctctttaggaaaggatattaggaatggacaaattttctgggganacagggttttcttcggggggngggggctggggagggacatttaaattaaaaggtggggaccgggg

SEQ ID NO: 305111 - DNA, 416 bp, Homo Sapiens
  misc_feature (253)..(253): n is a, c, g, or t
  misc_feature (316)..(316): n is a, c, g, or t
  misc_feature (373)..(373): n is a, c, g, or t
gtgatgtatattctaaaataccccagaagtagaaataaagagttagtgaaatggtataataattaaatttaactgtaccaggtgcttctgaccctaaaggacctattctagggcccctaccctactattctgattcacattccatcaacttctacctccacctccacaataagtgttctctaaagttgcaggttgagaatatagtaggtgcccagggacaaaagcccttttcactgtgggagggactccgggncactttgcattaaaatcaggaaaggggaacatgggctttttcaaacttgaggggaaacccagngttgggaggttcttaggacttttagttttcttaggagggttcatttgaggaggaggnaggggggaggggaaacttccaggaacttaaccacctttctttc

SEQ ID NO: 305112 - DNA, 353 bp, Homo Sapiens
gagagctagcaccaagcttcaataccctggttacacggttgaattaagtcacatttggggaaaagtacatggcataaacatttctgatgagaatttcagctggaggatgacaacagttatcaaggaataaagaatcctgcagtcatcatccagtccagcttccctgcagtaagcatgagcagtagtacagaatgcttgtgaaaccaatcagaaaagatgtccctcgtgatccacgcctttctgttaggcgtaataatgggactgggtaaggaaattcactccttggaaaacagcaaagatacaagctttttgcctatttacatcagttttactcttatggcatgcccgctggc

SEQ ID NO: 305113 - DNA, 176 bp, Homo Sapiens
  misc_feature (56)..(56): n is a, c, g, or t
agctcggcgtgggagagaaagatgaacaaaacagccaaaaaatgttggggagggtncaggtgtcgtccgggtacatttaatgagaaaaatgagtgagactcccgagtaagaatggagttaactagtaatgaaccatgttggcccttagcattcctgctcaagataactgcctagag

SEQ ID NO: 305114 - DNA, 518 bp, Homo Sapiens
  misc_feature (130)..(130): n is a, c, g, or t
  misc_feature (325)..(325): n is a, c, g, or t
  misc_feature (362)..(362): n is a, c, g, or t
  misc_feature (376)..(376): n is a, c, g, or t
  misc_feature (385)..(385): n is a, c, g, or t
  misc_feature (401)..(401): n is a, c, g, or t
  misc_feature (425)..(425): n is a, c, g, or t
  misc_feature (439)..(439): n is a, c, g, or t
  misc_feature (444)..(444): n is a, c, g, or t
  misc_feature (451)..(451): n is a, c, g, or t
  misc_feature (464)..(464): n is a, c, g, or t
  misc_feature (476)..(476): n is a, c, g, or t
  misc_feature (482)..(482): n is a, c, g, or t
  misc_feature (490)..(490): n is a, c, g, or t
  misc_feature (508)..(508): n is a, c, g, or t
gaaatttacaactattattgaagaaaagaacagtaagaaaccagaaagtagtattttgggggcagctcacgtggagtcaggctcagtgtaggacttgagtgaaagactttcccaagaagccccaggctanatctgggcagccctggatgcttaggtctggaacccagggccagaatctttgacagccagatccagtaaaggccaaaaccaagaatctcctcccacaccagtggattctcaaaacacagtgcacttgatcaggctgtcagaattacctaggaggcagtgcattattcttgatgggaggaggaattctctggaacantcctggaatttgcattttaaaaagtgtggcggaattnttttgttgttaatnaattccttncgttttgttgtttccnttttgtttaggaaggcccatttcntaaaactttccaanttttntttattnttgttaaaaccanaaaaactggggnaaaggnttttggcntttatttttggacccggngattttgtgg

SEQ ID NO: 305115 - DNA, 378 bp, Homo Sapiens
  misc_feature (69)..(69): n is a, c, g, or t
  misc_feature (318)..(318): n is a, c, g, or t
  misc_feature (347)..(347): n is a, c, g, or t
  misc_feature (362)..(362): n is a, c, g, or t
gccacttttatttcttcttccacttatttgttttaataccctaagaaacaaattcaaagtctaccaggngactgtgatgtgcagtcagacttgtgggccaccagagcctggacacctccaggtcatgcacatattccacctgggcaaccctcagaaggtggactgaaaatgcaacgaagggcacaggaggggactcctgcataacctcggctggggttataagatatagggaggaaggcttcaagggttcaaggctccccaaagtaggaaggccatttctgaagcttttctccaactagccaggataaactgggggancagacagggttaaatctccccagcccagncacttaataatgatnctttttcaggacccca

SEQ ID NO: 305116 - DNA, 444 bp, Homo Sapiens
  misc_feature (52)..(52): n is a, c, g, or t
  misc_feature (89)..(89): n is a, c, g, or t
  misc_feature (91)..(91): n is a, c, g, or t
  misc_feature (300)..(300): n is a, c, g, or t
  misc_feature (405)..(405): n is a, c, g, or t
  misc_feature (411)..(411): n is a, c, g, or t
ctctgtataaatattttaaacatttatgagagctacaaatcatatagctttncttgtgtatttatacccaaattcactgtggctttgcnantgaaccagcccctacaagagaaaaaattaaagggggttgcagagatttctctttgaaagataagcagaatctttagaacttacaaagtcaaaaggctatacagtttctttattcattccaaactgacctcccatcatttcaaataaataaaatgctctatttactccatggaactgactcatgtcagggctctcgggcaaagggttccnggtaaaacctcaaggactcagggggactgtggccctccaaaggggctggtggtacctaccatgggattcccatttggtaataaaatggtcccgggatgggggggnaatccngggggcaggaggggcaggtgaggtggggttttc

SEQ ID NO: 305117 - DNA, 461 bp, Homo Sapiens
  misc_feature (318)..(318): n is a, c, g, or t
  misc_feature (352)..(352): n is a, c, g, or t
  misc_feature (359)..(359): n is a, c, g, or t
  misc_feature (400)..(400): n is a, c, g, or t
  misc_feature (428)..(428): n is a, c, g, or t
  misc_feature (444)..(444): n is a, c, g, or t
ttaaacaaccaacatttattttctcacagtcctggagattaaaagtccaagatcaaggtgctggcagggctggttcctggtgaggtctctcctcctggcttgcagatggcagcattcttgttgtgtccttacacagcatttcctctgtgcacatgtggagagacaaacctctggtgtctcttcctcttataaggacactagtctatgggattagggcctcactcttatggcctaacttaaccttagtttcttaaaggccttatgtcccaaatacagtcatgttggggggtttagggaccttcaaccaaggtaaatttngggtgggtgggaagaaggcccaaccattttgggngggttcntggttgggggaccacaaattcaagaaccttgaatttcaccnaattccaattcaccaagtgacctccttnttgaataaaaggtttnaaattttaccccagcct

SEQ ID NO: 305118 - DNA, 185 bp, Homo Sapiens
  misc_feature (164)..(164): n is a, c, g, or t
actgcgcccggccattatgacccattcttaatgcaagtctttatgtggggacattcatatggggtaggatatatccttcaactcacctaagggaaacctgcccaaagcgggttgtatccatttttacattccccactttataggtgtatgagggaatttcaggntcccccctatatactttctaa

SEQ ID NO: 305119 - DNA, 423 bp, Homo Sapiens
  misc_feature (83)..(83): n is a, c, g, or t
  misc_feature (194)..(194): n is a, c, g, or t
  misc_feature (320)..(320): n is a, c, g, or t
ttaactaagtattttgctcataagcacttctgccacattctgtattcacttggtgtttgctccttcagtgaaattttcctggngttacattctttcttgggaataatatataaaattcaaaacatcgagactaaatatcaaatcatcagaaccaagatttcctgattgaaggtcacaatgtaatctaattgggnatttttctcaaaatgcacaatcacttccctaaaaatatccaggatttctcaggaaatatttatggtttttcttcggaggaccctgcaggaaattttaaccaaaaataaggtccatctaaggggggntttttaagggcctaccaggttggttgggtttttcctttaaatggcaccatttagggcctccttcacccccctaccatggggttatgggaccaatttttcccct

SEQ ID NO: 305120 - DNA, 459 bp, Homo Sapiens
  misc_feature (301)..(301): n is a, c, g, or t
  misc_feature (362)..(362): n is a, c, g, or t
  misc_feature (377)..(377): n is a, c, g, or t
  misc_feature (399)..(399): n is a, c, g, or t
  misc_feature (420)..(420): n is a, c, g, or t
tccatagcaacaaataccagctgatgccagttattctcaagtgtgtcttcccatccctgactccaccagtctcctgttctgtacttccaattgcctactggatctctccttttgaatgttgcgtaaactcagtgtgtctcaaatagttacccaacccaatcctccacactgaaatatcttctggcagtgctacaccttttgcagtgatactgtctcaggcactcacacagctgcagtactctaatactctgccactggccccttggcagtcgacaagagccagtgatgttggggaacaganaagaaggggataggacattaggaattcatgtttacatgatgggaggaaaggggtttcaagnttaagtattcagtgncaggtacagggactttgggagnaatgggttaggttatttgggnaatggaatgggccaaattccaatcaattctggtaggaca

SEQ ID NO: 305121 - DNA, 444 bp, Homo Sapiens
  misc_feature (157)..(157): n is a, c, g, or t
  misc_feature (159)..(159): n is a, c, g, or t
  misc_feature (345)..(345): n is a, c, g, or t
  misc_feature (354)..(354): n is a, c, g, or t
  misc_feature (374)..(374): n is a, c, g, or t
  misc_feature (433)..(433): n is a, c, g, or t
aagaaggcataaaggtgagagattgttcgtaaagtactttgaggttgttggatgaaaggtgataggtaaacacaaattattataatcatggggaaggttaatgaaaaaaactctggtccctgggaacaaactgtagaactctcctgcggtaagcgantntcatgaaaaatgagctattttctgtcctagccttctgatttaaaatttggtgtacatgttaacaatacaataaacctaatatttgggaaaatgcctgggaaatcgttgctttgggacagggaaatctgggatttcagggaggtcatattaattaggcatgttttatcttttcctccttggaagganaaattaaantccactcccaaaacacttantccttactaattttttaggcagttttacttgggggcctacttaaggttttaagtttttntcctggggggg

SEQ ID NO: 305122 - DNA, 453 bp, Homo Sapiens
  misc_feature (111)..(111): n is a, c, g, or t
  misc_feature (113)..(113): n is a, c, g, or t
  misc_feature (350)..(350): n is a, c, g, or t
  misc_feature (395)..(395): n is a, c, g, or t
  misc_feature (440)..(440): n is a, c, g, or t
cggcaaggaccaggatggacgaccctggagaagagtgacaggaggtggcattgataccaaactttcgacgaccaaggtttcttctgagactctgagtgtccagctggaagntnttttaagtgtctgtcactggtattgaggagtcaggggcacggaatagaagacatttccggtcacatgacatctcggctgggagggtttgcatgtcgtgtctgggaaaggagtgacctgcccgcccattggcacccatcgctggttagcagggctgtttccacgctctgaatgagtccgttctcagaaactatagggaacacattaaaggacttacatctcttaaatgccattggtgntttttgcctctggttacttgggcaaaaggcaacgcaatttcattnttgcattggccaattttccacctgtgtttcattgttttggttttntttgatgttgagc

SEQ ID NO: 305123 - DNA, 391 bp, Homo Sapiens
aaatactcccttttgcttgaggaataatcagacatcatcaaaataaggacattacgttgaaaataatatcttggggaaaactatttatttctaatacggccagtgaggagttgtcttagggaatgaatgggctgaccaagaggattagaaaagagattcagcacttccacctggtttggctctagccctggtttgcagtgactaagagttgtcacctagacatctgtttgtagggcagagtgagacaagtctgtgaccttcagctcagttcctgtgggacagatgcccaccccttggaagttaaacactcttgtttaacagtttttagttcacaggagccaagggactggataggcaaaggaaggcaatggatgtgtttgttttgttgttt

SEQ ID NO: 305124 - DNA, 515 bp, Homo Sapiens
  misc_feature (55)..(55): n is a, c, g, or t
  misc_feature (102)..(221): n is a, c, g, or t
  misc_feature (297)..(297): n is a, c, g, or t
  misc_feature (335)..(335): n is a, c, g, or t
  misc_feature (373)..(373): n is a, c, g, or t
  misc_feature (384)..(384): n is a, c, g, or t
  misc_feature (414)..(414): n is a, c, g, or t
  misc_feature (440)..(440): n is a, c, g, or t
  misc_feature (463)..(463): n is a, c, g, or t
  misc_feature (471)..(471): n is a, c, g, or t
  misc_feature (504)..(504): n is a, c, g, or t
aggagtcccctgctcaacagcgtgctcctggtgatactgccacccgtaacggtanctggctttgctaacatcctgacgagacgtcggggagagacgggaagnnnnnnnnnnnnnnnnnnnnnnnnnnnnnnnnnnnnnnnnnnnnnnnnnnnnnnnnnnnnnnnnnnnnnnnnnnnnnnnnnnnnnnnnnnnnnnnnnnnnnnnnnnnnnnnnnnnnnnnncagatcacatgattctttacatctctgctgacagatttcatcactggtgctgagtgcagggagtcccgcaggccanttacacgtgttggcatttgccggggcaataacagggcntgtgtggatttggttatttttatgggctggggtttctngctggcagatngcctgggttttttccattggccaagggttncatgggttttgacacatccaggggantttcaacagttgagggatggcantggaccantgagttcgttgcatgagggttttccccggggcnttggtttcccc

SEQ ID NO: 305125 - DNA, 410 bp, Homo Sapiens
  misc_feature (218)..(218): n is a, c, g, or t
  misc_feature (273)..(273): n is a, c, g, or t
  misc_feature (305)..(305): n is a, c, g, or t
  misc_feature (347)..(347): n is a, c, g, or t
aaggttttaggttctcggagatgaaattgagtctgggaaagggacgctgcatctccagaggtgaataattccctgaaactaaaaccattgcccgttttctctgttgatggttgctgatatcccctgaagttagttccacacccgaaacccaagccctctggccacttctgcccagggaaatgagagagggcatgcgattcccttgggccatgtggccncagctggacatgaggactggtcagggatgaaggtgagcaggaaggccctgctgtngaaattcctggggctggagcttgatttgcttnccatttgctctagttagggaagtctttgtttcctgggggagncagttgagttattttttgttgttcttaggaattcttgatgttggggccaaacccaaaacatta

SEQ ID NO: 305126 - DNA, 400 bp, Homo Sapiens
  misc_feature (23)..(23): n is a, c, g, or t
  misc_feature (327)..(327): n is a, c, g, or t
  misc_feature (368)..(368): n is a, c, g, or t
ggcacgagcttggctctgctctntcgtcgtgtcctccccactgacccccggctaccactggtcttttcactgtctccgtaagtttttcctttttcagaacgccatatagttggaatcataaagtatatatagccttttcacattggtttctttcactggataatatgcatttgtttcctctatgtcttttcacagtttgatagctcatttctttttagcatcgagtaatactccattgtctgggtgtacaacagtttatccattcacctgctgaaggacatcttggttgattgcttccaagttttgggcaattatgaataaaattgnctataggattatccatgtgtagggttttttgtgtccatttnaaggcttttcaactcctttggggtttaaataa

SEQ ID NO: 305127 - DNA, 389 bp, Homo Sapiens
  misc_feature (338)..(338): n is a, c, g, or t
  misc_feature (352)..(352): n is a, c, g, or t
cccatagtccccatccccaaccactacggggaggtattgggtggcagatctgaggaagctagattatcccgggcaggcacatgggtgtggggagcagagaagaaaatggaaggattctacttctgttcaccctaccctagagtacactctaccctcaccctctagaagccccagatcacagacacccaccctctgtctcaaatcccagctacgtaggactttcactccagtttaaaactttaggatctggccaccaccaccaggaaaggaaaaatatcaataggaaacatacatttttttctggcataatttaggaggcgtctatgtgtctttctgtntttcctcttcaatnttatttccttggccaaggaggaattttgggcggccct

SEQ ID NO: 305128 - DNA, 408 bp, Homo Sapiens
  misc_feature (273)..(273): n is a, c, g, or t
  misc_feature (341)..(341): n is a, c, g, or t
  misc_feature (362)..(362): n is a, c, g, or t
  misc_feature (373)..(373): n is a, c, g, or t
tccataacctcagggtgctgctgtagtccttcttcctcagggtgaatcttttgtccgttcctggcctcttgggtgggggtgggtggtgtcagatgatcaccagaggactctagattcttcacctgccatttgtctatctctgtcaacctcaggaatcatggcgtttctgcattatggtcttcagcaagacttgtcttatacaacttagcttaggagacatatggatgaagcgaggcctgtcccttaagcttgaggctgttggctcatgctttngcgtcaggggcaaacccttgggtgcttcacaagcaggagcttttctcctgttcaagaagttggaggtnaggacttcaccttttgcctcntatgggggttngggttcacactttcttcaatatggggtcttggtgg

SEQ ID NO: 305129 - DNA, 338 bp, Homo Sapiens
  misc_feature (236)..(236): n is a, c, g, or t
  misc_feature (249)..(249): n is a, c, g, or t
  misc_feature (300)..(300): n is a, c, g, or t
agaaacaactcaaatgtttaataggagtcagttgaacaaagtgtaacaaacctatcaaacgatgtattttgtagctacaaaagtaagtaaagacattctctaaaccaatagagaataactccaagatacttgagtgaacaaaaggaagttccagaacactacatatttttcataagacaagacacacagatttacacataggtatggcatacatatttgttatatttaacaggaantaatggggggccnggcacggtgggccttcacggctggtaattccccggcactttgggggagggnccgagggcggggccaggttccatcttgagggttcgggg

SEQ ID NO: 305130 - DNA, 365 bp, Homo Sapiens
  misc_feature (329)..(329): n is a, c, g, or t
  misc_feature (334)..(334): n is a, c, g, or t
ctaaggatatagtaatttaaagacccttacaaagcaagctgtgtataccaggcattttttacccaatcttttttagttgtttcccctaaacctaattttctagtgttttagagacatgcctttgactctttacaaagcattcaacttttactgacccaatgacactctctgcatccacattttacttgtcgatagtaatatcgtattacctaattttgaaaataagtacaataacataaattgggttttgaattaaacaggcttactgggtagggaggcaggaagtgcaagtgtggcaccatgggttagggcgtgcctttattaatatnctgtncagttgccggaggatggggaaaacatttccc

SEQ ID NO: 305131 - DNA, 268 bp, Homo Sapiens
  misc_feature (43)..(128): n is a, c, g, or t
  misc_feature (209)..(209): n is a, c, g, or t
  misc_feature (240)..(240): n is a, c, g, or t
gagattgttacctcatgttactcaggaagtaaatggaaatgcnnnnnnnnnnnnnnnnnnnnnnnnnnnnnnnnnnnnnnnnnnnnnnnnnnnnnnnnnnnnnnnnnnnnnnnnnnnnnnnnnnnnnngagctggtacttgttaggcaactgctgatcttgtgggccccaacattgctccttcatcccctgttctctagatccagggantcaaaccatgtgtttctgggaactaattccngggaaattaataggaccaggaaatatgt

SEQ ID NO: 305132 - DNA, 368 bp, Homo Sapiens
  misc_feature (350)..(350): n is a, c, g, or t
aagagctgtttctattgcgggtatatttagttttaactaagtgaaaagatacttccctgatcttgtaatctataataaatatattctaaatttttcttaatgatcccggttaattatgtattcccaaccttggcctgatgcctggtataggcactatgtagcattaaatctcactaagctgccaacagcactatgtgtgcccttgggagctacaaacatgtctggacaatcagccctaccctatgccatggttccattctgccccagtttgagttcttatagctggtaggcagggctttcctatacttctcttaggagggtcagattgtcacttcttgctcagggttctnggccggcatctgaaggtt

SEQ ID NO: 305133 - DNA, 219 bp, Homo Sapiens
  misc_feature (38)..(38): n is a, c, g, or t
  misc_feature (40)..(40): n is a, c, g, or t
ggcgtacatatacaccatacttttctttatgcattcancntgttgttggaaaccaaggttgagtccatattttggccattgtgaatagtgttgcactaaacatgggggtgcagatgtctcttcaatatattggtttcctttcctttgagtaaatgcccagtagtgagattgctggatcatatggtagttctatttgtagttttttgaggaatctccaca

SEQ ID NO: 305134 - DNA, 451 bp, Homo Sapiens
ttgaaggcatactgttttaatgaacattataaccaaaaaaaattgagtcctttgtgctagaaacatgtagaagaaaaattataaatttgtttcaaagaaagctttcagaatcagttttacctaaaatctatagctaagattatcactcccacataccctcacccatgatttcttcctgccaaccttctctcaatagctatatcagtatttggcttgattcatgttcaatattgacaacagcatgtctagttaaatactgctcgcagctggccatgggacatattatgaatacctttgcttcccagatacatttataattgtttagtttttcatttgcttacttctctgggccataattcaaccccaaattatttgccatttgtccagatctctccacatccctgatgggcccagggttgtctacaaatgtcatcttgttcaaagggctctg

SEQ ID NO: 305135 - DNA, 182 bp, Homo Sapiens
  misc_feature (103)..(103): n is a, c, g, or t
  misc_feature (106)..(106): n is a, c, g, or t
gtaatattttagaaagattaaataactaatgaagaggcaggagaaagaatcggagataattcccatgtttctagaactagaataagtagattagtagtatcantanactgtaatataatgcagtacagggcagtagtttaaaatcccatgtccctaggaattagtttcccatagtcacttgc

SEQ ID NO: 305136 - DNA, 338 bp, Homo Sapiens
  misc_feature (268)..(268): n is a, c, g, or t
tgacagaaattgttcttttttctactcacaggactgttattgaattagaaatttgaatttacatgtggtggatgaacatcactcttgttacctgcttcatgtacttttttgagtgcttactacctgtgatgattattctgtttctgatctccagtacttagcaaaactggagtttttccgcaaagctgcagatgagggaatgatttaccttaacagcccttcaggattttaacctaggattaagtaggtttgcatgtttgtgattccnttcattcagggcccggcttcttgaaggtagggatgtgggggaagagcttttaagggtcctgaaatttccc

SEQ ID NO: 305137 - DNA, 319 bp, Homo Sapiens
  misc_feature (179)..(187): n is a, c, g, or t
gaacatctccatattctgtacatgtggttaaaaactgtcaaacaagggtgtggattatacaagtgtgtggattaagtacagaactctaagggattgatacataaaagagtttgaatggaagtttgataaaatgattaaaaggagtggttgacccttttttagtgaaggacggattatcnnnnnnnnnaagaatgcttctgaatataaacttttacatattatatgtattaaaagataaggagttgcttaatattaagtcttgggtttttaggattttgaaaacccaaatacaccctttcagtgtggggaaacctgagtc

SEQ ID NO: 305138 - DNA, 461 bp, Homo Sapiens
  misc_feature (211)..(211): n is a, c, g, or t
  misc_feature (364)..(364): n is a, c, g, or t
  misc_feature (401)..(401): n is a, c, g, or t
  misc_feature (431)..(431): n is a, c, g, or t
  misc_feature (438)..(438): n is a, c, g, or t
catttcctagtttggtaattctaactatatcgtttagaattatgaaatgatgctttgaatgataggatttacttcttcacattaagacatatttttaggaacatagaccattttgacaagtgaatttcacagtttaagttccttaaataaaatgttaatacatattccacactctttgtttggatcctcttttgctggttttctgtaaccngtttctgctttgcctgatctagtaggctgtccacatattcagggtaatctattcctaaggtaggctttcaaggcagtcaggaaacagggattggcatttgctttgtacttttttgggggcgggtgtaggggtatggggaggaaagggaaattngggttaaaggtccaccaggaggaaggaaggatttatngatggggggccccgtgttcactggaggggntcttacntgaccccccgatggttggcccct

SEQ ID NO: 305139 - DNA, 404 bp, Homo Sapiens
  misc_feature (305)..(305): n is a, c, g, or t
  misc_feature (313)..(313): n is a, c, g, or t
  misc_feature (348)..(348): n is a, c, g, or t
tattattaaatattgatcatctacatgttttctctttccaaggtccacctattgaaaaaagagcttcacatctatttgttaatttggattttaaactcaataattagttaaatctttgagtaaaagggtaggtatcatcataatttatcttcattgactcctttcctacgttaaaggctgaaaatgaggttcagactctcatttcactaaaacctccaacagtattttaatgctgttgtgataagtcgttcaaaataaccattttcaccaaaaacatatacacgtttctttgcacgaagtagggncatatccngtatttgcacagggctaaaaccacatttgaggggnggctttttacaactttccattttttataaattttcgggaaccccctttttttaggg

SEQ ID NO: 305140 - DNA, 514 bp, Homo Sapiens
  misc_feature (48)..(48): n is a, c, g, or t
  misc_feature (341)..(342): n is a, c, g, or t
  misc_feature (400)..(400): n is a, c, g, or t
  misc_feature (404)..(404): n is a, c, g, or t
  misc_feature (409)..(409): n is a, c, g, or t
  misc_feature (445)..(445): n is a, c, g, or t
  misc_feature (471)..(471): n is a, c, g, or t
  misc_feature (496)..(496): n is a, c, g, or t
tcagcacaacattgatagtaaaacaaagaacataaacatctaaaaacntgtttttggtgattcaaaaatccctattataatcatagcactaaagaaatctaatggtctgatgcaggataactgtgaatcaactcagtcaaggtgagcctgaggaccactctgtgtgccctccatctccaggagagctattttcaaactttcccctaatactcctctcattccccaccaaaatttgatgcctctgctattcagagaaactaaggcacaaaagaaaatcaagcacatcgaaggttcactccctaagttcattcagtgaactcctagtaacacctactgagggnntcacttaagggtattaaaacttggaacccatggattttacatttcccaggttcttcangggncaggncttttggaatttaatttgttgttaaggagtaattgnccaattcttgggggggaaaaaagctntttttattttcctcttcctccttancacaaaggggtaccattc

SEQ ID NO: 305141 - DNA, 234 bp, Homo Sapiens
  misc_feature (131)..(131): n is a, c, g, or t
  misc_feature (182)..(182): n is a, c, g, or t
  misc_feature (195)..(195): n is a, c, g, or t
  misc_feature (203)..(203): n is a, c, g, or t
  misc_feature (210)..(210): n is a, c, g, or t
aaaaagacaaatgtgtttttagaagaacaaatgggagacatgcaaacattatcacaaaccaaactttcttatataggtgtgagtggtctttttcaggttcataaaactgccagagaggggatttatggtangtttattctgggtctctcccctgggagtaggaagccaccccaaacaggganatttatgtccgtnctcatttntcaggangtttctacttttaatcaaataagg

SEQ ID NO: 305142 - DNA, 359 bp, Homo Sapiens
  misc_feature (268)..(268): n is a, c, g, or t
  misc_feature (304)..(304): n is a, c, g, or t
  misc_feature (343)..(343): n is a, c, g, or t
gaatcttaccatcactgaaggtcatctagatggatgtttgcattttctgtatgatgtttctaccaagattgtcatcatctcttgtgcccaccttccccttttccagcactgacctctgtcagaaggcctccccagttctcttctacttccttccgccatttctttagctcatcagctccttcgacttttccttctccactttcacccacataccagtggaggaaccaccgggaccccagtccccaggctctcaggtgtccttcaaggntcctcttggaccatttttcttcccctggattactgngggaggggggtttcttcctggtccccctctggcctcttnctcaaatttcccattt

SEQ ID NO: 305143 - DNA, 312 bp, Homo Sapiens
  misc_feature (118)..(118): n is a, c, g, or t
  misc_feature (208)..(208): n is a, c, g, or t
  misc_feature (268)..(268): n is a, c, g, or t
  misc_feature (299)..(299): n is a, c, g, or t
tcgtatatcatttcaaacccccatgaagacccagacagcatgtttggggtgggagtgggccatgcggggatggccttgtggaaggcaggcgtttaggcgcagtactctaaagcaggtngggctcagctgagggcccaagcctaggaaccgctgggcagacacatgttctcagtaaggggcctggggccgcctttgccattccactttnggctctctttggggaagagcttcaccacaccctcggaaactttcctgagctcttgatttncctgggggggttgggttaagaaccagcgttntattttttaaacc

SEQ ID NO: 305144 - DNA, 362 bp, Homo Sapiens
  misc_feature (348)..(348): n is a, c, g, or t
aaaaatgcagtattatctatactcagactgaggtgctgggatggcgagcaggggaccccacagcactgtccccagggaattcaagtcctgtgaccgccagtgacttactccgtttccttggggcttttcccacctcaacctgtattgtttctttttcataaataaattcagcattatagtatcattaaaagaaggccttaaagagggcgttatttttccttttgggttgaagggaaggggaatagttaattaatagttttcacctctttctccccaaaaaggtacagttcccaaattttgtggcacaggaggatttgctgtggggtatttcaaggaggggtactttgncatttttaggctcc

SEQ ID NO: 305145 - DNA, 273 bp, Homo Sapiens
  misc_feature (14)..(14): n is a, c, g, or t
  misc_feature (55)..(226): n is a, c, g, or t
atttcggcacagtntttaaatattcatcccagtgtcatcccagttagtcatactnnnnnnnnnnnnnnnnnnnnnnnnnnnnnnnnnnnnnnnnnnnnnnnnnnnnnnnnnnnnnnnnnnnnnnnnnnnnnnnnnnnnnnnnnnnnnnnnnnnnnnnnnnnnnnnnnnnnnnnnnnnnnnnnnnnnnnnnnnnnnnnnnnnnnnnnnnnnnnnnnnnnnnnnnnnnatgttaggcaattatagggatcacagtccaccatttcaaactcttag

SEQ ID NO: 305146 - DNA, 469 bp, Homo Sapiens
  misc_feature (111)..(111): n is a, c, g, or t
  misc_feature (114)..(114): n is a, c, g, or t
  misc_feature (385)..(385): n is a, c, g, or t
  misc_feature (424)..(424): n is a, c, g, or t
  misc_feature (444)..(444): n is a, c, g, or t
taagtaatcagtgacttgaaaaatagcagattggtataaggattgtaacttaagaaactgaaaactcccatgctttaaaggagtataggctttgatatttttctgcggaanttnttcttcactcatttaaatcttcctaggctgagattaagcattcatcctgaaatgtacacttgaatagtttgaaattcaacacaagtgtatatttttagtgaagacattttctcttgggttatcagtggtcagtgatgtagtgggtggttttgcttgacctcagggtatttacagaagcctagggatctgagccaaatatctaggcccaaccccaagttggggactagggtcttcacttattgggtacagcacacccaatgttttatggccntttcacccaaaaagcgtttttacggccggggtgtgcccntagtcaccaacagtaaccgncggggagacacgtcaggggagaggg

SEQ ID NO: 305147 - DNA, 541 bp, Homo Sapiens
  misc_feature (147)..(147): n is a, c, g, or t
  misc_feature (151)..(151): n is a, c, g, or t
  misc_feature (253)..(253): n is a, c, g, or t
  misc_feature (283)..(284): n is a, c, g, or t
  misc_feature (286)..(286): n is a, c, g, or t
  misc_feature (291)..(291): n is a, c, g, or t
  misc_feature (391)..(391): n is a, c, g, or t
  misc_feature (417)..(417): n is a, c, g, or t
  misc_feature (425)..(425): n is a, c, g, or t
  misc_feature (434)..(434): n is a, c, g, or t
  misc_feature (453)..(453): n is a, c, g, or t
  misc_feature (465)..(465): n is a, c, g, or t
  misc_feature (490)..(490): n is a, c, g, or t
  misc_feature (507)..(507): n is a, c, g, or t
  misc_feature (526)..(526): n is a, c, g, or t
ttatgtcaaggatgctacgccaacccacctccaccctaaggtctggggctgcagtagcttaactccccaatgcttagtcccctaataccatgggaccactcaggtgatgctgggaaggggacagggcccatgataggccaggtgtgntctncacagcaccccatcttccaacatgtggaccccaaaggtacatttccagggcatggctctcagctgaagtccgtccccatggaagaccctcctcccactgggnccagggagccagcacggccctgcccatggnncncctgnacacagccttcttcctccagggcacaggtttaggccccaacatggattgaggcggcgaggctggcaaattttcattcatggaagggttcattccaggagnttgctttccttcaggcaacagggagnccgggacntaacaaacntggttcccagttattattncaggattgaacnttcccttattgagggagggggaacntttcggaggggcttttngcccattgttggcctttgnaagttggccccacat

SEQ ID NO: 305148 - DNA, 382 bp, Homo Sapiens
  misc_feature (302)..(302): n is a, c, g, or t
tgaaacagtttttattcttgacttcctaaacaatgaattgcttatactgtcctataaggattctctgtgatttgctgtactgcctagtaaacttttctttgtaagtatttctttaactgtattggaggattctcaagctgagaaagaatttaaagaacctcattttcggtaaattctttcattttacagcggagaaaaataaggttccaactggcttttggaaagtgacagaaccggaccagggacccatacaactctatctagcccagaaatatccctgaattataagatactgccttggnggacagggaatataaattttgcttttccgcttacttttccaaattccattattttatttgttcagtccctgttcacaggg

SEQ ID NO: 305149 - DNA, 408 bp, Homo Sapiens
  misc_feature (178)..(178): n is a, c, g, or t
  misc_feature (263)..(263): n is a, c, g, or t
  misc_feature (361)..(361): n is a, c, g, or t
  misc_feature (375)..(375): n is a, c, g, or t
  misc_feature (398)..(398): n is a, c, g, or t
actgtactgttatttcacatcctgagagtcttttctcagactgtaagctcttgggaaacaagagctgagtccacactcccttcgtatctccctgctgccagcagagagctgggctctgggccggagctccacaggggcaggggctctgctgttccctcatgcagcgccctcggccagnggacgagtgagcaatggacgcagatatggcccgccctgacccacactgtctttcttgcccctcaggccatctctcgcctctgcgnggaacaagtacaaggacctaagaagatccgcgagaaggcgcttcagccagtggcagacaacctgaatttggccccggtgggtccccagccatcatctntttaaattacgganggcccgccggaggaacaaccatncctttagttt

SEQ ID NO: 305150 - DNA, 254 bp, Homo Sapiens
  misc_feature (187)..(187): n is a, c, g, or t
  misc_feature (222)..(222): n is a, c, g, or t
  misc_feature (234)..(234): n is a, c, g, or t
ggacttggcctttcagctcctatatttgactgaagttcttccactatgcacttattgtcagttcttgagatgatgctctgggacttaataactttgatcagaccttctaaacccaaatttggaagtgagggaccagaccagaaaatctagggatacatggatggctaggaggacacaggtgttaggnttttaattaggatggcagggctaacagctggcccnttttcccttgtnttggatacatattctatttt

SEQ ID NO: 305151 - DNA, 170 bp, Homo Sapiens
  misc_feature (99)..(99): n is a, c, g, or t
  misc_feature (156)..(156): n is a, c, g, or t
tgttaggctggttcagggcagggtccagccattaaggacaggtgcattcttctttcttggggccagtggagtgttcccaggggaagggcacctccagtnttcctgttctaggaaatattgaggcccaaataatgggggttggggctgaggcacctncttgtgtttgactt

SEQ ID NO: 305152 - DNA, 149 bp, Homo Sapiens
tgtaaaattaactaaagctcagaaatgaagataaaatatttcaacatatctcattaatattaattttagaataactgatatgaacttaagatacttttaagaaggatctgatcagcagatagtataaaatgaaattcaagaagactgtg

SEQ ID NO: 305153 - DNA, 404 bp, Homo Sapiens
  misc_feature (333)..(333): n is a, c, g, or t
  misc_feature (363)..(363): n is a, c, g, or t
  misc_feature (370)..(370): n is a, c, g, or t
  misc_feature (376)..(376): n is a, c, g, or t
ttaaatttaaatctattagaatcactgccccccaactacggcattaggctagattagtgacaaaaggcaaatagacatggctaaagccctcctagaagcatgactcactcctgagtcacgtcaggtgtcacacaccaggagcgggccctctcaaggccacctctgtctcagcaaagtctctgttctctaccacctccaccctacagatgtgcgtcttcagctgtgtggccgcttcaccctgttgcctcccttctaggaaacccagtcggggagtgtgttgccacacccagtggggttagttattcaggaataggggtctaggggtcttctttnccgtttctaaaagtcttctttgttttcttnggcagtnggtgtnactttcagagagaaggggtattcagggc

SEQ ID NO: 305154 - DNA, 354 bp, Homo Sapiens
  misc_feature (74)..(74): n is a, c, g, or t
  misc_feature (314)..(314): n is a, c, g, or t
ttgatctattaaggccaatttattgtagtttacaggctttcctctgctatccttcatccccattatgggatgtnggttcactgcccatatacccccctgggtattgtattcccagttgggggccaacctggggaagggcagtggctcacaaggtagccaccagggtcagtcatgtgcattgcatttgcaaattgctgggctgcctccataatggagtcatgttctcccttagagtttggcctagtgtgactgtgaagtcctcccaagtaagttcaaatgttaagcctagttaatgggaacccttcaatgcattngtcaggggttttccataaaacttccatagctccattttaa

SEQ ID NO: 305155 - DNA, 550 bp, Homo Sapiens
  misc_feature (33)..(33): n is a, c, g, or t
  misc_feature (150)..(251): n is a, c, g, or t
  misc_feature (531)..(531): n is a, c, g, or t
ttttgagatagagtctccctctgccacccaggntggagtgcagtgatcttggctcaatgcaaactccaactcccaggttcaagtgattcttgtaccccagcctctggtgtagctgggactacaggcacacaccaccgtatctgggtaaannnnnnnnnnnnnnnnnnnnnnnnnnnnnnnnnnnnnnnnnnnnnnnnnnnnnnnnnnnnnnnnnnnnnnnnnnnnnnnnnnnnnnnnnnnnnnnnnnnnnntgtaagccactgcgctcaactgggaaaatcctttaaagggtctgggagcagagggactgacatgctttgacttaagttttaaaggatcattctgggttgatatgttggggcatagactgcaggggggcaagagcaggaaaccaggggagaccagttagggacactattataattatccaagcaaggttactacaataatctaacccaacatgatgggtggctagggaccaaagtgggtgggtaaaggggatttttgagaaaagtgggttgcattctgggnaaaatctagggtttttagg

SEQ ID NO: 305156 - DNA, 267 bp, Homo Sapiens
  misc_feature (132)..(132): n is a, c, g, or t
  misc_feature (195)..(195): n is a, c, g, or t
gcgcccggcatgaagagaaaacatttctaaacttgctttgtatttagatgggacagctttaggaaagggagggagacagcaacatgtattttttccatactgtgtgggtggggaaacaaacaccagtagganttaacaatatgggaaggacaggcaagggcagattttcattacggtaggagtgcctacaatttncctcataacttggggttttacacacttgcaatcctctgatcttgattacctccagtgatcacggtaaaatat

SEQ ID NO: 305157 - DNA, 511 bp, Homo Sapiens
ttttcactaatcatagctatctttaaagaatgtatacaaaataaattatcaaggtactagaaccatcacattataaattacattggtgtttcagaccagccatgaccacgctgtgtctgggcatgacaggcagtggctctggggtgttttcatctacttctctccagaaggaaaggcagactgcaacgggtcattccagtgaggtgaatcacttccccacttccttccttttcactcattatcagcataataaaaagtaatacactatcattcactaagcatttaacacatagccggcctgttacctaggtgctatacttcttgtctaaatataaatgggaatggacaagctagggtgaggaaacttgctcaggggatcctatttttctcctacccttggatacttatcatccatccaatcaaaggggtctggggaaaacaacaccctatggggcgtcctcctctgacgctgggagggacagctcggcttccctcactggaccttggcact

SEQ ID NO: 305158 - DNA, 460 bp, Homo Sapiens
  misc_feature (48)..(48): n is a, c, g, or t
  misc_feature (274)..(274): n is a, c, g, or t
  misc_feature (320)..(320): n is a, c, g, or t
  misc_feature (397)..(397): n is a, c, g, or t
  misc_feature (417)..(417): n is a, c, g, or t
  misc_feature (428)..(428): n is a, c, g, or t
ctacagttttaattatggtgactcatgcaattttggtgtaattagccnttttattcttactcattttaattatgaaataaatatgcaaatttatgctaatagtatagttaaggaaattatccattgcatttgaggaagcactcaggcaaattttaaaatgggatcatagttctgacagttacagaaatggacatgaaaacaacaggcagagttccctgaatacacagtgaacatggccctagaaatagagctttcatgagacgttccgagaganatgaatgttttcccgtccattcctgctgggcctcctaggattcagntccaagcctgtatctctggggtctgcttgtgtgctaaagctcccaagggctatgagctgagcccaggatcacctttnttcccaggggtttccagaancacaagggggnaacggtgacttgttgtcctaacttttcaggtt

SEQ ID NO: 305159 - DNA, 445 bp, Homo Sapiens
  misc_feature (50)..(50): n is a, c, g, or t
  misc_feature (68)..(68): n is a, c, g, or t
  misc_feature (95)..(95): n is a, c, g, or t
  misc_feature (135)..(135): n is a, c, g, or t
  misc_feature (137)..(137): n is a, c, g, or t
  misc_feature (148)..(148): n is a, c, g, or t
  misc_feature (150)..(150): n is a, c, g, or t
  misc_feature (153)..(153): n is a, c, g, or t
  misc_feature (155)..(155): n is a, c, g, or t
  misc_feature (158)..(158): n is a, c, g, or t
  misc_feature (171)..(171): n is a, c, g, or t
  misc_feature (182)..(182): n is a, c, g, or t
  misc_feature (185)..(185): n is a, c, g, or t
  misc_feature (191)..(191): n is a, c, g, or t
  misc_feature (193)..(193): n is a, c, g, or t
  misc_feature (196)..(196): n is a, c, g, or t
  misc_feature (208)..(208): n is a, c, g, or t
  misc_feature (234)..(234): n is a, c, g, or t
  misc_feature (241)..(241): n is a, c, g, or t
  misc_feature (305)..(305): n is a, c, g, or t
  misc_feature (318)..(318): n is a, c, g, or t
  misc_feature (328)..(328): n is a, c, g, or t
  misc_feature (357)..(357): n is a, c, g, or t
aacagcatcacagcatcagacaacagcaacatacatgctggcccggattntgaacagaaccgcttcgngccaggctgaaacctctcttttaaagngatacacttgaatccatttctgggttctacagacctcagngnacccattcatnanctngnagngttcattgtcttntcccctaaagncanattccngnatngtaagggcactnatttcctgggactgattgcttctgtntttgggnaacaaaggatccctcctcagtagcagggaggccacttgatcctttaaagagactttttaaaggnaaacatcccattnaccaggggtntacacggcaagtcagaaaaatgtgtgggnattttaatttacccactttgaaggacccaacattcaccccacacccaccctttaggttgggatttgcttccaccaggcccatattgag

SEQ ID NO: 305160 - DNA, 366 bp, Homo Sapiens
aaaaaagattctctccacctacattcattaccgtttctgggaagagttctgataaattcagtttttgcaaccttgctccatttccagtgatattcttgaatcccttatgattgtggtgacccagcccgcttcctagctgggatgctccttcatctggttctgcctaactcacccctcagcccccactgccttgggtaagtccttagaaagagaactgacaaattaaagtgagacattctttcattcattccatagctatttattgagcttcttaggaagagcttcagcttacctgggctagcattcttaggacatcaatggggcaaccaacttgtcattgggcagtttttacatgtggaaggtcag

SEQ ID NO: 305161 - DNA, 461 bp, Homo Sapiens
  misc_feature (324)..(324): n is a, c, g, or t
  misc_feature (417)..(417): n is a, c, g, or t
  misc_feature (427)..(427): n is a, c, g, or t
  misc_feature (435)..(435): n is a, c, g, or t
  misc_feature (446)..(446): n is a, c, g, or t
agatgtcattgtattctaagtttcagtttcttctataaaatagattaaatactattgcaaaggactattgtcagggtctgttcttattgcttccatcctactcatacctcagtttgtactccacatagcaaccagagtaatcatgacttagagggagaataaagtcacaccgttatatttctgtgcctacaacactccagtgggctttccatctcatttaggagaaaagattcttaggcctgaaaccagcctcgtaggcatctagtcacctcccatcgttgccgggccactttctctggacttacttgggttccaggcggacantgggcattccatacttttttttaaaaaacatggttcaaacaagttttaggggcttttcatggtttgtttttttcctctacttggggatggggntgcttccttncattttcntttggggtgtnccttttcaaaccttt

SEQ ID NO: 305162 - DNA, 134 bp, Homo Sapiens
  misc_feature (98)..(98): n is a, c, g, or t
ccgcggcccggccttaatgtaaacttttttaaaaaatgttcagcttggggtaatttcagcttactttaataactttgattctgggctctgggaatttnacatggccagtaggattacatggccaaggtaaggac

SEQ ID NO: 305163 - DNA, 344 bp, Homo Sapiens
  misc_feature (210)..(210): n is a, c, g, or t
  misc_feature (246)..(246): n is a, c, g, or t
  misc_feature (273)..(273): n is a, c, g, or t
  misc_feature (294)..(294): n is a, c, g, or t
  misc_feature (320)..(320): n is a, c, g, or t
  misc_feature (331)..(331): n is a, c, g, or t
cttcggcacggaagagacaaatcactacccttttggagctttcattttattcagtagtcagggaatacaaaatacgtaagtgaagctgtgtcagaaaagaataaatgccattgtagaaggaaaaatatagaggaggaaagaagagccaggcgtatctgtattttttaatagggtagccaggacagttccttttgagctaggctgtaactnaacaaacacctgaaggcattagctatgaggatactnggaaaggaaaggggcaaaaagggactnatagcgcaagggccttagtgncacaaaccccagactcccgggtaccncccgaggcttnacattggcttgga

SEQ ID NO: 305164 - DNA, 329 bp, Homo Sapiens
attacttatcattcatgtgttcactggagtcacacttttaatttccttcaagaacttttcctttgttttcactgcttggctaactgtcaggtataagagacctagctttcagtctgtctctgcttctgtcctatcttagctttcaacatgccttcctcaataagctcaatcatttctatcttttgatttaaaatgaggggcatgtgactcttcctatcagttgaatagttagagcccactgtagggtctattaattgggcctaatttcaatattcttctgtttcagggaactaggggagggcctgagtaggaaataggagagatggagg

SEQ ID NO: 305165 - DNA, 382 bp, Homo Sapiens
  misc_feature (85)..(85): n is a, c, g, or t
  misc_feature (215)..(215): n is a, c, g, or t
  misc_feature (346)..(346): n is a, c, g, or t
  misc_feature (355)..(355): n is a, c, g, or t
  misc_feature (366)..(366): n is a, c, g, or t
ggacaaaaatgtcaccaatcttccacaaagcgggtagaaggctcagagaccttcagggagaatttgaacttggtggcccgcaagngccttgctgtgtttgcactttgctgccacagctggcaaatcagcctgatctggctaagctttttgggcctaggcaattctcaggtccagcctttataactgtgactggactgtgtggggcttttggcctntaaaactgagctttactctagtaaggctgggagaccctcaaggagggcattacagagcccagaattaacacacacagggcaggctaatctaggcaaagagagtactttatctggggatttggcagaggctncctggggtngggtcccagtnaccttgttttaggcca

SEQ ID NO: 305166 - DNA, 322 bp, Homo Sapiens
  misc_feature (240)..(240): n is a, c, g, or t
  misc_feature (245)..(245): n is a, c, g, or t
  misc_feature (261)..(261): n is a, c, g, or t
  misc_feature (277)..(277): n is a, c, g, or t
aagagatggagtctggctgtgttacccaagctggagtgcagtggctatttataggcacagtcatagtgcactatggcctcaaattcctgggctgaagcaatcctcctacctcagcctctctggactacagacatgcacccttgtgcccagctgtgatttttatattgaaagatgggatcactagaacttgttgaatcatcggaagagttttcataggactcacataactgggatagtatnactgnatatcatgtcttaagncattccctaaatgtgnaggaccctggacttaggaacccagaattcaccacgggtgtttttt

SEQ ID NO: 305167 - DNA, 168 bp, Homo Sapiens
  misc_feature (58)..(58): n is a, c, g, or t
  misc_feature (117)..(117): n is a, c, g, or t
  misc_feature (124)..(124): n is a, c, g, or t
  misc_feature (141)..(141): n is a, c, g, or t
ttgagcccctcgcccaacctgacacctttcttgaggcttgcagaagcacccaaggtcnctgccctgtgacttggccgaaaaacattttaggcatttttgaatatggggcaggcatgntaacttnaggagttccagttcttnccagtttaagttccttggccttttttg

SEQ ID NO: 305168 - DNA, 398 bp, Homo Sapiens
  misc_feature (187)..(187): n is a, c, g, or t
  misc_feature (291)..(291): n is a, c, g, or t
  misc_feature (336)..(336): n is a, c, g, or t
  misc_feature (347)..(347): n is a, c, g, or t
  misc_feature (384)..(384): n is a, c, g, or t
gaataaatccaaattgtgaatgcttaaaatatactttacagaatattaaaatttaaaagcatcacaggaaaaatattaatactgttttcagaatttcagtatgtgaataatatttacattacagtttcatatgaaccttttacttctctatttagtatgccttcatgtcactgcagaggtatgaaanggagagctctcctagttgtgaaaaaagaaagatgttttattgggagctaagtggaaggttgaacatgtgggaatatctgggcatgcactgaagacaccttttgncatctcccccatccacataggcaaagtgaatgtggtttgtgtccntttatgcaggntactctgggaaaaccaaactgaaggcaaggtttaacntacctttttttaaa

SEQ ID NO: 305169 - DNA, 402 bp, Homo Sapiens
  misc_feature (54)..(74): n is a, c, g, or t
  misc_feature (214)..(214): n is a, c, g, or t
  misc_feature (257)..(257): n is a, c, g, or t
  misc_feature (267)..(267): n is a, c, g, or t
  misc_feature (283)..(283): n is a, c, g, or t
  misc_feature (296)..(296): n is a, c, g, or t
cttattcaacttccccgcccccgaaaaaagttatggctaacatctatgcttgcnnnnnnnnnnnnnnnnnnnnngcttcttgacttcgagtagatgaataataacaagatgcttttccctcctctagaacatatcctcccctgagagttcccctgcgcataggcccgagtccctgtcacccgaggtagttatcacaccatctcaatcacacttngaggctgagagtgagtgttcatgaatgtgttcctgagtgtgtngggagggctngggatctgagtcagtngggtgatgggctngagggcggccactcagtcacagtaagttgaatgagtcttcctgtgtgactgtgactacacagggactgtcaatgtaggatgggagggaaaatggaaggtagggagc

SEQ ID NO: 305170 - DNA, 402 bp, Homo Sapiens
  misc_feature (289)..(289): n is a, c, g, or t
gccaagcatgtaccaatgatggcaatgtgttcctcactccccagctttataaatatataattgataaatcagtattgtatgtatttgtattgtatttaaattgtacagtgtgacattttgatatacatatatattgtgaaatgattaccataatcaagcgaattaacatacccatcacctcatgtagttccgtttttccatgtgtgcagtgagaatacttaaggtctactcttttagcaaatttcaagcatgaaatacattattgttaactatagtcaccgtactctgncattggggttaccaggaacttactcctaactggcatcttactcctaaggtttggcatcctcttcactaggatctccaggattcctctcactcctggacccctaggtaactacc

SEQ ID NO: 305171 - DNA, 373 bp, Homo Sapiens
  misc_feature (15)..(15): n is a, c, g, or t
  misc_feature (35)..(35): n is a, c, g, or t
  misc_feature (84)..(84): n is a, c, g, or t
  misc_feature (302)..(302): n is a, c, g, or t
  misc_feature (320)..(320): n is a, c, g, or t
  misc_feature (329)..(329): n is a, c, g, or t
  misc_feature (339)..(339): n is a, c, g, or t
  misc_feature (348)..(348): n is a, c, g, or t
gatagaggttatatngagaaatatttttgtagatngaaaacttgctaaaaacgaagtctttagtcacagaatttcaagaaactngaagagatgttatagaaactaaactagggatgttgtagagggggttcatacatagggtagtctggactagagaaaccaagggataaaagaggattagctgactcaggataacatttcaggtttgtgaagatgaatttgtcctttgaaacagatctttttaggaaaggttgtttcataatttctgaccgaagtatttgttacacgtaaaataagtaagnaacgggactgaggccagnaaagctgtnggatgacagnaggggattnggtgccatttcttcagtggaatttt

SEQ ID NO: 305172 - DNA, 126 bp, Homo Sapiens
tacttgactaggtcaataaagataaggcactaaagataggcaatctaaatgccattttacacatatggtggatggataactctgtgtcctaatatttctgaaccttagttaccttatatgtaaagt

SEQ ID NO: 305173 - DNA, 229 bp, Homo Sapiens
  misc_feature (56)..(56): n is a, c, g, or t
acccactgcatgccaagtacagttatatgctgtgcacatgcaggtagcataccggnaaagttttggtttggttattttaaattgtaaggttaaataacctataatactgggcatataattaccatttatctccaggggttctttgggaacctaaaattcagagattgctagggaattaattttacttcccaaagttcaaattaaaactttattctgggccttttaacta

SEQ ID NO: 305174 - DNA, 377 bp, Homo Sapiens
  misc_feature (127)..(127): n is a, c, g, or t
  misc_feature (226)..(226): n is a, c, g, or t
  misc_feature (283)..(283): n is a, c, g, or t
caaaaaataatcacttttaaggaaaagtcactgttgatagcactcagaatgccaccagtattgcagatttgtaatctattactttaaacttttacaaatgctcatggtgtaaagttcagacccaagntactgaatgtctgttgcctgaaaaggatacttcaaaattatattttccctttaatttcctgaatcaaaaggctccaggttgtgacagaaatgtcactancttgctgtctccattcctgtacagagacccacaagagactgaaaaatggtgttgggncaggttgtcttggggttctgtgccttctggggaccggtaggaatgccagtgtgggactgcagtgggagctgggggttgggggagcaaatgcctg

SEQ ID NO: 305175 - DNA, 412 bp, Homo Sapiens
  misc_feature (105)..(153): n is a, c, g, or t
  misc_feature (349)..(349): n is a, c, g, or t
  misc_feature (365)..(365): n is a, c, g, or t
gagatatgacaactaaaaacaacatgtaaacctagattaaataactactgggtgaggcaaaaccattttgcaaaaattttcttttgctaaaacatcagtgggacnnnnnnnnnnnnnnnnnnnnnnnnnnnnnnnnnnnnnnnnnnnnnnnnnaattactctgattatgtaaaagatatccttttaaggaaatacatatttaagggtaagtgggcatcaagtcctgcaacttgcacatggttcaggagaaagaatgggggatgcaaatgtggaaatattaatacaggttgaggcatctgcagttcttaaaactttttgagtgtgggatgttcatggccacaagttgganaatttcccttacctgnttctcctggcggcgggtcgcggtggaaaactttttgttttcccggcc

SEQ ID NO: 305176 - DNA, 475 bp, Homo Sapiens
  misc_feature (436)..(436): n is a, c, g, or t
cactttctacagcgatgggtctccaatcgttcctcaaatgtaggccttgctctcccccatcctggaagaattaatgagatagatgttttgtgcaggctctgctgagggggaggtcctgcttccccagatggaggtcagcccaccagagctgctgttctaaaattatcccctgcacatccctcaaaagcatcaaatggtcataataactcatatttacaaagcaccatcgcattcactgcatgggatcccacagggctttacaaacgcaacaaactaatacacacgctaactaggaaggcgcctcttcgccaattccctggcaagggcagcccacctttgggggttgaaacggtaggcaggctgtttgattctggcacgggagccccagggggcacaatgggccagggccgggggaggggaaggaattggcccggantttggggagggccttacggttgccccggggcaacacatt

SEQ ID NO: 305177 - DNA, 261 bp, Homo Sapiens
  misc_feature (92)..(92): n is a, c, g, or t
  misc_feature (191)..(191): n is a, c, g, or t
  misc_feature (194)..(194): n is a, c, g, or t
tttgtttttcaaactttttaaaccatgacctgcagtcaaaaacacctgttacctgcaacatcatggtccagttcccacacacgcatgcgtancactcatgcatatacatgtaattgaaagcaaagtttcacaacatgaatggggtcagcttccagggcacatagcttcatgggagggggtggcagggcctngtncatgtgcagctgcagggcaccttccacatgggctgtgactgctggagttgtacactggggtccttga

SEQ ID NO: 305178 - DNA, 316 bp, Homo Sapiens
  misc_feature (148)..(148): n is a, c, g, or t
  misc_feature (200)..(200): n is a, c, g, or t
ggcagtaaggagagaacagaggttccagcctgcttcaggtccaggcagttctgcattgcccctaactcctcagtgccagtcatgggccaggccctgggggactttggaatgagtaaaacatgcacctattgttaaggttcacctggtnccagaaggggaggcagacccaccttgcccaccattgacccggacagaggcantaaatacggagcaccttcatgggccagggcttgggaggatttccccaccattacccttaccccagcgccaattaacagagggaccctgggatttgttttaacgcaagttagcattt

SEQ ID NO: 305179 - DNA, 484 bp, Homo Sapiens
  misc_feature (319)..(319): n is a, c, g, or t
  misc_feature (321)..(321): n is a, c, g, or t
  misc_feature (338)..(338): n is a, c, g, or t
  misc_feature (470)..(470): n is a, c, g, or t
gacccgtgtagcacccaccctgcctgcccagcatcagctgtgaagagacgggtgaacatccgtcagcctgggagagctctggcccagccaccaggtgtgtgcagagaaggcttgggctactgcacagcctgtgtatccgctgagcagagcaaactggagatagctaagtcctcagctgtcctcaggtagagtctgctcctagacatcccccactaggaggaagctccacaatgccttttcagggtttcctgccagtgcctcatcatggatgtttcacagacttaatgagtaagctgactctttcaggctgcaaggcaancncagggccctggggcagncagcttcttggttcaagttcacagcccaaccctggggtttcccgttctttaggttgctgttcagattttcaagggccatttgccctggttaacaagttaagaggcttaagggaattgttgttccaccctttnggccctggaaattt

SEQ ID NO: 305180 - DNA, 238 bp, Homo Sapiens
  misc_feature (102)..(102): n is a, c, g, or t
  misc_feature (148)..(148): n is a, c, g, or t
tctttcacagcatttggaatttgaagtctataaaaggttttttgactggtgcaatgtatcttactgaatatagtagcaatattcttgttctgtagcaaggtnttcattccattcagtatttattaaagtacctaacaagtgccaggcntgtcctaagcactagtattacacgaggtttttcgggagctaaaacctttagggtaggacagagaaggagagtgcaaaaaggactctcgag

SEQ ID NO: 305181 - DNA, 324 bp, Homo Sapiens
  misc_feature (208)..(257): n is a, c, g, or t
aacatttttggttgatgacttgggggtcagggaatccattcaggtgagaggttagttttttggtcttcaaattggaagagcaactttagcctttgatttgtattatcttctcacagcaactattatgttgactgcctgtacatgccttcaataccatgtaaacctagtttatcttttgtatatttgatttcttagatggttagagctnnnnnnnnnnnnnnnnnnnnnnnnnnnnnnnnnnnnnnnnnnnnnnnnnntctactaaataaggagaaattttctcttattaataaggaaaaacccatcttctacttaaaataagga

SEQ ID NO: 305182 - DNA, 495 bp, Homo Sapiens
  misc_feature (122)..(130): n is a, c, g, or t
  misc_feature (458)..(458): n is a, c, g, or t
agtccaagacaaacagtgtaaaggaaaatgtcaacaataaagtcatcactggtgggacctcaaggcagcagagtggaatcacaactagatcctgcaatgtaactaatcaaaatcttaggaannnnnnnnnacaaagcagaaattccatacgttttgacccacgaaggggagagcttcagcacatgaaacagattcgtctggagtaataggaagtatgtccaaatgagggaggaggcatccaaaaggacaagacctgctaagcactctgagagcatcgtctacacctgctgcttccagatcatcatctcccagttgttcccaggcagcccagcagttctggactttccattccctaccattcccaaccaggaactggcccttcggccaaccttccttccacatggcaccatgggtccgaggataatggaacattgtttcgggattggcttaactggggncaaattggatttccttttgggacgtggcggcctgctg

SEQ ID NO: 305183 - DNA, 516 bp, Homo Sapiens
  misc_feature (360)..(360): n is a, c, g, or t
  misc_feature (373)..(373): n is a, c, g, or t
  misc_feature (453)..(453): n is a, c, g, or t
  misc_feature (460)..(460): n is a, c, g, or t
  misc_feature (472)..(472): n is a, c, g, or t
  misc_feature (490)..(490): n is a, c, g, or t
  misc_feature (505)..(505): n is a, c, g, or t
gtccttcagggatgtctggggacctgtccttatccagactggatttcatttttgtttttgaagccaccatcccagaacagtgaagacagtacagaaagctactagaagcaaccagatgcaatcctgtactctttctcaagcaaggagggactgcttatctgttggcatctttatgcactgtgtggagtactgatgaaaagtgacagcatttcatagctgtgtttaggggaggtggggagccgactgcagtgctatccagacagctcaccctctttgcagctattaagagtctcatcaaggctgtctatggcgatgtcgtcattcctcacattcccagaaagtaggaatttggaaaagatncagtggaacattnaaccaattttctttcttcttcccggacatatggcacacctaacaggcctgcttttgtttaacagttgtaattttttaaantaaaaantctttgggtccnggaaatttttaaactttnctagtcttggctcanggggcaggatg

SEQ ID NO: 305184 - DNA, 370 bp, Homo Sapiens
  misc_feature (295)..(295): n is a, c, g, or t
  misc_feature (348)..(348): n is a, c, g, or t
  misc_feature (359)..(359): n is a, c, g, or t
attatttacattcatcccacgtgcagaatacactcaccccctcctattattctgcagaattctcatttatagcatcagcttacagtccaggatattgtcatctaaattaggtccagttttggatgaggctcctcagatgtatgtagtttcttcagctccttgagtacattacttctctatgtgaagacctgtgaaactaaagaggcaaattgtttgccccacacataaccaagatgcaatgattggtcaggtgtatgataactagtgtaggacattcttgttcaaacagaggggnaaatgttgggtacaaagggtgttcgttacgtcacaccctttttggaaatttcngctggggcacngggttgggtaa

SEQ ID NO: 305185 - DNA, 252 bp, Homo Sapiens
  misc_feature (100)..(100): n is a, c, g, or t
  misc_feature (132)..(132): n is a, c, g, or t
  misc_feature (148)..(148): n is a, c, g, or t
  misc_feature (226)..(226): n is a, c, g, or t
tcgaagtaatgacgttaattccctgggaaacactcagccacagctgaaaatgtgtgctcttcaggatggtctccagatccgcatcatcccctagacagtngggtcccggaaatactcatcacctgttcaggnattcaggcatcaagtngttcgtagggagagttcagcttgtaagcttctattcttttgggtaatattaaaattagctagttttgaaacttagccntaacccctgtaattttttcccgtggg

SEQ ID NO: 305186 - DNA, 257 bp, Homo Sapiens
  misc_feature (177)..(177): n is a, c, g, or t
  misc_feature (188)..(188): n is a, c, g, or t
  misc_feature (209)..(209): n is a, c, g, or t
aaaattagacataatctatttttgccaccttgaatcctacatattacctacataagttattgcaggactgggagaattaaattatttgctgtatttatagtactcataatcgaatatagtatatgctatataagtgtcagcaaatcttttttttattcttgttcatgctgttttttntcccttctccntcttcattagagggttattgnatttttggtacccgacaaacttgtattcattcttccaaaaagcctagg

SEQ ID NO: 305187 - DNA, 425 bp, Homo Sapiens
  misc_feature (297)..(297): n is a, c, g, or t
  misc_feature (379)..(379): n is a, c, g, or t
  misc_feature (385)..(385): n is a, c, g, or t
  misc_feature (394)..(394): n is a, c, g, or t
gacaatgttctttggtaggcctaggtgagttaagttaaaagaggcacaagatgtgacaataaaggactctttttatagtagaagacataaagagaattccattgtaagggtagagaaaatttgttgtaagtttgattctttttagaaaactgatcatgagaaagattggtttttcttatgggtataggaaataactttattacataaagcacgtctttggaagttgtactgggataaaatgaggctcctcacatcagtgaggttaaccaataggcagggaggggagactttcccaantccctaggggttacccaaaacttctaggaccctggttttgttacccttttcatggccccatttttggaaatgttccggtaangtgttnctttaaccntttaggcccctccaccccaagggggggttcc

SEQ ID NO: 305188 - DNA, 426 bp, Homo Sapiens
ctctacagagtggctggcagaatggtcctaagaaggccctgtccctcttctttacctttttaggactgacattcttttttagttacttctcacctcttctaggatctttgaggtagatgagaaggaaggcttcctcctcctgtcctaatcaggcatggcctcaaccctgtccctgtgtagcattccagatagcttaaagctgggtgcacctttgaaatgtcattttgtctttacacctttaggtatttattaaaactcaccatcagttccctgtggctatcttttctcttaaaatagctaagggaaaaagtagttaaggcagtgggcattaaaccagagttgttcactggtttctggaaacctggcatgggttttcaggaaggagttcaccaaaaggcacaggtggggcaccggggggggcctggc

SEQ ID NO: 305189 - DNA, 121 bp, Homo Sapiens
  misc_feature (55)..(55): n is a, c, g, or t
  misc_feature (63)..(63): n is a, c, g, or t
  misc_feature (69)..(69): n is a, c, g, or t
  misc_feature (77)..(77): n is a, c, g, or t
  misc_feature (93)..(93): n is a, c, g, or t
aaaaatttaaaaaattggaaatgtgaacatgggtcatgaaattggcacacgaacngatgatgncaaccntttgcccnactacaatttgctggncttctcccctcctccctgatggggaaaa

SEQ ID NO: 305190 - DNA, 210 bp, Homo Sapiens
agtgggacgtttcttatagcagagacacaattgcagtgctgggtgcagtaaagaaagtctacacctctaccccaacaatcaggcagcatctctgatcataaaggggcttggaaagggggtccttttcccactggtacaccacttgcacacacagctgggggctttttcccagagggaattgcagtgttaggatgcacattttaggtgggc

SEQ ID NO: 305191 - DNA, 344 bp, Homo Sapiens
aaatgacagatgataccttgggttgggaggggtcctggaagtggactcttccacagtggcatcaggggtaggggtcacagtggtggttaggaccagagctgaggtcacagagctcctggaggcaagattaaggacaaagagtggctccccatcaccaagttgggccatctggtcaaggacatgaagatcaagtccctggaggagatctgcctcttctctgtgcatcaaggaccaggttcaaggcatttgttcaccattgaggactacaacggctatgttggtctgggtgttagtgctccaaggaggtagccagcaccatccatgggggctataattcatggttc

SEQ ID NO: 305192 - DNA, 460 bp, Homo Sapiens
  misc_feature (349)..(349): n is a, c, g, or t
  misc_feature (388)..(388): n is a, c, g, or t
  misc_feature (418)..(418): n is a, c, g, or t
gcagttaaatacattttgtatacatgaagcttagattaattcccatcatcatcatctcctgtttttatatgtgtccctatgtgtttcatgcattcctctttgatcagattggaatttgagttaaaatttagctttgtacattacgtgtgagagttacagactagcaagtctaattactttgccttaccttgagtgtatgccacagggtcagataacacattaaacatttagttacactgggattactcttccaaaggctgacctcctgctaatgttcagagggtaactggcaatccgggaaaggaaataattattcactggcaggaaaggaatgtggacttcttaaaantaaacccggggacctccctggtggattttgccttggccntggcgggatggatggacccagtttggactncttgtggccggtccagccccgggggggttggctaaggggagg

SEQ ID NO: 305193 - DNA, 150 bp, Homo Sapiens
  misc_feature (66)..(66): n is a, c, g, or t
  misc_feature (101)..(101): n is a, c, g, or t
  misc_feature (111)..(111): n is a, c, g, or t
gggcatgaggcaaccagaaagtttgtgtttaatcctgaatatggatcactgtttcacttctaattnggagattctgcctaagggaaagaagttaagagtangggtaaagantatttgttcaccccagagttacattttttgggggaccct

SEQ ID NO: 305194 - DNA, 381 bp, Homo Sapiens
  misc_feature (104)..(104): n is a, c, g, or t
  misc_feature (110)..(139): n is a, c, g, or t
  misc_feature (157)..(211): n is a, c, g, or t
acaggctgggctgtccccacctctcagggaagtgcatctaagtcaggttttcccctctggcacagcctgcctccacagcccaatttccaccatgccacaggaancccgcnnnnnnnnnnnnnnnnnnnnnnnnnnnnnngagacagagtcttgttcnnnnnnnnnnnnnnnnnnnnnnnnnnnnnnnnnnnnnnnnnnnnnnnnnnnnnnngctggggttcaagcgattcttctgcctcaggagagtaggggagtagctggggattacagggcatgcaccaccactcccggataattttatattttctagtaggagacgggttttctccatgttgggtcaggctagtcttggaacttccagacctcaggtgatcttgcccg

SEQ ID NO: 305195 - DNA, 237 bp, Homo Sapiens
aatttcagatacctctccatgcaaatgtccacacagaacaaatagaagatgaatatgaatgctgtcagaaatactttgcatgttcaaaaggaatctctgagtagtattttagacctgaagggacacctaaggctctttggcttttgcataaggcagggctagactgtaaactcctgggagggaaggaccacgccttagttttgtttatacattcccccaccccctatcttaggtgcc

SEQ ID NO: 305196 - DNA, 359 bp, Homo Sapiens
  misc_feature (188)..(188): n is a, c, g, or t
  misc_feature (194)..(248): n is a, c, g, or t
  misc_feature (348)..(348): n is a, c, g, or t
atatcggcacaggcttcctcttctctactccttgtgcaaacccatctctggatagctagaaaaggaacttcagaatggactatatgtgatgaccacctgtatgcactctaggctcttatctgtctctattttatgtggtgactatatctcagaagtactaccccttctgagtagtactattatttccnatgccnnnnnnnnnnnnnnnnnnnnnnnnnnnnnnnnnnnnnnnnnnnnnnnnnnnnnnnggcctctttagtattaggggggtgagggtgacattcctaggacttctacagtaggcagtttggggcatgttaggtggacaggggaaattgtggattcccncatctcccccc

SEQ ID NO: 305197 - DNA, 402 bp, Homo Sapiens
  misc_feature (345)..(345): n is a, c, g, or t
cttcatccccactgccaccaacagtgcaggatggccctaagaggagaagtaatgtgctaccaagtggcccagcagaggtgtgaaccaaacagtctggtaccaaaaccctattctggatcattcctcctttctgctccaccagcagtttggggcacaggcttgggaatccagacaggaaagctcctcccctctgaaggcagtggggaccaaaaatgacagcatggttctaggacagctctgggaagtcagggcctgtggattgccttcattccctccaccttgggcccccaaaatgggccagtcctggagggggtcacagtttcataatttctctgagggggggcntgggggttgggcttgagggttattaggcaggccccacagggtgggttaagtttgggg

SEQ ID NO: 305198 - DNA, 295 bp, Homo Sapiens
  misc_feature (233)..(233): n is a, c, g, or t
  misc_feature (239)..(239): n is a, c, g, or t
cttcggcacagcagcccagagcactggcatcatctgtactatcggcctagtttcctgattggtggaaatgttgatgattaagtctggaattaatatggcttgtctgaacttacgagtaccacgcagagaccatcaggaatgtgtgcacaactatggaaagccttgcttctgaccccaatctctaggcgggctagttgctgtggctctgggacactaacgggcctgaggatctngaactngggctcacacagagcagtgtccccatggaggttggagcttttagaaggggagcccc

SEQ ID NO: 305199 - DNA, 434 bp, Homo Sapiens
  misc_feature (331)..(331): n is a, c, g, or t
  misc_feature (385)..(385): n is a, c, g, or t
tgggagatattttagtggtggtggcaagggggtgctggaatgttttcttcattgctggtgaaatcttggaactactgccttgtagaggttgagtagactttcaaaggtctttcttctccttgctgttactcaaaggtcaagagatttgcttgggtggagcccaccagcttgacttctgggaagaagtgagtgatggttgtgcctgcaaagactatagcagtgcacctgggctttggggctgactagccctgggtaataccacactgcctgtatttaaacacaccatggaaggcagataggagggagaaacaaatttcatatttccccactnggccagatggaagggcacttttacccatccctggaaattatcccccgtttttcnttttgtttccgaaatattattaccattttggatacagtttttccttcaa

SEQ ID NO: 305200 - DNA, 436 bp, Homo Sapiens
  misc_feature (332)..(332): n is a, c, g, or t
  misc_feature (386)..(386): n is a, c, g, or t
  misc_feature (410)..(410): n is a, c, g, or t
  misc_feature (422)..(422): n is a, c, g, or t
cttttgtactatttcaataatctccttggatatactgattgagaaactgttataaggcttactgcgaaattgacgaagccaaatttgatgactgtcccaaatagttttgtgcccttgatagattttacatgtgtttttttctataaatctgcctttaaaaatttattgttgtcttcagatgttttcatgatatgttcacttagtagtttatgccacatgtctttaatgcagttctaggaaacccattgctgaggaaagtgaaggttctctttcaatatccataatggaaagtcagtttacgggccgagcacaccgggggtttgggccttccnaggttattccctccagtaggccattggtattggcctggtcctggggggaaaacncatttggatggagggcctaggggntttaccaaattnaaagggatttcctt

SEQ ID NO: 305201 - DNA, 373 bp, Homo Sapiens
  misc_feature (142)..(142): n is a, c, g, or t
  misc_feature (157)..(157): n is a, c, g, or t
  misc_feature (168)..(168): n is a, c, g, or t
  misc_feature (198)..(198): n is a, c, g, or t
  misc_feature (212)..(212): n is a, c, g, or t
  misc_feature (229)..(229): n is a, c, g, or t
  misc_feature (276)..(276): n is a, c, g, or t
  misc_feature (308)..(308): n is a, c, g, or t
  misc_feature (328)..(328): n is a, c, g, or t
  misc_feature (348)..(348): n is a, c, g, or t
tccactcagagttcagttcgtactgtacttctgccattatctcattattctgcggggtagcaggctgaatctaaaaatctgaaagaatctgttgtcccacccacagatccaattgaaaataaaagacaggagagggagaatnaaaattggcctatancaccttcttcngttgcaggaacatctgtactgcctcctttngtggcaaaaatagnggaccccccaatacagnggatttatgctctgctggtcatagccggagagcccttagggaccttncggttttcctattttcgtaacggctggatccnaataatttcggcagcagggnttttttacggggccacaatnccacttgggggttttaaggttggtt

SEQ ID NO: 305202 - DNA, 445 bp, Homo Sapiens
  misc_feature (275)..(275): n is a, c, g, or t
  misc_feature (371)..(371): n is a, c, g, or t
  misc_feature (405)..(405): n is a, c, g, or t
  misc_feature (419)..(419): n is a, c, g, or t
ttttaagagagatagaattccatttacctgcatttatattatgaatcccagtaagcttagactagataatctataagacatctacttcttctaacttagaaaaggaatttattcagggagatattaagtagctcttagaggcaaggctgaagtttggagtgtgggcaggcaccaaagggaatccacgaggctggagctgcagccatggccggaacgtgaatgacctgattaagatgctgtcactgttaggtactgggaaactgccactggcattnctgggacactaggcaccaatggtgggtcactaggatactaggaggggtaccacttacctgtggccaggaatggaaccctggaactaattgcaggcntctcttttgtttgctttgccccaagacttcaggntctttcaaaggggngttttctggattgggctagttcttgg

SEQ ID NO: 305203 - DNA, 363 bp, Homo Sapiens
  misc_feature (353)..(353): n is a, c, g, or t
tcgtgagtttgtaaaacattttgttttaaaagagtttctgtatgattagtcctgatggttaaaccatagctttgaataatgaagtatataaagcatgaaaagttagaggtggatataacaaattatctaccatctgggttaactgtctagttgaaagttcttgtactccccctttcttccatccctcatccattcctttagggtaactactatcctgaagttgagaatattcttcctgtgtgttttgacacacccacacctatatacatttatacacacacacagacagaggggggccatacaggacccgtaagttggaacagttttggcctaggctggcttttcataggggnaaacacaatt

SEQ ID NO: 305204 - DNA, 399 bp, Homo Sapiens
  misc_feature (271)..(271): n is a, c, g, or t
  misc_feature (348)..(348): n is a, c, g, or t
tcggcgtgtgaccaaaactctagagaaaggcttccttcctcagcacttagacatggccagacctggggcaggccgacgtgtcaggcccggtactcaggagacaatgaggcttgctgcagcgtttctaatggcagctctatatttctagggagttgttttatttgtttttttaatgtcacaatttctatgtattaaatattgaactttcttttactctagttagaaaaaatcagagtaggaaatcccaaaattacagtcatggcaccatatnaataacatttcagtggaaaaagggaactgggcattatatggatgggtgggtccccttaaggatttacaatgggagcntggaaaaatttcctatttacctaggtggatggcattggatggattcctgga

SEQ ID NO: 305205 - DNA, 365 bp, Homo Sapiens
tggactttaattcagagcatgaataagacaatcctttatcaagaccatttggggagaactttttaaggggaagatatcttcttctatcgtggcctcaaatcaggccatactgattttctacatgcactaagggtgtggagatgggggttagggtagcagggctacaagaaaggatcagcagctcttgtgcacatggaatgtctgaacgctgaaacagaactacatcactaccacacagccatgctgctctatggagaacttttatcttttgcctttcactgtgtttttatagtgttctgggtgtcataacttccttttgctattgcttttccgggaagtgaatgtgactttatccattttggcag

SEQ ID NO: 305206 - DNA, 459 bp, Homo Sapiens
  misc_feature (430)..(430): n is a, c, g, or t
  misc_feature (446)..(446): n is a, c, g, or t
tcatactctataaaaataccaataataaaaatcctgtaaggaaaactaggaaactatagtcttatgtgggggagacttttcagcattagaaaactggaagctataaaagaagagatagctgtttgccttttcagatgctgaaactttgtaaatggtaaaagacatttaagtcaattgaagaacaccagattatgagaaaatatgcagtgcagaggaaaaataacatttaattgtgaatttcatatttagggaactcataaataaaaattaggccagggccttgtggcggcatgctctttagttccccaaccacttcagggagggctgagggtagggagggtttgctttgagcctgggggagggtttgagggctttcagtggaggcccgtggatttgttgttccacttacggcttggcagttcttggggtngaccagaggcaggganttttgtttttccc

SEQ ID NO: 305207 - DNA, 510 bp, Homo Sapiens
  misc_feature (387)..(387): n is a, c, g, or t
  misc_feature (423)..(423): n is a, c, g, or t
  misc_feature (446)..(446): n is a, c, g, or t
  misc_feature (457)..(457): n is a, c, g, or t
  misc_feature (474)..(474): n is a, c, g, or t
  misc_feature (490)..(490): n is a, c, g, or t
  misc_feature (496)..(496): n is a, c, g, or t
aaaggagaagagacccaggatatttgcaaatggttctagtgatttccacagtccactggtagttggtgtaaacatcatgtgcacatctgaattcctggatccttttgagaaatcacaggaccttgggacaatatgcatggtgtaggaaagggggcactcacgaatagtgactccgtttagacgagacatttccccctcagttcccagggctctacctatcctgattcattcacctaaggaatcagctttgtccctgtagggaatttgggattgggcaacttttggaattaaagtctaatccagtgggtaacagtttcacccatgggagttcaggataacctgggtttcggattctgggggaaccacccttatgggcttgagtggggntttcactcttctggcaccttcaggtttctcttaccntacgggttagttaaccccggggnttgttggggtnagggcataaggggaaantccctattaaaggcantttaantgagtgccttgggg

SEQ ID NO: 305208 - DNA, 332 bp, Homo Sapiens
  misc_feature (266)..(266): n is a, c, g, or t
  misc_feature (299)..(299): n is a, c, g, or t
tggaaagatacgcaaaagtgttataagagaaggagaggataattctggctggtgggatgatctaggaaagcttccttaaggcagttttaaataattccagaacaagtcaaatgtattctcttatacccctactcagctcctatactcaattatataaaataaacatgaaaaaacctcaaataattatgaataattactatatgttaccaagtattttagggcatgttaggaatgatattttacctcctcttaaaggcaggggaccntaggatgggtttgctatatgggtttaggggaantttaataccttggtggttgttttttaaaaatac

SEQ ID NO: 305209 - DNA, 403 bp, Homo Sapiens
  misc_feature (343)..(343): n is a, c, g, or t
  misc_feature (360)..(360): n is a, c, g, or t
  misc_feature (370)..(370): n is a, c, g, or t
atcagcataaactatcatcagcctttctgttgcagtataactgctggactttcctcatttcccaaagtgaccctaaaatcaatcagacctgacctggggccagatcagacttccctgagctcggattctctgggcccaaattgtggttccaaacagctccagcccacagtctcctctctgcccttcatcacctcctaggtacatgtgagagactcagatctatggttttacatctgttctaaagggaattcaacttcatcccgggggttgggttcacacacataaaaacaagggaaacttaagctccttaatttaacatgtggcatattatttgtctttccanttcttggcagggttcanggggttcaantcctattatatatatggagtaggctttttggca

SEQ ID NO: 305210 - DNA, 420 bp, Homo Sapiens
  misc_feature (185)..(351): n is a, c, g, or t
  misc_feature (409)..(409): n is a, c, g, or t
aaatgttgatatttttaaaaaatctgtcgtgaaaaatgccatggtaaagtggtcttctttttaatgatttacaagcctttaacttataacccaaaacacagttgcttatttctttatagactcatgtgttctgaagataagtgaaacttttaaatgatttgagaggtttaggtagcatgcctgtnnnnnnnnnnnnnnnnnnnnnnnnnnnnnnnnnnnnnnnnnnnnnnnnnnnnnnnnnnnnnnnnnnnnnnnnnnnnnnnnnnnnnnnnnnnnnnnnnnnnnnnnnnnnnnnnnnnnnnnnnnnnnnnnnnnnnnnnnnnnnnnnnnnnnnnnnnnnnnnnnnnnnnntattaaagggaggagttcccctggcacatggctctctttgttctggccaccctggggnggacatggact

SEQ ID NO: 305211 - DNA, 348 bp, Homo Sapiens
  misc_feature (305)..(305): n is a, c, g, or t
gaggggtgtacaaggagaactgtggctaaaaatgtccaacaaatagaatgcctttcatctcttattttctctatctctttcttaatccatgtcatttctcattaaaatgtacttggaaatttatcatcagagagctttatcttcccatgccagaaaaggcatgtgtcctagtggaagaggataatccccttttctgttcttctttggggctggtttaatacccagacttcacggaggaattgatgggatcagagctcgatgcagggagattagttaggctttctaaggaaggcgaattacttccnggattcacaaagggggcaaaagcttcccctaggaccccaatgg

SEQ ID NO: 305212 - DNA, 212 bp, Homo Sapiens
  misc_feature (35)..(35): n is a, c, g, or t
  misc_feature (37)..(37): n is a, c, g, or t
  misc_feature (117)..(117): n is a, c, g, or t
  misc_feature (146)..(146): n is a, c, g, or t
  misc_feature (168)..(168): n is a, c, g, or t
  misc_feature (202)..(202): n is a, c, g, or t
ctgtctgttctccaggacctgtctgaccacccatntncctcctgcagtctgactgtgtgtatcctatagtagagatgccaggggcctcctcacccatccaggggtcgacccttagtngagacgccacgtgggacaaagggaaaggncgggatgctgggagtttctctnctaccagcctttcagggcccgctagtgcccactncttgccaaac

SEQ ID NO: 305213 - DNA, 430 bp, Homo Sapiens
  misc_feature (21)..(21): n is a, c, g, or t
  misc_feature (32)..(32): n is a, c, g, or t
  misc_feature (72)..(86): n is a, c, g, or t
  misc_feature (123)..(301): n is a, c, g, or t
  misc_feature (351)..(351): n is a, c, g, or t
  misc_feature (378)..(378): n is a, c, g, or t
  misc_feature (404)..(404): n is a, c, g, or t
tgatgagattggggctaagtnccagggctccnaaatctctgcagactcacgtagccagctgccacccggacnnnnnnnnnnnnnnnaaataaagttggccaagataaagcgtatgtatcggtnnnnnnnnnnnnnnnnnnnnnnnnnnnnnnnnnnnnnnnnnnnnnnnnnnnnnnnnnnnnnnnnnnnnnnnnnnnnnnnnnnnnnnnnnnnnnnnnnnnnnnnnnnnnnnnnnnnnnnnnnnnnnnnnnnnnnnnnnnnnnnnnnnnnnnnnnnnnnnnnnnnnnnnnnnnnnnnnnnntggcagtgtaggaaaaaccaaacctttcattacactggctcttaggaatnttaaactgggtacagttcactttgggnaaacagtttgggggttacacctaccncctttatcccaaccgtttccacccct

SEQ ID NO: 305214 - DNA, 439 bp, Homo Sapiens
  misc_feature (92)..(92): n is a, c, g, or t
  misc_feature (168)..(168): n is a, c, g, or t
  misc_feature (332)..(332): n is a, c, g, or t
  misc_feature (366)..(366): n is a, c, g, or t
  misc_feature (374)..(374): n is a, c, g, or t
  misc_feature (383)..(383): n is a, c, g, or t
  misc_feature (411)..(411): n is a, c, g, or t
ctactggttcataatacaggaaacttaaataataagggatcacatatttgcaggcaacatttggattaaaaatacatagacaacataaggtncagaagccacctgagcttaagccattgtcatgtgaccaccttgaccatgagctactgctctaaaacactgcctttnaaattacctttggtaattttttagcatgaagccaatttaaatatgtcaatatttcaacataagtttaacagtatggactaaaaaccatcaactcacgattctggttactttaaaatttggtatgctgtatctcaaatacattagtaactattcctagatggganataaggcaaatgacatgggattcattaaaaaatnggttaaanaacattacngaaattgtccctttgttaaaggttaaanctttaggcaaactgctaaggtattcttc

SEQ ID NO: 305215 - DNA, 289 bp, Homo Sapiens
  misc_feature (124)..(124): n is a, c, g, or t
  misc_feature (152)..(152): n is a, c, g, or t
  misc_feature (194)..(194): n is a, c, g, or t
  misc_feature (228)..(228): n is a, c, g, or t
  misc_feature (237)..(237): n is a, c, g, or t
  misc_feature (271)..(271): n is a, c, g, or t
taaaataactatttatatcatagttatcacattgaattctaaaagagcaatgtagaactttatacttttcttgaatattacagatcatgttaaagtcccttttgttctccccagttttatcctnctcaccttgcatctcccctcccagaggnaattgttgtaatgaatttgatttgtatccctctagtttatcntttaataaactatatatatgagccatgacatggnattgctttngggtgcctttgtaggaccatggcacattgtaggnacatttccaaattcatac

SEQ ID NO: 305216 - DNA, 463 bp, Homo Sapiens
  misc_feature (403)..(403): n is a, c, g, or t
  misc_feature (449)..(449): n is a, c, g, or t
ggaatgttacctttaaagaaaaacattaggtgactaataatttggtgcttatgtgactgtggcaaatcatgaagatagtattttaagtatggaaaacaattgctaaccagcaagataatgtcaagttccttaatatgaactcacttcttggcctttgtctaccttctccagcttcatgtcttaccactttcccttattatggacttcatgttgatcaagtggaggctccctctcctcaaggagagtccctaggccagattcagaagatggttggtagagaggggatttgatagcttctgaggacagtgctttgggatgggagaaatatcatggcaacttagggacagtggctttgggatgggagggattattcatgggaactttagtttttcccgctttattngagctttgccccgtggatatttcacttgtttggggggggccgtttnggagacagggtctc

SEQ ID NO: 305217 - DNA, 238 bp, Homo Sapiens
ggatcagaattgtcccatggtcatccttagctgaaagtgagcctggatcatcaaggctttcagtggcacacacatcttcctgaaatgtatccttttgtctcatccatcacaacttcccagggctcttttcctttctccaaagaggaaactacatctggcagaagatgaaaagcccagtgagatcatgctgtagtcctctaaaatcacatctatggcacaaatcattctgtgcaggatc

SEQ ID NO: 305218 - DNA, 260 bp, Homo Sapiens
  misc_feature (248)..(248): n is a, c, g, or t
ggccaggttctgcacatgaagagggatgttgactgctgtggtacacacagttcagaaggtcttgccccttgctgaccttccctttatacctgctgtggcttctacccttagccacttgctcctttgttatttctggcctttccttgaatgcatccttcattgcatcagggattaaagtgggtacacgaggggcctgggcttatagacactcccaaggactctgggtaggggtcatggcagatctagtnggaaacaagccc

SEQ ID NO: 305219 - DNA, 450 bp, Homo Sapiens
  misc_feature (34)..(34): n is a, c, g, or t
  misc_feature (99)..(221): n is a, c, g, or t
  misc_feature (286)..(286): n is a, c, g, or t
  misc_feature (381)..(381): n is a, c, g, or t
  misc_feature (434)..(434): n is a, c, g, or t
tttataatttttattaaaaatgtctattattttntaattatgctgttttggattatagattttttattctattaatatatttagatgttcttcaaatannnnnnnnnnnnnnnnnnnnnnnnnnnnnnnnnnnnnnnnnnnnnnnnnnnnnnnnnnnnnnnnnnnnnnnnnnnnnnnnnnnnnnnnnnnnnnnnnnnnnnnnnnnnnnnnnnnnnnnnnnngtcatcaaacccaggttcagctgctcacctgtcaaaagccaaacacaggagaggagcgatggcgngtaagaaagcaggtttatctggagagccagtaatctgagaagatggtggactagtatcctaaggtgctgtcttaagtcaaaacatatttcagggnctttttatgttaaggggtgggcaaagcggaaagagggttgttatccaagaggntgaccaacaaccacag

SEQ ID NO: 305220 - DNA, 149 bp, Homo Sapiens
  misc_feature (25)..(25): n is a, c, g, or t
  misc_feature (35)..(35): n is a, c, g, or t
  misc_feature (51)..(51): n is a, c, g, or t
actgccacaaattatgaaacggccntgactttttncaacacgttgcacgtncctcttcattaacttagggccttcaagaacttaaagcatgcctttaatttaatttactccccaacttcaccctctttcagtgcagaatttggagagtg

SEQ ID NO: 305221 - DNA, 431 bp, Homo Sapiens
  misc_feature (310)..(310): n is a, c, g, or t
  misc_feature (390)..(390): n is a, c, g, or t
  misc_feature (396)..(396): n is a, c, g, or t
  misc_feature (401)..(401): n is a, c, g, or t
tttcggcacagaactggaagaaccaaagtaaaatggaaggggggattttttgaaattaaaactagttagtaaccaaacagacagatatatgccagattttttagtgccattcccaccccctcaaatccctccatctcccttcaacaccccctcctatccccgcaatgcagtgcaaagactggtatagctaagggcctatctatcaaacagattcaagatttgcaagcgtaagacatgtagggttagagttacctgcagcttgtgataggtacgtaataacatatgaacaaacgatattaacacctgtggntaggtgagtggtccaatagctatttttattgccatgttgttaaactattaatggacaaaaattgttggggcttattgganaatatnctttnactgctatcctggattttatttttcccggg

SEQ ID NO: 305222 - DNA, 415 bp, Homo Sapiens
  misc_feature (87)..(199): n is a, c, g, or t
  misc_feature (388)..(388): n is a, c, g, or t
  misc_feature (402)..(402): n is a, c, g, or t
gccaacttccgagtctcactgtagtggttaagggtagagacggcaaccagatgccggcaatctgaacctccatctccaccgttcttnnnnnnnnnnnnnnnnnnnnnnnnnnnnnnnnnnnnnnnnnnnnnnnnnnnnnnnnnnnnnnnnnnnnnnnnnnnnnnnnnnnnnnnnnnnnnnnnnnnnnnnnnnnnnnnnncagggcctggctcggtcagtcctgcctgaggttcgcgatttcaccctgacagccgtggacctttggacaaaccactcaaccaccccaagtttctccggactcctgagaaagcggaatccaagtaattgcctacctccaaacgggcgctgggcaacacagggggcaagtgctttgtaaatggaacagcanttaaacaaattagnagttgttggttta

SEQ ID NO: 305223 - DNA, 297 bp, Homo Sapiens
tttatctgcaaaatggtaatggggctgagctaaacttgagattctttcagctctaaaattctgacttgggtatggctccaaagatctcagtgatgtgctgggtaaccatgaggggagtggtcccctggccctagtgggtgtagacacctgctctttttgtttcctggacccctctctgtagtcattcagagtagtgtcactggagatagagtggctctatctcaccccacagtttggaaagatgctgcaatggtagcccatcccgtccaaatgcagctcgctcctttgtgcatggga

SEQ ID NO: 305224 - DNA, 347 bp, Homo Sapiens
  misc_feature (288)..(288): n is a, c, g, or t
  misc_feature (316)..(316): n is a, c, g, or t
  misc_feature (327)..(327): n is a, c, g, or t
taacaattctgagtatactctcagaagctgggttagagtcccaggcttcttttgaaaagtacctcctaggctggaagttcttgctggctccttgttctgattagaattcattccctgacccctgggaaaattttgtttcctggggtcctcacgacatctttctattctctctatttgagcctgtttctctcacaggaacttctcagtcaaaccgaaacccctgttcctccaatcctgcggtcaccacggatgggtcccaatactgggccgggttctttctcccgcggnagaagtttacttgaagatctttgaattncaatgggcctnttggggttccctccggaata

SEQ ID NO: 305225 - DNA, 147 bp, Homo Sapiens
  misc_feature (15)..(15): n is a, c, g, or t
  misc_feature (96)..(97): n is a, c, g, or t
ctcaggccttgattnctagcaacagactgccaccaaacatttggctcctgttcaacattttctttgtgaaaaatggcactgctgttgccgcctggnntgctgcagctagactggctgtgtaagtgctctaataatgtattccactgg

SEQ ID NO: 305226 - DNA, 421 bp, Homo Sapiens
  misc_feature (216)..(216): n is a, c, g, or t
  misc_feature (283)..(283): n is a, c, g, or t
tgacttgtgtgccagtttattggagcagtatttctgtcagctacaatagaatatcagctgtgacatttggctgagtcaggctgtgaacgaggctgcgtttaacagaaaacttagttaacagtgactgttgtattttttgcataaaaatgaaaaagcttctttttagtgtgtatcagctctgatagggactcctatgtttttccatgtacccatcanctaatgcatttgtctgtattccagggccgaaagaggaggggcaagggcagaaggtgcaggccagctnaggtatcccccagggaggctccccccacccatcccccaggttgacaactgctcctgttgggccagagtctaggccaaatgtcaccctccttattaagtttgggatttgtagttttttaggcttgggcagtgttgttcc

SEQ ID NO: 305227 - DNA, 366 bp, Homo Sapiens
  misc_feature (256)..(256): n is a, c, g, or t
  misc_feature (259)..(259): n is a, c, g, or t
  misc_feature (319)..(319): n is a, c, g, or t
  misc_feature (345)..(345): n is a, c, g, or t
gtgaggagcattggttaaaaaagaccataagttgttcattgtaatcatggggaggagggaagtaatttgcttgtatttctgctatgttatttttctacggactgtacattgtgaatacttggtgcacttactgaactgataaagataaattcatacttgtaggaccatttgatcattattcctacagagcagtgttagtgatgaggaaaagtaagatctgggaatataatttccacatatacatgaataatctgtnttntgttaatttatattttataactgtagttgtactctaaggattgtattttgtcaatggganggttaattttgttgggaaatggtttngaatataatactgatgtccta

SEQ ID NO: 305228 - DNA, 189 bp, Homo Sapiens
  misc_feature (25)..(25): n is a, c, g, or t
gcagcggcacttcccgcggactgtntcacgccaagtgaccctgccactgcgctgctcccaccaccccatgtccaccccgtcctcggacgcctggtctcagcacatcaccggtattctcttcctcttaccagtaattagtttgagactgtgactcacttctgtccaacaagatgtgaagggaagtcttcc

SEQ ID NO: 305229 - DNA, 386 bp, Homo Sapiens
  misc_feature (75)..(75): n is a, c, g, or t
  misc_feature (91)..(91): n is a, c, g, or t
  misc_feature (284)..(284): n is a, c, g, or t
  misc_feature (324)..(324): n is a, c, g, or t
  misc_feature (344)..(344): n is a, c, g, or t
  misc_feature (349)..(349): n is a, c, g, or t
taatttataaagaaaagaggtttatttggctcacagttcttgcaggctgtacaagcagcaatggtccagcatttncttctggtgggggctnagggagcttccactcatgacggaaggaaagggcagcagcatcacatagcaagagcaggaggaagaagggagggaggtgccaccaggtcttttttaacaaacagttctcacagaaactaatcaagtgagaactcacttgttaccacaaagatggcaccaggctattcatgaaggatccatcccgataacaggancatttcccaccaggccccaccttcaacactggggatcaantttccatataagattagaanagggncaaacatccaaactgtatcatggcagaaggagcctgg

SEQ ID NO: 305230 - DNA, 395 bp, Homo Sapiens
  misc_feature (203)..(203): n is a, c, g, or t
  misc_feature (205)..(205): n is a, c, g, or t
  misc_feature (337)..(337): n is a, c, g, or t
  misc_feature (369)..(369): n is a, c, g, or t
tgataagatgtttcaggatcatcttgcaccagtcctgaaattagccattccaggagtatggttcagtttagaggggcagtgacattagaaactcagatacaggtgcttaggtatgctcttattagaggagtatctttgattctcaacctttccagtagatggaacaatgaaatacatgcatttaacatgtgcacatatatgtnantaaatacacacatgcgtatatcaatttgccacaaacacacatatattggaaatcaccagttcagagtgatatccctattcatccctgcaggttctttcttgcctccctctattccatatttgtatcttcatnctttttcaggtgaaaaccttgggcttctacantttaaaacccatttacatcattttgc

SEQ ID NO: 305231 - DNA, 306 bp, Homo Sapiens
aaaggcatgtgcactatgccctctacttcatttttaaatgcttcttttgaactccagctttattccagagcccactgagcacagctctcatgggatttaaagctccaataattatcatattttgggcataatgccatatacataaggaaataccatgtgtcagtcataatggggagtaggaaatggacaatcttcttatccacaaatctttggcaaattcacatacggggattatggcaatttggtaattttaaatttacacaattttaaatcattcattcattttaaccaaatattcactggact

SEQ ID NO: 305232 - DNA, 111 bp, Homo Sapiens
  misc_feature (26)..(26): n is a, c, g, or t
  misc_feature (46)..(46): n is a, c, g, or t
ggacagcagccggctctttttttcancaggatgtggagagtgggcnccttgggaagacgaaattgagtatgtgcgggggaggggtcatatgaaacaaggtcgggaaggggg

SEQ ID NO: 305233 - DNA, 491 bp, Homo Sapiens
  misc_feature (146)..(163): n is a, c, g, or t
  misc_feature (445)..(445): n is a, c, g, or t
  misc_feature (474)..(474): n is a, c, g, or t
ttccctctggtactatcaaaactcaacagtataaggtatggatttagtatacttattaaatgaaagatatcctataatatgacctgtgaatggattaaataaaaggtatgtacagttataaaattccataataacagacatgcaannnnnnnnnnnnnnnnnnaacttcttgccttttaataatatctttgaatatagatggtttcaattctccaataacaagatgtagagtggccaaatgggtttttcatacatgtttccctaggtccaggacacccaagaggtatggtccctctcttgggggcataaggaaaacctaggagttatatttagggggcatcatggtgtggggtggaataggtttggacccaaggctggggccatggcttcaccaatggacccaaattatggtttggtccatatttttaatcccaatacattggancctacctatgggaacctggtaaataatcnatttggccttctgggac

SEQ ID NO: 305234 - DNA, 254 bp, Homo Sapiens
  misc_feature (106)..(106): n is a, c, g, or t
  misc_feature (146)..(146): n is a, c, g, or t
  misc_feature (165)..(165): n is a, c, g, or t
ttggccaagccttgccaacttgataaggagcaaaaaaggctctaaaggtgtatgggctccccagatttctgggaggggcatccaaatgaatgaggaacagggcttncagggtaggtcacctgccaaattcctcctggggggcacgnttgacaagaggggaagttnttcttcttaccaagatccattcatggggggggacagggttcccattaggccccgggaccccacaaccttaaaaaccgtgggtttcttgt

SEQ ID NO: 305235 - DNA, 350 bp, Homo Sapiens
  misc_feature (113)..(113): n is a, c, g, or t
  misc_feature (276)..(276): n is a, c, g, or t
ctgtagtactcacttctcttgcaattaactaagatgaatagcaagcaggtcctaaaaaaatttcaacttcgtgggcaacattagtttaagaacacaggcatgggagaccagantttacctattgatattactattaaatacggaaatgattatgaaggtaatttattcttcaaccatgtatttataaatacatcacagcaactaggtacttactggggaatccccttcttttcatttcttccattttgaggggaccggtccatgcaggggggattnccaacattatctataatttggtggaatcacatggtttggtcataaaaatttcattttggactatttggtaattc

SEQ ID NO: 305236 - DNA, 453 bp, Homo Sapiens
  misc_feature (320)..(320): n is a, c, g, or t
  misc_feature (354)..(354): n is a, c, g, or t
ctggggacatcctttagcctctgtaggctcaaaactattccctgaggcttgtgacacacaggacaccacaaaggctgttcaacatggcagcacatggtctgtgtcacagaactgcaggtttcagagaattcagtggtgggaagattgctctttgagagagataaaggggtgaattatatctgtttcctttcaaatctggtatgccgtgctagctagagatctgcactgcaaaaatcctgaacacaaacttaaccaacaaaagcaggaaaagacaattttaaacacgggagtggaaagggtaagcacttcttaaaagaccnggaggacagccttttggaggcggaccttacccantgtaaaagttccctgtttttaaggggcctgttaggggaagttttgaggccacaggaccaaaacaaaggtttccatttatttacccgttttttcccaaac

SEQ ID NO: 305237 - DNA, 414 bp, Homo Sapiens
  misc_feature (361)..(361): n is a, c, g, or t
  misc_feature (397)..(397): n is a, c, g, or t
gattgctacacatttgaatggaccaaatgtgttttaagaccaaattcaagtaaaaaggatgtgtctcttctgaactgaagctcattaaatgtttcaccggccttcctgcaaaaatggattttcaaaactttggaaaggatagcatttaagctgaatttgacctgtattgaccattttggaaatcagccaagcaattcgcttgaagatacttgaagcacttgaaatatgggaattgctggaaaaagaataagacagcccaatagctaccattgcccaggggtgatactttgggtaacagggactgatgggcttgtataacaatctggacatggctggatagggagttggggggagtgggggngcagccattgggggaaggggccaaaggggaaccctnaggagttagtttttttc

SEQ ID NO: 305238 - DNA, 343 bp, Homo Sapiens
  misc_feature (311)..(311): n is a, c, g, or t
  misc_feature (317)..(317): n is a, c, g, or t
  misc_feature (326)..(326): n is a, c, g, or t
aagaatggaggcttcttaagcccatggctcatcttacaggaatgtgcctgttttgtatttcagggtgttctagaaaattgctttcttgagcaaaaaggagaaagtttttcatgtcctcatttgaccacattttgttcccatggctttaagttgaaagctcagaatcagctctactctcatcactaggtggcacttgtgaattacaaatagtcaaatgaatttttatgacaaacatgtgattcacaaatatagataatgtttggaatccctgcatgggacgttcctcaaaatgggaaggaaatggaaaggangggggnttcctagtnaagtactagttggctgt

SEQ ID NO: 305239 - DNA, 323 bp, Homo Sapiens
  misc_feature (134)..(134): n is a, c, g, or t
  misc_feature (145)..(145): n is a, c, g, or t
  misc_feature (206)..(206): n is a, c, g, or t
  misc_feature (251)..(251): n is a, c, g, or t
ggcacagcttaataattactagctgttatgatgatgaagaaatattatcactcttttactaagagtataagaaaagtcattatcaaagcacactgtttttcatatctaagtgaacagtgatatttgtaataagngcactttaagnattcctattaaagcggaagatagcaggcagggtggaaaagtacaagaataattcccatggngtacaggtctccacttttgtcccttagccatctccaatgtaaggnaagtcttgggactgaaagtctgtttctggaaagttcatacaaggggctatttttatggccaggaaaaggcgg

SEQ ID NO: 305240 - DNA, 272 bp, Homo Sapiens
gtgctcaaggaatgtgggtaggataatgatgtgatggtggtggtagtatttggttgatgtcatagggtaagtacttctatattttgttattatctaagcatttcattttattaaatatttttctccataattgctttcttgaaatgtaagagttaagtcctctcataggaaatattttgggtcactttaacatagtcacatttaaggtaatattttttaaaaaaggaaggcttaggtaaggtaaggacaatttggatccccttgcctttagg

SEQ ID NO: 305241 - DNA, 407 bp, Homo Sapiens
  misc_feature (342)..(342): n is a, c, g, or t
  misc_feature (367)..(367): n is a, c, g, or t
  misc_feature (378)..(378): n is a, c, g, or t
  misc_feature (387)..(387): n is a, c, g, or t
gctcctttgtgtcattgtatagttgtatgcacaaaaagtgcggaaggaaacatttaagaagttatagcttttattacagttcgagtctttagaatatcacaggagaacagaggagggaagattaatagtgagaatctcgtggttagagttctacatgattctgttcttaggactggagacatggaaatacggaggaatctttcagagctcactgttcgctagtgggagggcagtatttggtgggaggcagggcagtccaggtagcacctggggggaaaaggatctttgacttccatgttttaaaacctgtttgacctcttccatccttcccacttcacgttnccaccttgcccagtttgttcaactngttgtggtatngccaggcanccttccagttttctggcccc

SEQ ID NO: 305242 - DNA, 201 bp, Homo Sapiens
cccaaagtctggtttccttattaaccccaagttcatggtccacccgaagcttttcaaatgtcagtcccggctccccgcgccccagctgcagtgctgggccctatcgtcaccctcgccctcccggctccctgcgccccagtgccaggtgctgggcccagtcctcacccttgtcctcccggctgcccagcaggcggttgcggt

SEQ ID NO: 305243 - DNA, 380 bp, Homo Sapiens
  misc_feature (308)..(308): n is a, c, g, or t
  misc_feature (324)..(324): n is a, c, g, or t
ttaactggaatattcttttctgttgtttgttcagtaatttaatgagctgctacttagctgtatgtccctcagtacatctcttttcattctgagcctaagtttcatcatttatgagatgttgctaatacggataactgcactatataaactaagatcaaataaatatgaaagcctttaaatatatatgtactgcatatgtaatataaatgggaatgaccctatcttaattgttcactccacttggaaataattcttaaaatgtaggtaggtcaggtggaatatttgttaaatggaatggaatggatttnaaattgtggtaatttnaaattaccaaattgcctaatacccctatgtggaatttgccaggattgtggggtagg

SEQ ID NO: 305244 - DNA, 185 bp, Homo Sapiens
cctgagcttaagcttattttaacagtaaatctacttctgcatagtaagtaatcttaagagatgaaccaagaggttgtaatatgcctagtctatattttaagcatttattgcaattgtttggttattataagttgcttcatgtgaatcattttcttggatttaatgttcaactagaaacttgtagt

SEQ ID NO: 305245 - DNA, 431 bp, Homo Sapiens
  misc_feature (354)..(354): n is a, c, g, or t
  misc_feature (360)..(360): n is a, c, g, or t
  misc_feature (386)..(386): n is a, c, g, or t
aagatatctcttccccagaaaaaaataggaccattcattcctctgtatctgtacaaaatgcttcagagtagctacctcattctggagccaaaatggtacctggctcttgggaaaacctggggaggataaatggaaagctcctagagctatagtggcccacctagctccccagagccccgtattttaccccttgaagccaaaaacaaagggagacaattttgtactccatattgtactgatgctgtattttaaggataatattctctggcatactttcaccttccagtaacacctactttccttagggttcccacttgtggccttcgtatgtgtcctcagtctttacttaccccnttgttnccaatggacaagctttgtggcccctncccaccgggggtttcagcagggagcccggggggtttcttcatcca

SEQ ID NO: 305246 - DNA, 352 bp, Homo Sapiens
  misc_feature (196)..(196): n is a, c, g, or t
  misc_feature (221)..(221): n is a, c, g, or t
  misc_feature (314)..(314): n is a, c, g, or t
  misc_feature (325)..(325): n is a, c, g, or t
aatagttatactctttcatcaaacatgtgttcagagccagtgaagtgctggtcagcctaacagaattggaggcaggaaagtatgatttagctgtgtgcccagaaagaaaatgaaacagatttggctgaatacttattaatctctgcctcaacaactaggattatattcccatttcataggaaatgggagggcactnagagaatgagtaacaagcctaaggncacatagggtaggaaaaaattgatataatcattaatgtagttgtgttttcaaacttcagtcctgtttcagtttcaattaaacattttgttccngtcctcatttntatggatatgttcctgtggattgggcc

SEQ ID NO: 305247 - DNA, 494 bp, Homo Sapiens
  misc_feature (295)..(295): n is a, c, g, or t
ttcacttcttaccaagaatatccattaaatgtctaaaagaaatacaagcatacacagatctacacacactgaaatcccagtcatgaaaaattaagacattccggccataaactgtgcaacaagacacttccagttagtgtgtgctttagtgatcatggacagcggtatcagagtgagtggtagggggttggggctgccaacaatatactgtgcctcagagccaataagcagcaggccgggactggcagccagggccagtcttcttaaaggggagattttaacacaatatctggantgctgggactttcccaatgccatttcatggggagaggggatggggagcgaggaactgggggcattcaagttgcagttcaaaggcttttggggtcaacggtcgggagggagatggaaaccctaaggacaagggtcttgggttgcccacggccagcttgttccagtcttcatcttcacccttcaaacacactttcattttc

SEQ ID NO: 305248 - DNA, 326 bp, Homo Sapiens
  misc_feature (214)..(214): n is a, c, g, or t
  misc_feature (293)..(293): n is a, c, g, or t
  misc_feature (299)..(299): n is a, c, g, or t
  misc_feature (314)..(314): n is a, c, g, or t
gtgggcacaggtgattcttccatctcagcctccttggtagctgggactacaggtgcgcaccaccacagccagctaatttttgtatgttttgtagagacaaggctttgcatgttgcccaggctgctctcgaactcctgggggctcaagtgttctgcccaccttgggccctcccagagtgctgggattacagtgggtgagccactgttgccggggntggagccatttaaacagtttgttttaaaagtggggaaaaacggcagtctttaaaatggaattatgggggaaagcactgnagtttncccaaaggggagganttacttacactg

SEQ ID NO: 305249 - DNA, 389 bp, Homo Sapiens
  misc_feature (133)..(240): n is a, c, g, or t
  misc_feature (316)..(316): n is a, c, g, or t
  misc_feature (343)..(343): n is a, c, g, or t
  misc_feature (362)..(362): n is a, c, g, or t
caggcttgatttttgccaaaagatagtttgacttcctgaaactaacagataactcttgtattcaaaaaataaatgtaatggatttaaagactggtaagaagtattttcttttcttttcatttttgagacacannnnnnnnnnnnnnnnnnnnnnnnnnnnnnnnnnnnnnnnnnnnnnnnnnnnnnnnnnnnnnnnnnnnnnnnnnnnnnnnnnnnnnnnnnnnnnnnnnnnnnnnnnnnaaggtgcccaccacccctgggctaatttttgtgtttttagtaggaggacaagtttttgccatgttggccagggctngtctccaactcttggacctcagggtgnagttggcccgccttcaggncttcccaaagtgttggggattaggagg

SEQ ID NO: 305250 - DNA, 302 bp, Homo Sapiens
  misc_feature (164)..(164): n is a, c, g, or t
agtcagatctctgtgcaggtaaccacagccaaagaccttacctcgttagttttcctgctggaagcctgacttgtacccctacccagcccccgctgaagagcagcccttgggaccatttgaaacaagaggcttgggggaaagccctgccttccgccgtgagtggncttccctcggccgggcaggaagttgtcgacggaactgctgcaggatgggcacgggtggggactgcgggcatggctggcttttagttgttttgggatatgtaaccttgaagggggaattcctgggatcattttgataac

SEQ ID NO: 305251 - DNA, 140 bp, Homo Sapiens
gtgccaggttttaaatcatactttaaataaattatactttaaaatgctttacttctcaagattgaagataacccagatcaaacttcaggaaatgggacaatttttataaaatttcatgtgatacaaatttagagggtggg

SEQ ID NO: 305252 - DNA, 461 bp, Homo Sapiens
  misc_feature (352)..(352): n is a, c, g, or t
  misc_feature (368)..(368): n is a, c, g, or t
  misc_feature (373)..(373): n is a, c, g, or t
  misc_feature (407)..(407): n is a, c, g, or t
  misc_feature (447)..(447): n is a, c, g, or t
ggatttaatctactttttcctggctccctcccattactgggagagctgggtcttaaacccagatacctcttctccagttccaggccctttgtcctgttaagaaacttctccgtttgacgtgtcttgaggctaattcttctacagtaatatgaggctttgatccagacagctccagagaaactacgctcaaagtggagggttttcttaattgtagagaaactcacattacattaccttgtttgtgagatgtgttctgttgtattcagaaaggttcaggaaggaaagtcgggctctgggtcctgtctaggaaaaattggatggcagggagccattttaggctgggaggggggancttttaggaggagganggggncagggaggaaagggggcaggttgggaagggaacntccggagggaaccccttttttggaaaagttgggcctgggnaaaggattttttcc

SEQ ID NO: 305253 - DNA, 224 bp, Homo Sapiens
  misc_feature (26)..(26): n is a, c, g, or t
  misc_feature (30)..(30): n is a, c, g, or t
  misc_feature (58)..(58): n is a, c, g, or t
  misc_feature (119)..(119): n is a, c, g, or t
  misc_feature (188)..(188): n is a, c, g, or t
  misc_feature (195)..(195): n is a, c, g, or t
  misc_feature (207)..(207): n is a, c, g, or t
cgggtaaagcagtttccatggcagtntggnttttaaaggccaaacctccccagggctncaaagaacactggggccaaacagcactaaaggagagcatccctcgctaaccaggccccctncttagaacagcagcacaaaagcctgggtacatgcaattccatcccactttcccattcagcagcaaactncagattncaaacaatattngggaccaaacagtattg

SEQ ID NO: 305254 - DNA, 385 bp, Homo Sapiens
  misc_feature (200)..(200): n is a, c, g, or t
  misc_feature (310)..(310): n is a, c, g, or t
  misc_feature (360)..(360): n is a, c, g, or t
gcgagctacggctaccacccgtcatctcttttcagctaatctgcttcgcgctacttttttgaggtgggcacctgggatggaggcaaggaatcacgaagtgccgttctcctcggaaggggcagcctgatgtctttaaccactgaactgtggtttccaactggatgcgctttgggttcagggctaagacacgcgtaggcgtngcagacagttcaattcgtggggcggctttttctctcccctgcgcggttttgcagaacttgaggattcacgtttgccacgcagttcttcttaaatgttaagggagaacttngctttattttaacggaatgtgttatttcaggctggccaaaggaacaaggntaattcaccctttccttcccccacg

SEQ ID NO: 305255 - DNA, 358 bp, Homo Sapiens
  misc_feature (39)..(39): n is a, c, g, or t
  misc_feature (56)..(56): n is a, c, g, or t
  misc_feature (140)..(140): n is a, c, g, or t
  misc_feature (209)..(209): n is a, c, g, or t
  misc_feature (291)..(291): n is a, c, g, or t
aaaacatgatagagttaagagaggagtatatgacttggngcttgtatttcatgctnacagatactgtgagcaattgctaatgagttagcaaattttctaaatcatttttttgatgaatagtcacccacttcttgatactnaaatgactggttttaagttgttcacctcatcagtaaccttgactcctgccatgtaaaatgcacatgctntttcttttagcctgggtgatccacgggggcaatagggccagggggaaggctcactctgggggttgtgtcggaggggtccagnaaagggtttccatattttaggtacggtgttctacatggggggactacttacttcaagccatatgggg

SEQ ID NO: 305256 - DNA, 488 bp, Homo Sapiens
  misc_feature (172)..(192): n is a, c, g, or t
  misc_feature (317)..(317): n is a, c, g, or t
  misc_feature (351)..(351): n is a, c, g, or t
  misc_feature (357)..(357): n is a, c, g, or t
  misc_feature (364)..(364): n is a, c, g, or t
  misc_feature (387)..(387): n is a, c, g, or t
  misc_feature (402)..(402): n is a, c, g, or t
  misc_feature (423)..(423): n is a, c, g, or t
  misc_feature (469)..(469): n is a, c, g, or t
actgccctaaaaggaagggcacagtatttctggcctcaccatctgtggttaccacagtccttggttgagacccagtgcatgactggctccaagtttgacacacaacatttccagtggtggtggccacagtattgctacagtcacttcttcctcaactccacacagctcagcnnnnnnnnnnnnnnnnnnnnnctccattcattaatatttgggaaggaaagtaaggggaagagggaaaattatcttctacctggattaatccatggggaattctttcccaggacctttccccttaaaacccacaaagggttcattantttcccttaagttctggcaaggggacccacaggnttttanttgaggnttgggggggttgcccccctttantgttagggattacanttttcggggttggacccaaanttttttaggggttccaccaacaccccaggttcccttttttttggantaccctggggaaggatttt

SEQ ID NO: 305257 - DNA, 327 bp, Homo Sapiens
tccaggggctaaaaagttaaacaacaacaataaaaaagctgaaactagagtagtatactagcagtgtgtttcctttgggggcatttggctgatagcagaagtagagcacaatcagggacaggtgacaggctgctctctacccaaagcagagagatagaattcatatccctgtaacctcccgggcacatgcttcaatgtcaatggggtgccattccatgggtaggttgagggtaaatgggtaccctgtgtttcaggggggtgatgttttcataggaataaagttaagtatttcccacttggaaattgtaccactcctggggtatttgg

SEQ ID NO: 305258 - DNA, 324 bp, Homo Sapiens
  misc_feature (190)..(204): n is a, c, g, or t
  misc_feature (292)..(292): n is a, c, g, or t
taaaaagttaactataaagcaagtccttcaggaggaattccggaaggcatcattatcacaggagatgacagcttcatgcatgttattgccccgaagaccttctggtgggacaagatgtggaaggtggaaaacagtaatattgatgatcctgaccctgtgcaggcctaggctaatgtgtatgtttgtgtcnnnnnnnnnnnnnnnattgaggatgggagtctcgctctgtcgccagactgggagtacagtgggcacgatctcgggcttcacttgcaaacgttgcctccggggntttcaagtgattctcctgccttcagaattcct

SEQ ID NO: 305259 - DNA, 442 bp, Homo Sapiens
  misc_feature (286)..(286): n is a, c, g, or t
  misc_feature (344)..(344): n is a, c, g, or t
  misc_feature (349)..(349): n is a, c, g, or t
  misc_feature (385)..(385): n is a, c, g, or t
  misc_feature (399)..(399): n is a, c, g, or t
  misc_feature (432)..(432): n is a, c, g, or t
gtggttaacagtgagccttggaagagatgagtaaaggtgatgcttcaaagacatgctgagcaaactgaaaagcaagttaaagcgccgtgacattgcttccaaaagccaaggattgacagcagctgacagtcatgctggtacctgtgtcacctttgaatacaaagaacattgggcattttgacttatttcagcagggataaaatgttagggaggaaaatattcccctaactgccttcctcctctgaaacatcaatgtagaataataatgccttcttactcatgtatncagcttttccaattcaccaacttatttggaagggcatcacaaaaggaggacctttttnaaatncatctacccttagggccaaataggtacattttcttngaatttcccttggnattgttggaaaatggtacttttttggaaaaggnctttccaggg

SEQ ID NO: 305260 - DNA, 353 bp, Homo Sapiens
  misc_feature (104)..(104): n is a, c, g, or t
  misc_feature (293)..(293): n is a, c, g, or t
  misc_feature (323)..(323): n is a, c, g, or t
tgaagtcctcatagctgtctcatctgcaaagtgacttcccagcggttacctgccctcggcctactgcaaaggaatcatcactgtggggtccagaacctcaggtnggtgtcagggccatccgtgggcactgcaggaatactcttccatggacagagttcacatgtcaccctcactgttggaaagtgtcatctatgggtgcagatatccgtggaagtgacatatctgctacctgctttggcttcagggaagcatgcggggcgacatgggaggcctccatggcagcctgggtgttntgtcatctttactgggctgtgctgtgtttngggccagggcttctttttcggggctgtcct

SEQ ID NO: 305261 - DNA, 371 bp, Homo Sapiens
tctaattgtggtctctggtgctcgtaatactttaattcaaaagaaatgttttgatggcctacactggagtgtgttaagccaccagattccggtgctttcgtgggggtgatatcagggcaaggctcatttaaacacttcagtatttgtctccaaagcatgaggataattgcccaggcatccaagatgacaagtttgcatttaaaaaagtaacagggattctgtaacagtatctgttactacagtgcctatcaggacttaggccaccctcccaataacaacaggttcagggattcagttgggttgggtaacgtatctgtaatttactttttggctttaggaacagaccccctttttcacccttcaatattgga

SEQ ID NO: 305262 - DNA, 361 bp, Homo Sapiens
  misc_feature (332)..(332): n is a, c, g, or t
  misc_feature (346)..(346): n is a, c, g, or t
gagcttcctagaggctgaagcaaaaatagtttaaaaccccactgttggttatcttactcgtatcagtgggcttgagggacatactcttctctcaatggagtacaaaaaaggttttcttgttccaaaaaaattttttttcatgtgtatttatattcaagaaagatacagcattaaagaatgtggatcacagtgaaagtacaaatgaaacagtaaatgtgggttgttaaggagcacagactttgatgtcaaggattgaccccaaatttacaatctgggctcttacaactgggttacaatgtttaaggcaaagttgctacacctccagttttccnttttctgtccattnggggagggtaaaagt

SEQ ID NO: 305263 - DNA, 344 bp, Homo Sapiens
  misc_feature (140)..(140): n is a, c, g, or t
  misc_feature (170)..(170): n is a, c, g, or t
  misc_feature (311)..(311): n is a, c, g, or t
agatgcagtttttcgttagccacttcctccttaaaggagaccagtgggcggagggggaggactcctctgtgtgcctgttaccagtagcgaatctgatgcatctgcagcaacctcaattcttacctcctcagaagaaagtntcggccgaggggcataaggtagggagaccnagaagttttagaggagtgaaaatttattaaaaagttttagagcaggaacagaaggaaggaacgcgcacctgggaagagggccaagctggtgactcgaacggttattgtgcagtttggcctttttgactttgaggttttatnacattggtacgtccaggggtctttgtgttccct

SEQ ID NO: 305264 - DNA, 158 bp, Homo Sapiens
  misc_feature (107)..(107): n is a, c, g, or t
ctccagggagttttatttcctcagcagctgtttctcccatgcctgggcttgtgctaatgtggggcctgggcggactggggggtcgggtgggcatctccctcagactnggcaacctcaggtgcccagccgagttcctgcagcccgctttggccccaggc

SEQ ID NO: 305265 - DNA, 166 bp, Homo Sapiens
tttttttgattcagtgcctcagacctttactaaactgatgatgtctgggactcattcattaggaaaaattgacttgctagtcaggtccaaggcatgcacatccaccaaaccagtccctgtttgctctgagctcgctgtctagcaggtcctcacacacacagccaca

SEQ ID NO: 305266 - DNA, 145 bp, Homo Sapiens
  misc_feature (69)..(69): n is a, c, g, or t
  misc_feature (76)..(76): n is a, c, g, or t
  misc_feature (89)..(89): n is a, c, g, or t
  misc_feature (92)..(92): n is a, c, g, or t
ttcttattcttccaaatccctcgttttgagaatcaaggggtaggagtttgatgacagcgtgtgcagctntgaaggncagagaaggggtngangcagaggaggggaagaaaggggcaaaacggaggagcttttgggagtaagaact

SEQ ID NO: 305267 - DNA, 321 bp, Homo Sapiens
atgagtgaccgtgcttggctgttcattaaagttttaaattttgtatactacagcataaaaatcagtaagaatatgacttggggactcaatctggtactacaactcagtaagaaaatgggcaatgaggaactaccttcttctactgtatagttcacatttattctctaagacctttctctcctaaagtcttccctggaatttcgtttcaccatttccatatttggggggaatccgtggtacctggctctattgttggtaaagggctaggattccattacattcgtggtatatataaaacccctttactggggacaatgaggt

SEQ ID NO: 305268 - DNA, 317 bp, Homo Sapiens
  misc_feature (271)..(271): n is a, c, g, or t
  misc_feature (278)..(278): n is a, c, g, or t
  misc_feature (296)..(296): n is a, c, g, or t
tgctttatatgaattgtattaaaatgttgaaatctacaagcaagataattaaaatgctatccctgccaatcagctgagaaatcagtttaactggggtttgacttcatgacaaatgggccatcaaactaaaacttagcagaactatggcagcctgagagttccagagtggaatttggccttagaacatttccctaaggtgcgagtttggggcacagcagcccaaagaggctcgggtgactttgtcactcccagaggaatgcctgcaggtgtnccctcancccctgtcacaagccttnaggccaccattttttgaattc

SEQ ID NO: 305269 - DNA, 434 bp, Homo Sapiens
  misc_feature (167)..(167): n is a, c, g, or t
  misc_feature (272)..(272): n is a, c, g, or t
  misc_feature (339)..(339): n is a, c, g, or t
  misc_feature (352)..(352): n is a, c, g, or t
  misc_feature (376)..(376): n is a, c, g, or t
  misc_feature (383)..(383): n is a, c, g, or t
  misc_feature (401)..(401): n is a, c, g, or t
  misc_feature (414)..(414): n is a, c, g, or t
ttcaaaatcctctttaacaggagctgtggttagtaaaatcttatattcttacttgagcatatgttcttcatagaaacccaaactgtgacctctttggattgctgaatgaatgtatatgtttctagttagtaagtgtgaactgttaaaactcacataaaacacaaaantttgagatatccccctctcaacttccccattttgagggtttcacataaaaacaagtgaaaaacatttagagaaatgaaaaaacattctggaatatattataaatngggttaaacacatatgctgggcggattatcaatcttttgttttggaaaaccaccacatcatcttacngtggaaggggggnaatttttccaaccttttcctgccngcctttncttttaggggccaaaccnggcatttcctttngcccccttctatgggggttt

SEQ ID NO: 305270 - DNA, 444 bp, Homo Sapiens
  misc_feature (39)..(39): n is a, c, g, or t
  misc_feature (54)..(290): n is a, c, g, or t
  misc_feature (299)..(299): n is a, c, g, or t
  misc_feature (311)..(311): n is a, c, g, or t
  misc_feature (350)..(350): n is a, c, g, or t
  misc_feature (369)..(369): n is a, c, g, or t
  misc_feature (376)..(376): n is a, c, g, or t
cagctgggaacatatgaagccccagtctcttaaaaaatnatttggcatgcacannnnnnnnnnnnnnnnnnnnnnnnnnnnnnnnnnnnnnnnnnnnnnnnnnnnnnnnnnnnnnnnnnnnnnnnnnnnnnnnnnnnnnnnnnnnnnnnnnnnnnnnnnnnnnnnnnnnnnnnnnnnnnnnnnnnnnnnnnnnnnnnnnnnnnnnnnnnnnnnnnnnnnnnnnnnnnnnnnnnnnnnnnnnnnnnnnnnnnnnnnnnnnnnnnnnnnnnnnnnnnnnnnnnnnnnnnnnnacttcactncaagccctgggnaacaagattgaaggcccctatttcaagaaatttcaactntttaaaaaataaataaatncttccantcttggatccgttttacgggggctttcagggtcttttcttgaaaatcgccgtgttacttgtttgcact

SEQ ID NO: 305271 - DNA, 424 bp, Homo Sapiens
  misc_feature (151)..(151): n is a, c, g, or t
  misc_feature (169)..(169): n is a, c, g, or t
  misc_feature (414)..(414): n is a, c, g, or t
aataaagcggcaaacagatttttaataaaagggtttctatgaaaacagaagaaaaacaaaggttaatatctactgtagactatacactagttttttgagagtctctgtagttcttcagattgtagtgttaatctgacagagtctcctgggntgtagtttaaatcaggtnttgcagtgaactttctgagtattccatacatcaacaaagcataaaagctgtttatatataagttgctgtaggtgatttttcccatagtttattcaagttgtcttgctccagtctgcaggggaaatactttcccaaattctgggaggacatcagggtaggaggaggaaagggttaggtgttttccaattggttcctcaccaaaggtggttaattttatcccaatttactggtagggctatggtacnggctccaaaa

SEQ ID NO: 305272 - DNA, 119 bp, Homo Sapiens
  misc_feature (43)..(43): n is a, c, g, or t
  misc_feature (103)..(103): n is a, c, g, or t
gtggttattgagggaaacaaacacattatttgtgggctaggantaatgggaactggggtccctttacctcccaagttacaccctctgttccttttttcgggtnaaaattttctttcgcc

SEQ ID NO: 305273 - DNA, 426 bp, Homo Sapiens
  misc_feature (50)..(50): n is a, c, g, or t
  misc_feature (374)..(374): n is a, c, g, or t
  misc_feature (391)..(391): n is a, c, g, or t
tttctcacacagttctggaggctagaggcaagatcaaggtgctgccaggntcgatttttggtgagggctctctttctggcttgcagacggccgccttcactatgtcctcatgtggcctttctttcctctgtgtgcacgcactcctggggtctctgccttttcttatgagaacaccagtcctattggattaaggccctatccttatgacttcagttaatcttaggtacctccttaaaggccctatctccaaatatagttccactggggtaagggcttcaacctgtgaattttgggggacacaattcagttccacaacaatgagcatttgtgtaggttcacattttggggggatactgtgaatagtgctaccatgnaacaattctaggtacanttccttttgggtaaactcatatatacatatctgtt

SEQ ID NO: 305274 - DNA, 107 bp, Homo Sapiens
caaagtgattctcctatctcagcctcctgaatagccgggattatagggcctgctgccacgcccagctaatgttttgtatttttagcagagactcagtctcaaaagag

SEQ ID NO: 305275 - DNA, 410 bp, Homo Sapiens
  misc_feature (295)..(295): n is a, c, g, or t
  misc_feature (303)..(303): n is a, c, g, or t
  misc_feature (355)..(355): n is a, c, g, or t
  misc_feature (368)..(368): n is a, c, g, or t
aatctatacttctcttcaaatgtttgtaccactcacctacccaattcccttcccaccccaatcaaaagacaaatacccatgctcagaacctgggggctcacattttacctgaaattccacaagtaacagaagcacacatttaggggataaaaccctagagagagagtaacacaatcctggctgccatctcagaacaagagagcattgtacccagagtccatgatcacatactggaatgactgtgtgacggagctgacatgccccaataggttacaacagattgttctggcttgtnaaccaatncaattaccacaatttaacaaatattttattggaacaccccgggaaggcaccnggggtattattantgttcctccttcagctattttgtttaggattaacacggaaac

SEQ ID NO: 305276 - DNA, 436 bp, Homo Sapiens
  misc_feature (227)..(227): n is a, c, g, or t
  misc_feature (229)..(229): n is a, c, g, or t
  misc_feature (326)..(326): n is a, c, g, or t
  misc_feature (344)..(344): n is a, c, g, or t
  misc_feature (356)..(356): n is a, c, g, or t
  misc_feature (363)..(363): n is a, c, g, or t
  misc_feature (398)..(398): n is a, c, g, or t
  misc_feature (424)..(424): n is a, c, g, or t
gtctcctttgccttgcttttcccaaatatatcctatagctgttccaggggctaggagatggacccaaccggacatagcctggattctatagagatagcagagggaaggctaagtcatactacagtgtgaatgattaatagtagatatttcttttcagagcaggttttgtttaggttggggagaaagaggactgcagagaaaagggataaacactgagatgccagagncncaggggttgcccaccccatagagtccacaccccatttccccatgttttttgcatgagccctgctggggggcaggccctggggtcccttcccttctgnatcctgttgtcctgagtncacaagcttatnccctgtnttgggaaccttggttcttaagcaggcattgggagnattttgagacagctgggaggaccagnggcaccccttta

SEQ ID NO: 305277 - DNA, 141 bp, Homo Sapiens
  misc_feature (121)..(121): n is a, c, g, or t
gtgtctggctctaattttcttttgatcattgggaattcagggacttttttttccaaccagggatatgccttggtttgtgtttgtatacattaaccctgccttttagtccatggcccttttncagtgttcaggtttaaagta

SEQ ID NO: 305278 - DNA, 423 bp, Homo Sapiens
  misc_feature (374)..(374): n is a, c, g, or t
gtataaatgtattttgtgtgtgtctttttgtctgatttagacttaggtacgtcatccttacagattcccacttcatccagaggttgggcttggcatccagtttcttgcatgtagaggaacaaagaaaggaagagctcatgcccactctgtaattattcaaaatttatgtttacttagaatttatcatgctgcttaaaatgatcagaaaagattctctttaaaaactgctctggctctagtctaaattaccaagatatcaaatcacgagagttacaattatacccagatctggctgaccctagcattctgctacgtctccactagactaaattgctgaaaatacaatcttttctaagggtatttcacaaccccgnaggaccatctcaagatgggggaaaagggaaaagtacaagcatttccctc

SEQ ID NO: 305279 - DNA, 150 bp, Homo Sapiens
aatgtattaggtacttgggagcagtgtcttccatgggattaagagccacaggaagggtttgacaaataagttttaaaaactaatctagttaagtttccgggggggaaatgtcttggaaatttatttaggagacaaccttttatttcagtc

SEQ ID NO: 305280 - DNA, 253 bp, Homo Sapiens
  misc_feature (59)..(59): n is a, c, g, or t
  misc_feature (132)..(132): n is a, c, g, or t
  misc_feature (169)..(169): n is a, c, g, or t
  misc_feature (175)..(175): n is a, c, g, or t
  misc_feature (184)..(184): n is a, c, g, or t
  misc_feature (196)..(196): n is a, c, g, or t
  misc_feature (202)..(202): n is a, c, g, or t
  misc_feature (211)..(211): n is a, c, g, or t
  misc_feature (230)..(230): n is a, c, g, or t
gttcatatttaaaactatttacaggggcacagagaagccagagtggcccggcccagggncagggatgagtccctgcaggggggacggaggggggccggcaagagttgggaagtagctcctctacggtggacnggacaagggcgggcagctgctcctccgccgcacagtnactggnctgtggggncgtgggtggggntggganaggggtttnaagttcccagtttcaaatnccaggggcagttacttgactggg

SEQ ID NO: 305281 - DNA, 118 bp, Homo Sapiens
  misc_feature (58)..(58): n is a, c, g, or t
  misc_feature (81)..(81): n is a, c, g, or t
atacccactatatgttcaagttctaaattgggattctggggaagctgattaaagaggnaaataatgtgtagtctattgggnagagggtaggataaacaatttttaaggtgaaataatt

SEQ ID NO: 305282 - DNA, 508 bp, Homo Sapiens
  misc_feature (99)..(99): n is a, c, g, or t
  misc_feature (127)..(127): n is a, c, g, or t
  misc_feature (241)..(241): n is a, c, g, or t
  misc_feature (308)..(308): n is a, c, g, or t
  misc_feature (349)..(349): n is a, c, g, or t
  misc_feature (406)..(406): n is a, c, g, or t
  misc_feature (455)..(455): n is a, c, g, or t
  misc_feature (484)..(484): n is a, c, g, or t
  misc_feature (491)..(491): n is a, c, g, or t
tttttccatcagcgtctcacactatgaaaagtagaacttatatttttgctaaaaactcatgttcgtttactcaaaccagatgatgaggataggcctggncttgttgctgtcacccatttcacttccngcttttctgaccttcgcaccatccctgccgtcagtcctttagaccaggagctcattgcttcatctttgcttggctcactacagtgtcactaaacttccttgcctctgccctggngttatttacttcttttctcacacagtcacagggaggtttctataatctacatataatcttgtcattnttttgcttgcaatccttttcatgatttttcaggaataaatngacaggtgccccatttgtgggtgtttaaggtttgtggtttcattacaacccttgttngaaccctgcaggtggcacctcccgggctttgggttttcacttcttttanccacaggtggaccacctcactgggtgttntactganccggtctttttccattc

SEQ ID NO: 305283 - DNA, 146 bp, Homo Sapiens
ttgtgttctcaagaatgctttctaaaacaaactcatgtgacataaacagggccagcttgccctagttacacccttactatttcattaacaaaggaactgggctgccattctgtttttgttatgcttatgctgaataactgtactca

SEQ ID NO: 305284 - DNA, 271 bp, Homo Sapiens
aaacttgttaaagtttgtagaagctgagttgttgatttctgtggtggataaaagccagtgctgtatctggaaactgttttcctgtttttcttagataccccttgaatcggatctgtttaatggaagaggatttttctgttaagctggttataatgccggttaaactttgtgtttaggatgttaaagtcctggaatgaatataattacctgcctatataaaaaaagctgaagtcatttgatgaaaagttaacaagtgcaggcatgtgagcta

SEQ ID NO: 305285 - DNA, 319 bp, Homo Sapiens
  misc_feature (278)..(278): n is a, c, g, or t
accattacactactacattcccctgggtggggcgaggggagtgtttcttgttgaaagatggcaaggttagagaccttgtttgtctggcgtttccagtgcctggtactcaaatatttttgtcagagaaaatgggaaaactccaagatatctccattttataagtcttactaatataagaatccaaatcactgtggaagaagaaagtgaagtgaaattccctagtatgaagaggatcaaagcggtgtccctgcttaagtgtagaataagcatagctattnaaataaaagactgatcttcactgagtttaagagtctcagaa

SEQ ID NO: 305286 - DNA, 455 bp, Homo Sapiens
  misc_feature (356)..(356): n is a, c, g, or t
  misc_feature (380)..(380): n is a, c, g, or t
  misc_feature (393)..(393): n is a, c, g, or t
caataacatgtaatgatctatgatgatgcaaacactctatacttgtaaaatgatttaaaatttcccacttgttaactgaaggatgtacgcggtggtagagacatgtatgtctctattcttttaaatctgaaagcattatctaaaacccaatcatcatatacctgtagggaaaaagcctaacacagccatatccaaaagtcatagtccgtcagaagtatgttaaatgttataaaattacttgacctcaggcatttctgaggttttgggtgtcctcaatttattaatataatagggtgggttggggttattttaacccaaactttaaaaggccatggatgcctggcaagccttctggntggggacccaaaggtcaccctttnttacttctggacntgagggccgggggacggttaacttcacacctgttattccccacctttggggggggcccgggt

SEQ ID NO: 305287 - DNA, 420 bp, Homo Sapiens
  misc_feature (227)..(227): n is a, c, g, or t
  misc_feature (294)..(294): n is a, c, g, or t
  misc_feature (316)..(316): n is a, c, g, or t
  misc_feature (361)..(361): n is a, c, g, or t
  misc_feature (371)..(371): n is a, c, g, or t
  misc_feature (377)..(377): n is a, c, g, or t
agaaaatgcagttaagtgctagaagagggttcctgatctatttgaatccagccaaagaatcctcagaaatttgtaattgatttgctcaagtatgaaatgtagatctgagttggcaaactttccgtaaagggccaagtggtaaatatttttggctttgtaggacattggtctctgtcacaagtactttcaaaaacaggtgggcaagctgcattggctcacaggccagnagtttgctgacccctgatctacattgtttttccttctaaatattacctgattatcttaggcttcttnggccaaacatgctagggccggntgggaggcaggagggttttctgtttacatggctgtaggtctcttnatttaatggnatccantcccaggaacacgttaggaggattctggaagttcaacacatac

SEQ ID NO: 305288 - DNA, 371 bp, Homo Sapiens
caaatagtatgaattcttgctccagaccagtgtgagtgtggtcctgtgtttaagaattctttttaatagctcccacggggaggatgctgccactcttcgggagttctcacattatccacatgtcttttatgtcctcttccccggcctcagcctttatatctgtgccccatgttcactgcctatcaaaactcagtgtctatgccaccagggaaccggcagatactttcaaggaccacactgggatctacagcactaactgacgcaggcctcagaaaaatccctttactctcccaccagctaaactattttacttaaaaacactttaaatgtggtttcaaggtggggtatataataattttaggggtacaggt

SEQ ID NO: 305289 - DNA, 290 bp, Homo Sapiens
  misc_feature (40)..(40): n is a, c, g, or t
  misc_feature (72)..(72): n is a, c, g, or t
  misc_feature (150)..(150): n is a, c, g, or t
  misc_feature (156)..(156): n is a, c, g, or t
  misc_feature (175)..(175): n is a, c, g, or t
  misc_feature (260)..(260): n is a, c, g, or t
aggaacaaatttattactaattatgcaattatttcatttnctggtgtgggggaagaaaaaaatacttaaaanccttttaaaaatatctctaataaagacttaagaatcctgctgtgttgcgcttctgcaaaggcacaacgtggggtgganctgcanctgccccccacgctctggnccccagcatggtggctgggcctggctctggctcagcttggagctcagggaccactctcagatatgaggggtcaggaggaactggnctggcaaggccccaggctcccacctgggtt

SEQ ID NO: 305290 - DNA, 245 bp, Homo Sapiens
  misc_feature (97)..(150): n is a, c, g, or t
  misc_feature (176)..(176): n is a, c, g, or t
  misc_feature (232)..(232): n is a, c, g, or t
ggcactggtcccagagcagccacacttacagtcgagacacaaagtggacatggggttgccggggctgggggagagcaacgggggggctagcctttannnnnnnnnnnnnnnnnnnnnnnnnnnnnnnnnnnnnnnnnnnnnnnnnnnnnncgcccgtggcctgcacaatgcgaatnttaccctaattgccacaggaacccgtgcactttaaaaatgggcttaaaatgggggnaattttttaagtt

SEQ ID NO: 305291 - DNA, 109 bp, Homo Sapiens
  misc_feature (53)..(53): n is a, c, g, or t
agtttgtttatgcaaacagtgttattatcagcttaaaataatgggttataacngtagtatttgcaagcttcatgataccctcaaatcaaaaaacatacaatggagacac

SEQ ID NO: 305292 - DNA, 157 bp, Homo Sapiens
taaagaatgtatgagactggagagtatgagtgaggccgactttttttcttgctaaaacacaactggtgtgcccagtttattacctatgtcttctacacatccacaagtaattgtgccaggtctaccattgaatagaatgaagaaagaagtgaatggg

SEQ ID NO: 305293 - DNA, 301 bp, Homo Sapiens
  misc_feature (58)..(58): n is a, c, g, or t
  misc_feature (220)..(220): n is a, c, g, or t
  misc_feature (231)..(231): n is a, c, g, or t
  misc_feature (237)..(237): n is a, c, g, or t
  misc_feature (275)..(275): n is a, c, g, or t
  misc_feature (291)..(291): n is a, c, g, or t
cttgttagctcttactctcttctcttccctctggccttgcagaagttacacagcaccntcatctagttcagttaactctttggatgtgaaccaattatcgagtaccatgaatttcaaagcaaaaggagagaatgggtctgggaataacctttccttttcctccttccaccccattctaaattccccttagttagtgccatctagaagagggccttcaatntgtcaacactntttaanatcttttacacattgggtaatatactaaatgttgaatntttccaaaaacaatgnactctagtcc

SEQ ID NO: 305294 - DNA, 323 bp, Homo Sapiens
  misc_feature (38)..(38): n is a, c, g, or t
  misc_feature (59)..(59): n is a, c, g, or t
  misc_feature (131)..(131): n is a, c, g, or t
  misc_feature (215)..(215): n is a, c, g, or t
  misc_feature (242)..(242): n is a, c, g, or t
  misc_feature (272)..(272): n is a, c, g, or t
  misc_feature (292)..(292): n is a, c, g, or t
  misc_feature (306)..(306): n is a, c, g, or t
tggcatcatggaactgaatcaaacttgcatttttggtnacacaataggacccaggtttntagattaaaagaatatgctgtgacttgtggaaactcaactggcaacacggattatttgcagtccagcgtttntccagccagtccccaagatgccaggacccgatggactcctggaatcagggatgtgctgcctgaagtcactaaggcaaggggctnggaacacctgacaatccgggctcattncagtgtcccggcctcccctcctacagagtngtcctgggctgtcttgagtntaagtgggcaggtncttgggaaacctgggga

SEQ ID NO: 305295 - DNA, 274 bp, Homo Sapiens
  misc_feature (214)..(214): n is a, c, g, or t
caaggtgtcgccattttgtcttttacacgcggtttttaatgacgagttttaattaggttccgctgcagtcacggagttccgagtgttagtgtgtgcgtccgcgttccgttacttaatagcaaacgatgttgacgatttgtttttatctttttggccggatagtagaattttcggtagggcgggggccggtgaagaagaggggcggcataacttngcttaaacttcacatttctccttggatttagtagggaatcctaatgaggaaaagaggagt

SEQ ID NO: 305296 - DNA, 370 bp, Homo Sapiens
  misc_feature (228)..(228): n is a, c, g, or t
  misc_feature (330)..(330): n is a, c, g, or t
ctgggtatcaggtgcctatgtgaacagctcccaataaacccttgggcactgagttgctagtgagctcctctggtacagaacacgtcacactggttcagtgttgcggctggtttaggggagaattaagtccgtcctgtccgtcttccctggtgaggactccagaagctcctgcctggggccctccggacagcccagacacctcttcgcgtggctgatctcgctctggtnccttttgctgaatgtagcttagctctgagggtggctctgtgctggacccagttgactcttcctgggggaatcatcaaacctggggggccccaaagcagccgnagccacagcttccacatccttttccggcaggcattcccgt

SEQ ID NO: 305297 - DNA, 376 bp, Homo Sapiens
  misc_feature (129)..(164): n is a, c, g, or t
gcagtgatactgaaatgtaactggacaggtcagagaaaacttccttgataaggtgacatataaactgaatattcatgggcttgaacatataaaagtggaaggagggggatttcaggaggggcagagtgnnnnnnnnnnnnnnnnnnnnnnnnnnnnnnnnnnnncttagtgcacattttagtttgtcactagggtttttggaggttcaaggtgagattttgattattgaatcctccacctacccctcctgccttctgggattctggactgatgcattatttataaaaatgtatagaagccaacagggaaataaagtactgtttaaaaggtggacaaaggctgggatagcccttcaatgtctgacttttttcaattg

SEQ ID NO: 305298 - DNA, 504 bp, Homo Sapiens
  misc_feature (91)..(91): n is a, c, g, or t
  misc_feature (396)..(396): n is a, c, g, or t
  misc_feature (413)..(413): n is a, c, g, or t
  misc_feature (424)..(424): n is a, c, g, or t
  misc_feature (444)..(444): n is a, c, g, or t
  misc_feature (478)..(478): n is a, c, g, or t
  misc_feature (490)..(490): n is a, c, g, or t
aatttagccgtcttgctaattccctaacttctgaccataaattcatatgtatttttgttaaacatattagattttacagactgtgtctgtncttgcaggtgatggggcaggtacagggaaaacttttttgataatcttcagaggttgactgtgaaacactcttgactataaggaggttttgaaagctgtttggaaaaatatcataccatacttattaaatgggggagaggggaaagcaacagaagtgctgagctcttcaacagtcaatatagcatttactgtttcctatatttaatagcattcagaacaatagaaacaagttggcacatagccactttcaggtacctaactgaaggtaaatgttccctaggaaactgaatagtttaaagccttccngaggaaaggaaactccntttatttaacnattttatgtggaccaaattncccctaaactcccgcttaattttttaaaattagnccatttcccggnccttttctcctctt

SEQ ID NO: 305299 - DNA, 382 bp, Homo Sapiens
  misc_feature (263)..(263): n is a, c, g, or t
  misc_feature (284)..(284): n is a, c, g, or t
  misc_feature (319)..(319): n is a, c, g, or t
  misc_feature (354)..(354): n is a, c, g, or t
cactgtacctggccctaggtaaccaaatgttagaaatagccttccataattcctgaagcagaacaattagcataaacatgttatctgttaacacagctttttagtaaatgtttgcacagtagcatttcgctagttggtttgggagaagcaatgtccaattatcaggagttgggtcatgagggcttaagcataaacggccatgacttgacaaaagtaacagtccagcagtatcccatggagattgagaaccgatagaagtaggnctcaacaaaagaggtggtctntgaacttcatgactatcatcacctccctaagaganggaatcttttaaaaacaccatagtgccattcagangcaagtttactcaggttacaagttgagt

SEQ ID NO: 305300 - DNA, 346 bp, Homo Sapiens
  misc_feature (264)..(264): n is a, c, g, or t
  misc_feature (316)..(316): n is a, c, g, or t
tgccctatgttttggcccttgatgtatttgtgggaggaagatgggtagactggctaactgtgatatcaactgatttctgaatgatacagttataccctgagtcagtttctggagattaagcaagggtgccaggagcgttgtgaagggctctcattgtttttacatgtcagtgactgcctgccttggttttgccagctgcaaaggaagaactaagccctcttttgcctagagaatgctaaaagggtgaatactcaggtgtgggtnggggaggtttctaaggacaccccagacccccagatgatgcacctaaggagtnctgttgtgaccctgaagaaggggaccctct

SEQ ID NO: 305301 - DNA, 347 bp, Homo Sapiens
  misc_feature (265)..(298): n is a, c, g, or t
  misc_feature (337)..(337): n is a, c, g, or t
tctaaaacttcccattattgctggcaatgacaaattctacctcaccctctccacaccactcctgattctccaggtaccaccccggtctctctcttatttggtctttgcttctgtgttcaagaagccacattattaaatgccatttcttgactctactgtctccttcgtttagttattgcctctttcctaaacagctaaactcagggaaattagtttgtatttgtatatctaggtccattaattaggcaaagctacacatgggggnnnnnnnnnnnnnnnnnnnnnnnnnnnnnnnnnngaaacagggggctcactttggtcaccgggctgggagtgnagtggggcaa

SEQ ID NO: 305302 - DNA, 317 bp, Homo Sapiens
  misc_feature (156)..(156): n is a, c, g, or t
  misc_feature (273)..(273): n is a, c, g, or t
tgcataggactcggctggctacggagggcccctctgcacctcacatgctggcaatgctccaacagggctacttcgcttgatacaaggctagattattgagaggtgctgtgaatcccaaggcctcatgaatttttgaagttgtcacacgttagtgtngttgggataggctatctcaacaactgactataattctggacaggaaagcaagaatcaaaagcttcaagggcaatctctagctataccttacttaacctcactccctggctgacatgnccaggaaaatataggacagacagcaaataagggcaaagctattc

SEQ ID NO: 305303 - DNA, 346 bp, Homo Sapiens
  misc_feature (34)..(34): n is a, c, g, or t
  misc_feature (84)..(84): n is a, c, g, or t
  misc_feature (116)..(116): n is a, c, g, or t
  misc_feature (199)..(199): n is a, c, g, or t
gcaagcctcgctcagtcttaagcaagaggggatngattcgcccgcagcactgagaatccaggggcaggcgggatggcgttcagncgctgttgctagaaatctctgtctttactctnttttgaaggcagcatggcagggtgaacacaagcacagactgaaggcagcttgccgcggttcacatcctgggtcacaccacttncttaccatgtcacgtggggcaaattatgtaacttctctgagcttgctttcctcctcttgaaaatgggggttaacaatggataataccccactttccatagggattgtttgtttaaggagacttattaaatgaagggctggggtattc

SEQ ID NO: 305304 - DNA, 351 bp, Homo Sapiens
  misc_feature (273)..(273): n is a, c, g, or t
  misc_feature (333)..(333): n is a, c, g, or t
caaatatgaaataattggaaagttgattgcatatttctatgtatataatacccctgggaaccttcaaaaatgtgcgtcacttgggtctttgggtcaattgatctacccaagcaattaatacttattcaggctgttattgtattaatagtaattacagaggacccactaaagagataagactcttctctattatttatgttataggaaacaaacgataaggaagcttgtttctaaaattttggtttggctcatgaaattttaaatgtaaggccnttttgtcccgtataggataagttctggaaataagggccaaaaggttaaaggtaaaaaatntatggtattaaatatata

SEQ ID NO: 305305 - DNA, 145 bp, Homo Sapiens
  misc_feature (17)..(17): n is a, c, g, or t
  misc_feature (97)..(97): n is a, c, g, or t
  misc_feature (133)..(133): n is a, c, g, or t
atgaattaaatcacttncatccacttcatcccacaacttttggatacactgtgcatcatttccagatttctccacaaagaaggagggacaacccaantgaggcacaatgactgaaggcagcagcgcaggtctntctactttctgg

SEQ ID NO: 305306 - DNA, 357 bp, Homo Sapiens
  misc_feature (323)..(323): n is a, c, g, or t
gcttgctttcagtgttcagtctaaaccataggactatatatttgtcttagcataatgccgaacatgcaagtctgcttaaactatagtcttaagatttgtgtgttttgggtttcctctacttcctctatttcctgtcttttttgggttataggtcagatgggttctactttttattcccatttcagactgtgggagagcttctaaaaataccagtgtccatccctgcccctagggatctagttaatttttaaaagctctctgtgtttcaaatttgcatgtgtttctgtatgtttgcagtatctccgtgtgtttttcaaatcttnctgatggggggcacttcgtgtaacttttaaaccc

SEQ ID NO: 305307 - DNA, 439 bp, Homo Sapiens
  misc_feature (326)..(326): n is a, c, g, or t
  misc_feature (354)..(354): n is a, c, g, or t
  misc_feature (359)..(359): n is a, c, g, or t
  misc_feature (372)..(372): n is a, c, g, or t
  misc_feature (428)..(428): n is a, c, g, or t
aatatttaattcttgtgacattgaatctgcttttattataaagagttaagaaattgccatttccatgacagtttcctccatcaacaatcttaatattgaagcttgaatttaggtctgctggtcagtgattctagtctagcaaattactttaggactgaaagctcttgtttctttagaaaaatatactatgggagattaggatcctgtttactagtgaagactctgtctcttttccgggtcaaaacattttgtgggggaaatatcctgttcgtgacctagggaggaaacaagacaggaaaaccaaatctttcttccattttatgganttccttactcccataccaggcagttttnggggngttctgggggcantccataggcactttgcccatttttaaaaaccaggctacaggggggcaccattttcngtggggttaaa

SEQ ID NO: 305308 - DNA, 485 bp, Homo Sapiens
ttccattcatgtgtgagcacatgcgtgtgtgtttagcagaaatgggaacatgttatgtatcagttcgagtatcagggatagttctgatttcttgttacctctggccatgggtttacaatggcctatcaatgcctgaaacaaaccccttccatgaaggcagctacagtgcagcaattaaaaacattagctttggggtcaaaaagatctgggttcaatttgcagctttgtcactcaatagctgtagatcttgggccagttccttgacctttccagatagcagctttctcattattcaagggagtgaaacaacacccgcctgacaggcctgctgcgggggattaagggtaacatgcattaaaacactgaggcatgctgctttgcttacacagggaaggccccctgttcaatgtcagggggcttttacttgtttactcttgaactttggggggggtacagtattttcagttctggggtgcagggcacaa

SEQ ID NO: 305309 - DNA, 484 bp, Homo Sapiens
  misc_feature (161)..(286): n is a, c, g, or t
  misc_feature (410)..(410): n is a, c, g, or t
  misc_feature (474)..(474): n is a, c, g, or t
tatgcttaggtctatgattcatttcaggttatttttgtgtatggtgtgatgtaatggcgtggcacgtaagctctgaaacgaacctcaatgatccctaccttatgaggtccttatgaagtctcacctatgtgggctctacccagggactcacttttaattgnnnnnnnnnnnnnnnnnnnnnnnnnnnnnnnnnnnnnnnnnnnnnnnnnnnnnnnnnnnnnnnnnnnnnnnnnnnnnnnnnnnnnnnnnnnnnnnnnnnnnnnnnnnnnnnnnnnnnnnnnnnnnngagggaagcaagctagcacattttaggacccataaagagaccaacaagggcaagggaactgatgtctcctgcccaatgccaggttaaggcccgagggcctgccaacacctacagagtgagcttnggggagcagatccttttctgggggcaaggtctgaggataatgcagctttaggtcaatggcgttngattgcaact

SEQ ID NO: 305310 - DNA, 439 bp, Homo Sapiens
  misc_feature (91)..(91): n is a, c, g, or t
  misc_feature (100)..(100): n is a, c, g, or t
  misc_feature (354)..(354): n is a, c, g, or t
catatccccgttttctgagggggctggtgagaccattatcccggtagcagtgtaaaggggcctcagaagccgtgccgtgcctgagatcctnctcctcctnccatccgggaaaccacctctgctgctctgactgtctgaagctaacctcctgggcttcctgcttgaggcagaccttcatgaacaggcttaagccacccatcccgccttgggacacacatgccgccctctcagggaccttggactgggaccttgccattctgctcctgctggggaggtcgtgccgcctgtttctctctgtgtgtgagtttgcaggttcccagaggcagagactggggtttgcgaacagtccccctncccccaaccttcgatgggacaaggaggggcctttgttcattcctcaggacattttgtttccaaagttgaaaaggttcccttccac

SEQ ID NO: 305311 - DNA, 270 bp, Homo Sapiens
  misc_feature (47)..(47): n is a, c, g, or t
  misc_feature (61)..(61): n is a, c, g, or t
  misc_feature (176)..(176): n is a, c, g, or t
  misc_feature (216)..(216): n is a, c, g, or t
  misc_feature (225)..(225): n is a, c, g, or t
  misc_feature (238)..(238): n is a, c, g, or t
caaacctccaaaacttctttcccttccttggtctgccctaggccctnctgagtatagatancctctcttaggaggcagctgggcaaggcggttcaggagcccaaatggggaaaaagatttaactgggagaccacgtagggggttgagttcctctttacacacagggccatttattnacacaggacaaaatttagtttattggggcaggggaggggntaaagggcntatttaggtttgnttttttcgttaccttttggttttgccttcatt

SEQ ID NO: 305312 - DNA, 384 bp, Homo Sapiens
  misc_feature (258)..(290): n is a, c, g, or t
ggcacgagacgtgagcaattgtagaatgaacagacttcagggttttggtgttggtatagctttctgtgaatagtgaaggtattaggaggctaatgttaaggcagcaggtgaggtggttttcaggcaacacatctgaactcattaattgatcaagtatttatcagatgctctttcctatatactaattatctccccaaaggaattctttgcagcacaaaagtttaacacttaattatacattttgagttgttctccagnnnnnnnnnnnnnnnnnnnnnnnnnnnnnnnnngaaacagggtcttgttctgtcgcccaggctaggagtgtagtgggtaccatcgcggctcgctgcagccttgaccttacggggcttatgcgatcct

SEQ ID NO: 305313 - DNA, 236 bp, Homo Sapiens
tagtagcataatgagagtagtcctttatctttctctaatgttagtaaatatattctgttagtaggaagttctgaaattgaagggaaaatatatttaaggaaataaaggaattcaatacacccttcaaaagtcaccaaatactgaaaataagtgatgagtccttaaaacctgagtcaaaaaaggtccagttttacagcctgcaattaattcagggctgcgttggcattaaaaaagga

SEQ ID NO: 305314 - DNA, 351 bp, Homo Sapiens
  misc_feature (27)..(27): n is a, c, g, or t
  misc_feature (36)..(36): n is a, c, g, or t
  misc_feature (75)..(76): n is a, c, g, or t
  misc_feature (84)..(84): n is a, c, g, or t
  misc_feature (97)..(207): n is a, c, g, or t
  misc_feature (237)..(237): n is a, c, g, or t
  misc_feature (257)..(257): n is a, c, g, or t
  misc_feature (274)..(274): n is a, c, g, or t
  misc_feature (282)..(282): n is a, c, g, or t
actgtaggctcaacctcccaggctctngggatcctncccctcagccaccggagtagctgggactatgggcacatnncaacacanccagccaatgttnnnnnnnnnnnnnnnnnnnnnnnnnnnnnnnnnnnnnnnnnnnnnnnnnnnnnnnnnnnnnnnnnnnnnnnnnnnnnnnnnnnnnnnnnnnnnnnnnnnnnnnnnnnnnnntgagccacctgtgcctgggctgtgttgttnttaattattgagtagttatnaagagttttttaaaaanatattttnggatacaactgtccttcagatatatgatatacaaatatttttcttcccattccgtaggggtgttccttt

SEQ ID NO: 305315 - DNA, 418 bp, Homo Sapiens
  misc_feature (237)..(279): n is a, c, g, or t
  misc_feature (313)..(313): n is a, c, g, or t
  misc_feature (376)..(376): n is a, c, g, or t
  misc_feature (385)..(385): n is a, c, g, or t
aatgatagtgacatttgtatgtcttcctttgagaatgtttattcagatcttttgcccatataaaaaccagattatttgcttttttgctgttgagttgttttagtcacttgtgtgttctggatactagtcccttgatggatggatagtttgcaaatattttctcccattctacaggttgtcttttcattctgttgtttcctttgctgtgcaggagctttttagtttaataaagtgctnnnnnnnnnnnnnnnnnnnnnnnnnnnnnnnnnnnnnnnnnnnagccataaggatctttgcctgggaccaatgtccnggaaggcgtttttcccttatgtttttctacccagtaggttttataggtttgggggtcttacanttcaagtcnttaaattcagtcccgaggttggaatttttccca

SEQ ID NO: 305316 - DNA, 167 bp, Homo Sapiens
  misc_feature (116)..(116): n is a, c, g, or t
  misc_feature (121)..(121): n is a, c, g, or t
aagtattaggagatacgataaggaaatttccccaagtaaaggaagaactgaatccgcaaaaagaaaagagagtggggttgtatgggaaacccagttaggggggacccctttggggnaaaanttgggtcccaaaataattaggacacccccaaaaaaattaccctggg

SEQ ID NO: 305317 - DNA, 503 bp, Homo Sapiens
  misc_feature (351)..(351): n is a, c, g, or t
  misc_feature (394)..(394): n is a, c, g, or t
  misc_feature (402)..(402): n is a, c, g, or t
  misc_feature (414)..(414): n is a, c, g, or t
  misc_feature (427)..(427): n is a, c, g, or t
  misc_feature (438)..(438): n is a, c, g, or t
  misc_feature (482)..(482): n is a, c, g, or t
gtacttagtaagcatgcttctaattgtggttcccttccacttacctttgtgataggggtaccaaaatctgtttaccctcatctttgctctcttccagaggaacaggagaggtagttgggtcagtgtgccagaaaagcagaagttgagtatgtggagttcatagctgcatgtatgagtgtttgtggggcagggaacttttaatggaaaacatttgtgttgcatcgaaaacagagcgaggcctgggttagagtctgtctgctttgtctgtcagtctgttccctaccagcactagtcactgttctcctggggagtctcagggcatattgtgggtttctttcttgctctttgctnagcccctaaatctttgcccagagttttttgtgttcaaggggtnggcccccntgttgcagtctnggagtaagacttncaaggttgggngaccaatgggctttgaagaaggtacttcagccccacatacggantttggggaccttttaaggtta

SEQ ID NO: 305318 - DNA, 517 bp, Homo Sapiens
  misc_feature (248)..(248): n is a, c, g, or t
  misc_feature (292)..(292): n is a, c, g, or t
  misc_feature (445)..(445): n is a, c, g, or t
ttctatcattccattaaaatgggcaggttatgtgttcttgaactttaataaatactctttttacaaaacacgtgaatgtacttttcttgtcagaaggggaacactgagtctccgctctagatccattaactgtcatactccttccccagacaacacaagtgctttaactgatgatgaacacggtcattcctctccttcaccccctggcagcaagactggctacagagagcttgcactcagctctgcgnttctacgggtgagttttataggtacacaccccatgtggggtgcntgtggtagcttcatgctgcctgcatctggacaggtgaggtaatggccactattgggcctctgtccagattccctctgcagacccatgcacgcactccccgctgtgctgggcagtggcttaacaccagatgggcttgccccctttttcagagancttgccccttcagccaatgccaatgacttggagggcacaaaaggccattgaaatatgggtgcaattttacaa

SEQ ID NO: 305319 - DNA, 544 bp, Homo Sapiens
  misc_feature (417)..(417): n is a, c, g, or t
  misc_feature (450)..(450): n is a, c, g, or t
  misc_feature (461)..(461): n is a, c, g, or t
  misc_feature (468)..(468): n is a, c, g, or t
  misc_feature (487)..(487): n is a, c, g, or t
gtactaaccataatagagcaataacaactgtttactgagtgcttcctataaaactgggtagtttagtaggtgatttacatattctcccaattatttatcatacctatctattcttggaacatgaaattagttgttgatattgatattaaacagctagcaccagaccacatgcgacaaacagccaaggtaggattcagatacatctcaggggaagctgagctgccttttgccaggggtaaggcactgtgctgtttgttaggctcttgctctttcctagggaagagtcggccctggcatgtttttgaagtgggagacacgatccgactcctcttcctggttgcttcccccaacttgttagttccactgtcttctctagatctgttcttaccctaatggttccaaggaggaccccactgncgggcatcacctgttagctcttgggaatcctgnaaaaggcattntttttcncccagagtttctttacttnccctttccccttgtttaaaaacccacttttctcagtgaaggcaggttcttcaggctt

SEQ ID NO: 305320 - DNA, 503 bp, Homo Sapiens
  misc_feature (356)..(356): n is a, c, g, or t
  misc_feature (414)..(414): n is a, c, g, or t
  misc_feature (453)..(453): n is a, c, g, or t
aactaagcctatgaatcagagagagactgcatatttttagttttctctgaaacatttaggattgtgctaaacatgaactctctggataaatgtttgtggtgatggcttgtgacctgtcccagcagctggcccaggctaccatattttcagagcagtgcactgggagagatcctcagaatccctaagtccctcacccctgaaatttggcctgttctaaaatagaatcagtacagtcttagatggctctgaaggaggttgacatttaagctcagctttaaagccagggtataaatgcaaggagaccagaaccgagtattcatctcttgtattcccaccagtatgtagttttggggttnagcagacccagaacggaacatccataaatgtctagctactgtagattccctatctctnggccaacttgggattttctagttcgtagttccatgtttnatttaggcttctttataaatgaattgtgccttcctaggtttcctccctct

SEQ ID NO: 305321 - DNA, 429 bp, Homo Sapiens
  misc_feature (199)..(199): n is a, c, g, or t
  misc_feature (362)..(362): n is a, c, g, or t
  misc_feature (378)..(378): n is a, c, g, or t
tttcggcacggagaattcattctcagatcagcttcccagatttttgccaatatcaattaaaaaaattttttagccaaccacgtactgtgagtaagccaatatcaattagcaaaatctttagtttcttttggtgattcagtatcttccccctggagttttttgatgattcagtaccctcctagatttggcccctggctgncgggggatgtgacttgtcatttaattctggagaaaatgaggggtagggcttataaggagactccttcggggcagggtcattacagggtgtgttacatagggaaatgctagctgctggctagctcttcgctcttgaaaggctcttcctccctcaacttgaaatnggggaagggggaaccncacacgactgaggtcccgacattcttttaggcacatggttttttagggtca

SEQ ID NO: 305322 - DNA, 230 bp, Homo Sapiens
  misc_feature (97)..(142): n is a, c, g, or t
  misc_feature (165)..(165): n is a, c, g, or t
  misc_feature (197)..(197): n is a, c, g, or t
caaagaggagacaccatatatatttttggaatgaatgaaacagaagcttagagtcagagattgtgggtttggatgccaactctgtatcccactgacnnnnnnnnnnnnnnnnnnnnnnnnnnnnnnnnnnnnnnnnnnnnnnatgtacacttccctcacagggtnggctgtgagattaaagtaagaagacacctttngaaatgctagtttgctgcagatttggctagtac

SEQ ID NO: 305323 - DNA, 180 bp, Homo Sapiens
  misc_feature (14)..(14): n is a, c, g, or t
  misc_feature (151)..(151): n is a, c, g, or t
gcagattttaagantttgttgaagctttaaatttgaaagaaacctagagattattcagacaacagcatatcactgtaggaattccttctgtttcttaattttattctgattgttatatcctggcaatgtaagttgtacaagaaaggtcttnctttatcactttggggaaaatgggctcaa

SEQ ID NO: 305324 - DNA, 412 bp, Homo Sapiens
  misc_feature (121)..(121): n is a, c, g, or t
  misc_feature (187)..(187): n is a, c, g, or t
  misc_feature (224)..(224): n is a, c, g, or t
  misc_feature (283)..(283): n is a, c, g, or t
ggcacgagctgcgaagttatttattcaaatatcatcccaattaagagagaatcagaagtatcagaaatttgttggtttatattcacatgattggttaataacttaggggacaaacggtgtngtctatagtctgtctttggagaattcaaatacttttttggggggtttcaccagggcacaatccttnggaagtgcatgagaccaaatgccattaaggaatcagnaaggcagggctgcctctctttagtccaggggtcagggtgcccttcacatagccaagctnggggacaacgggggacttgaaatggaaactcccaagggtccaaaactatacccttaaccaaatgctttgttggagcacccttttaagtttggccaggcttttttcccccatccaatatttccaggcgtt

SEQ ID NO: 305325 - DNA, 346 bp, Homo Sapiens
gctcaggaaggaacatggcctgagcacggaggtgaagggtggactgagggccctgggaagaccatctgcagtgacagtggggaggaggctagcgaggctctggacagttgcagtggggagccacaggaaccaccaagtgagggagggaccgaacaaaagccagtcatggtagaggctaggtggaaagcagggagcctcacaccctactggccagaagatcctcttagcgagcctctaacaggaagggtagcttctcttcaccctttgccagcaccaggggtctagaccaccggttcccttttgccatgttcccctcctccctccttttcctggcgttcattcccat

SEQ ID NO: 305326 - DNA, 413 bp, Homo Sapiens
  misc_feature (317)..(317): n is a, c, g, or t
  misc_feature (345)..(345): n is a, c, g, or t
  misc_feature (376)..(376): n is a, c, g, or t
  misc_feature (390)..(390): n is a, c, g, or t
cgggcagtttctagaacaagttttcctttttcagtggttgtaagcagtgaaatacctcatgtattacaagatagatattaccgttatgatagaataagatttcatctttcacagaaagtgatcagctgatatatgtgtcagttaaaatgtttatcaattaataggtatttaagtgacaaattgttaatgttgaccattgttcctcctttaagatccagtaacccaaaccaaatcggtaaccattgaaaggatgatatttaacagttaagggtgggccagccatagggccgtttcatttccctttcaacaaagggganaaaaaattgcttcctgggcacaactttnttaactgggcttccttttacctttattaccngttccgtgggaggngttttttggacctaccttttacc

SEQ ID NO: 305327 - DNA, 318 bp, Homo Sapiens
actacatttcaaatgcttagacgcccctggtggctacaagatatctattggacagtgcacatgtcgaacgtttctattattgccaaaagttctactgacagcattgatctagagtgccaatttacaaatttgtggtgggtgagtacatctttctggtaaccatattacttgtgcctgctatctaggacaccgtatttcaagatactttggaaatgtaagtagtcttcatgatattgttgatttcttagtgaaccatgaaggagctggaaaggtttctcagatatttttctcagttttggggaaatctaaaacggactg

SEQ ID NO: 305328 - DNA, 380 bp, Homo Sapiens
  misc_feature (222)..(222): n is a, c, g, or t
  misc_feature (265)..(265): n is a, c, g, or t
cacaagttaacaccaaagtccataataccaaagtgagtttattagtatttgcctcttttatgcctttttgtgcattgcattaagattctctcagaagaacggagccaagagttcaggagcaaatgatgtgaaggaagtgctcccaggggagagcagtatggggtgaggggtatgaaacaggacacggaaatgaaaggagccaaacaagggtgcgctttcagntgaaaccacagcttctgagtagcccgtggggagctgtagcgcnacaggcaaggagctgggcttctggggttcctgtatcagtgagcagctgcagggattgagggtgtactggccgaggctgttccagtgctcgagggcaagtctgcaaaggtcatggt

SEQ ID NO: 305329 - DNA, 373 bp, Homo Sapiens
  misc_feature (324)..(324): n is a, c, g, or t
  misc_feature (326)..(326): n is a, c, g, or t
  misc_feature (352)..(352): n is a, c, g, or t
ttggaaatgttcttcagtacatatttaggctatttataagttttctaagaccattcttttaaagtcacactgtatcttcaaaagcccactttaaacaaaccctcctattatttataaaacacactaagacttacgtaaacaccaaacaaataaatacattgctgattctagaatatgtataatagaatatagtctacaattgcttgtattgatgatccacataaagtcacaggaatttcttaaatgatagaaggttaaagtagcactttttaaggcaatgtatgtactattaagttttcatgcaaatcactgattacctctccngnggcacaatggtaatttttggttaggnaatggattttcaactctaggt

SEQ ID NO: 305330 - DNA, 230 bp, Homo Sapiens
  misc_feature (45)..(45): n is a, c, g, or t
  misc_feature (64)..(64): n is a, c, g, or t
  misc_feature (85)..(85): n is a, c, g, or t
  misc_feature (188)..(188): n is a, c, g, or t
  misc_feature (200)..(200): n is a, c, g, or t
tcagctcttctacagactgtccttgtaagcttcgggctgcgaaantggatgggcaaaaagcttngagagaaaggatcctaaggtngaagggacggggccttttgagtagtatcacatgagataatgccaaaaatgcattttataaccccctctgtgctaatgtcattgtagctattattaatgagccngggactgaactnagacctctcaatgacagcgagcagataaga

SEQ ID NO: 305331 - DNA, 439 bp, Homo Sapiens
  misc_feature (423)..(423): n is a, c, g, or t
aagttcccattccaaactatctttctcaagtttaaaattccaccaacctctagggcaggggcaaaatgctgccagtctttttgctaaagtataacaagagtgaccttttctccagttcccaagaagtttgtcatctccttccgagaacacctcagcttggacttcattgtccttatcactgtcaccattttggtaaaagccattcaacaagtctttagggagttccaaactttcccacctcttcctgtcttctgagcccccaagtctctagaaagttccaaactttccgacattttcctgtcttcttctgagccctctaaactgttctaacctctgcctgttaaccagtttccaaagttggctttccacatttttcagggtattccttatgggcaggcaccccactttccagtaaccaatttnactgtatttaggtttg

SEQ ID NO: 305332 - DNA, 303 bp, Homo Sapiens
  misc_feature (235)..(235): n is a, c, g, or t
  misc_feature (248)..(248): n is a, c, g, or t
  misc_feature (277)..(277): n is a, c, g, or t
tggctcccacagcacccagttcctcaaagccaggttctgacatataagtgagctcagagaccagcagcttccctcagcacctcatctgagtagttttgtagcagagtgacacctctcatgaaaagcctttcagcacgcttccccagagaagcacatcagcaattactctgccattcagtgagccacaactgagccctttctaaccagggtatgaatctcagccctgggggtggtnggtaggggaaatnggggggacttcattctttgggacacactntcttaggcccctaaggggtaggtggc

SEQ ID NO: 305333 - DNA, 430 bp, Homo Sapiens
  misc_feature (366)..(366): n is a, c, g, or t
gcaggacttttcttaagttacaaataagaccatcttaaactctttgctgtaatctgtaaggctagacttgacctggtcccagacattgtctctagcctcacctccttagctccctgtcctcattcttgccttctttgattccctctaaaacacaagcagcgattttccacttggattttttgcacccactgcacaatgcagcctggctctttccctcccttgttcctgtatctttttcctttaagtcttagaccggggcttctctggcttctctactaaaggagccccctctgagaagtgagcttccaaaaatattgtccctactgtcattcttcatcaacaatgggatatgagagcctatttttnccatatccctggcaacaagggagtatttccaaagttgttttcatcctggccagtttggattagg

SEQ ID NO: 305334 - DNA, 421 bp, Homo Sapiens
  misc_feature (353)..(353): n is a, c, g, or t
  misc_feature (361)..(361): n is a, c, g, or t
  misc_feature (380)..(380): n is a, c, g, or t
  misc_feature (387)..(387): n is a, c, g, or t
  misc_feature (395)..(395): n is a, c, g, or t
agttctaaaagactccctctaaaactgatgatacacctgcttgtataacaactaaggcaagctacattttgttcccaagggtggcttctaaatctctataaaactctccactggaatttattgttttagctcatgaaaactggatataaagagtaaaggtgtggtaggtgtaatttacatattagaccattcaatggagatacaaaattccatataaaaagcttaaatggggaagaaaaagttctaggaatgttcctcacttacattttatatgggtgacggggatactattacactcactatgggggcctatggtctggaggcataataggtggtggctttctttttacagngttggggnagggtacaaccaaccaacnggggggngtgaggtngatggcagagggggtcttattaattc

SEQ ID NO: 305335 - DNA, 158 bp, Homo Sapiens
  misc_feature (15)..(15): n is a, c, g, or t
  misc_feature (29)..(29): n is a, c, g, or t
  misc_feature (62)..(62): n is a, c, g, or t
  misc_feature (65)..(65): n is a, c, g, or t
cagcatggaacaaancgtagtaaaaaagnaaattgtgaaatgaaatgtacgggcccccaatnttncagttcttgagaattaaggagacttaggtcatttaaacatggatgacagaggagtaggttggggaaaggactttttttaaattttagagccaa

SEQ ID NO: 305336 - DNA, 475 bp, Homo Sapiens
tagactctggggtacatgtgcgggtttgttacataggtaaattcttgtcatgggggtgtgtcgtacagattatttcaccacccaggtactaagcctagtacccaataattattttttccgctcctctccctcctcccagcttccaccctcaaggaggccccagtatttgctgttcccttttttgtgctcatgagtcctcatcattcagctcccacgtataagtgggaacacgtggcattttctgttcctgcattagtttgctaaaaataatgggtctccagctccatccatgggtcctgcaaagacaagatcttgttcttttttctgggctgcatagtattcccatggatggtatacatacccaccattttcttttaacccaatctgttatcatggggccctttaggattggattctatggtctttggctattgtggaaaggtgctggggaatggaacaatccatgtgtgtggca

SEQ ID NO: 305337 - DNA, 448 bp, Homo Sapiens
  misc_feature (316)..(316): n is a, c, g, or t
  misc_feature (372)..(372): n is a, c, g, or t
  misc_feature (377)..(377): n is a, c, g, or t
  misc_feature (407)..(407): n is a, c, g, or t
gtacatgtgcagatttgttgtataggtgaactcgtgtcatgggggtttgctgtcagattatttcatccacaggtatgaagcccagtacccattagtcattttttctgatcctctccctcctcctactctccaccttccaacaggccccagtgtgtgttgttcccctctatgtgtccatgtcttcttatcatctaggtcccacttataagtgagaacatgtgggtgtttggggaaacccccctccataatgctccctttgattctgtgacagagggaagccagatcatgaggctgcaaggttgacaaagggagaggnagggaaggaaagcttaagggaaagaggaaggaaaggcatggggaaccaagcccccnggggngtagggaaggggccaaacaggaaggggctnagtaggggtccagggtggcctgagtatggaattttgaggag

SEQ ID NO: 305338 - DNA, 135 bp, Homo Sapiens
  misc_feature (109)..(109): n is a, c, g, or t
attgtgataaacagcttcactctctgtttctcactacaagcacttcccaggggagagaaatgatcctggaaatgctctcgggcgatggggcaccaatgggggagtggcnggggaaagcagccaattaggggggag

SEQ ID NO: 305339 - DNA, 301 bp, Homo Sapiens
  misc_feature (63)..(63): n is a, c, g, or t
  misc_feature (207)..(207): n is a, c, g, or t
  misc_feature (215)..(215): n is a, c, g, or t
  misc_feature (221)..(221): n is a, c, g, or t
  misc_feature (282)..(282): n is a, c, g, or t
agtctttaatctgtatgacttctaatggtgcggagacatgggcactcacccacattagtggcnaaggaaattgatacaactgttttgaagagcaattttgcaattattatcaaaatttgtaaaagtacacagtcttttacactacaattccatttgaagtattcatagcaaagaaacagggaaaacagagggtaaaaaaatatacanggaaccancccttnctattcatggaaaaatgggggaaattaacccgttaaatgggccccaccataccaatggggnatacctagggaggccaatt

SEQ ID NO: 305340 - DNA, 440 bp, Homo Sapiens
  misc_feature (42)..(318): n is a, c, g, or t
  misc_feature (331)..(369): n is a, c, g, or t
  misc_feature (405)..(405): n is a, c, g, or t
ccaatacagtaacctctacccagatgttgcatttaaaatttnnnnnnnnnnnnnnnnnnnnnnnnnnnnnnnnnnnnnnnnnnnnnnnnnnnnnnnnnnnnnnnnnnnnnnnnnnnnnnnnnnnnnnnnnnnnnnnnnnnnnnnnnnnnnnnnnnnnnnnnnnnnnnnnnnnnnnnnnnnnnnnnnnnnnnnnnnnnnnnnnnnnnnnnnnnnnnnnnnnnnnnnnnnnnnnnnnnnnnnnnnnnnnnnnnnnnnnnnnnnnnnnnnnnnnnnnnnnnnnnnnnnnnnnnnnnnnnnnnnnnnnnnnnnnnnnnnnnnacccatttctccnnnnnnnnnnnnnnnnnnnnnnnnnnnnnnnnnnnnnnngccatttattctcactcacacttacccaccatctcnaagcgctttaccagtccacggtgacctggtgggaa

SEQ ID NO: 305341 - DNA, 511 bp, Homo Sapiens
  misc_feature (50)..(50): n is a, c, g, or t
  misc_feature (457)..(457): n is a, c, g, or t
taggggatagggttaaagttcaggttgactatttctgagagactctaacntttctcttcaagagaaaaaaggtcccaagtattaatagattcagagttaatgttactaaatctgaaagcttataatagaaactctagcactaaaatctgagtttgacatatccacagcagtagggtttgtgagaaaaccactctactgatatcctaaagagataacacttgtatagcaaccatatcctaaccattgcagaatgggtggcctgtgacagaaagccaggggactcacttgggtttcccttgtgcacccagtaagggagctgcagaggaaaatgtagggaaagctggaaaggacaggaatggacctttccccttccctggagggaggctgctccaatcctatccacccaaagggtccaaaacatctggggtttacaggggctgttagggattaccccctnggaccagggccataggtcacccccccacttcaaaaacagctctttacacctttt

SEQ ID NO: 305342 - DNA, 413 bp, Homo Sapiens
  misc_feature (158)..(158): n is a, c, g, or t
  misc_feature (178)..(178): n is a, c, g, or t
  misc_feature (307)..(307): n is a, c, g, or t
  misc_feature (331)..(331): n is a, c, g, or t
  misc_feature (339)..(339): n is a, c, g, or t
  misc_feature (352)..(352): n is a, c, g, or t
  misc_feature (401)..(401): n is a, c, g, or t
cctcagcctcctaactagctggtattacaggcacgagcaccacgcctggctaatttttttatttgttgcagagacagggtttcaccatgttgcccaggatggtcttgaactcctaggctcaagtgatgtgctcatctcagcctcccaaaatgctgganttacaggcatgagtcaccgnatccagcctctaaatttctttaataagccttttcacagtttagggaaacaatttttcattaatatatatatataggtaaatgtatttaaaaactaccccaccatacttaatttggtatccaaaattcantgagggttgcacccattccccttnttgtcatncccaggctttctngggcctcagggcccgttctttaccttatttttcggggggtaaccaaatnctttcgggggcg

SEQ ID NO: 305343 - DNA, 372 bp, Homo Sapiens
  misc_feature (33)..(33): n is a, c, g, or t
  misc_feature (43)..(43): n is a, c, g, or t
  misc_feature (51)..(51): n is a, c, g, or t
  misc_feature (132)..(133): n is a, c, g, or t
  misc_feature (200)..(200): n is a, c, g, or t
  misc_feature (208)..(208): n is a, c, g, or t
  misc_feature (312)..(312): n is a, c, g, or t
  misc_feature (330)..(330): n is a, c, g, or t
gaattacataaaagaattagctctaatcaagantttatatttnactgaatngtgaagaaatcaattatttaaatgccatggatctccaggctttcctaacccccaaggctagactttaatgaaaacttcatnnggtaggtaaatcatagttaataggtgggactgcaaatggtatatgcagccatgttagcagactgttncctaagcnttaaagcacctgtttaagtcacctatagccaaataatagaaatacacttttagaatcaagactaatatcttaaccgtaattccttctttgatttttctatcaantggactagttatgaggantgggaagggataggatcgagacattttaaataaggtattttt

SEQ ID NO: 305344 - DNA, 211 bp, Homo Sapiens
  misc_feature (192)..(192): n is a, c, g, or t
atgtaccactgtgtgcagcttaaaggcaaactctgaagatgacatggtggtttttttgtccatgtagccggtagagtgatgctgctgtcacctggagacacaacaggaggaaaaagtgtgttgggtctgttgggtcatgtgatgttatccagcagggagttgtaacttcaagcctagaattgagaagaaatnccaaagaggaggtaaaggt

SEQ ID NO: 305345 - DNA, 360 bp, Homo Sapiens
  misc_feature (143)..(143): n is a, c, g, or t
  misc_feature (214)..(214): n is a, c, g, or t
  misc_feature (248)..(248): n is a, c, g, or t
  misc_feature (341)..(341): n is a, c, g, or t
tctgaagaggtaattctttaaaacaaattatagggcttaactctgagccaaatttttataactgcttcaatcatgcctcatgccatgctcacgggcactcatgatcagattaaccaaaccgaaatgcctatattaaccaacgnctcctaggggtgaggaatcttggtagaagaaaaagacaaagagcacaatatggcattgaccatgttcattnctggtgtacaactgcataggcagatttcaaattncaaggtttctccaaggtccaaataccttcaccctcctcacacatgcaaaaccttactaggcacagggaggtttttaggggaacttaaggggangggtttaaagtttcaatca

SEQ ID NO: 305346 - DNA, 344 bp, Homo Sapiens
  misc_feature (109)..(109): n is a, c, g, or t
  misc_feature (242)..(242): n is a, c, g, or t
  misc_feature (253)..(253): n is a, c, g, or t
  misc_feature (264)..(264): n is a, c, g, or t
  misc_feature (285)..(285): n is a, c, g, or t
cttatgtgacatctctaaagtttacaaatacaacggcaattgcgaacacatccaacaaccagaacaatctaccggaggactaaatccaaaaatctaatataggaccagncccaaactaccacaataccagtctattattaatcagcgaaacaaatggagcccttgaaaactaacagtcactagcggattattttaaattaggcttaagggagtacaacacaacaatcatgcctgtaacacgnaaactaaagtntctacgtgccnaaacggtcgatagggctacgnaacagcctttttaagcttccctcttcctcggggctaggggttggcaagcggcctctgct

SEQ ID NO: 305347 - DNA, 381 bp, Homo Sapiens
agagggaaagactgcagtacttctagaaagttgtggacttctaagaaagagccaggcttccatctcactatcccttgatcattatctctgaagtccctacctgcacttccctgattgccctgtagcaacaccagcatggtgggaattggagggaaagattgtggaaaatccctaaagggtcattgttcatgacgttattttgaattgtaaaattgtgagccactcacatttcaattacaaaaagaacagaactcttaatcacgttgtgaagattaatttcttgccattttctgggattaggcacagaagcttgtatcaatgaaggagtatttagggaggggaataggggggaaaattgtatttttctgtttcaaactctct

SEQ ID NO: 305348 - DNA, 269 bp, Homo Sapiens
  misc_feature (230)..(230): n is a, c, g, or t
gggttccttccctaggaagagcactcggaataacctgctggaaatgggattccttcgctaggaagagcactcggaataacctgctggaaatgggattccttcgctaggaagagcactcggaataacctgctggaaatgggattccttccctaggaagagcactcggaataacctgctggaaatgagattccttccctaggaagagcactcggaataacctgctggaaatnggattccttcgctaggaagagcactcggaataacctgct

SEQ ID NO: 305349 - DNA, 514 bp, Homo Sapiens
  misc_feature (312)..(312): n is a, c, g, or t
  misc_feature (387)..(387): n is a, c, g, or t
  misc_feature (397)..(397): n is a, c, g, or t
  misc_feature (423)..(423): n is a, c, g, or t
  misc_feature (473)..(473): n is a, c, g, or t
  misc_feature (484)..(484): n is a, c, g, or t
  misc_feature (504)..(504): n is a, c, g, or t
agagtttaattctcaaaataaggtactttatgttaacatgaagaagtttagcaacaatttcattatctggaaagactgaattatataaagtatgtggaatgagggtaaaaaagagcttaaagaaaatagctccctctttgattttggtatttcctagccaagtactttgccaccttacctgtttttactatctatctggcattttgatgaacttttccccagctaaatcgacgaatcggctctcatgttgcatcccagtgtagcgtgggtgttgcctgctgctctgggagtcctttgtgactcacccctggngattaggggtccacattgggtgggtcaaggtgtgtattgggatggggggaacactggggggaaggaaaactaacntttttcaccngtttactcttttctttctgtttcccnttagggactaacttgttttattattaaagggggttttgaaattttgggantttaaaaaacnccaattgactttaaccaaantctttcccgg

SEQ ID NO: 305350 - DNA, 413 bp, Homo Sapiens
  misc_feature (349)..(349): n is a, c, g, or t
  misc_feature (374)..(374): n is a, c, g, or t
  misc_feature (396)..(396): n is a, c, g, or t
ttcaatacctgcctatccctttcacctcacaacagactgactgtcttgctccaacccttagcagttcccaatgtcatcatcaaggaccatcctcaccagcagtgccacaatattcaatgttcaaggcattatgtagacacaaggctgcatggttaggaagtagtaactgctcaaacaatattaaataaagaaatgtatgaatgacctgcatgacttaacctgaaatcactgagagaaaagaagccagaaactatgcttctggattgccctgatcacaactaggaagttcctgccagagtgcagtgctttgaaatcacgtatgggggttacaacctcaggaaaacaagantcagggttgggtgtgggcttcaagncttgttattccccagcactttngggggaggggcccaaag

SEQ ID NO: 305351 - DNA, 441 bp, Homo Sapiens
  misc_feature (289)..(289): n is a, c, g, or t
  misc_feature (311)..(311): n is a, c, g, or t
  misc_feature (384)..(384): n is a, c, g, or t
  misc_feature (399)..(399): n is a, c, g, or t
  misc_feature (407)..(407): n is a, c, g, or t
  misc_feature (423)..(423): n is a, c, g, or t
atttagactgttacattttatatagtgtggtataaaatggggcatggatttatactaagtccatggagttcagtggaaggggaatgatttaaaaaaagttgtggttttctaaataatgtggcttgaaaaataggtgtaacaggacttggtcagaaacgcagaggctgttcaagtttagctccccaccagatggaaaataggttaaattctgtaaagatttaactttaaccacaagagggcacaactggagagcacaatttttttggtactgcagtaaaattgattaccncttgagaagtgttctttttaancagctattaacaataggagttgagtatttttcacccctgggtttgaaaaagtgccccgagggccaccactggncccaccatctgttantccccacnattttgggggcccctnaggtgggggagagcccct

SEQ ID NO: 305352 - DNA, 368 bp, Homo Sapiens
  misc_feature (274)..(274): n is a, c, g, or t
  misc_feature (312)..(312): n is a, c, g, or t
  misc_feature (327)..(327): n is a, c, g, or t
  misc_feature (350)..(350): n is a, c, g, or t
gaactaccaatatcaaatataggtataaagaaattgtcagagagaggctacagagagtatagttcatcacagccgaccttctttatttctgtgagaagagaaattggtggacaattggcaactgttataatgggaaaataaacatcctgtcaactgtcagtggttaaaaggtcaatttccagccctagtggaagacagctataagtctgtctgcgggagaatggatatttcagtaagtactaagttaaaaacacattttaacaacttaattccnaaaatcgctcttaaaggctgtggttcttgccgcttacnatacttgaggctacnatcgtaaagggcacttgtccggntgttgggcctgtgacttc

SEQ ID NO: 305353 - DNA, 135 bp, Homo Sapiens
  misc_feature (120)..(120): n is a, c, g, or t
atgccctgcctagacaccactttaaaatggctgtttcatgttacagatttaacttgggggaggccagcctaatgaaaatttattattttctgtgaggtcactgtatttataactcagggnactgggctaccgagg

SEQ ID NO: 305354 - DNA, 311 bp, Homo Sapiens
  misc_feature (145)..(189): n is a, c, g, or t
gctcaaaccatcctcccacctcaacctcccaagtagctgggaccacaagtgcccagcaccacacttggctaaatttttttgtatatttttggtagagacagggtttcaccatgttgtccaggctagtcctgaactcctgggattnnnnnnnnnnnnnnnnnnnnnnnnnnnnnnnnnnnnnnnnnnnnngtgtaagtcaccacacctgggcccccaaatttgagatgtctgtacatgtcaaattaccaagaagctaggtatagcccaactcatatatcatttgatactgtgtcaaagtttaactactaggg

SEQ ID NO: 305355 - DNA, 394 bp, Homo Sapiens
cttaaaattcctgcactaaaagactgcaccatactgcactccgcaaaacgtgctgatggcgccaattacaagcccccagccgaatgctccagcccccaccattcgggcagatttatgcggactcttgccgacgttattacaagtcagagtttattgggaaattgttacattatgcggagtgtctaacaaattgcttatgctgctataattggattacaacagccgcttgctcccaccggtaagattaggcaagtaggactcctgccgatctctgagcgttcgggtaaattttatttgccttgcctctctctttcctaacaacatgcctctctccctgccagctgtctgctgaaaaggcacagcttgttccttgggcctaacaatgcaattacag

SEQ ID NO: 305356 - DNA, 333 bp, Homo Sapiens
  misc_feature (196)..(196): n is a, c, g, or t
  misc_feature (199)..(199): n is a, c, g, or t
  misc_feature (201)..(201): n is a, c, g, or t
  misc_feature (236)..(236): n is a, c, g, or t
  misc_feature (244)..(244): n is a, c, g, or t
  misc_feature (264)..(264): n is a, c, g, or t
  misc_feature (277)..(277): n is a, c, g, or t
  misc_feature (284)..(284): n is a, c, g, or t
  misc_feature (322)..(322): n is a, c, g, or t
tgaaatatctcacatacactataaaatagcaatttccagggtggaaatggaactcattataaaacgtcagagagtactgctctaattcgacacatttcttttctgtctcttcctcaagtagaaaatagcacttgagctggtgatttttatttctccttttggcacatgtgccacacactgccatcatttctcatcnggntnctgaggctatgtgagcttttccgtgtacttagggnaatttctngatatttctttgtgctgccnttgtgtatatggntcccctncacatctggggttttcatctcgcggaggggcatcccgnctgcaatgtct

SEQ ID NO: 305357 - DNA, 311 bp, Homo Sapiens
  misc_feature (81)..(158): n is a, c, g, or t
  misc_feature (288)..(288): n is a, c, g, or t
ctgtcagtctttcccaactaaaccgtgagttccagtatgtctggcagcacgtctgtcttgttcttggtgtattcccattannnnnnnnnnnnnnnnnnnnnnnnnnnnnnnnnnnnnnnnnnnnnnnnnnnnnnnnnnnnnnnnnnnnnnnnnnnnnnaaatggaggacactcaagcctcatgttttctctttctgacacatacctgtgctccctacgaccccaccctcaccatcacacccttaatagtggagacttagtgtgggtactgggctttttcaaacagggnattatgtgggccctaggacaggg

SEQ ID NO: 305358 - DNA, 219 bp, Homo Sapiens
  misc_feature (55)..(124): n is a, c, g, or t
  misc_feature (152)..(152): n is a, c, g, or t
  misc_feature (173)..(173): n is a, c, g, or t
aagctgaatctaaaatgtttatgacaaataatctataacagccaaataactttgnnnnnnnnnnnnnnnnnnnnnnnnnnnnnnnnnnnnnnnnnnnnnnnnnnnnnnnnnnnnnnnnnnnnnntgtagtaatgccaactaagatagacaantcagagagtccagaattaganccacacatctatgataaatggtcaactgatttttcataaagtgaaa

SEQ ID NO: 305359 - DNA, 167 bp, Homo Sapiens
  misc_feature (68)..(68): n is a, c, g, or t
  misc_feature (113)..(113): n is a, c, g, or t
  misc_feature (122)..(122): n is a, c, g, or t
ataatacaaatggttcataattcatcatttctgagcaatacatgcctgggatctagctagatcctttncacagttttccaataatgattttatgtaccctgcttgttataaangaggaagcngagggccagagaggttgggacattcctagggttgcacagccggtg

SEQ ID NO: 305360 - DNA, 344 bp, Homo Sapiens
  misc_feature (157)..(157): n is a, c, g, or t
  misc_feature (258)..(258): n is a, c, g, or t
  misc_feature (270)..(270): n is a, c, g, or t
  misc_feature (311)..(311): n is a, c, g, or t
ttccaaatatttaggggaaacttgataataggcttttactttgcagtggtataaactgtcctagaagaagactgactgctgcattaggaataaaagagaacacaaaagtcgaaaaaaggaagtaagcatccagactgagggtaataatggtgaaganataaaaagacctatataagaaaagcttgtatgtattgatctttaaggtcataacagtaacctagcaacaggagtgagtctgggaaaataaggctgtagaantactacacagantttggaaactattattaattggggtatctgtggaatcagangctttctttcatctttacatttattagcccttt

SEQ ID NO: 305361 - DNA, 149 bp, Homo Sapiens
tgaaaccaaggatgcagtgtttgtttaaaaatgcactggctgatgaaattttccactgcttggcatgttggaggaggagctgtcaggaaagggcaagccggcacacaaaatgctctgcctttcacgctaacagttcacttattactgat

SEQ ID NO: 305362 - DNA, 446 bp, Homo Sapiens
  misc_feature (179)..(179): n is a, c, g, or t
  misc_feature (210)..(210): n is a, c, g, or t
  misc_feature (284)..(284): n is a, c, g, or t
  misc_feature (325)..(325): n is a, c, g, or t
  misc_feature (332)..(332): n is a, c, g, or t
  misc_feature (339)..(339): n is a, c, g, or t
  misc_feature (352)..(352): n is a, c, g, or t
  misc_feature (372)..(372): n is a, c, g, or t
  misc_feature (385)..(385): n is a, c, g, or t
  misc_feature (414)..(414): n is a, c, g, or t
  misc_feature (423)..(423): n is a, c, g, or t
ttatcagacagacattctgaatgtatagaaatcttacgtttaagtgagttctccaggatgttcaaatggtggctcctacacacattccatctaaacactgtgaccacaggaccccaggtggccagcaccagtggcagggctggcctcaaggcagtggccaggcattggctttgtaggtntggacgaggatgcccatggcctaggaaggtntccaaggctggccggccaggggacttcaccacacttgcaagagcctcccaacagcgagcaaccccaggggcttncaggccttcgcgccccatcttcccagcttcaactgggggtnttcctantttcttngggggtgccattnttcccattcaaggggctttnttggggaaccccnaaggcccgttgattgaaggattttttgantttaaccanggattgattggaacaacaggggg

SEQ ID NO: 305363 - DNA, 117 bp, Homo Sapiens
tttttacctttttgagacagggtcatgttctgactctcaggcttgagttcagtgatgcgatcccagcccactgcaacctcaacctcctgggctcaagcagtcatcccacaccagcct

SEQ ID NO: 305364 - DNA, 218 bp, Homo Sapiens
  misc_feature (196)..(196): n is a, c, g, or t
atgagccacttgcacacggcctagtctaataactttttacacatactaggggaaaccaaaatgtgtgtggtgactcactttcttgctaggattcactttactgcagtgggtctggggaacccaaaccccacaggcatccccactggtacacacaggtacccacggggaattaacccaggtgatgaagggggctttngggacaggggtgcttgctcttt

SEQ ID NO: 305365 - DNA, 314 bp, Homo Sapiens
  misc_feature (143)..(143): n is a, c, g, or t
  misc_feature (185)..(185): n is a, c, g, or t
  misc_feature (259)..(259): n is a, c, g, or t
tcaaggctaagtctgttgctcctttggcttgcatattggaagggcctgggactctattcagccttgcttggctaagtgaatatggatctcagtcttggaatggttcacattctgttgatcactaactgctatgaacaattatntgagcaagttctaaggccacatgacatcaggtagagttgttnagaatctagaagaaaaacctaccagtgaagcatcagggaagcagatccagccacagcagatgctacacacttgncatatctctgtctgctgggccagcacctatttccatcgtgttgggatctgggaag

SEQ ID NO: 305366 - DNA, 392 bp, Homo Sapiens
  misc_feature (74)..(74): n is a, c, g, or t
  misc_feature (90)..(132): n is a, c, g, or t
  misc_feature (225)..(225): n is a, c, g, or t
  misc_feature (310)..(310): n is a, c, g, or t
  misc_feature (346)..(346): n is a, c, g, or t
  misc_feature (371)..(371): n is a, c, g, or t
  misc_feature (381)..(381): n is a, c, g, or t
ttaatcacagggaagttctttaaagtattcctttgcctagcctcactcctgacccagaggtgaggcacagacantttttccctcactgtnnnnnnnnnnnnnnnnnnnnnnnnnnnnnnnnnnnnnnnnnnnccctacaggaaaagaaaaacaaagacctatccccagggggttcccctttgagccccttgaatgccaaagccccaatatccctgtgaacagctngaggccacagccagctgagctgtgacagacactgctctttgcctgccagcatccgttcttctcatctgcctcactaacaagaatntgggattttgtccaggggacagcagttcgccccaanggttttccaggattacccaccccanctaggtggtnacggtgacctg

SEQ ID NO: 305367 - DNA, 146 bp, Homo Sapiens
gcgggggagtccagcccacacagaaatcatcgggaaaatgtgaacgctgcaggcctcccaccgtagtcaaagctgagtccctcatgagtcctgttagttcgttcacttgacagacacatctttgagcccctcctgccaggcgcaaa

SEQ ID NO: 305368 - DNA, 391 bp, Homo Sapiens
tgacttcaataccctggaagaatatatgataaatgtattcagattctattagttttatttgtaagcagattctaaacaaagaggatgaatttgggcacatatacacatgcacaaatgaaatggttcaacatctaaatgatatgacacaaaattaccactatgagaatcaagaggctactcttatgcaagcaacaaacttttacttatgatttcaaacatacagtttaattttctgttaaaactgttttaaaaaacagtactagggttcagttttctagtctcggcatggaactaatgccaggggacctattttgaatttagggaaagagacaaaatggtgtgatttcgtgcttcatttacatcatggtttttttggagggttaggtggatt

SEQ ID NO: 305369 - DNA, 301 bp, Homo Sapiens
  misc_feature (86)..(86): n is a, c, g, or t
  misc_feature (195)..(196): n is a, c, g, or t
  misc_feature (204)..(204): n is a, c, g, or t
  misc_feature (227)..(227): n is a, c, g, or t
  misc_feature (264)..(264): n is a, c, g, or t
  misc_feature (274)..(274): n is a, c, g, or t
tacataagaaagagttcagccataaactgtgatgttgacatccatgccaatatccataattactgttaataaaatataaagcacanaacagatatgacaatataatacttcagttgtgcaggatatgcaacagacacaattcctaagtgctggtatgaggcaattaaatcatgcacttatgcaaaatgttagggnnaaaaattntaattacagaattgcttgatgtncttttagtttgtattatgttttgtcagcttattaganacacaagatnaacagtcaatgcaaataatactagcag

SEQ ID NO: 305370 - DNA, 441 bp, Homo Sapiens
  misc_feature (192)..(192): n is a, c, g, or t
  misc_feature (194)..(194): n is a, c, g, or t
  misc_feature (369)..(369): n is a, c, g, or t
  misc_feature (377)..(377): n is a, c, g, or t
  misc_feature (409)..(409): n is a, c, g, or t
tgagtgagtagaaggatgagacaaaagcatccattgaatccacatataccaagcgtctacttagcacgtggtaaattgcctggcctggccccactagatgttcaagaaatatttatgaaccaactacttttagctttgaccctgtactagtcactgatgacgcataagtaaataatataggtagtgcttgcntncaaacaacaacattttaggtagttaaagggtgtgcaatggaatgctgttcataccccctccctttctcctgcttgtttgcagctctactagggaagtcataatttgtattgttgttgttaatgtcagaggatgcatttttaaatagaagagcaaatatgcctcttgtaggcgggngaaaggtncccctgggcatttattttagggcaagtggggnttttaactttcagagggcagcttgatgtttct

SEQ ID NO: 305371 - DNA, 227 bp, Homo Sapiens
ggtgttagtggcttggttggccagcagcttgcttttactgcaggaccctcctgggcagaggagaccctccagggaaatacacactattttatgtgctggttttgggcctaacgcctcatgggcattcttagccctgggagaccagtgtatgagctgggattgcctcacactaagaatagcaggaacccctagaagtctagggccattgtggctttggggagcccagg

SEQ ID NO: 305372 - DNA, 203 bp, Homo Sapiens
ttgaatggaatggacttaaagtctttggacttgggagaattaggacagatctgtttccccgttggtaaagtaaaggttgggcctgatgatctcagaaactcaggaagagtgatggtcggccccagggtcgagagtgagttactgccaggtccagggctgtccctgtgttctggctcccagaccacagtgtttcttcctgaagc

SEQ ID NO: 305373 - DNA, 527 bp, Homo Sapiens
  misc_feature (151)..(160): n is a, c, g, or t
  misc_feature (348)..(348): n is a, c, g, or t
  misc_feature (422)..(422): n is a, c, g, or t
  misc_feature (445)..(445): n is a, c, g, or t
  misc_feature (466)..(466): n is a, c, g, or t
  misc_feature (482)..(482): n is a, c, g, or t
ataaaacaaaaacttttctaaaacatcactggctttttgtgagccactgattataaagcagaggtggcaaaccctccttgcataaaatatcacacttgggtaagtgcagtatgttatgtgtctttaataatgccacatcagccccaagtannnnnnnnnnctcaaaaattgcagcctgtgattctaactaatccaagttcataggaggttaaatcattcttcattgtctttcactctttaataatgggtagttcctctttgaaccatgaacttaaaaacacttctaaaaattaaggaaactgggcaatgagtttattccttaacaaacactgtgttgggcatgaggtngggggagggtaaattcacttcggcttacttggattttatccctgttggaggttcacactaaggacagtgttccngttttcttcacacagggttaccnggctacttggggccctattgncctgttgggtagtttnggggaaaccctctgtggaactccctggagctggaaaaatttcggg

SEQ ID NO: 305374 - DNA, 258 bp, Homo Sapiens
  misc_feature (83)..(83): n is a, c, g, or t
  misc_feature (94)..(94): n is a, c, g, or t
  misc_feature (149)..(149): n is a, c, g, or t
  misc_feature (185)..(185): n is a, c, g, or t
  misc_feature (198)..(198): n is a, c, g, or t
  misc_feature (218)..(218): n is a, c, g, or t
ccatgtgaacgtctacgcatcacctgttcctgctgcttatgaggattgctcataacctcacagtggaggctccacaccaaggnttcctgaccanttttgtagggccactgtcgggccctccagagagcctgtcccatggcagatggganttcctccctttcctgcctcaccttggggcacacatnttcccttctccantgggcccatcctactgaatntggaccaggacacagggcaggacatgccattaaaatgtgg

SEQ ID NO: 305375 - DNA, 268 bp, Homo Sapiens
  misc_feature (38)..(38): n is a, c, g, or t
  misc_feature (64)..(79): n is a, c, g, or t
  misc_feature (98)..(98): n is a, c, g, or t
  misc_feature (256)..(256): n is a, c, g, or t
ttgcctttctaaaagctgtaactgtctttctctgactnaattgtcctacatagatcatttcacnnnnnnnnnnnnnnnnggctaagtttttatagggnctggaaagtttataattaaggtgacatcatgtcatttattgtccaaactaggatgtctttgcctatgaaatgtctccttctccatatccccctcctcaaagacttactgtttcatatcaggaaagggtactcttacaggcaaaaatctgtatttactngtttcggagtgt

SEQ ID NO: 305376 - DNA, 253 bp, Homo Sapiens
  misc_feature (106)..(106): n is a, c, g, or t
  misc_feature (128)..(128): n is a, c, g, or t
  misc_feature (170)..(170): n is a, c, g, or t
  misc_feature (193)..(193): n is a, c, g, or t
ttttcttgttgttttctatgctgaaattttgtttctgggtttgttctgctttgctttgtactgttcttgaatttttaaggacaaattattttttatcatgataacngaggggttagggttaggttgcnatggtaaattattttgaaggcttaggattctgagggctaacngggccaggtgaggatattcaggnggataatatacctataccttaatatccatcacctagggggtattttaggggggccataaa

SEQ ID NO: 305377 - DNA, 422 bp, Homo Sapiens
  misc_feature (302)..(302): n is a, c, g, or t
  misc_feature (308)..(308): n is a, c, g, or t
  misc_feature (362)..(362): n is a, c, g, or t
agaatgtcattggtattttgatgggaattgcattgactctagattgctttgggtggtatggacattttaacaatactgattcttctaatccatgatcatggaatatctttccatttgttgatgttctcttcaatttctttcatcagtatttatagttttcattgtagaaatctttcatttatttggttaaattaattcctaggtatctaattttatctgtgggtattgtaaatgggattagattacttcttcaatttctttttcagattgttcactggtgggcatataggaaatgctactgnattttngtatggttgaattttgtgtccggggaacctttacctaaatttatccatatttcnggaatttttaaaaatggtatcccgtggctccctttttgtgaggtggattctgtccaggga

SEQ ID NO: 305378 - DNA, 230 bp, Homo Sapiens
  misc_feature (81)..(130): n is a, c, g, or t
  misc_feature (146)..(146): n is a, c, g, or t
  misc_feature (177)..(177): n is a, c, g, or t
  misc_feature (209)..(209): n is a, c, g, or t
  misc_feature (217)..(217): n is a, c, g, or t
atgtaggtggttggtatagaagtgttctcagtttgttacttaacctccaagtttatgtgggagttttataactatctttannnnnnnnnnnnnnnnnnnnnnnnnnnnnnnnnnnnnnnnnnnnnnnnnnggtattttttgtagangacaggggtattgaaggctctctcctcgtgnccgaaattcttgggcctcgagggccaaaattnccctatangttgagtccgtta

SEQ ID NO: 305379 - DNA, 564 bp, Homo Sapiens
  misc_feature (149)..(341): n is a, c, g, or t
  misc_feature (435)..(435): n is a, c, g, or t
  misc_feature (466)..(466): n is a, c, g, or t
  misc_feature (472)..(472): n is a, c, g, or t
  misc_feature (480)..(480): n is a, c, g, or t
  misc_feature (487)..(520): n is a, c, g, or t
  misc_feature (534)..(534): n is a, c, g, or t
ttctttatggctgacctcctaattaacatgtgttctctggaaaaacatttcactcaaacaaacttcacctcatgtccctcggtttatatttcccttcacaaacacaggatagataaggaacagtcagagagctcaatctatacaaatannnnnnnnnnnnnnnnnnnnnnnnnnnnnnnnnnnnnnnnnnnnnnnnnnnnnnnnnnnnnnnnnnnnnnnnnnnnnnnnnnnnnnnnnnnnnnnnnnnnnnnnnnnnnnnnnnnnnnnnnnnnnnnnnnnnnnnnnnnnnnnnnnnnnnnnnnnnnnnnnnnnnnnnnnnnnnnnnnnnnnnnnnnnnnnnnggagggcatttgccaaccaccaatggatatctgtggtaccctaaacacaggatggtttccatttctttggggctctcccggatatccctgcccngtgccctcacactgggggtaaatcccaaccnggaggnccaactgncctctannnnnnnnnnnnnnnnnnnnnnnnnnnnnnnnnncacagaggcggggnggaggagggcttgatgaggagtgggtcttt

SEQ ID NO: 305380 - DNA, 420 bp, Homo Sapiens
  misc_feature (163)..(163): n is a, c, g, or t
  misc_feature (366)..(366): n is a, c, g, or t
ttcttcttaaataaacaataggctaaatcacacataccccatcatgtcccatgggtgagagatggggaagtaataacttgtgcccccagaaaaatggatagagaactgctggatgaagtcatgaagggtactgaaagtctttgagctgggaaggaagacagantttaaaaagatgttcacagagaaacttggtatgcattatttctatccctgagggcagatgtggcaaaagttgaattcctgatctctcgatcaatgcactgaagtgtgtgtgtgaactgcggctcttcacaggaatcatcagatggggatcacctttagggaatgaatattctccctgttcataggtaaaagatagccaaaccnctagggcttaatcaccagcattattttcagtaggagtccgatgttttgccagcc

SEQ ID NO: 305381 - DNA, 115 bp, Homo Sapiens
  misc_feature (46)..(46): n is a, c, g, or t
  misc_feature (67)..(67): n is a, c, g, or t
  misc_feature (89)..(89): n is a, c, g, or t
aggtaatggcattggggcaagggtattgcgggttggggagagggtncagagctttcttgttgccccnttttggggtggcacccaaattnccccaggcatccccctgttgtttcaa

SEQ ID NO: 305382 - DNA, 467 bp, Homo Sapiens
  misc_feature (321)..(321): n is a, c, g, or t
  misc_feature (335)..(382): n is a, c, g, or t
  misc_feature (400)..(400): n is a, c, g, or t
  misc_feature (427)..(427): n is a, c, g, or t
ttactataaagtaaaaattattgtaggccttctaaggaatttataattcattaaaatacatataataacactaaaaagctaattaatatataatattctagttaaaaattaggcatatatgactatatgcaatagtgtggaaaacaattaggcatggaaattattgttagagtttattatttttcaaaagataatgataaaacacacctgtaaatttaatataattataaattcgtcaaatctcaggatggtaaaaccttaaatataccatttgtaactgacattatgtattctctttcttcttcagaggaaaaccctganggaactatgggaannnnnnnnnnnnnnnnnnnnnnnnnnnnnnnnnnnnnnnnnnnnnnnngaggactaaggtctcacnctgttcacccgggcggggtgcgtgggnggggtcccggctcgccctcaggctccgccccccggtttca

SEQ ID NO: 305383 - DNA, 505 bp, Homo Sapiens
  misc_feature (387)..(387): n is a, c, g, or t
  misc_feature (411)..(411): n is a, c, g, or t
  misc_feature (437)..(437): n is a, c, g, or t
  misc_feature (445)..(445): n is a, c, g, or t
  misc_feature (476)..(476): n is a, c, g, or t
ggtaaaataagttgtattgtgtttcataaaatcatgactaaaattaaggcaagtctatagatcactatagaacattaactaaatttttgaaacatttcagtgtactgcccacaactcttattttgaaaagtttttgaaatccttaattcacagccatacttaatagttgatttctgtttgtgtagtcgtcatccctatggtctttcagaacttggcagttaatcctcctgggttttgactagttcagtgttttaacccctaagttagctttgggagctaggacacaagttcacaagtgtggacaggaacattaaactttctgccagccgaaatctgttcaggagcttggttcagattttttttaactcttaaaaagcgctttggttncaaagcagatttcgttaaggagtntggggggagtttttgttttgttttantttaagcnggcattaaactccatgtatatggaaggggcntttttataattgtaaggtataatgtaaaa

SEQ ID NO: 305384 - DNA, 433 bp, Homo Sapiens
  misc_feature (101)..(135): n is a, c, g, or t
  misc_feature (137)..(393): n is a, c, g, or t
taaagtatatattgaattacattgagtgtctttatagtatctattgagattattattttttactttaactgattaatatatcgttacttacattaattgannnnnnnnnnnnnnnnnnnnnnnnnnnnnnnnnnngnnnnnnnnnnnnnnnnnnnnnnnnnnnnnnnnnnnnnnnnnnnnnnnnnnnnnnnnnnnnnnnnnnnnnnnnnnnnnnnnnnnnnnnnnnnnnnnnnnnnnnnnnnnnnnnnnnnnnnnnnnnnnnnnnnnnnnnnnnnnnnnnnnnnnnnnnnnnnnnnnnnnnnnnnnnnnnnnnnnnnnnnnnnnnnnnnnnnnnnnnnnnnnnnnnnnnnnnnnnnnnnnnnnnnnnnnnnnnnnnnnnnnnnnnnnnnnnnngctgagatttacagggcatggaggcacccacggcccaggc

SEQ ID NO: 305385 - DNA, 508 bp, Homo Sapiens
  misc_feature (356)..(356): n is a, c, g, or t
  misc_feature (424)..(424): n is a, c, g, or t
  misc_feature (432)..(432): n is a, c, g, or t
agttgttgtaaaaacaattctttatgtgtccttgaacatgatacttcttcagtttccattgtgattgccaaaggggtatattcatacccttttgaaatgaagaaatggattctctattgggtttggcttttgtgtttcttaaacctgttagcatcatgcatagagcagaaatatattaattgaactctatgaaaatacttcctaactcatagtctaactcaggtttcaaatgactacagtggctagggaagttagaattttttttcccaagaagacatgtctcatgatcttttcctctctccttcctaagatggccttttcaatagctctttcacctccccacttcccatctcttncatgtggccatagccttggcccctctggttggagccacaggcacttaacgtggtatttatttagggtnggaaggcnggcccccagccttggcaagggcaaatgttttgtatgtgggtaggaggggtctataatagggtgtaggacccccttt

SEQ ID NO: 305386 - DNA, 494 bp, Homo Sapiens
  misc_feature (339)..(339): n is a, c, g, or t
  misc_feature (379)..(379): n is a, c, g, or t
  misc_feature (393)..(406): n is a, c, g, or t
  misc_feature (413)..(413): n is a, c, g, or t
tctgccgtattcactgtatctgcagcttggagcacagtagactcaaatgcttgcatgccagctcttcccctgtacagcctggattaacactgatgctagcagactcctttgcacaactgattagctttcgtaactaccacagctttcttactgctagtcattctgtgatgggattaagctaggtcttgaactccttaactccagttccttggctactactgagtacatactgaataaggcaaaattgacttacctcttttgttttgctcccctgtggtagaattctaggggtacagactgctgggtttcaaatgccgccctacttggccagccgtatgntaaaggttatttggaacttcttgggtagccttggtgtttncatctattaaaaannnnnnnnnnnnnntgcccgnttcgacaggggtgtttaggggaggactgaggctttattcagtacagatatgtttgagagcagcacccgttccaaagccctt

SEQ ID NO: 305387 - DNA, 476 bp, Homo Sapiens
  misc_feature (75)..(75): n is a, c, g, or t
  misc_feature (317)..(317): n is a, c, g, or t
  misc_feature (443)..(443): n is a, c, g, or t
  misc_feature (453)..(453): n is a, c, g, or t
gattttcctgcttgcatcatttctagcacagagctggaggaaatggcgaggtgcaggtggccgctggccatgctngttctacatgggagcaagacagctgctaggtgaaggggaatgaccaggcagccacagggaggacatgtggcctcaggaagcctgggtgtgtatcctggttctgctaggaacacgtgtggggctttgtgtgggtgactctctggctccccaagcctccctttcctactgttatatccttaaagtgcctctgaggccaaagctttgtggcaattgtcaaatgagtccatatgcagtgagtaccntgtttgagggaggacaaggtcaccaaggagctgagaatgtttctccgactgatgagacctagatatttgggtacatgggaggtccccgttcccttgttgattcccgcagccttttgcctccttgcngggaccccgnctcagttcagaaagccatttccc

SEQ ID NO: 305388 - DNA, 140 bp, Homo Sapiens
ttccatccatttagcaaactttattcctgaccacattttatgccctgggtgtgaagtggtacaaggaaaatgactaagacatagcctaaatttttaacaagtaaatctggccatgcaaccaataaacagttcttagtcag

SEQ ID NO: 305389 - DNA, 159 bp, Homo Sapiens
acagcgccattttctgtttgcaccacacaaagtcagcctgagtgtctcctccgtggatcactatgagggcatcattactcagcatctttgagtaatgagacatttgaggatgtcatgtgcagactggggtcagtctgacaaggtctaattctgctccca

SEQ ID NO: 305390 - DNA, 166 bp, Homo Sapiens
  misc_feature (44)..(44): n is a, c, g, or t
  misc_feature (140)..(140): n is a, c, g, or t
  misc_feature (149)..(149): n is a, c, g, or t
gaatagatggggtgcggggacggagacaaatgacggcctttggntcggaatacccacctttctggtaatgcagcccagcggtccccagcctcgttttccagccctcactcaaaattgagtcgctcttgttcgaacgcctntgacaagtntgtatctacgtgtcagg

SEQ ID NO: 305391 - DNA, 219 bp, Homo Sapiens
  misc_feature (157)..(157): n is a, c, g, or t
  misc_feature (196)..(196): n is a, c, g, or t
tatcactccttaagagcaacaggcagccagggaccccagctcaacacccaccgacacatgatgtctactgtgttctgaacatgcataagcatataatttgaactgcattgttagccttcagggaaaggggcaccagggagctgtgcttggccagggnacctagatccatttacttgtttcaaaaccaacccagggngctgagcttacttgaggcttcag

SEQ ID NO: 305392 - DNA, 279 bp, Homo Sapiens
  misc_feature (60)..(60): n is a, c, g, or t
  misc_feature (130)..(130): n is a, c, g, or t
  misc_feature (170)..(170): n is a, c, g, or t
  misc_feature (185)..(185): n is a, c, g, or t
  misc_feature (202)..(202): n is a, c, g, or t
  misc_feature (251)..(251): n is a, c, g, or t
actacaatatttctaaagtacctcaggaaatgttgcccgaaaaacatcctacaggatggnggctgccaactaaagtcattggagcaacagacagtggctacaattactaagtaggactctgtgtacaaantcaatggtcagtctgtaaagtccagcacctttcagagtanaccatctcactctgnttcacttaaacaatttngatacactagtaggaaggtgaagtcccttttttggagggggtggaatangcaaatgggatggatacatcaaacccaa

SEQ ID NO: 305393 - DNA, 357 bp, Homo Sapiens
  misc_feature (175)..(175): n is a, c, g, or t
  misc_feature (326)..(326): n is a, c, g, or t
tatatcagttaccttagcagccttaggatagattacatacctattgaatactactgaactgaaatttaactgtaccatatcttcccagtgttctgtaaacagggttagtattaaatcttagtgaaacatggccaagttgagatgaatacctgcaatgaagtactaattatttggntctcccatccaccaaagcctggggattccagccctctatgtattccacgtcactaggggatgtcctgtctccccccagcccccaatccccaatcaactcacagggttccgttgttactgggtttcacaggttacagggcttcgggatgggnctgcacggtgctggtttcaaggactaatggg

SEQ ID NO: 305394 - DNA, 313 bp, Homo Sapiens
  misc_feature (117)..(181): n is a, c, g, or t
  misc_feature (184)..(184): n is a, c, g, or t
  misc_feature (262)..(262): n is a, c, g, or t
tcaattgtcccacctcagactcctgaacagttgggactccaggcattcaccaccacacctggataatttttttatattttgtagagagagggtgtcactatgtttctcaggctggcnnnnnnnnnnnnnnnnnnnnnnnnnnnnnnnnnnnnnnnnnnnnnnnnnnnnnnnnnnnnnnnnntgncacccgcatctggcggaatacaataatcttagtaaggtaagttaaataccaaaccttttgggttttaaaaatgctttnccagaccagcctgggctaaccatgggcggaaacccccattctctaccttaa

SEQ ID NO: 305395 - DNA, 272 bp, Homo Sapiens
  misc_feature (31)..(31): n is a, c, g, or t
  misc_feature (34)..(34): n is a, c, g, or t
  misc_feature (56)..(56): n is a, c, g, or t
  misc_feature (71)..(71): n is a, c, g, or t
  misc_feature (86)..(86): n is a, c, g, or t
  misc_feature (102)..(215): n is a, c, g, or t
  misc_feature (236)..(236): n is a, c, g, or t
  misc_feature (255)..(255): n is a, c, g, or t
agagagggccttgacctgtcacccaggccanctncccacttcagcctcccaaatanctagaactagaggtntgcaccaccacaccnggctaacttttttaannnnnnnnnnnnnnnnnnnnnnnnnnnnnnnnnnnnnnnnnnnnnnnnnnnnnnnnnnnnnnnnnnnnnnnnnnnnnnnnnnnnnnnnnnnnnnnnnnnnnnnnnnnnnnnnnnatggacaacattgccaagccnttaaagggattttctaaangaaataatatattttat

SEQ ID NO: 305396 - DNA, 224 bp, Homo Sapiens
  misc_feature (187)..(187): n is a, c, g, or t
agcagcaggggtacctaggtgggaagtgaacagatttctagagataactaaattgcccagactggagttaatcccatgcaacacacactggacaattcttcacctcagccttcaaccaaccattaacctgcaatattaacaaatggactatgctaataaaatctctggtgacctcagacttttttanagtctggggccagggatctaatactgcttttctctat

SEQ ID NO: 305397 - DNA, 183 bp, Homo Sapiens
  misc_feature (102)..(102): n is a, c, g, or t
ttttaccataataagcaataagccaaatattcagaaacctggcttccaacagctttaattcaactccagatttagagtagaaaaggcccttaaacaccaggnaaaactttttaagaatctcagctctgatttaatatgcagttaaacttttctctctagtttctagcccacagcaatattaga

SEQ ID NO: 305398 - DNA, 394 bp, Homo Sapiens
  misc_feature (59)..(59): n is a, c, g, or t
  misc_feature (61)..(61): n is a, c, g, or t
  misc_feature (64)..(65): n is a, c, g, or t
  misc_feature (72)..(72): n is a, c, g, or t
  misc_feature (91)..(91): n is a, c, g, or t
  misc_feature (108)..(108): n is a, c, g, or t
  misc_feature (161)..(161): n is a, c, g, or t
  misc_feature (196)..(196): n is a, c, g, or t
  misc_feature (214)..(214): n is a, c, g, or t
  misc_feature (223)..(223): n is a, c, g, or t
  misc_feature (231)..(231): n is a, c, g, or t
  misc_feature (262)..(262): n is a, c, g, or t
  misc_feature (278)..(278): n is a, c, g, or t
  misc_feature (310)..(310): n is a, c, g, or t
  misc_feature (315)..(315): n is a, c, g, or t
  misc_feature (322)..(322): n is a, c, g, or t
  misc_feature (353)..(353): n is a, c, g, or t
tgaaggtcagagctgcaatgcaatatggattctcgggcttctgccagttgcatggctananggnntctacantttcctagtcatgcaagtntgatgggagaaaggctntactttagctgcactcagttctcagtgccactcccggagagagcaggaccctntttagggtgatgaccccatagtgggtaggaaactntgaaggtacagaggggantctgggatnttgcccgnttaggaaaggaaagagtttgccccaatgggngggtcaaaagcatcantccacagttttgaaagggggagggggagaatncacanttttctntcacccggggattttaaattaaattcacttncagaacacagtttggggtttttttcactttaaaggcagagg

SEQ ID NO: 305399 - DNA, 481 bp, Homo Sapiens
  misc_feature (440)..(440): n is a, c, g, or t
tttgcatgtcaacatacagttttcccagtaccatttgttggaaagactattcctccattaaatcatcttggcactattgtaaataattgattgatggtaaatatgagggtttatttctggactttcaattctattccattgatctcagtgcctgtttttatattagtaccatactatcttgattactgttgatttgtagtaagtcttgaaattggagattatgagtcttccaatgttcttctttttcaagatggttttggctattctggggttccttgaaattttgtgtgaattttagggatcagttttttaggtttctgcaaagaagccagctagggataaggggattgcactggaatcaggtaggatccaaccttaagggagtctccttcttatggttttctggttgcctatggacaggaatatcacagactgggggnaaattataaaaccaatacaagtttattcaggctcagtgttc

SEQ ID NO: 305400 - DNA, 457 bp, Homo Sapiens
gaggtaatgttatagaacacaattggactgcatatagcaatatactaaggcttggcttattgatcactctgtcaagtcacaggaaaaagtttaaattggtggatataaccactaagacatcctaaattggataatctgcggatagcttttagaactaacatggcatccttctttttgtatcctaaatttaattttgaaataaaaagtcattctaaaacagacatgcagttatttctcacaatgcattcactctgttttcttcttgtgggtgtatctgcagttttatcagcagatacaggtccaaataggaaggcaataaaggaaggcatctaggaaggtaaccacaaccatggtgccaggataccaaaccatgtaggggtgtcggacccaccccacgggcgaggggtggttcctggttcttttccaggttccctcccttcttgaggctagggaggct

SEQ ID NO: 305401 - DNA, 316 bp, Homo Sapiens
  misc_feature (233)..(233): n is a, c, g, or t
ataaataacattttaaaaagttaaaatgagatcatttagagactgaaagaagccactgagtagatgaaatttataacacacattatctcctaagttgaacatatgactactctagggatctgggcaattcccaattttgtgtggaatacatgtgtccctaaaggtacatgtgcattatgtttgactattactggggtagggcaccctcaaacttgcttatcccatccaggtgncctattattataatatttattaccacccatggaaagggggattggatttccccttaccacctcctggatgggattttccaaat

SEQ ID NO: 305402 - DNA, 493 bp, Homo Sapiens
  misc_feature (240)..(240): n is a, c, g, or t
  misc_feature (348)..(348): n is a, c, g, or t
  misc_feature (364)..(364): n is a, c, g, or t
  misc_feature (391)..(391): n is a, c, g, or t
  misc_feature (397)..(397): n is a, c, g, or t
  misc_feature (477)..(477): n is a, c, g, or t
atattatatctaaatctctgtgtggtacaaggatatctccttgcagataaatagttcttctgaagtatctgaccttatctgcttcctagaaaatgcagtcaagttacaaataaggtgcagtgttttcttctgttactgaataaaacaatttgggtcaaattgtacctgaaggtacttagaatccaattatacttgattccttgttaaatcacttatgctagtaactaacttgttaaaagngtaattcccaagtatttaagggataggaatgttgagttataaaatacattttgccttttattgtatgtctttatttttcacacggcacattgcatttatttgaggagncaggggcaggaagggncaggaaatgttggggtgaggaggaggngggccngcccccaggccccaatgccccaccctcttatttggttactggtctgtcagggtgtttcccggctcatcttttctggattnggggattattaggttt

SEQ ID NO: 305403 - DNA, 428 bp, Homo Sapiens
  misc_feature (215)..(215): n is a, c, g, or t
  misc_feature (217)..(217): n is a, c, g, or t
  misc_feature (317)..(317): n is a, c, g, or t
  misc_feature (373)..(373): n is a, c, g, or t
  misc_feature (413)..(413): n is a, c, g, or t
aatagtctcttagatatttattgtaatcttcaagaaataaaacaaactcaaagaacaaaaaccactttctatatagaattcacatacaaactgaatacctaatagagcacataccatttttacacaattaatttcaataaagataattaaaacttcacaatgtgaatacacttcatagctttaaacccacacaagagctcctgtggacacatgangngtcacaatatttgctatgcagcagtagttttcaactaaatgtcggtcactatatggaaaggcattaagctgttttcaatattttcttaggaggagttccncagtgcaggtcactgaggagggggcccaaatgtgcctgggggtcccaaggggaggntctttcatctgtggcatttcccaatgcccttttggggggnacctggggggcttcc

SEQ ID NO: 305404 - DNA, 273 bp, Homo Sapiens
  misc_feature (126)..(126): n is a, c, g, or t
  misc_feature (162)..(162): n is a, c, g, or t
  misc_feature (171)..(171): n is a, c, g, or t
  misc_feature (200)..(200): n is a, c, g, or t
  misc_feature (208)..(208): n is a, c, g, or t
  misc_feature (227)..(227): n is a, c, g, or t
ccagccacctagaaaaccaccagttcagatggggtggggtcagattccaactccacctgaagggataattctagttttctccctcctcatattttcaactccgttttcttgacaagaaacctgggnttctgtggatgctttaataggatttgacttcttttngggtcagtncccccattattgacagcggaccctccctngcttcctntggccacccttggggcctnagggggggttcccttccccgaccttccccattgggcttcaggggca

SEQ ID NO: 305405 - DNA, 335 bp, Homo Sapiens
ataagcacttgcgactggcccattttcttttataatttcttcagaaaggatcctgcacgattcctactgtgttgctagccagccaatgatatctagtgatattgaaatcagttcatgaacattttccaagcttcaagcctctcaggtgcagggataatggggattatgctatacgaggcagatattgggtacttcattgtaggaaacaactgttatctcttaacagggtatcagggtaggattttcaaggctttaggttataggacccatcacccaaaaataggtaattctattctgttttcatttgaggccaatatggtatggaggagtcatat

SEQ ID NO: 305406 - DNA, 434 bp, Homo Sapiens
  misc_feature (155)..(155): n is a, c, g, or t
  misc_feature (235)..(235): n is a, c, g, or t
  misc_feature (377)..(377): n is a, c, g, or t
aatttaatgagatggaatagccatgaggatgaggaggtaaaaagaagtcaaagaatacagactggcttagttgaagaaataaccttctaacaagcagagctgtctcacttggaataaataggcctaaaggatgcatgtgcaccagcctgacagtntttaggtagagtctagggttcaactgttagaatgtagcagaactcctgcactggatggagtagaggtcctaactcgggantctgagtggataattcaccaaatttccaacaagtcagagatggaaattcagattttcaccagtcttctcttaggcaaatgaacttgggaagcatctttgtgtcccttcagccaaagtcacccatgaggccggaggtccaagnctctgtcaagtttactgaccggagtccggggctctgtgaggagacagcacagtcacc

SEQ ID NO: 305407 - DNA, 348 bp, Homo Sapiens
  misc_feature (121)..(121): n is a, c, g, or t
  misc_feature (279)..(279): n is a, c, g, or t
tactcctatgttcttatggggacaagtataagggagggactgcaaggggcataaggaagtgtttttgagttaccatggcagcataggatgttctttctctctgtccctgggaccagggatngtatcgcaagggaggggagtaaggaggtgtttttgaattatcatggctgcataggatgtttttcctctgtccctaggacccagtgatgtatggctccctgcttctagaggaggaaagaaactacccaaccagagagagaagaaataactggtcctganccttgagtacaaatggcttatcgtgccagaattaatgatggggaggaagggaccaagaacaaggagctt

SEQ ID NO: 305408 - DNA, 166 bp, Homo Sapiens
ccaggcctaccttgtaaggtctgtaattcttagagagcaggggccctaactcatttctgtactcttcactgaataaactatcacatcattaaaatgtctcttcctcttccctgggtataaagaactgctgtttactaagcttttcagaggaatagggccgggtata

SEQ ID NO: 305409 - DNA, 275 bp, Homo Sapiens
  misc_feature (205)..(205): n is a, c, g, or t
caccactccttaattctaagttctggtctagcccagtcctgggaagactcttccccacgcacagccacttggatgggctcccctcgcccagggtggctcccgtgtccagcatccaagggaactgacgagagaggacgggggagaagggtgacaagtacaagcacctgcagtttcccaccagcagcagggaaatatttagggtttnaccagaagggggaactttcctaggcattacacgaggaattttgggtttaccttccagttgggggaagggc

SEQ ID NO: 305410 - DNA, 143 bp, Homo Sapiens
  misc_feature (18)..(18): n is a, c, g, or t
  misc_feature (125)..(125): n is a, c, g, or t
acaagacaaaaaacatgnattctaatgactggaaaccaaaaagacaaaggggttgctataatatcatgttttgatatttttagctttgtttgcaaaggctaaattacagtaggcccctggcttgnttcctgtagcaattgcct

SEQ ID NO: 305411 - DNA, 271 bp, Homo Sapiens
  misc_feature (12)..(12): n is a, c, g, or t
  misc_feature (81)..(81): n is a, c, g, or t
  misc_feature (164)..(164): n is a, c, g, or t
  misc_feature (181)..(181): n is a, c, g, or t
  misc_feature (259)..(259): n is a, c, g, or t
tcagaaagtccntgcagatatccctgtgggtaaaacaaataagaaaaagggaaagcattactagcaaagaaagtcaagctnttggaaaaactgacagtgatgtctgaaatgtcttacagaagagtatgttgttggaatgaccactgtatatatgacctgaaaantacagtaggctaaattnttaaagttctaggttgaaagtgatgggcagaagttagtaaaaaataggaaaagcactgccatgaagctgaaaatgccnttggattagatc

SEQ ID NO: 305412 - DNA, 137 bp, Homo Sapiens
  misc_feature (118)..(118): n is a, c, g, or t
cttgtattagtgatcccatcactgtgcaaaatattactccccaaaacttgggagggcttatataaggaaatgggggtatttatttcataggtttctgtgggggcagggggagcctgtntgtgggcctaggcaggggt

SEQ ID NO: 305413 - DNA, 350 bp, Homo Sapiens
  misc_feature (57)..(57): n is a, c, g, or t
  misc_feature (87)..(87): n is a, c, g, or t
  misc_feature (171)..(171): n is a, c, g, or t
  misc_feature (174)..(174): n is a, c, g, or t
  misc_feature (228)..(228): n is a, c, g, or t
  misc_feature (237)..(237): n is a, c, g, or t
  misc_feature (258)..(258): n is a, c, g, or t
  misc_feature (294)..(294): n is a, c, g, or t
  misc_feature (305)..(305): n is a, c, g, or t
gaaaatcccactttacttcaagtgaagtcactgggttgtccccatgaaatatctccncaatgggtgtgctagacctttactctctgnggcaccaccaagaccccctcaccctgccagagccctctgaagtgtactcagaatggaggggctggaagtggggccagtggtccnggnagtcagcctccccttctgacacaagaattatcgtggaacagcttgtgtgaccgntcaactggnctctccatctttaagccattntcttgttgactctgttactgcagagtttggggaggnctcatggcttntcgcatcctatttcctgagcttccctgaagccaacttatggcaca

SEQ ID NO: 305414 - DNA, 380 bp, Homo Sapiens
  misc_feature (331)..(331): n is a, c, g, or t
  misc_feature (349)..(349): n is a, c, g, or t
  misc_feature (356)..(356): n is a, c, g, or t
ttgtttttgcagcaaaggaattgtgtactttttgttcctttaatagcagaaggccattgggaatctccttggtctgaaaggcagcctgcagtttttgcactggctcaactgccacaagagagaaactatggcttttgctcacaggtatgaaatgaggtctaacccacttcagggaagtgatatgaccctaatagcaaggtcctttagactacaagacggatcttgtcaaattcaggatactcctacttcaaattttcctcagttcccagtctctctgacttagagctgaagagtagaggggaaggatgttctacttttctttcactggganatggggatgataggagtntgccaantgatggtcttatttagggcaaaaa

SEQ ID NO: 305415 - DNA, 347 bp, Homo Sapiens
  misc_feature (23)..(23): n is a, c, g, or t
  misc_feature (307)..(307): n is a, c, g, or t
  misc_feature (334)..(334): n is a, c, g, or t
tgagctcgaaattcaattttcangtttctagtgtctcaatgttctgcagtgatcagataattttcccttgaatttataagtgtgatgtaaattacactgtgtttcaggcagtggagacgttattttctctaggctgactaactccttgtggggaactgggagtcaggagtcttgacttgagtacccgccttgccactgtgtacaagtcacttcccatcccagggtttcaatattcatatctgttatttaacacaaaagggaggcagaaaagtagggagcttgttctaagggattgcaaaccggaagngccttcaaggaaccgaaccaaacaggngacacaacgaggg

SEQ ID NO: 305416 - DNA, 230 bp, Homo Sapiens
ttctttgtattcacttcatttttggggggaagatgcaactatataaatgtccatcatggccatggaagacaggagacgaggtgagagaaaagaggactgaattatacctaagaaaggcataacccagggaggaaaatgcctcttaatgggagtctcatcggcacaaaatcaaaccaatggacaggcaaggaaaaaggagtgaggtgtcaaaaccttcctgtaaacaagca

SEQ ID NO: 305417 - DNA, 118 bp, Homo Sapiens
tcatttgcattccttggcttcccctatcttcatctccaaagccagctgtctagaatcttcaaatctttctttattctctctctcagttccgctttttacttataaggacccttgagat

SEQ ID NO: 305418 - DNA, 321 bp, Homo Sapiens
gtaacaataatgaaaggtgacaggtttgaaatttcagtgatctttatgtgtcatacatgtatttatgtgtcaacaaggctcttggacatttaataagtggcaatagagctgtaaacttttaaatggtcaaaggacatctttttgcaggatttattggcttcataaataaatctcactgaataatatcactttaccacttccctgggcttctatataaacattctaacttctctttagaggatgataaatattaaggaacaaaataacagggattaggaatgcagtttatggttctggaaaggcaaactggaataaaggtgg

SEQ ID NO: 305419 - DNA, 152 bp, Homo Sapiens
  misc_feature (93)..(93): n is a, c, g, or t
ctctcttaaggatctgactttaatgtttatcatttattatagcccaatttgattcttaatgcttttagtggggaagactctgtaggagttccntaaagagagtttttgtgcgctggctttcccagacgctggttgcagtaaccatgcatttg

SEQ ID NO: 305420 - DNA, 484 bp, Homo Sapiens
  misc_feature (313)..(313): n is a, c, g, or t
  misc_feature (401)..(401): n is a, c, g, or t
  misc_feature (423)..(423): n is a, c, g, or t
  misc_feature (433)..(433): n is a, c, g, or t
  misc_feature (456)..(456): n is a, c, g, or t
gttattttattgagcagaaagttaatggttacacgtaccataacagtagattcttagaggattccaatttcctgtttagtatttaagtgacatcataaaattctcaatatatgatatttactgataatgacatttgaattgtcacttctccaccaataattcttccaaaaagcacaagactattattattattccaattgtctgttttagtagtacactttatcttacttcttagcttctttgaactattttttctttacaattcatccacttaatattcttgcggataggaaataattttcaaaataaaagngagggccaaaaaggggtaaaaaggtccatacacctcctaattccaaatttccaaccatttataaaaatcccttcctccaggggccacnggtgggaaatatccccaaatcngggtatattnttccaaccagggggggaatctcngggggtttttaccccggttttttggcca

SEQ ID NO: 305421 - DNA, 217 bp, Homo Sapiens
  misc_feature (155)..(155): n is a, c, g, or t
  misc_feature (171)..(171): n is a, c, g, or t
  misc_feature (177)..(177): n is a, c, g, or t
  misc_feature (184)..(184): n is a, c, g, or t
ttatttatttacaagcactggatgagtccctggccaccccccaggacagagcaaccctacgcagccccagcgcagttaaatacagttgggagctaggggactggagggaggaattaagggaaatacaggactagggacaaatactctgttaagtngtcacatacgggccanatcctntagtctncagagccacggctttcaccacccccacaccagg

SEQ ID NO: 305422 - DNA, 374 bp, Homo Sapiens
  misc_feature (60)..(60): n is a, c, g, or t
  misc_feature (109)..(109): n is a, c, g, or t
  misc_feature (117)..(164): n is a, c, g, or t
  misc_feature (244)..(244): n is a, c, g, or t
  misc_feature (298)..(298): n is a, c, g, or t
  misc_feature (338)..(338): n is a, c, g, or t
  misc_feature (345)..(345): n is a, c, g, or t
ataattttaagttctgactgaaagtataggtttaggactaaacacaggacattatgtccnaagagtttaaaattttagagcaataccatgaaataatttaatacaagantaatatcnnnnnnnnnnnnnnnnnnnnnnnnnnnnnnnnnnnnnnnnnnnnnnnnttacaagcgtgccacccacgcccaaccatcaaagaggagagtttctaaggaagctaaaagctattgcctctcagcgggantttcaaggaacgaggaatgggcttatcctcaaaggggatttttaggggtgtggncttttgtttaggggaggtgagcccccaatttttacagggnggccccntagggttttgagggaaggttattttgggc

SEQ ID NO: 305423 - DNA, 487 bp, Homo Sapiens
  misc_feature (319)..(319): n is a, c, g, or t
  misc_feature (338)..(338): n is a, c, g, or t
  misc_feature (410)..(410): n is a, c, g, or t
  misc_feature (416)..(416): n is a, c, g, or t
  misc_feature (431)..(431): n is a, c, g, or t
  misc_feature (461)..(461): n is a, c, g, or t
  misc_feature (471)..(471): n is a, c, g, or t
cagaacatttttatataaattgggtcatttcaagataaataaaaagtacatgatccattacaaaattgccaaggtggaactcaggcgaatgaagtgagagactcgctgacccagtatatccctcattctacaaagaggaaccagaggtctctaaaagacctccgtgagcctaagctgatgtccacctgcttgctgtcctgtgtaaaagtcatcagcaatggaccctaggcaggtgaagaaaaagcactagagctgctatggccaagacatgaaatgaaactttccagtggggcagtgatgtgtcactaggcaccgcggncagaggcgctggggggggntgcagagcagggaggggggaggaaggtacccagtgcccctcctggggcattccagctttacctggggggcanccgctnttgcagggcccaaanttttgacccaacatggggccaggggttttnaggccctttncccgtacttcaggggg

SEQ ID NO: 305424 - DNA, 306 bp, Homo Sapiens
  misc_feature (73)..(73): n is a, c, g, or t
  misc_feature (140)..(140): n is a, c, g, or t
  misc_feature (293)..(293): n is a, c, g, or t
atgtgacactggagtcatgcaaccacaagtcaaagggatgcccggagcccctaggaactaagagaggcagganttgatccctccctagaacctccggatggagcagagccctgagacatcttgatctcaatcttctggtntccagagctggggagagggagaaataattccttttgtcatgagggtccctagttgtgggttactttgtttacagcaggcctggggaaaacttgatccaatgttcattaaccttgcaatggggcttgttcttgaaacacacagccattttcatngggggacccatct

SEQ ID NO: 305425 - DNA, 440 bp, Homo Sapiens
  misc_feature (40)..(40): n is a, c, g, or t
  misc_feature (51)..(51): n is a, c, g, or t
  misc_feature (399)..(399): n is a, c, g, or t
  misc_feature (405)..(405): n is a, c, g, or t
ggttgtgggggtgtatcactatgttgaccaggatggctcngaactcctggnctcagcaatcctctcattttggcctcccaaagttctgggtttatgggagtgagccattgcacctggccactcctccccttgcttttaatgctcagccccttcactaaagatgccctgtatctgtgacttcctgggtctcacgagcagaaaagttgatttgtgagccaagctctcacttctcaattccatggccaccaaataaagcctgcactgcttgaggctcactttcggttttgcatattggcttcatggcaccaaacagggaaagaccccattttagggaaagtggctttgtcagtaacaaggacacagaaggaaagaaatgggagggatgatttaggggcagangtcagncaaactatgggtctttggggcccaaatctggccac

SEQ ID NO: 305426 - DNA, 390 bp, Homo Sapiens
  misc_feature (100)..(100): n is a, c, g, or t
  misc_feature (118)..(118): n is a, c, g, or t
  misc_feature (136)..(136): n is a, c, g, or t
  misc_feature (172)..(172): n is a, c, g, or t
  misc_feature (204)..(204): n is a, c, g, or t
  misc_feature (259)..(259): n is a, c, g, or t
  misc_feature (265)..(265): n is a, c, g, or t
  misc_feature (277)..(277): n is a, c, g, or t
  misc_feature (294)..(294): n is a, c, g, or t
  misc_feature (300)..(300): n is a, c, g, or t
  misc_feature (323)..(323): n is a, c, g, or t
  misc_feature (333)..(333): n is a, c, g, or t
  misc_feature (356)..(356): n is a, c, g, or t
  misc_feature (363)..(363): n is a, c, g, or t
  misc_feature (379)..(379): n is a, c, g, or t
gcctggcccagattattagattaatttttattactattagttttaatagtgatattgcttgaatcattttgtatttctaaaaacctttcagtttcccctngccttcagctgtacaggntcctgagctatggatttnagactttacataagattattttataagactgtaaanaggaatatgcttattatatacattgcatatanagatgctgtggaaacggggaaggatttactgtatgcaaagctgtgcacctatatnttcccnttattcccattnggtgtgtcttgttgggnttgggnctcagtgattttgtaggtagggnaagcacaggngttcttttgaggattctaatgcntttcccnttggggaaaatagccnccctcttaggc

SEQ ID NO: 305427 - DNA, 166 bp, Homo Sapiens
  misc_feature (65)..(66): n is a, c, g, or t
  misc_feature (142)..(142): n is a, c, g, or t
ataagcactatgtagtttcaagcctcatatattctatctcgaaaggactgattcacaaacaaccnnacaccctggacacaattccatcctggggatcatttccaagcaagaggaatgcggagtcacctcctatttaaagctnatcaatttctttaccttcattctc

SEQ ID NO: 305428 - DNA, 425 bp, Homo Sapiens
  misc_feature (280)..(290): n is a, c, g, or t
  misc_feature (366)..(366): n is a, c, g, or t
  misc_feature (378)..(378): n is a, c, g, or t
  misc_feature (390)..(390): n is a, c, g, or t
  misc_feature (399)..(399): n is a, c, g, or t
  misc_feature (409)..(409): n is a, c, g, or t
ctcgctctgtcacccatgccggagtcctgtggcatgatcatagctcactgcagccttgaactcctaggctcaagggatcctctcacctcaagtctcccaagtagctaggactacaggagcatgccaccatgcccagataatttttaaaattttttgtagagacaggttgtcttgctatgttgcccatgctggtcttgaactcctgggcctccagtgactctcctgcttaagcctcccaaatagctaggtcaacaggcacacatcaccaagcccagctaannnnnnnnnnnaaactttctgtataaacagtctcaccatcttcatcagggctgttcttcaaatcctcgggtggttaggtgacccatncccacctcgggncttcccaaggtnctggggggnttaacagggngtgaggccaccatggg

SEQ ID NO: 305429 - DNA, 323 bp, Homo Sapiens
  misc_feature (39)..(39): n is a, c, g, or t
  misc_feature (269)..(269): n is a, c, g, or t
ttttatgctaaatcaaatttgtaaccttttgtccaaacnttataaggtgtaattgtaaccttgggtcaagaaaaacgaggctctcctgatgaggcaaattttggtacataatgcatttaagtgcatgagttattttcatcacactttaaaaaagcatttgaaatcaaatgtttctggaatccttgggaaaagcatctgatttcacaagagatcaactgaaaacacttcatcaagtccaatgctcttatttgcaggatcaggaaaactgngggttcaggaaggggttgctataggtcaaggggggctcctaggtgggagggatg

SEQ ID NO: 305430 - DNA, 331 bp, Homo Sapiens
  misc_feature (301)..(301): n is a, c, g, or t
ttttatttatcactacagactctgccttttctactatgctgtaaagtgttactttattttattttttctaccttaaggttaaggaaccttaaccttttgtttttggcaatatggtaggctaaaggtacaggaaactcattgcagtttagcacactaaaaaatgatggattgaaaaaataaatcaaaactcttatttcctgggctccactggagacaaagtaaggggcttctcagaggccagaaataataaaaggataggatgaggtctattaatggataggctggcattggggagtgggtncttgttctggggatatgggtccctgatccc

SEQ ID NO: 305431 - DNA, 450 bp, Homo Sapiens
  misc_feature (25)..(25): n is a, c, g, or t
  misc_feature (36)..(36): n is a, c, g, or t
  misc_feature (285)..(285): n is a, c, g, or t
  misc_feature (408)..(408): n is a, c, g, or t
  misc_feature (438)..(438): n is a, c, g, or t
tacatctcacaggtgccagtgcatntttataatccngtgtttgcattctcaaaagctagagttaagttagcatttctgcagccatggtatgaggaatctgacgcttcactgcgtcttgtaatcttgaaagaaactgtgcatagggttcctatgacccttgcatgatatgtaaaaaggattgtactgggactccctcttcaggaattgtggcccaagtgcatttagtggcctatgcgcactgctgataagggccgtctggggagtgcccatttgacgttccagggnctgaataaggggccattaccccaatagcatatcctctgtaatgtctccgtttccagcagcacagttctgtctagcctgctctgcacacttttcttgccaattgaaattacacatcagctatgnactcgcggacaaggcaagttcgcggcaagngtttcacatcaa

SEQ ID NO: 305432 - DNA, 534 bp, Homo Sapiens
  misc_feature (103)..(103): n is a, c, g, or t
  misc_feature (454)..(454): n is a, c, g, or t
  misc_feature (506)..(506): n is a, c, g, or t
gtttgaaaatgccctctgaaaactccaaagtctttatacaataatatttccagtggcattaatgtaattaattccctctattacattttctgtattagcagancagatttagatcactatttgactttccccacttgtagggagtaaatattctggcaggacatgatttcgaagtattctgattttggggtcagttatttctattgtaaatacataaatggggcagctattttgggtgtttgggacatctgcctcaagactgtttaatatgagtgtacccacagggagaggaaggtttgctctccggggttacggatctgcaaggaccaaggaggcatccccttggggcctgtggggaaaatttcaccacccttgggggcccacctcccccaccaaccccatccctcaccttccacccccaaaacaggaagggagcggaataacaggggaggtngtaatggctttttgcccaggaattcctaataaaatttacttaggggtatggntggtacttgcacattcaccagggccttt

SEQ ID NO: 305433 - DNA, 294 bp, Homo Sapiens
  misc_feature (204)..(204): n is a, c, g, or t
  misc_feature (223)..(223): n is a, c, g, or t
  misc_feature (276)..(276): n is a, c, g, or t
gagataccttattacctgagattcttcaactacctgcaaccttctttaaacctaacgcaatctgatataaaagagcctgggatgagacttcgaaggcagaagtctactgtctcattaaaacaaggtcttggctattccatgaaatcaaatcttatttcagtgcatgtgtgttccaataaaactactgtattgcaggaggcaagnctatctgggcctatggggngtaggcttgctgactcctgctggaggcctcccccataaaattaaaaacccccncaagggttaaaattcggg

SEQ ID NO: 305434 - DNA, 248 bp, Homo Sapiens
  misc_feature (76)..(165): n is a, c, g, or t
  misc_feature (169)..(169): n is a, c, g, or t
  misc_feature (176)..(176): n is a, c, g, or t
  misc_feature (203)..(203): n is a, c, g, or t
tatttctttcttccaacaaggaagacctgctttgtgtttgaaagagggttagatctgatggacctagcaactggannnnnnnnnnnnnnnnnnnnnnnnnnnnnnnnnnnnnnnnnnnnnnnnnnnnnnnnnnnnnnnnnnnnnnnnnnnnnnnnnnnnnnnnnntttnaacacgnaactccccaaaatgcttttgaaaaccngccagggggggaacaatcactgggggaaggtaagggaatgacccc

SEQ ID NO: 305435 - DNA, 283 bp, Homo Sapiens
  misc_feature (197)..(197): n is a, c, g, or t
  misc_feature (257)..(257): n is a, c, g, or t
  misc_feature (271)..(271): n is a, c, g, or t
ggaggaggaaaaaattatatgttgactgatcaacctacttcaattctttcttgggttttcttgacaaaatggatgtcactcccaaaattaaatgtatcaaacttattataaacccagggggaaaaaaacaaggaaaagtaaaccaggggatacattttctgtatatatcaaaaaggggtttctttaaattgtcaggnaaacaatgcttaacagggccactccattaatcacccaggggtaggctaggctctgtaggntgggtaggttaggnttaccctggaag

SEQ ID NO: 305436 - DNA, 331 bp, Homo Sapiens
  misc_feature (112)..(125): n is a, c, g, or t
  misc_feature (158)..(158): n is a, c, g, or t
  misc_feature (313)..(313): n is a, c, g, or t
ataggataaatgctgaataaaataactaactacaacaattattatgtacatgtattaattttataactaagaacacaggcaataaatgctatgtttaaatcctgtacaatcnnnnnnnnnnnnnnaaacatgggaggaatcctacacggcagcccccnggaagtcgccttgctttgctttgtcagtgatttcctcctcccggatgtggaactggaagggtaggcatgaggtcatgggctgcttccccagggtgcccttggggattgtcgggtggctcaactcccaggctggctctgcatggggaaggtaaccngctggctgccctcccact

SEQ ID NO: 305437 - DNA, 379 bp, Homo Sapiens
  misc_feature (236)..(236): n is a, c, g, or t
  misc_feature (278)..(278): n is a, c, g, or t
  misc_feature (331)..(331): n is a, c, g, or t
  misc_feature (350)..(350): n is a, c, g, or t
tattttacccaagggagacaatccaaagtctaatctgctcagggtctacaactgaagtccagggtctttgagttagatgctttgagtgtgacctactttttgcctttgggaccctaaatgtcagtgcctgttaatttttctttgagaagtgtaatttctccagaggtctgctctttaatttccccagagaaggatgttctaggtcagcatgggggggatataagcctgggctaccnattactgggcgagcagggcagaggcacgccacatgggtgggnatagggagttgggagttcatccccttttattcagacttccacttaggtatccngtttttagtcttctatctnatttccatcctcctccggggccgggggta

SEQ ID NO: 305438 - DNA, 279 bp, Homo Sapiens
  misc_feature (170)..(170): n is a, c, g, or t
agtaaaatccacaaatggggtaataaacacccaagaaggtaggcaggtctcattctatacctctactgagaattgctatgaaaaggaagctgccagaaaacctggctttgtcctgcattaaacaatggagcccagaggagacgcttagcctggagcagtgggaacatgangtataatataacaaatccttctgaaaacactgtagctttatttctttaacaacactgcagtctgaacatgaagtaaaccaacggatactctgaggatgagtggggacag

SEQ ID NO: 305439 - DNA, 435 bp, Homo Sapiens
  misc_feature (239)..(239): n is a, c, g, or t
  misc_feature (256)..(256): n is a, c, g, or t
  misc_feature (283)..(283): n is a, c, g, or t
  misc_feature (298)..(298): n is a, c, g, or t
  misc_feature (312)..(312): n is a, c, g, or t
  misc_feature (363)..(363): n is a, c, g, or t
gcaccgcaaatatcattacacgcaaagttttatattgattttttccctataaatacatttaacctatcaattctacgcctagaattctatcttccagacacacctgcacatggaccaaatgatacacatgtgagggtatctcccgcagcgctgtatatatcagtgaacaaactgatcccagcccgatgtccctgcacagtgcacgagttaatcactaaggcacacgcacacatgaagtnttacacatctaaaaaantgaagcaggtctctagggtactgggantgggggtcaaggggntaaaagccaggggngccaaaacatgcccacccacttcatggtcaggcaaaagggaggggaggaantgctttatcctatttcactttattttaccatatgccctaaccaaactttggggaggcaccaagctaggaggg

SEQ ID NO: 305440 - DNA, 170 bp, Homo Sapiens
  misc_feature (72)..(72): n is a, c, g, or t
  misc_feature (138)..(138): n is a, c, g, or t
aagatggagttcaacattaactatattctaaaatttcaaccaacataacctatactctaaaatgacttagantaaagtcacaaacagtccctcacaaaaggccgctagtatctctatagaacttacattccccatgantcatgaaggtaaaggacacctgaggatacttc

SEQ ID NO: 305441 - DNA, 507 bp, Homo Sapiens
  misc_feature (426)..(426): n is a, c, g, or t
  misc_feature (474)..(474): n is a, c, g, or t
tttcaaaatgggtttcaagatgtaaccttgaagcaaactgcagaagccttttcccttagcccttaaaatagactccccatccctccctttctcaccgtatacacgcccttcacatttatctaactatatgttagtatctaactaggtgcctacttagaagttccagggacaaatcctgagagagacagatcaagcctggagacccagctgcagaattccagagattacctcaaggtggctaatcaacaacctggccattgttgagatgaacgccagcccacactccagggtgggaccgggacccaagatagccactgggaataaaactcagtgcaattcctgcatcccttccatatcaggtcttccctttttaaacgcttgcctttccacctcaaaattcaaactgggttgctttgggatagggantccagccacttccccttaggccaactttgggaaataaagtcaattttnccctaccatacctcggtcttgttaattggggct

SEQ ID NO: 305442 - DNA, 267 bp, Homo Sapiens
  misc_feature (102)..(102): n is a, c, g, or t
  misc_feature (199)..(199): n is a, c, g, or t
  misc_feature (205)..(205): n is a, c, g, or t
  misc_feature (212)..(212): n is a, c, g, or t
  misc_feature (230)..(230): n is a, c, g, or t
ttagcattatttactttaaattttttaactcctgggacagataataagactccggtagaatgacactggcaaatgttagagggaaaaaggaaagtttacccnaaagtattatggaaatccctgggagaaggacaatggaaaggcctgggagatttactgacatggggatgagggtatgcttgtgttttacagatcaagnaaaccncacaagnagatgagaaactgctggngcatcagggtcaggcaaaaacccctgactccatgttt

SEQ ID NO: 305443 - DNA, 233 bp, Homo Sapiens
  misc_feature (139)..(139): n is a, c, g, or t
acttttgtttagagatgggtctatgttgtccaggtggtgtgcattcataggtgtgaacacagtacactgcagcctcagaatgctggcctcaaaccatcttcacacctcaaccttccaagcagctggcaccacaggtacnaccaccatgcttaactaccgagtatataattttaccacatacatacacatgctctttttaatataaccacaatgtcattactgcacccagcaaa

SEQ ID NO: 305444 - DNA, 436 bp, Homo Sapiens
  misc_feature (98)..(98): n is a, c, g, or t
  misc_feature (111)..(111): n is a, c, g, or t
  misc_feature (190)..(190): n is a, c, g, or t
  misc_feature (197)..(197): n is a, c, g, or t
  misc_feature (377)..(377): n is a, c, g, or t
  misc_feature (402)..(402): n is a, c, g, or t
  misc_feature (424)..(424): n is a, c, g, or t
aacctcttcaaaacagtggctcaaaacaacagttattgagttcggaaataggcaacttgggcatggctaggcatggaaggtttgggttccatgcagtntcagctgggaccnttcagggggctggagaatcctctttcaagatggctgctcaaaaggctgttgaccagagctcagttggggtccagggccngggtccngggttcctctccaaatggccctcttcatgtagaacacgccatgggctgcctgggaccttgtcataccatggtagctgggttataagagtgattgttccagggagaaccagggtgggagaactataaatacagtcttttatgacatagtcttgggaaggcacgtgggcatcgctacttctngtgctgtactccttggcccagattncagaggacggggcaataggganatggattaagag

SEQ ID NO: 305445 - DNA, 435 bp, Homo Sapiens
  misc_feature (325)..(325): n is a, c, g, or t
  misc_feature (363)..(363): n is a, c, g, or t
agccaattcaaacgaactctatcaaaacacacaaaggcctagaggagagattacaatgaacgtaaataattcaaggcaatttttgatctaaagcattttgcttagctctacaaaggcatgaatgaggtgtggtcacgtttttgtataggaggttttgccactacttgctcccaagttaaacatggccacagagtattgtgaatgtttaatgtatgcctgggaaaaatttattggccaatactttagttactaatgggaggattatgtatagtcggaccataaagcgtgtaaaagcagatcacttaggagccgctctgtcccgggncagcagcactagatgcatggggccctttgagcacctgnaaataagggttaggcatgacttagggaactggggttttatttttttcaaacttggatgttccaattcagtta

SEQ ID NO: 305446 - DNA, 109 bp, Homo Sapiens
  misc_feature (66)..(66): n is a, c, g, or t
ctgaaccatctttttccagtaatatatatattaatactgtatatcctgaaaggcccaataaatccngcagaaaactgttatcacattgctgagctcaaaaaagtaaggg

SEQ ID NO: 305447 - DNA, 176 bp, Homo Sapiens
  misc_feature (28)..(28): n is a, c, g, or t
  misc_feature (157)..(157): n is a, c, g, or t
atttattatgtttacttatagtagggtnattattgttattttaagtaattaaatcatgtcaataaatattgttaagattctcaatttcaatttataagatggcaagtatagagagatagagccacaaaaacaaaagctacttggaattcttaataanttttaagaccctaaaactt

SEQ ID NO: 305448 - DNA, 360 bp, Homo Sapiens
ttgacaggaatcacaagtcaattgggcatcatctacctggaggtgggttttttttgctgctaagaaaatataaggattaaaaacaaattgtaaattgagtggtaatattttctacaagggtaacattaaaactgtgtttagcacaattactattattggatagtgtcccaatccaaatgctgccattcataaatgggagtgctgctttccatattgactcctgaattggacctctctttccttgataatgccattgaggcaaaggtgagctaaagcatgtgctgtgtcaagcaatttgggcagcagattgagattgaattgccaatgtgatgtagtgggagatgttaaagttttgccacc

SEQ ID NO: 305449 - DNA, 542 bp, Homo Sapiens
  misc_feature (401)..(401): n is a, c, g, or t
  misc_feature (472)..(472): n is a, c, g, or t
  misc_feature (477)..(477): n is a, c, g, or t
  misc_feature (487)..(487): n is a, c, g, or t
  misc_feature (504)..(504): n is a, c, g, or t
  misc_feature (510)..(510): n is a, c, g, or t
caacatgccgagccctagagtggtcctccctctcccaccaccaactatcctacctggcctcccaagaactgcctttggtgactcttgtattctctgtcttgcttcatgcctgggaaatttcagggcatatattaaggggaaaaccttagggaaacctgaaccttcaaaactgggtagaatgaatggatggaatggaagaatttactgcagcgaaatcatcttcaaattccttttaggttggaagcttcttaccctgggcaagtgaagaagtacatttggttatatgtttataatccatgtgctactgggtgaaagatgataggacaagaacatttgaaatgtatgtgttagggatctctggcccagcgttttccatcaaaaggaggcacacccatggattnttcgttacaaatgggtggggacagccgggtttctactcacgtaaattgtttgttccctgaggcacctgggngggtnttcacctccngggtctccttcccgttnctcttntgcctgagtcccgcaccaccttttttaacctc

SEQ ID NO: 305450 - DNA, 391 bp, Homo Sapiens
  misc_feature (302)..(302): n is a, c, g, or t
  misc_feature (341)..(341): n is a, c, g, or t
ggaaagaggtttatttgggttatgattctgcaggctgtacaagaagcacagggccagcatctgtctctgctgaggacctcaggaggcttccactcatggtggaacgggaaggggagctggtatgtgtacagagaccacacgaagagacaggagggaagacagacgggagacgccaggctctatttaacaaccagcctgtggagaactcatagagtaaaaactcactcatgcttcaagaaaggacattgatctcttcaggaagaatccatcgtccgttgctcaaacccctcccattcgacctnccatccaggcactgaggcttacattttaacctgagtttngggagagggagggaattttaaaaggcagagcctgttaggatttttaaagg

SEQ ID NO: 305451 - DNA, 411 bp, Homo Sapiens
  misc_feature (199)..(199): n is a, c, g, or t
atttaaaatatttcagtgtgccatatagctctgtcccttggtttggttggccttgttttttcctgtgaagaatgaaagggcaaaggtgataccaaaatgaaacagctttggagtgatatctttaggagcctggaagccatttttgtaattttgttgtctatataaatgctacctttgcctggaggtagtgcgcctgtgntgtgtacatccagagggcaacagtaatagccaacaaccagacaaactagtgaagttaatctgtgagtgatgattttatgatacttatatgcaaattaaaggcagaagttagtttcttctcaagatggcctttttggctggaacattaccatttttctttccccagggttttgaaagaaaagggccttttttgggattttaactatattctgt

SEQ ID NO: 305452 - DNA, 433 bp, Homo Sapiens
  misc_feature (84)..(84): n is a, c, g, or t
  misc_feature (289)..(289): n is a, c, g, or t
  misc_feature (362)..(362): n is a, c, g, or t
gcacaaggggattgcagcactcggtccgatttccccttgaggcaggcttttgctgatccatattcgctggtgtgtgcgtgatgngagagtctaagaagtcaagcaacaagtactttacaggaaaagctgaacagaaattggagtaccctcagagtactaagaagacgaaagttggattttaaggcccacccaggaggagggactcttgtaaacacaagttctgcttgagaccatgagagatgaaggtaaaccagaagtagaccagccctgaccaaccaaacctaaagtntagcctgggaattcatgtctatgttgttctctccaaagacagaggacaatcccatcatcttaggattctctgncaattttttcatacagtgtttggggttttaaggccaaagtccttcagggcttcacaggttaaccgggttcc

SEQ ID NO: 305453 - DNA, 487 bp, Homo Sapiens
  misc_feature (131)..(131): n is a, c, g, or t
  misc_feature (285)..(317): n is a, c, g, or t
  misc_feature (356)..(356): n is a, c, g, or t
  misc_feature (374)..(374): n is a, c, g, or t
  misc_feature (429)..(429): n is a, c, g, or t
gccgtagatacctataccatctcccgactggctaatgagaacctgattggcttagcagctgctgttcttgagcagaattctccatggctgaagctatcagaacacctggcacccagacgggcaaccgcccntttgtagagaagggagaagtctcagatcaccacgttttcttcccctgggcagctgttgattgattctttgcaagggtttttgacatcgttgggtcacagagaggggaagctgtgtctcatcctagttttatttgctcatcctagtttgaaaggnnnnnnnnnnnnnnnnnnnnnnnnnnnnnnnnnaaaaaaagcaacaaccaaccttgaattgaaaataggggntttacaattaaaggcccntaggaaaaaattatcccattatttaaaatccttcacaaccatgcttcacctatgnggggggaaaacctataaaggctccccccattacaccaagggggtttatttcttaaagg

SEQ ID NO: 305454 - DNA, 314 bp, Homo Sapiens
  misc_feature (258)..(258): n is a, c, g, or t
  misc_feature (267)..(267): n is a, c, g, or t
  misc_feature (272)..(272): n is a, c, g, or t
  misc_feature (280)..(280): n is a, c, g, or t
ttacttttcagctctatacctgatggcatcttgttctatcagcatgggtacagactcgttcatgtagtcccataatgttcatggagtcccataatgacactacgcagtgcctggccaagcaagttaggtttgaatgtggctagaggaagatgaataaaagtgagaataagaggcgaggagaacagagaggcattataaggatatttactctttgacttaaagaaatgagaaagtactagaagggtttcatcagagttntgggtatgncctgnctttaaangcataaattttggctatgtgggcaaaattttaaa

SEQ ID NO: 305455 - DNA, 172 bp, Homo Sapiens
  misc_feature (102)..(102): n is a, c, g, or t
  misc_feature (148)..(148): n is a, c, g, or t
cttcatgtaaatgacataccatcaccctctagacacctggaacatcattttgaagagaaggaataacactgaagtccacacgtttataatatgcctcctctntttctctgtaacagtgtatgatctcaaaacaggtttgatacaacgnaaaacaaaaagctgagacaaaatc

SEQ ID NO: 305456 - DNA, 332 bp, Homo Sapiens
  misc_feature (223)..(223): n is a, c, g, or t
  misc_feature (279)..(279): n is a, c, g, or t
  misc_feature (313)..(313): n is a, c, g, or t
atatgtttattaaatactgcagtaaagtgaaaaacagaatggttgtatgagtatttgacctacagtttctactgaaaatgtattgctttcatgcccgttgtaaagatgaaaaatcataagttgaaccattgtaagttggggaccatctgtataagattacaaatgaaaccctttacattaaaatacaactatcaaaatatttaaacaaaccaaaagtgtcccntagtaatatatgtgcttctttgcattaaataacaaaatctgtgacaggcttaaagngtatccataatttctaccataggaataatgtagnggtttacatatttgtatct

SEQ ID NO: 305457 - DNA, 426 bp, Homo Sapiens
  misc_feature (237)..(237): n is a, c, g, or t
  misc_feature (239)..(239): n is a, c, g, or t
  misc_feature (271)..(271): n is a, c, g, or t
  misc_feature (327)..(327): n is a, c, g, or t
  misc_feature (361)..(361): n is a, c, g, or t
  misc_feature (371)..(371): n is a, c, g, or t
attatgcagaattctgtcacatttcagtttacctcatattaaattgggacttcatttgcaaatttctgtttttccaagaatttctaattgccttttttcttgttgacatagagacaagtttactgtcttgttgacagtaaagacaaattttcttaacttgtctttactgcatcaaaatcatctagctggtcagtttaggttaagtctagtgtacagctatatatatgtatatatttngngtcactgtttggttttggttgttatatttccnaccttcctactttcttaaattgcttttgatacagcatatcttcaaaataaattttnagagactatacatgggcaggataaaattacaagngctttccagnctgaaaagcaggggatgaggtcaacagaagggcttcccgttcagagtttcaagga

SEQ ID NO: 305458 - DNA, 353 bp, Homo Sapiens
  misc_feature (254)..(254): n is a, c, g, or t
  misc_feature (266)..(267): n is a, c, g, or t
  misc_feature (284)..(284): n is a, c, g, or t
  misc_feature (291)..(291): n is a, c, g, or t
  misc_feature (296)..(296): n is a, c, g, or t
  misc_feature (299)..(299): n is a, c, g, or t
  misc_feature (302)..(302): n is a, c, g, or t
caggatggtctcaaacagctggctcaaacaatcctcccatcttggcctcttaaagcactgggattacatgagtgaggcaccacacctggccaagaatttccttaaagcctatgaagtggtgagcctttcatttcatgtggacggttctggtggctgcaggatggcctgaaatgagagagcaagtgatcctttagagaaatggtttccttttatccagtctgaagctgatgggggtgaaatctggagtggcagangtaaggctggannggaggagctagatcggnggagaancatcngcnggncttggcttgaaatgtgttgggtttgttcattcgtttatttactcagccggt

SEQ ID NO: 305459 - DNA, 288 bp, Homo Sapiens
  misc_feature (215)..(215): n is a, c, g, or t
  misc_feature (230)..(230): n is a, c, g, or t
  misc_feature (277)..(277): n is a, c, g, or t
tgagttcctaggtggggagacaggggtgcagctcagatttaaatcaggatagcagcactttcgtgaaaagcctaggcacacagactcccttcatcagggagctgttggtgtggagcttccttttcctgtttcgtgtccttcccaaagtcccactgctattcttgcttttggagtgtgagtgctgcctgtgagaagacttcttctttgcccagctnggcccctgcagactncctccagccctaaggggagcatgaacttgccttatttgcccaagttnagaaggggaag

SEQ ID NO: 305460 - DNA, 400 bp, Homo Sapiens
  misc_feature (41)..(226): n is a, c, g, or t
  misc_feature (286)..(294): n is a, c, g, or t
  misc_feature (380)..(380): n is a, c, g, or t
tttaaatattcatcccagtgtcatcccagttagtcatactnnnnnnnnnnnnnnnnnnnnnnnnnnnnnnnnnnnnnnnnnnnnnnnnnnnnnnnnnnnnnnnnnnnnnnnnnnnnnnnnnnnnnnnnnnnnnnnnnnnnnnnnnnnnnnnnnnnnnnnnnnnnnnnnnnnnnnnnnnnnnnnnnnnnnnnnnnnnnnnnnnnnnnnnnnnnnnnnnnnnnnnnnnaggatcacagtccaccattcaaactcttaggggtctaatagggttatgggaattagggannnnnnnnnattatggggccaaggtaggtaatgtgtaggccttcccatagggtccagtgccaatattccccccttccaaaagtgttaccgtttcnggcagccaaatggttgggat

SEQ ID NO: 305461 - DNA, 122 bp, Homo Sapiens
  misc_feature (99)..(99): n is a, c, g, or t
ttgcccaaccaccatctattttctatatagcagccacatcttatagacctggctcatagctgccttgtagaactcatctccttccagccgccttgctcngtctcaaacactctagggcatat

SEQ ID NO: 305462 - DNA, 454 bp, Homo Sapiens
  misc_feature (146)..(146): n is a, c, g, or t
  misc_feature (242)..(251): n is a, c, g, or t
  misc_feature (275)..(275): n is a, c, g, or t
ttctttctaaaggagtatctcaaataatgggaggagtcagcaggctagagtgtaggatattttgcagcagtgtcttgctttcagcttcacgtcatcccattgctccctcagccagcctctgaccctacacttggtctataccaggnttatatactgagtttcatggatacacttaggtggcattaagtagaataatggcagatgtaatgtttatataacttcacttaaatttagtttaggcnnnnnnnnnncacctcatcaacacagaaaacctntaacctaaaatttgtgcaggaaatgtgtttcacaacagcaattaggggatacagggtgtatttaatctgttctcgcactgctaaataaaggccataccccgaggactgggggaattttataaaggggaaggagggttttaatgggactcacagctccccatgggctgggggagggcctc

SEQ ID NO: 305463 - DNA, 393 bp, Homo Sapiens
  misc_feature (150)..(150): n is a, c, g, or t
  misc_feature (189)..(189): n is a, c, g, or t
  misc_feature (293)..(293): n is a, c, g, or t
  misc_feature (337)..(337): n is a, c, g, or t
  misc_feature (368)..(368): n is a, c, g, or t
acattcgtattgggagcgatgggaggggcctctctgtcagtggaggtgctcagtttcttcagccactccaagctggagctctggggatcctgggggtggccgggcacattggtcatgttcccatcattgcggacgggcaatgggtagttntagggcatggtctcgtagatcatgatgaagtacttggtntaggggctgagtgggggcagaattacagctaggctaccaatgatgaaggacacaaccagcactggctccctggcccaggcattcttgagggaaagtgccaagtntcgccaccatcttggtctcggcggcttgaaactttgaatttttnattttcgatatttttcacagtttcccggttngttaatgacattccaaaaaaatttt

SEQ ID NO: 305464 - DNA, 348 bp, Homo Sapiens
  misc_feature (208)..(208): n is a, c, g, or t
  misc_feature (252)..(252): n is a, c, g, or t
  misc_feature (257)..(257): n is a, c, g, or t
  misc_feature (294)..(294): n is a, c, g, or t
gcttcttccagtattgcacaatcccataattattgctattcagctaaaaacatgcctcgaggattgcagaagatgagaataataattttaaaaactggagtcagcaacacgaactcttgaaagcactagtataaaagcattcaagaaataacttcctctggcttccttggacttgtttaagagattactaatggcaaaatcaagtggnaattttaatggatcagtaggtctttatgaactataagttccccnggtgnaaatcaaaatgctgctcgtgatgtatgcctccgaacngggttgctgacctaaggtctggggacctgcttaaggctgtgggcttatgcactg

SEQ ID NO: 305465 - DNA, 200 bp, Homo Sapiens
ggaggccagacgctgtggctcttttccagcccacttgtctacgctggatatcctgagggcacttgattttgtgaccccaggactaagtcaactctgagggctgtcagctggagcatacagtcttatccactgttagaatgtcttttactgaaataacatttggcataaaacttgtagacataaaacagtctgcagccatt

SEQ ID NO: 305466 - DNA, 103 bp, Homo Sapiens
  misc_feature (51)..(51): n is a, c, g, or t
  misc_feature (65)..(65): n is a, c, g, or t
  misc_feature (87)..(87): n is a, c, g, or t
tgccgcttaggaaggccctgccgggagcagaagtggagacatcagcagganggcatcggcaagtngctcccctcccgggcctcatcngccaaacgatcatctc

SEQ ID NO: 305467 - DNA, 279 bp, Homo Sapiens
  misc_feature (266)..(266): n is a, c, g, or t
acaatggagcaggatctacacaattctaaagaaaagcaagcatgactcaaggatttcctcttcatcctgtgttcttcatgtagagagacagcagagaggcagtcagagaatactgtctgataagcccttgaaaaagctgtagggccaagatgagatacagagatgactcaaaacagagaatccaggaatgcatagatcctggtaaaaaaggtgggagatgagtaataaattcatttgtgtaggattaagactaatccaactaacanttatattattgga

SEQ ID NO: 305468 - DNA, 441 bp, Homo Sapiens
  misc_feature (264)..(264): n is a, c, g, or t
  misc_feature (379)..(379): n is a, c, g, or t
  misc_feature (409)..(409): n is a, c, g, or t
acattcccagtctgcctttcactgagtttttacctgttcactagaacaacaaaagggaacccaatcgggaaactctgctgtcaactaagcaaactctaaatttaacatttgggggaccccttggagagtagttgagagctatgtgctcccctcttcagaaaaatgctctcaaatactcagtgcataagcccacagccttagcaggttcccagaccttaggtcaggcaatcctgttctgaggcatacatcacgagcagcattttngattttcatctggggaacttatagtttcattaaagacctactgatccatttaaaattttccacttggattttggccattagtaatctctttaaacagtccagggaggccaggggngttatttcttgaatgcttttatactagtgntttcagggtttcgtgttgctgactcccgtttt

SEQ ID NO: 305469 - DNA, 455 bp, Homo Sapiens
  misc_feature (362)..(362): n is a, c, g, or t
  misc_feature (417)..(417): n is a, c, g, or t
aggacaacaaattcctcccctgtttagttgagggggcccgaataattgtcaagaataatctaaatgaaggaatcttaagtggaagcggtgcacataggatattcattctccctatgggcagatactcaggtatctccagcaagatccatagttatacagctcactttgttttagaacagtggtcataatctactaatacctctgttcctatttgaggcccaattgaggatttccccaaagattcctgataaggattaaggtgtatccttttcagagactgtctccctatctctccacctctggaaggacttgcaggaaaggatttctgtttttgagtactcccaaacacaccttcatggcanttacttgtggcgtgtggattacttgttaaccaaaaatggcatctgttcctacccngccacaaacaaaccttggtcaaggggggggcggcgtgg

SEQ ID NO: 305470 - DNA, 312 bp, Homo Sapiens
  misc_feature (300)..(300): n is a, c, g, or t
acagtctaaacaaatacgagacaaaacatggaaggcaataagctgcaattaaagattttgtttttggaaatggtcattaggcttaaaaatagtcacagggtcagtttttcaccaagccaatgcagggtaaaaggctaatctcacttgtaattcttagcagctctctcactgatggtttagttacttaatctccttggtgtttactgtgtcgttccttacgggtgaagaatggggagatgaacgggaatgctttgtctaaagcacaggaagggttgctgggaaatttttaaggactcaccngttcagggcaac

SEQ ID NO: 305471 - DNA, 219 bp, Homo Sapiens
  misc_feature (206)..(206): n is a, c, g, or t
tttaagttcattacaacccctttggaatgtggcatcacaaaatttggtgtctgaaaataatgttagagattattgtatacaattagagacaagactcaaatgtaggaaccacattacctaactcctaagtcagtgtttcttgtgtatttcatgacatttaggattttgaccactataaattattacggcaagttattagggtaacntagtaagtgttta

SEQ ID NO: 305472 - DNA, 283 bp, Homo Sapiens
  misc_feature (97)..(151): n is a, c, g, or t
agaattacatcctggcaaccccctccataatggttatagccaatgatacagaggagtcatgactaaccctggtcaattccagtgtctgtcctgcacnnnnnnnnnnnnnnnnnnnnnnnnnnnnnnnnnnnnnnnnnnnnnnnnnnnnnnntcatgcatcaatcatgcaatgcaaccatcaaccaaccattcagccaacaaaccagccagtcattcaaacttctaattcagccacctattcagtcaaccaattaaaccagccaaccttaccaaacagccaacc

SEQ ID NO: 305473 - DNA, 252 bp, Homo Sapiens
  misc_feature (49)..(49): n is a, c, g, or t
  misc_feature (119)..(136): n is a, c, g, or t
  misc_feature (211)..(211): n is a, c, g, or t
  misc_feature (236)..(236): n is a, c, g, or t
taggtggttgcccaagagacttctcaggcctaaggaaagcagccgatgntcccaagacaactctgtccggccagtactccagggcaacttcaaccccactaggacccaggccaaaaccnnnnnnnnnnnnnnnnnngaattaacgcaaaacagagccactttggtgcctacccctccacaagtaggtagggcacattccagggtagctctnttcagaagatggggacctgggcgcnttgcaggggttaggcc

SEQ ID NO: 305474 - DNA, 387 bp, Homo Sapiens
  misc_feature (199)..(199): n is a, c, g, or t
  misc_feature (214)..(214): n is a, c, g, or t
  misc_feature (227)..(227): n is a, c, g, or t
  misc_feature (259)..(259): n is a, c, g, or t
  misc_feature (280)..(280): n is a, c, g, or t
  misc_feature (305)..(305): n is a, c, g, or t
  misc_feature (360)..(360): n is a, c, g, or t
  misc_feature (377)..(377): n is a, c, g, or t
gcattcatttggcgccctagtttattgaatatctaactaagtgctaggtcctgtgatagtcacagaataagacagattaggtcttgctctcaaatttattttattggagaaaggcaaacaagagtttccccctagttcctcccactttctttctttgtgctgagaaacacagggtgccttcacagttctgtgacctggncagctgcaagttttnccttgaaggcttnagccaagctgagggcttagcattcccagggantgctgaaatactgcaagaccnaatttggcaaaactcacagaaactnggttccccaccacggatcgaatttcctcaaacccctcatataaaacttctataanctgacccccttcctcantagggcaaaa

SEQ ID NO: 305475 - DNA, 244 bp, Homo Sapiens
  misc_feature (197)..(197): n is a, c, g, or t
  misc_feature (210)..(210): n is a, c, g, or t
ggcatgcctgttaatttttattgaaaagtgggcattgtatataaaaaaattgtagcgaccctagatgattttctaatatctagatggcttacaccatttgctaggcaaatagaatgggggctgattccatttatcttgtctgagctgaccacagcaagggcgtggttttggtcaggctccatctctttttggtttgncctctactctttnggaagtacccctgcaaggagttctggcctaagga

SEQ ID NO: 305476 - DNA, 386 bp, Homo Sapiens
  misc_feature (49)..(49): n is a, c, g, or t
  misc_feature (288)..(288): n is a, c, g, or t
  misc_feature (319)..(319): n is a, c, g, or t
  misc_feature (345)..(345): n is a, c, g, or t
  misc_feature (374)..(374): n is a, c, g, or t
ggctttaacaatggcctgggctccagctgtggctttggcagggctctgnttcttcagctgtaccagctcctatagggccatggttgtgaggaagatcaagacctatgatgggaagccaatgttcgagtcctctgatgcactgcccaagtgaatggctgtagcagcccctcccaacctccccttcctgtggctgccccagagcctgtgagggatgctgcagtacaggggagcatagggaacaggagatccatctgaggctcatccttaccccttcagcccacccttgtnggaaggttttatttgcatggagtacccccantttgcccattgcccccaacaaatttnttttgtattttttcccaaaattaaaaggncttcagtttagg

SEQ ID NO: 305477 - DNA, 389 bp, Homo Sapiens
  misc_feature (217)..(234): n is a, c, g, or t
aacagctgtgtgagacctggaccggttagaggagttcactgcccctgtctgttggtctgccctctgcctttttggaagactctggagaatcaaccagaggagttttcctggaggtcccaggtaggggagggatacagaatctgtgtcttctgactagtgtgaagccacactgggctgcagaagccagtcttcccagcaattatgacagctcttgaannnnnnnnnnnnnnnnnnatgcccttccgaagcatttaagtgttgtctaacatgttccagtgtctgtctgaggtggcttataaaagcagggacaaaacttctatcagagtcagggctgttaccggtggaaggagatccgagttaccctgagtttaccagcagcacatctgtgc

SEQ ID NO: 305478 - DNA, 476 bp, Homo Sapiens
  misc_feature (259)..(271): n is a, c, g, or t
  misc_feature (380)..(380): n is a, c, g, or t
  misc_feature (387)..(387): n is a, c, g, or t
  misc_feature (403)..(403): n is a, c, g, or t
  misc_feature (412)..(412): n is a, c, g, or t
  misc_feature (431)..(431): n is a, c, g, or t
  misc_feature (439)..(439): n is a, c, g, or t
cttcacagataatgaaagttaggccaaagtattcaagtaacctttaccaaaatcagtcacagggcagtttagtggcagagggcaggggcaataacgccatatttactttggttcttatatatagttgctttcttctaaggaatctaaactaagtagaactaaaaagttgtaacttttatcatgtagttgaagacattacagtgaaatgtgaagagaatgagagtgagtttggtcttttgtagggagaaaaaggacagcnnnnnnnnnnnnnaagcatttgagagaaactattgtgaagctttgaagcttcgttgacaataattcttagagtatgtctttggaaagagctaagatatgttttcctatactaggagcttttncattccngtttcccggggccttnctttacccntttttgttatgtccggccncgtggtcntcggttggtttcccgaacctggccctgtttatttccg

SEQ ID NO: 305479 - DNA, 369 bp, Homo Sapiens
  misc_feature (47)..(47): n is a, c, g, or t
  misc_feature (317)..(317): n is a, c, g, or t
gtttcatggcagggaaaatagcttccatttccaaaggcagacttggncttttagattctagttttgcctccaatcaccacatctttttacctatgtttgtatctccttataatgatggcacatactacaatgttccatgaatgtctgaagatgctgtagtatactatttgaacttagaaaatctgtctccataccaataccaaagtgacttaatttctttactcttcttaaaaatgaagtggggatacagggtatttatggttttgaggaattttgaggagttctcttcaggaaaactgtgaggcacccaaggggantggcaggggcctataggggggaccaggcccaccattcttccttccggtggtt

SEQ ID NO: 305480 - DNA, 229 bp, Homo Sapiens
  misc_feature (42)..(42): n is a, c, g, or t
  misc_feature (79)..(79): n is a, c, g, or t
  misc_feature (177)..(177): n is a, c, g, or t
  misc_feature (201)..(201): n is a, c, g, or t
  misc_feature (209)..(209): n is a, c, g, or t
gcatgtttgaagtcaatgaaaagcaacctgttagcccaaagncctgggaacctccttcccagcaagaactgagaaacanttacttctgaaaaccagttcatttgtaagaagatgaccttaaacgtcccctaattagagctacagtaagttggtctactttaaaattaatttttaaangaaaccctacagttctactttctntggcagancctggatcctaaaattagcc

SEQ ID NO: 305481 - DNA, 376 bp, Homo Sapiens
  misc_feature (294)..(294): n is a, c, g, or t
  misc_feature (352)..(352): n is a, c, g, or t
  misc_feature (359)..(359): n is a, c, g, or t
aaaacacaatagatttccattagaaccatcctttaattcaataaattctttggatgaactctgtaaatagactactgacacatagcactcaaaaagtcttatgaaccttaaaacacaaagtagtagactgggtagacatagggacaatacagctcatcatttcatttttgacatgttggacttcaccatgcaagtaaattaatgcatatatgatattttgttttgttttgagaaagggtcttactgtgttacccaggctggaatgcagtggcaatgatcttggctcacagcaanttctgtctcctggggctcaagtgatcctcccaccccagcctcccaagtagggtggggnctaaggntgcatacctctatgctc

SEQ ID NO: 305482 - DNA, 233 bp, Homo Sapiens
  misc_feature (189)..(189): n is a, c, g, or t
tatttaatagaaatgctactaaaacaggtgtgaattggtatcatcttttaattttagaggcagtaatttagatagaattaacacataccaataatcagtctgattagttatccattggtgactgcttctgtggcaaagatgacagaaagactgtcaaacattgaactcctttaagtgaatttacaaggntaacatttttcagataatgatcatgaaaaatgacattgtgtaac

SEQ ID NO: 305483 - DNA, 394 bp, Homo Sapiens
  misc_feature (286)..(286): n is a, c, g, or t
  misc_feature (316)..(316): n is a, c, g, or t
  misc_feature (326)..(326): n is a, c, g, or t
  misc_feature (342)..(342): n is a, c, g, or t
  misc_feature (365)..(365): n is a, c, g, or t
atttttttccacatagttatacacatttgtgctacatgaccaaggtgtgtgttttaacttggaacttagggtaatataagagtcccagatttcttcaatataaaagatcaagtcaaagtctaatacatttaagatccttcataactatgttttaagtgagagttcactcataactagtaaatgtatttgatgctgtctagctttacataaagtagctctccaaaacaaatctggtattactgggaaattatttgtcagaaacataaatcaaattctattaatgccntatctgaggggcatttctgattttctaagntgtattatcnggcaaattacttacgntttcaataaatggcccaattccntattaaccaatggctattttatttctcct

SEQ ID NO: 305484 - DNA, 400 bp, Homo Sapiens
  misc_feature (127)..(127): n is a, c, g, or t
  misc_feature (321)..(321): n is a, c, g, or t
  misc_feature (364)..(364): n is a, c, g, or t
  misc_feature (381)..(381): n is a, c, g, or t
ccttttctattagaactttactaggtaaaggtatttgaatgtctgaactccatgtttagaaggagtcattggttttaaggctctgtcctagtacacctgtaagagcatttgcttaaaattgcctggnctttgtatgttatctctgtcacttcatatttgaaaatcacttgctagaatatggcctgatcaatgctgttatgctagtgagaaaatccacaactaaagactatttgctatatattagcattacggttagaagtctggaagcctttggaggctggtcaaatctgagttcaggtctagctcttcgagtttactggntgtgtaaccttagggcaatttactttaacctccgtggagtctncagtttccttatctgtncaaatggagggttaaaaga

SEQ ID NO: 305485 - DNA, 189 bp, Homo Sapiens
  misc_feature (127)..(127): n is a, c, g, or t
  misc_feature (167)..(167): n is a, c, g, or t
  misc_feature (173)..(173): n is a, c, g, or t
atgtttcctcgggacaagtcattttcatgaatctgctgtaaaacgtctcccaaactccaagtgtttcccaaactgagtgaaaatcgctgcagaatgtggtttccagcagagcttttcccctctcctnccttcacctctgcctgggttacagggtgcgggttccaggngttttnctagaagggaacaaaa

SEQ ID NO: 305486 - DNA, 261 bp, Homo Sapiens
  misc_feature (116)..(116): n is a, c, g, or t
  misc_feature (195)..(195): n is a, c, g, or t
ccggccctcccctctctgaacaggattgcctactccgtcctccgactcccagagcttttcactgacacctggggactgctgggtccctccttctctcctagcctgcccagggccancccaagcctgcagtagattttcatttatctctgtaagaacgtttacaaggacatggagcaaattagcattacacaaatnacgatgctgcaaatgaggcgttgtacagggttggcgggttgttgcagggcaggttttctgttcgtt

SEQ ID NO: 305487 - DNA, 121 bp, Homo Sapiens
ttgaatcaggtttcaagtactcttagcttttttctacgtcagagaatccaggtctctaagtctgacccagcttcttgtgcttgagccactagcaagccctaccagggaagacacaaatgaa

SEQ ID NO: 305488 - DNA, 419 bp, Homo Sapiens
  misc_feature (332)..(332): n is a, c, g, or t
  misc_feature (366)..(366): n is a, c, g, or t
  misc_feature (387)..(387): n is a, c, g, or t
ggatacagtaacgtaaaaccgcagaactgatgggtcatacaactcatttttgaatttgtactcaaggcctctgctacaaaatcccttgttgtttaacttaaaaagcctagaagcccttaagagctagctgttcttgaattttatctgggttgccttatagtctgagagttgcttatcagatttcctctcccctacatctcgtcatatgtattttcactttcacaaaggtgagtgcagcattaatgaggcaaaagttaatcttttctttgccagcattaataagagaccctaaagagcagcaaaggcatgtccagtgaactcagtcttcaggnaaactttaaggctttaaaactttcagtaattgantttaggtgcggttttgggggnggctaattttgggggtgccgttaaaattttgg

SEQ ID NO: 305489 - DNA, 409 bp, Homo Sapiens
  misc_feature (22)..(22): n is a, c, g, or t
  misc_feature (58)..(102): n is a, c, g, or t
  misc_feature (130)..(234): n is a, c, g, or t
  misc_feature (374)..(374): n is a, c, g, or t
ctgaggctagagtgcagtggcnaatcacagtttgctgcagcctcaacttcacaggctnnnnnnnnnnnnnnnnnnnnnnnnnnnnnnnnnnnnnnnnnnnnngaacacaccaccatacccagctatatannnnnnnnnnnnnnnnnnnnnnnnnnnnnnnnnnnnnnnnnnnnnnnnnnnnnnnnnnnnnnnnnnnnnnnnnnnnnnnnnnnnnnnnnnnnnnnnnnnnnnnnnataagccactgtgttggactttttggtcattttaaatttagttattttcttactactgacttttgaggattctttacattctcaataaaaggcctttatcatttatgtgccttgcaaacattttttcccggtttgtgggnttgtttttccattttcatagggtgtcttttggaaa

SEQ ID NO: 305490 - DNA, 440 bp, Homo Sapiens
  misc_feature (27)..(27): n is a, c, g, or t
  misc_feature (53)..(53): n is a, c, g, or t
  misc_feature (237)..(237): n is a, c, g, or t
  misc_feature (316)..(316): n is a, c, g, or t
  misc_feature (329)..(329): n is a, c, g, or t
  misc_feature (331)..(331): n is a, c, g, or t
  misc_feature (343)..(343): n is a, c, g, or t
gataggttctttctatgttgtccaggntggtctcaaactcctgggctcaagcnttcatccacctcaacctcctaagtagctgggactataggcacgtgccattgtgctcagcttatatatttttttgatgctgattattatcagatactgtcttaggtgctagagatactgcagacaccagtatctccccttatacagttgattgtaatagggagacactgaataaataagtatggnaattacacacagacccctcggtcttccctcagtatatcaaagctaggtaggctgagtctaggaactacagaagaaaacntacaaaaaaaccngntttgaaagcgcngacttttccctgctggggcaaatcaactcccctacacacaaggctgggtaggggaaggccttacctccactgcagtgttgacatggtcgcatcacgt

SEQ ID NO: 305491 - DNA, 353 bp, Homo Sapiens
  misc_feature (29)..(29): n is a, c, g, or t
  misc_feature (59)..(59): n is a, c, g, or t
  misc_feature (187)..(187): n is a, c, g, or t
  misc_feature (196)..(196): n is a, c, g, or t
  misc_feature (201)..(201): n is a, c, g, or t
  misc_feature (241)..(241): n is a, c, g, or t
  misc_feature (340)..(340): n is a, c, g, or t
gctctgttgcccaagctgggagtggaatngcaccatctccactcaccgcaatctccgcntccctgggtccaagcaattctcatgcctcagcctaccgaacaactgggatacaggcacacaccaccacatccagccaatcttttgtattttcagagagacagggcttcatcatgttggcgaggctggnctcaaactnctggnctcaagggatctgcccgcttgggctcccaaagtgctggtnttacaggtgtgagccgccatgccagggcctccatcattcttttaaagtgctgacagaggaccacttacagtcggttttggacataaacttacatagggnccacataggcctt

SEQ ID NO: 305492 - DNA, 332 bp, Homo Sapiens
  misc_feature (133)..(133): n is a, c, g, or t
  misc_feature (144)..(144): n is a, c, g, or t
  misc_feature (225)..(225): n is a, c, g, or t
  misc_feature (249)..(249): n is a, c, g, or t
  misc_feature (276)..(276): n is a, c, g, or t
  misc_feature (303)..(303): n is a, c, g, or t
  misc_feature (308)..(308): n is a, c, g, or t
ctttattctacttgtaattcactggataaacaaagaaatttcaaaccaaaccaaagtgatgatctgaatctcattagacctgaaggtcatgagaactttctctagagacaaaacctgccctgtatcacatccngcctagaaccntccccaaaagtcaaatcaactgctctgcgcttcaccagccatgttcatcccaaggtggtgattatcaaaaccacagtttgntccccaaggggacttgactctggnctctgccttgcttggtgtaggtcaaanttcttttttaaaaaatgggagagttgnccacnttgaggatgcttcttcacgctaac

SEQ ID NO: 305493 - DNA, 425 bp, Homo Sapiens
  misc_feature (22)..(22): n is a, c, g, or t
  misc_feature (301)..(301): n is a, c, g, or t
  misc_feature (378)..(378): n is a, c, g, or t
  misc_feature (406)..(406): n is a, c, g, or t
ctgctcactaatttgcttgatnactaccaactcttcttaaagttaacacgtttaaataaggtatttctggacttcctagccttttagcaagcttagaggaactagccattagctagtgatgtaaaaatattttggggactgatgcccttaaaggttatgcccttgaaagttcttaccttttctctagtgatattaaggaacgagtgggtagtgttctcagggtgaccagctgccctaaagtgcctgggattgagggtttccctggatgcgggactttccctgggatacaaaggtaccaagnagagtgttcagatatcatgtgggatttttctgataagtagccacatccagaggccttaaaccactggccccaaaagncgatttctccatttgaggagtacatatncttggaacttaaggaaatt

SEQ ID NO: 305494 - DNA, 422 bp, Homo Sapiens
  misc_feature (408)..(408): n is a, c, g, or t
gctcccagagatcccgtggaagtggcaaagacatctacaagcctctgattctctaccctaagataaccacaaagacacaagtgtccacctgggcattcgtctgggtgcgctctactgaccaagggtacgcgcggtgcctgggcattgagcagagaggggaagggaacctccatatcctgaacaccttctgccctgtgctggactgcgataggaactttatattcccatccgctaactcactcatgccccataacaacctcatgacacatggtccagcaaggtcaagctgcttgccttaaggtcacagagttgggaaattaaggaaccccatttcatgggaatgttactatttgattaaattgcaagggttttacaaggggcttcaaggttcaattttagggcaaggangcatgggggttttt

SEQ ID NO: 305495 - DNA, 134 bp, Homo Sapiens
  misc_feature (121)..(121): n is a, c, g, or t
agccctccaggagactctgaggcactagtctggtccagtgggtctcaaacttgacttgcaacaaatggcccagagatctttttgaagtgtagagtctgactcagcaggttttgggttgaantttagaggccagc

SEQ ID NO: 305496 - DNA, 330 bp, Homo Sapiens
taaattagccaagtattattaaatgccttgtatagtcttagcattccactaggtgttaacaggcacctaagagaactaaagctcatagtcctgaccttgaaaaactttatgatctagtttggatgaattcaaaatgttttcattgttttttattttgctttaaaactactgaatcttgtcttcaaacaagcttttcgtggaagaccaataaataagtgggagattccccctttctagccatctccccaatgtcatgggagttttagggacagaggcagtgaatgtaccacttcatcttcatgggataagggtaaaacatacacatgatag

SEQ ID NO: 305497 - DNA, 323 bp, Homo Sapiens
  misc_feature (30)..(30): n is a, c, g, or t
  misc_feature (69)..(69): n is a, c, g, or t
  misc_feature (79)..(79): n is a, c, g, or t
  misc_feature (85)..(85): n is a, c, g, or t
  misc_feature (113)..(113): n is a, c, g, or t
  misc_feature (116)..(117): n is a, c, g, or t
  misc_feature (129)..(129): n is a, c, g, or t
  misc_feature (183)..(183): n is a, c, g, or t
  misc_feature (198)..(198): n is a, c, g, or t
  misc_feature (283)..(283): n is a, c, g, or t
aggaataatgtcttgactaacgttttaggncccagagctccctgtgtcagcaaaggagaggtgatacancataggcctncttccnctctccaagacaaagacaactagaggancannaggtaggaaatnacatagtaaatcctagatgtatgttaaagggctttaacattgcctcatcctttntaataatattcacangcagcagctagggagggaggatgctagttctttccctttgaatgaaaatttcttatcaagctattgcacatttctggcataaggncagtgatagctttagtcttgggggtgacctgggggcaggt

SEQ ID NO: 305498 - DNA, 427 bp, Homo Sapiens
  misc_feature (317)..(317): n is a, c, g, or t
  misc_feature (363)..(363): n is a, c, g, or t
  misc_feature (372)..(372): n is a, c, g, or t
  misc_feature (375)..(375): n is a, c, g, or t
  misc_feature (383)..(384): n is a, c, g, or t
  misc_feature (392)..(392): n is a, c, g, or t
tgttatttaatattttgctcctaacttgagctgtaaacccacatcttccaagggcccaaactcacatccacccacaaggtcacgttacttttgtcccaactcagaggtgaattaatagaaaaaataactatgttagctgccgtcctgagattcactcccccatcattctgttggtggtgcacttttgaaagtgcctgtcttgctaggccttggggctaacaaagggggaagggagggcggggcagggtttatggcaggaaggtttgactttcagctaaaactgggagtgggaggggccatttagttcactttcgttncttttctttttcctggggttgtgcaggaaggcaggaattaaagggntgctatttncanggcttttnnatgttttntttccaggacccaggggcgttttgtttgttccctt

SEQ ID NO: 305499 - DNA, 135 bp, Homo Sapiens
  misc_feature (84)..(84): n is a, c, g, or t
  misc_feature (97)..(97): n is a, c, g, or t
acaacacatttgtatggaaagaaaataataccttgcacaaactatcaaaattgaactgtagtacgaaaacaatcagcaaaggantggtagccaccantacaattctcaaagtctcattagtattaattccaaatt

SEQ ID NO: 305500 - DNA, 346 bp, Homo Sapiens
  misc_feature (330)..(330): n is a, c, g, or t
aaaatgattaaaagttcaaagtgcgtggctggggcttgtcatctgtgggtttcactgtagggcgatttggctgggctgtgtagttggggaaacctggtatttgtctttcttcttgggttgattagatccccagaaaaggctctaccaatctttccagcctggatgataaaggctggctgtcagcttgatggaagccgagttggggaagagaccgtctctgaatctggcaggctagtaccctccttatctccttattttcagttggtcccttatccttgtgctgtgactaatgatcccccaatctaggagaccttctgttccaccccactnccggagaataaacctc

SEQ ID NO: 305501 - DNA, 344 bp, Homo Sapiens
  misc_feature (174)..(174): n is a, c, g, or t
  misc_feature (210)..(210): n is a, c, g, or t
  misc_feature (280)..(280): n is a, c, g, or t
  misc_feature (319)..(319): n is a, c, g, or t
  misc_feature (324)..(324): n is a, c, g, or t
gaaatatggaccagaaaagaaacataagcagtatttattttgtgaagtaattcattgatccaaaccaaactttttagttttagaacattaaaatatgtatatgtaagttgttgcttatacacttgtctgtgtccactagaggtaaataggaacaaagttatggtctgtttaagntagctttgctccttcccttgatgactctcttccctnttctttgtttattctctttctctccttggggaagggaaaatagtttgactacccgtctactataggtccnggggtctgggtattaccctctattactggctttaggggnttctnccggaggatggcaggaaccc

SEQ ID NO: 305502 - DNA, 321 bp, Homo Sapiens
  misc_feature (229)..(229): n is a, c, g, or t
  misc_feature (257)..(257): n is a, c, g, or t
  misc_feature (263)..(273): n is a, c, g, or t
tttatttaagatgaagacagtgacacttaagttactttcaagtttaaagagatatttataaagtacttcgaacttttttgtgggagcagtactatataaataaaatactgccattcaaatacagcccccgccccaggtttgaatgtagaggtcaatgaactatagagaaaatggtaacaaataaggtatgaccaaaaagtggccaataaataacacggggtcataaaantttcataaaatcctcttttaaatatggngggggnnnnnnnnnnncattacatcccggggtgtttcagctcctgactatccagctaggtaggg

SEQ ID NO: 305503 - DNA, 356 bp, Homo Sapiens
  misc_feature (252)..(252): n is a, c, g, or t
  misc_feature (272)..(272): n is a, c, g, or t
  misc_feature (321)..(321): n is a, c, g, or t
  misc_feature (332)..(332): n is a, c, g, or t
ggtctgcacatttccttcctttgactctctttgtctcagactgactctagtatctatgtggcaggatgacttatcttcctctctgctctttctcttccagaagatgacccttgctatgaagcggaaataaaattagggttctgttggcatagtaactatgaagacaccacgtttttgcaacataaaactttcttttttaatcttcaagactaagggccatttctcttattgatgattaatgctgaggatccngaagctccctttccctgggngctccttctaccctcccaaaccaggatgttcctggataggaccaggggntgttggggganggggggctgcaagggaaggggccc

SEQ ID NO: 305504 - DNA, 358 bp, Homo Sapiens
  misc_feature (236)..(236): n is a, c, g, or t
  misc_feature (278)..(278): n is a, c, g, or t
gcctattcaacactttattatgaaataggctttggttagattattttgcccaactatagactaatgtaagtgtcctgcacacgtttaaggtaggctaagctatgatgttcagtaggttggatgtactaaatgcatttttgacataatattttcaacttataatgggtttattgggatgtaatcccattgtaagtcaaggagcaactgtatttcttttataattgggtaggggaggntgagaggggtaagctgttttgttttgataaagcccgggggantgggtgaagggaggggaaagggcttgtttctccctttttctcccgccccaagtgtctaggagagggataaaaagggggcc

SEQ ID NO: 305505 - DNA, 134 bp, Homo Sapiens
aattaagaagtcaacataataattttaaactaaccggttgaataacatacaaaaccaagtacacaataaggaaagacccaaaatctggatcggttatttctcccaaattccattccttaagaaattaagtgttt

SEQ ID NO: 305506 - DNA, 456 bp, Homo Sapiens
cagttcaaaataaatggtgccctttggtcctgcagatggtttctttcttatctagttttttctctacatgaaaagttttgctgactcctgttcttaattttctattgttcttaatttaggtcctatgtctgtgcttgcctgatttttcctgtgactatcttttacagataaaatagtggaagaatcatcatgtatataagttcaagaagttttcattaagctgctaatttcctaaagaaatctggatcatggtgcatcctttgtttgtgtgtgggaggatatagtgatactgaatgaatcatgtcttgctctgtagcaagagggaatatttgggtaaagttgatgttggtttgctttgggtgagccagtgggagggtgggagtggggatcccgacccccagtgggccccctaaaaggcagccgagcccctaggaaaccagggcccacctggggttt

SEQ ID NO: 305507 - DNA, 329 bp, Homo Sapiens
ccagaggcacacgccaccatgctcagctaacgttacccaggctgatctagaactcctgggctcaggcgatcctccccactaggcgtcccgaagtgccaggattacaggcaagagccactacacctggcccttatttgtgcaattttaaagtggtgttttatccaaagagaaatgcgaagtttgtaaaataattttcctcaaatgataatgacttcaaaagacttacaaatctttacagaaaataaattaactactttaacatctatggctctaaaaatgactattaaatatttttgtaggttaacagggaaatcacattcaattgtttt

SEQ ID NO: 305508 - DNA, 265 bp, Homo Sapiens
  misc_feature (106)..(106): n is a, c, g, or t
  misc_feature (113)..(113): n is a, c, g, or t
  misc_feature (170)..(170): n is a, c, g, or t
  misc_feature (243)..(243): n is a, c, g, or t
aacagaaagaccctgtagttgaaagcaagaggaagcaacagagagaggcagtgagaatcaaatggctcagttaagcctcggtgtggctgggctaacgctttttcangtcactnttacaaggtaatccattcgcctgaagaggcatgcagcatcttgaaggaagggaaccnttgtggctaggtgattggggtggaatggcattccctctggaatctgattgcagacctgatttcccagcttggncccctggggcttctttagcttt

SEQ ID NO: 305509 - DNA, 272 bp, Homo Sapiens
  misc_feature (213)..(213): n is a, c, g, or t
  misc_feature (248)..(248): n is a, c, g, or t
cctactcattctgactaatgtagaagaaatgatggggaacggaaaattgctgtttgacaaaccacagtgggtaatggggtacagacaaggaacacttcagtgggacacttaaagttagggggggcaatgtgtgttgtggaaacgggggtatctggcagagtctttgaggaacctccccctggaagatgcttaggtgactccccaaggggaacngttggttaccttcacagttaggacacccccccttngctttgcgggttcattcacccagt

SEQ ID NO: 305510 - DNA, 418 bp, Homo Sapiens
  misc_feature (326)..(326): n is a, c, g, or t
  misc_feature (342)..(342): n is a, c, g, or t
  misc_feature (349)..(349): n is a, c, g, or t
  misc_feature (361)..(361): n is a, c, g, or t
  misc_feature (371)..(371): n is a, c, g, or t
  misc_feature (383)..(383): n is a, c, g, or t
  misc_feature (389)..(389): n is a, c, g, or t
  misc_feature (403)..(403): n is a, c, g, or t
ctgaagcagagaattgagatgcctcagctatcaagttgttacatatagaagtgttcctgtggttgatgagttactagaattattgacccatttctggacttttcatttaaaaagttgtaagtagggaattttggagatcatgagttatatttattttatccctgtatcttcagcccttattaggcatgggaacctgggcacatagtaattgatatgtattatctattacaggcaacctattaaaagtaaggtatttgtcttgttttatgggatgaggcattctgagacttcagggggttaaatagcttgctaggtagtggtggggncccagggggcttaacntcgaggntttgtcttcacnttccatgttnctttcacccccntacacntgtttatttggaantccagggggggtaaa

SEQ ID NO: 305511 - DNA, 472 bp, Homo Sapiens
  misc_feature (142)..(143): n is a, c, g, or t
  misc_feature (173)..(173): n is a, c, g, or t
  misc_feature (206)..(206): n is a, c, g, or t
  misc_feature (269)..(269): n is a, c, g, or t
  misc_feature (360)..(360): n is a, c, g, or t
  misc_feature (362)..(413): n is a, c, g, or t
  misc_feature (422)..(422): n is a, c, g, or t
  misc_feature (430)..(430): n is a, c, g, or t
  misc_feature (440)..(440): n is a, c, g, or t
ggcagcaacgaaggctcgacgatagtcccgccattggtccgcgctgcagcttgttctggcagcgagtttagttcaggaaatttgctgagaattttttttcacagcaagcctcatatttttgttgcaaattgtgtggcgtaanntaccaaatgtttcctctgacaggacaaganaagacctgcagcaccttgtagtgagaggctttnagggcctggcaagtctgaaatgtgctgtgttctgggttatgtgtgtgtccaccctggggattngggtcatgggaaagcgcctaagggaggcctcagtgtccacctgggcattggaaaacatgggactttcttgggaaaagctccagagcagggncnnnnnnnnnnnnnnnnnnnnnnnnnnnnnnnnnnnnnnnnnnnnnnnnnnnnctcccagtnagtttttnttttaacgtngaaatttttagggctggttaaaggcaaaactt

SEQ ID NO: 305512 - DNA, 325 bp, Homo Sapiens
  misc_feature (304)..(304): n is a, c, g, or t
gagttactgcaaggtttaggcgagacaatagcaaaaatgttttcgggggctgcacaaaaaagagggaattgtagtagttttacatcgccataacaagcagaactggtacctgctggtggatggtctgtgcttcccagagcgggatctgtggatgcttggggagggggaccactgagatctttcagagggtacataatgttcaaactattttcatgttattgagatgttttgtctttcaacatttgtacttaacggtgcaaaagcagtgggtgggaaaatgctgtatcccttcatagggaaccantccaagggcagaggaacccgt

SEQ ID NO: 305513 - DNA, 328 bp, Homo Sapiens
  misc_feature (111)..(111): n is a, c, g, or t
  misc_feature (208)..(208): n is a, c, g, or t
  misc_feature (250)..(250): n is a, c, g, or t
aaaaactaaaaatttattataaaagtgaaaactaaagccgaatatggttgagatgatacgagagcacttaagcagttttaaatgtattcaagttggtgggcccaagtaggnatttgaatgtacttgcaaatgagattatggaactacttattggcattaaagtgaaaagctctaaagcatagaggacagaaatactagagagattcanaaacccaattttcaaattagtatgggattctattcactgctnaacttaattcagcttccatggatggaatcctaacccagtttttaaagccaaagtatttaaatagttttgttgagcccc

SEQ ID NO: 305514 - DNA, 362 bp, Homo Sapiens
  misc_feature (248)..(248): n is a, c, g, or t
  misc_feature (289)..(289): n is a, c, g, or t
  misc_feature (296)..(296): n is a, c, g, or t
agggctcggcgtggcataggtgcacacagcctgacttcaaacaggcctatccactgggctggctgtgtgactaacaaataaatgttaagtacgcaaatttacacttggccatgacttgctcaaaattggcttaaaatgctgcagggtatgattctgaatcagtaaacaacaatacatttttcacttcagtcagccaaacacagagttcaaataagattttgaaattaggaattcaggactcattgccntttagggctgtggaatttaacagtttaaaattaggtctccntttcacnttcggcttaggggtttgatgggggcaaaactggccccaagggaaggcatctgtttttttgccgggt

SEQ ID NO: 305515 - DNA, 247 bp, Homo Sapiens
  misc_feature (25)..(25): n is a, c, g, or t
  misc_feature (35)..(35): n is a, c, g, or t
  misc_feature (62)..(166): n is a, c, g, or t
  misc_feature (214)..(214): n is a, c, g, or t
ttcggcacggttggcaatatagccncgccagtgtngggaagcagtcggaggagggtaggttnnnnnnnnnnnnnnnnnnnnnnnnnnnnnnnnnnnnnnnnnnnnnnnnnnnnnnnnnnnnnnnnnnnnnnnnnnnnnnnnnnnnnnnnnnnnnnnnnnnnnnnnntgagatgggtaagtttcctggacccctcgttggacttgtaatggggtnttgactttttttgctttgccacccagcttcaaa

SEQ ID NO: 305516 - DNA, 395 bp, Homo Sapiens
  misc_feature (50)..(50): n is a, c, g, or t
  misc_feature (238)..(238): n is a, c, g, or t
  misc_feature (278)..(278): n is a, c, g, or t
  misc_feature (318)..(318): n is a, c, g, or t
  misc_feature (330)..(330): n is a, c, g, or t
gagggcttcacttttaaggtttgagacccctttccttggtcattgcacancttcttcccctgatagaagaggcccagactgtctgtccctgtctcagggtcacctcagtgagggacgcgacctccaggtcccctctgagcctctgaacagcccagctttgctcctgggagttccgacacataggagggttagaggaatccaaggaggagctttctccaagaattggtggtcagcattnggctacctgggagagagtgactgccaagccccatggctgncactgtctgggttggatggggtggtcctgcactgggtgantcatgaccctgnaaggtcccccatccaccttacatgttcctggggattcccccagttccagacagcctttagaggca

SEQ ID NO: 305517 - DNA, 168 bp, Homo Sapiens
  misc_feature (45)..(45): n is a, c, g, or t
  misc_feature (129)..(129): n is a, c, g, or t
taagccaccacatctgggctaatttcaaatttaaaaaggggaacnaatctggaagggactaggcaccaatcggaaaaggcattcttgaggtaccaggtgtttaaaagggccccttcaccaaacacggtnccaaaaaaccggagggcatagtttaaaaaaagggtggga

SEQ ID NO: 305518 - DNA, 105 bp, Homo Sapiens
  misc_feature (20)..(21): n is a, c, g, or t
  misc_feature (46)..(46): n is a, c, g, or t
  misc_feature (49)..(49): n is a, c, g, or t
  misc_feature (58)..(58): n is a, c, g, or t
gatttataaatcctgctttnngcaattacacaatttgtttacaatnaanaattatttnactttgaacatactgtacatgacaattaaaatttgtcatggcaaaag

SEQ ID NO: 305519 - DNA, 233 bp, Homo Sapiens
  misc_feature (131)..(131): n is a, c, g, or t
ttggaggttactttaaagatagggacaagcaaggtataagacatgggggatgatgaggaaccacataaatttttctactgtttttctcattaaatactaaggcattatatatcactgtgaacaatcaaggntcaactgacactgaaatactgccaagactgcacatattctattgactccctgcctaactccatagctccctattgctaaactgaaatggtgtaccttcccaa

SEQ ID NO: 305520 - DNA, 221 bp, Homo Sapiens
  misc_feature (189)..(189): n is a, c, g, or t
ggcacgagccagcgatatttggaaagtagaggaaaaaacaggagaagcaaactgtcaacatctacagttctctttttgaaaaattttacctatatgcattcgcatttgttgtttgattagtgttactttgtgcttctaaggaattgaataatgaacagcttttgggaacaaatgcctgtattttgcagnattctacctctcagttgttcatatttctggat

SEQ ID NO: 305521 - DNA, 318 bp, Homo Sapiens
  misc_feature (43)..(43): n is a, c, g, or t
  misc_feature (130)..(130): n is a, c, g, or t
  misc_feature (136)..(136): n is a, c, g, or t
  misc_feature (139)..(139): n is a, c, g, or t
  misc_feature (186)..(186): n is a, c, g, or t
  misc_feature (195)..(195): n is a, c, g, or t
  misc_feature (219)..(219): n is a, c, g, or t
  misc_feature (254)..(254): n is a, c, g, or t
  misc_feature (280)..(280): n is a, c, g, or t
gggcagcaaaacatcttctttcctcaccctcaggctctctganagtcacctcctgatccagatccatttctgaactcctggatccaagaccaaggtcattctcatcaacccttaagccagtgaaagactntttcgnggncctcatgtgctggtgcggcttccagataatgatagccaaggtcacanttgccgagngccctggtagttcaggcactcttnttagtactttattgcaaattattcttcattgaatncttacaacaaacctctgtgggagctnggaattaccatattcttttccatgggaggagggaagcg

SEQ ID NO: 305522 - DNA, 269 bp, Homo Sapiens
  misc_feature (215)..(215): n is a, c, g, or t
gacactcacaggtttgaccccaaggttaagctttgcatttcgaccttgtaagccatgtactgtggtgcccatctggacagctgagttttagcagacgctggtgaccatctgctgaagacatctagcatgctctctatgctactggaatgtacgaacctgtctttctgagtcatttcaaaggacagctcattttccagggtttatccagcgctgtnggctgccccagcattcatagtttcttgtaaagaatccttgtctttgtgtttacc

SEQ ID NO: 305523 - DNA, 224 bp, Homo Sapiens
  misc_feature (22)..(22): n is a, c, g, or t
  misc_feature (62)..(62): n is a, c, g, or t
  misc_feature (67)..(67): n is a, c, g, or t
  misc_feature (79)..(79): n is a, c, g, or t
  misc_feature (100)..(100): n is a, c, g, or t
  misc_feature (113)..(113): n is a, c, g, or t
  misc_feature (134)..(134): n is a, c, g, or t
  misc_feature (182)..(182): n is a, c, g, or t
  misc_feature (186)..(186): n is a, c, g, or t
  misc_feature (204)..(204): n is a, c, g, or t
  misc_feature (214)..(214): n is a, c, g, or t
gggcagtcaggagccaggcttncagttctaacggggcttagagaaaaggccgattcaagtcnctttnctgatggcaagnggaggaaacggggctcttggnaacccaggacctncttcttaagcgctggacactncgcattcattacctcacttaacactaagaactctgtgaggtagctccncagncccagcacttttcaggcntggaaactanggcttagaga

SEQ ID NO: 305524 - DNA, 184 bp, Homo Sapiens
  misc_feature (132)..(132): n is a, c, g, or t
ggccatctaccctccactttgggccctgatcacctcagtgggatccattacacaactctacaaccattcagattcactgtgcttgggagatcaattggccagtgcccctgcctcattctggccttggttccnctgtctaatgggggacctgaacataaaacgaggcagaaataaagctattttt

SEQ ID NO: 305525 - DNA, 424 bp, Homo Sapiens
  misc_feature (14)..(14): n is a, c, g, or t
  misc_feature (67)..(67): n is a, c, g, or t
  misc_feature (344)..(344): n is a, c, g, or t
tggggtttcaccantgttgcccaggtcagtcttgaactcctgggctcaagcagtcttcctgcttcanctcccaacgtgctgggattagaggcatgagctactgacccggcctggatgtgctctgttcctaaaaaaagtactcatcctctatgccatagtgatttgtggactaaaatcctagggttagaggcaattacagcttttccccctacataaagtttcaatggagaaatggtctggagggggaacacagtttgttgatgcagaaatgaaggcctgggtgagccttaaatgtaacagaaaaagtgttatcaggatgttaggagtataggacagaccagggnggtatcgtaccaaatactttgaaggatgatgatgggtaaccagttggagggacaaccagttaaaaggaggttttcagaca

SEQ ID NO: 305526 - DNA, 365 bp, Homo Sapiens
tgctgaaacagagaattttaaaccaagttcccctctgcagcacaagaaactcaggtaagtttccagtgtccaaagcctacactcacaaacacaaacacgaagccctccctttgcaaccctcaagtacccagaacctgctgaagaaaaccatctttcaccaccttttgttaaggttcctcagtattagtggaaaagctttattctcataaagatatccaacaatgctaatttttacatgggcatgttatttccttagggcaagattaataggaaaacctggaaaaattcggcaacaagcacacaaagactaggcttctgttaacacaacctggaccccacccttattcacaccttttaggaaggga

SEQ ID NO: 305527 - DNA, 210 bp, Homo Sapiens
  misc_feature (104)..(104): n is a, c, g, or t
  misc_feature (111)..(111): n is a, c, g, or t
  misc_feature (117)..(117): n is a, c, g, or t
  misc_feature (124)..(124): n is a, c, g, or t
  misc_feature (155)..(155): n is a, c, g, or t
  misc_feature (172)..(172): n is a, c, g, or t
  misc_feature (178)..(178): n is a, c, g, or t
  misc_feature (193)..(193): n is a, c, g, or t
tgtctgtgcaaggttcacagtcagctgcaaggccagggtgcacactgcagacacctgtgagacctgtggatgccgaggaggaccaaaggggagagggaacagtnggctctngctctnggaggtnaaagagggaagataacatccccccaggtctnggaatttgattggagangattanttcctcgagaaggtntattttgccccaacttt

SEQ ID NO: 305528 - DNA, 296 bp, Homo Sapiens
  misc_feature (16)..(16): n is a, c, g, or t
tttcggcacagcccangctctgccttgctccttcccacatcagaaagtctctgggggaaagtgggggttaggacagtggctgccattcagcctcttccgtagccacctttgaggactggcccagtaactcggatagtgtcccaggcacctgcgggcttctgcgtggcaggcagactccagtggcaatggggtcccctcagggctgggctgcatggcgacttcttggttccttcctggatgtgtgtaagcatggactgctggccccctgtgcatggttccatcctcggtaggacggt

SEQ ID NO: 305529 - DNA, 268 bp, Homo Sapiens
  misc_feature (214)..(214): n is a, c, g, or t
  misc_feature (251)..(251): n is a, c, g, or t
gagggtggccaggaggggaatgaggaactatataaggcaaaatcttttatttatcttattaactgatttagagaaaagggcaacagctactatttaccaaaaacctggcatgtttgcattttacagacattgcctgcagtctttataatcctgctgtatctcccccatttaataagaaatgaaacagaggccaaacacccagagacgctcaggnccaatttctgtccagcaggttttgattacacatgcantctctgtacctacaagc

SEQ ID NO: 305530 - DNA, 274 bp, Homo Sapiens
  misc_feature (128)..(172): n is a, c, g, or t
  misc_feature (239)..(239): n is a, c, g, or t
ctgtcacccaggccggagtcaggtggcgcaatcatggctcactgcagcctcagcctcccatgctcaagtgatcctcccacctcagccttgcaagcagctgtgactaaaggggcacaccagtatgcccnnnnnnnnnnnnnnnnnnnnnnnnnnnnnnnnnnnnnnnnnnnnnccatcacacctggctaattttttaatgttttgtagagacaggggtcttgccatgttgtccagggctngtcttgaactcctggggctcagcaatccacccacc

SEQ ID NO: 305531 - DNA, 320 bp, Homo Sapiens
  misc_feature (281)..(281): n is a, c, g, or t
  misc_feature (294)..(294): n is a, c, g, or t
  misc_feature (303)..(303): n is a, c, g, or t
tttagatcctgcatcagacaggtcatcagaaaacatgaagctaaatgcaggtaaagaattaggtctcttgaactcttgaaaatatcattttcttatagaaatggtttaaaaatttcttttttattatttctaattttccttcagaaaattgtgagttttaacctacaacacatacactccaaggtaatgccactctaatgctgtctagttgatctgaataactaactgggtcaattatcaggtccacccaaactgtctctctgggggattaacttctgccnggcatattggggntctggttcnttttccccagggttggc

SEQ ID NO: 305532 - DNA, 411 bp, Homo Sapiens
  misc_feature (68)..(68): n is a, c, g, or t
  misc_feature (389)..(389): n is a, c, g, or t
ccctagtacaaattcctcaaagacatagaccgtggtttgttttatatctctgcagagtgacatctggngaatgtttactgaataaattaatgtacatgttcacattattcctcttcatccagttccctaataactgttaaatatatttcaaggggggaataagacagcaatagttacccagctctaagaaccagtttgtgagtgagaactaagttcttgactaaccagatatacacttgaataaaacctgttatgatactaccttggtcagaaaagtactcccagagccagctgtgatggttttaaaatttgcccacaaattttaaggatattcctcccttgatgggggcctaatttccctttccttggggtaatgggctatactcagngacttccttctaaccaagtagg

SEQ ID NO: 305533 - DNA, 412 bp, Homo Sapiens
  misc_feature (274)..(288): n is a, c, g, or t
  misc_feature (332)..(370): n is a, c, g, or t
  misc_feature (380)..(380): n is a, c, g, or t
tttggtaggaaaagccccatttatcccttcccataaagctcttctagatatgtaattctgaagttcatttcaaatcccgcttcttcccaaagtcctcaggtagacactgtctcagtcctctgtctcatttctagctgtgcctgacctgacgtttcccctctaacctaacagtgcagacctttctttccctcccatgacttacagtgttagaagcactgctcatctgacacagctgtcccaattctcaggctaatgtgattaatctataataatnnnnnnnnnnnnnnntgggtataagatgaaaggaatgtcaaggccagggaggtacattnnnnnnnnnnnnnnnnnnnnnnnnnnnnnnnnnnnnnnnggctttactnagagacactggggcacttttctgtgggaggga

SEQ ID NO: 305534 - DNA, 304 bp, Homo Sapiens
  misc_feature (259)..(259): n is a, c, g, or t
  misc_feature (276)..(276): n is a, c, g, or t
gcagccaacatggtaaccccttgttcccatacaacgggtgtgtatggccccttggcagatatcaatccagtgtccacaactagggaggatttagcaaggggattttattacttgtaacaagttaaggagaacactgggattattcccacaacagtgtcttccctgagcttggggctggatcaggttttgtaaggcatgggggtaatgaggtgttgatctgatttgatttcttgcaattgagttgatgccagggggcatngatcttgaccagatccntgccagggtgttgacccagggagcttca

SEQ ID NO: 305535 - DNA, 394 bp, Homo Sapiens
  misc_feature (345)..(345): n is a, c, g, or t
  misc_feature (362)..(362): n is a, c, g, or t
accaaacaaacccagacttacagaactaaaagctgataatttaattctgatcagtgtcttcctcaaggccaagaagagtctatttggtgtagagagcgcagtctttctgtctcatgatactgattaccacacaaaagcattggtgaagaaacaactgactgagttgagttagggagttttttcagagtaattttgactagttgcaattttcgatttgtgctttatttagacttgcaaacccagccaaactcgtaagataaggagtttccttcaagggcaacaagcacaggggcatgcaggaaggcacagtatcccacgggacacagggcaaagggaagggcccanttgaaggaaatcctgtnggaggagggaacagtgggctcccctttcagga

SEQ ID NO: 305536 - DNA, 138 bp, Homo Sapiens
tgagggagactgagaagtcggcactatgaggaaatgaagccatgtaccctgaaaagtgtaaatttggaagaaagctggatgaccatcttgaaatgcttgaaaggatattgtacaggtagtactaaattatgacccctt

SEQ ID NO: 305537 - DNA, 400 bp, Homo Sapiens
  misc_feature (267)..(267): n is a, c, g, or t
ttgtttttagccttatagtatcacctaccacttaaaaactttgtttcctgctgtctataggatgaggtcaacattcatagcacagcacttaagctccaccatgcctctcatttcatctctcccaacatatacagagtcccatgctctagctccagttgatcctttccaacattgccatgctcttttacgtttgcacatgaagttccctttgtctagaatctctgattcctgaacaaatttacctgggcaaattccttctcatctttngtgaccaagctcaaatgacagctcctcaggtaaagctttcctcaatccttttaggcagaggataggtaggatacacaagtactaggggcaactttctatttacaaatggctaattacttgaggttttataaat

SEQ ID NO: 305538 - DNA, 294 bp, Homo Sapiens
  misc_feature (63)..(63): n is a, c, g, or t
  misc_feature (192)..(192): n is a, c, g, or t
  misc_feature (210)..(210): n is a, c, g, or t
  misc_feature (276)..(276): n is a, c, g, or t
ccagcccaagatatgttttagtaagccgccagttggatcatctgtaagcaactcactagaagnttccagcatcctccacaaatttgacaactgagaaatgtggctgggaaatcatgatttgggtccgaagaagtgaaagcaacaatcctcagggtgttgtttcttgagagaagaagggtaaacagcaggganttcggctgagggtgtccnaaatctcgggggagggatgaattctcagggagagcttggaaccctgaggacaaagccctttgtccngggggcttggaaggatcc

SEQ ID NO: 305539 - DNA, 467 bp, Homo Sapiens
  misc_feature (44)..(44): n is a, c, g, or t
  misc_feature (326)..(326): n is a, c, g, or t
  misc_feature (355)..(355): n is a, c, g, or t
  misc_feature (382)..(382): n is a, c, g, or t
  misc_feature (403)..(403): n is a, c, g, or t
  misc_feature (438)..(438): n is a, c, g, or t
cgcacacgacctcagcctcctctgccccgctgggcgagctgcangtcctggcaccttctgctggggtcctgatctgagccagttgtctagcgatttaatttggtgaatttaccactgcgtcccagagtttatattggcacttaacagcagtaatatgtttctctctcgccaagaactattttcccgaccaagatggaacaccacggcacaaaaaataggtttgtgaactaatctggctgccctgacaagtgtcatttcacaggaatcactgcttataggaggcgcactcgggaatttaaatgagggctggggggttgtctgggccnggggttcacagggtgctttttttccccanttcagtttaacagggagttttgggggntgaggacaccctttttccctngcaggccgaggaacttttttcaaaaatcacacttnttcagtattttcattgacaggattttttt

SEQ ID NO: 305540 - DNA, 239 bp, Homo Sapiens
ggcacgaggggggtggtggtggactgtgatcgagaacattcctgcagggagaatgcctcccttccctgagtcagggaccagataacctttccaggatccttccagcccaggacaaagggctttgtctcaggttcagctctcctgagaattcatcctccccgagatttggacacctcagccgaattcctgctgtttaccttcttctctcaagaaacaacaccctgaggattgttgctttc

SEQ ID NO: 305541 - DNA, 210 bp, Homo Sapiens
  misc_feature (45)..(45): n is a, c, g, or t
  misc_feature (66)..(66): n is a, c, g, or t
  misc_feature (68)..(68): n is a, c, g, or t
  misc_feature (153)..(153): n is a, c, g, or t
  misc_feature (178)..(178): n is a, c, g, or t
  misc_feature (185)..(185): n is a, c, g, or t
  misc_feature (190)..(190): n is a, c, g, or t
taaatcttagagggcgtttaatccaatcctgttttccggagaganggaaatggacaccagcaaggntnagcgaggcagccgcgggtcacagagcttgttagtgggtgaacaagggccccagactcagggaccccatccaggtccgcttagctnggagccccccctccaccggctcttncccctgnccccngttagttcttccctggttcc

SEQ ID NO: 305542 - DNA, 420 bp, Homo Sapiens
  misc_feature (310)..(310): n is a, c, g, or t
  misc_feature (341)..(341): n is a, c, g, or t
  misc_feature (367)..(367): n is a, c, g, or t
  misc_feature (375)..(375): n is a, c, g, or t
ttcggcacaggaagaaagcagaaatggaacaaaaagtagattggtcggttcaaaatttctttccttatagtgttaaaacagggaacatcctcatcatgctagcttaggtaatccgtactcctgattggctgctatgaatcttctgtttttggaaaactggcctgtttcagaggtcagtttgattatgtggcacctaatgtgaacgacttcattctggttggtttgatctcttgggaacctcgtgcagggaagctagtccaaacagtgggcctcccatactttgtttacatgggcatagttcaggaatatnaaggcttcattatttatgggtgttcatattnattctagggtacaaaatttctggccnttcttctnacttcccctaggttttgtggataaaggggacaaagtttacttagg

SEQ ID NO: 305543 - DNA, 429 bp, Homo Sapiens
tatttttttctcacatagcaatccagaagtggcttcatttcacaaggtattcaagggatataggagtcatctaccttgttagttctcttaatacccaagggtattgttctttccatggtcaaagctggctcaagacttcctagcctgtgaaaaaagaagaaggtgggagcaagccatttcctttttagggaaattacagccatcacttctgcccaccgtccattcatggaatactttacttatataggctattacctaggcttcaaggaaagccggggggacgtgtcttcttaactaggatggggacatgtgcccctacttaaaactccagggggaaaggggttcctatttacttaaaggcttaaaaaggagggggggaatggaattacttagggagttttaaaggaccaaaaattgataggcagcccc

SEQ ID NO: 305544 - DNA, 439 bp, Homo Sapiens
  misc_feature (383)..(383): n is a, c, g, or t
  misc_feature (414)..(414): n is a, c, g, or t
ttcggcacggaactgggtgtgaagaggccgttcaggtcctctctcaggatgatcaaaaccacaaacacgtagagacacctccaggttcacactaggttggtcagtgaaatgcgtcctgagtgttttctaggcattctgaagacttgaagggtgcaagtgtcatcctcctttgcaggtcttcccagaaacatccacctcctgagtcatggcgacttgtgtatgatacgatcccaggcctgggaatctcctgagaagggttaaacagggatgcccaaaatactagccctggcaaatttttcctagtcatttggtggttagtccagagcttctcaaacctgctgaagcgagcagggaacacctctctgtataaaatgggcttattntccatttagggggtagcctttaggggtttantccagggagcttttaaaagttgttc

SEQ ID NO: 305545 - DNA, 183 bp, Homo Sapiens
atgagcaccaagtccggcctaagcaaaatttttatacagattcagtcatctttattaaagaaactgtgcagttaaaattgccagattgtctcatgagatccatgcaggcagttgggatatgtgagcttcatagtagagtttataaaagtggggggagtaataagtctagccaatataaatcag

SEQ ID NO: 305546 - DNA, 373 bp, Homo Sapiens
  misc_feature (72)..(189): n is a, c, g, or t
  misc_feature (310)..(310): n is a, c, g, or t
tagggtcaagcaatcctccttccttagcttcccgagtagctgagaccacagatgtgcatcaccatgcccagnnnnnnnnnnnnnnnnnnnnnnnnnnnnnnnnnnnnnnnnnnnnnnnnnnnnnnnnnnnnnnnnnnnnnnnnnnnnnnnnnnnnnnnnnnnnnnnnnnnnnnnnnnnnnnnnnnnnnntgagccactgtgcaaggcccattaagtcttaaagctagagaatcattctcttttgactccatgtcctgaatactgggctcactggggatggggaactggggccctcaaagccatagggagntccggcctctatggggtttgctgtactcagtctactcaccagctctcacaaattgggagtctc

SEQ ID NO: 305547 - DNA, 240 bp, Homo Sapiens
  misc_feature (82)..(82): n is a, c, g, or t
  misc_feature (166)..(166): n is a, c, g, or t
  misc_feature (170)..(170): n is a, c, g, or t
  misc_feature (185)..(185): n is a, c, g, or t
  misc_feature (196)..(196): n is a, c, g, or t
ccgtacccggtatgtatgtgaaccaattgttagcagtaaatttcaaactgttttcccttggctgctgcttggcaagcaggtngatgagagtctggtagaacctgcagtgagaggaaataccaccttttcttagagaacgatttaaatcggcatataagtgaggcanagancaaaaacttggaagnaaggttgtttntaattctcttccttgaaggattgcttatagctagcagggcctta

SEQ ID NO: 305548 - DNA, 366 bp, Homo Sapiens
  misc_feature (313)..(313): n is a, c, g, or t
cggcgtgggagcggcatggttagggtaggtacttacactgctctaccaatatatgggaattttaatcaaaatcaaaggaaaaattcacctgttttgagaatatacaatgtatttcaccattcatagctgaatctatcaatgtcccacccatttccattcacagccagtgtggagaacacctgcagtttctatgaacagttctccagacaatttctcagcatctgagcctctctgccagagctttctctgcctgaaggagcatactcagcttggcagcaggacaagcaagagagcctgggagttattcccaganacttcaaccagtggaagggcaagaggtaggtaaatgtcttatccctcaatggg

SEQ ID NO: 305549 - DNA, 420 bp, Homo Sapiens
  misc_feature (372)..(372): n is a, c, g, or t
tggccttcagtggagattttctttgaggcacagtgtcatgcagtggttaggggtggtgcgcaaagtaatacaccttgcaagttaggcccaggtcccccacttcctcagagagggaggagggataatcttgagacacatggtctttctgagtccatctcctctcaggcagaatggacctcccaggaaaactctcctcataggaggtatcccttaaccttaggcctgtaaagccgtatcttggtccttgcctcacggtgagcagcacatgttcagctcctgctgttgttccttcattgtgcgtcacagtggttgggcagtgagacccctggcaacctgactgggcactttcctaggccaagagccttcaggttnggatttggggagccaaatggttaggcttcccaggttacagggttaggc

SEQ ID NO: 305550 - DNA, 413 bp, Homo Sapiens
  misc_feature (246)..(246): n is a, c, g, or t
  misc_feature (250)..(250): n is a, c, g, or t
  misc_feature (252)..(253): n is a, c, g, or t
  misc_feature (287)..(287): n is a, c, g, or t
tcttctgactgaagttgaagataaaacctgataccagtttggagtagaaagagacacagtattgtaatcataaatgacatttgaccttaaaacagtaacacagcaaatttctaattaaagtggagcatgtcctgtcttgactgaggcaccaagacgatttgttgcagattgttgctggcagtgtgcagtccccaagaccaaatcaccaagaggcacagtggtaagagtggtcagcaaggagcggancctntnnctcccaccagcaggtgacttcaccacatcgtgtncctccttgggcgtaagaggcgccctaaaaggtttcttccgtttccagttattcctaaactgggaattactgtttcctggaaaaaaggcgtattatttttaagggccctgcttaggctattaaggca

SEQ ID NO: 305551 - DNA, 425 bp, Homo Sapiens
  misc_feature (240)..(240): n is a, c, g, or t
  misc_feature (268)..(268): n is a, c, g, or t
  misc_feature (374)..(374): n is a, c, g, or t
  misc_feature (403)..(403): n is a, c, g, or t
ggcacgagtcttaagtctgaacattaacttttgggtgccacagataactagtatggctcagatcttcagctcccagattcgcaacagctccctggctgttgagaagagttgacttagccttgttctcaggaaaacgatcctgtgcttgagcctgctctggcttctgagaaagccatgggaacctacatctctgcttcatgaaagtagtaaggaaaagggctgacttcagctggggagganttccttttccttcttataggggaaaagntgggtgttctgtggaagagggagttattcacttaccctggactattcagggatggggaggacggcagatgttgttttttcccagggggagcccttttgttgggtcntgggtttccccattcttccccccacactngggttaaggacccccacacagg

SEQ ID NO: 305552 - DNA, 197 bp, Homo Sapiens
  misc_feature (133)..(133): n is a, c, g, or t
  misc_feature (174)..(174): n is a, c, g, or t
  misc_feature (184)..(184): n is a, c, g, or t
ccccgacccccccgcttccccaaagagttacgtgacgccacttgatatgtgtgtgtgtgaccttggtcaagatcctaccttttgtgagcctgtttcctctgaggaacgtggataatttgccttttacttttgntgtgttgttcagggaatttaaggagattaatgggatgttantagtcttcantgttagttagggg

SEQ ID NO: 305553 - DNA, 421 bp, Homo Sapiens
  misc_feature (384)..(384): n is a, c, g, or t
  misc_feature (401)..(401): n is a, c, g, or t
ttcggcacaggaaagttaccatctggctttgggagcttcctgttgtacatgaagatgtttgggaggttttatcgtttagcttttttgagtgctcacaatgcagatggttctggggtgaatgggccttgcaagtggctggaccggcaatggcaagcctcagctgagcctgattcatagtgacagttcttctgtctgcaatccataggaatttgggggacaaaaggagggcaccactcactgataatttatgcacacttagcatcttcaacttagaagcactttgttcttccaaataatgctttttcaaatgtgggtggtcagcttttcttattatttccctttaccaactaggactgtaggcctttgttttcaattccatcattnttccacacttcccaccntttcagccttgccctgtgta

SEQ ID NO: 305554 - DNA, 231 bp, Homo Sapiens
  misc_feature (74)..(74): n is a, c, g, or t
  misc_feature (196)..(196): n is a, c, g, or t
  misc_feature (207)..(207): n is a, c, g, or t
ttggaagtatgagacactatcccaagaaatcagactggtgaggagaatgatactgactggaatcaagaaaagtnattacttgataaggccaaaggggccagaaatagagataattgtgaaaaaaccctcaccgtggctcatccatagacaagaagtgacataaacagaacaaattccacatcactcagacttgagnagatttttagnatgaaagagctttcaagttaagcc

SEQ ID NO: 305555 - DNA, 435 bp, Homo Sapiens
  misc_feature (68)..(68): n is a, c, g, or t
  misc_feature (166)..(166): n is a, c, g, or t
  misc_feature (406)..(406): n is a, c, g, or t
  misc_feature (422)..(422): n is a, c, g, or t
catgagacattttaataagctagctaaataaaagatactagaggttccctctattttaagcatctganccctctccctagctattatccaataagaaccctaattgataactttccagctgctagttaaccagcccccaacaaaacagcagaaagccaccaggatnttctgtgcaaaacccaggcagcctagttgctgggatttaaatgtggcaaaaagaatgcagacagctcattcctcatgagatcatccccttttgggaacccagctgaacactcctcggacagacgattgacatgggttcaagggaatcccacggacttttcccacagggccttaaaagagctaggtccatttggcattcaagttatttctcccggggcctgctaggactcttgataataanttacttcttggcatgntgggagtgtgact

SEQ ID NO: 305556 - DNA, 388 bp, Homo Sapiens
  misc_feature (270)..(270): n is a, c, g, or t
  misc_feature (367)..(367): n is a, c, g, or t
tttcggcacagcaaatcccttctgcctatgagcctgtaaaatcaaaagtaagttagttacttcctggatatgatggggatacaggcactgggtaaatacacctattccaaatgggagaaattggccaaaacaaagggggtacaggccccatgcaagtctgaaatccattggagcagtcaaatcttaaagctctgaaatgatctcctttgacttcatgtctcacatccaggggcacactgatgtaagaggtggggcttgcatggccttggnaggctctgccctgtggcttttgcagggtacaggcacccctcctggctggttttcacaggctgggctttgagtgtctgtgggctttttccggggtgcngggtgcaagcttttcagtggg

SEQ ID NO: 305557 - DNA, 210 bp, Homo Sapiens
taaacaaacaaaccacaaggtgggcagaaagtgtggggccaacatcacattagtacctctttcctcagaaatgtggacattataacttcagggtggaacagagccagtgatgggaaggactgggtgaagaatcctgtgacacaaaattggcagttggccagaatgaagagaagaggcccaaagaggggaggaggtgatacaaacatgagt

SEQ ID NO: 305558 - DNA, 363 bp, Homo Sapiens
  misc_feature (290)..(290): n is a, c, g, or t
  misc_feature (300)..(300): n is a, c, g, or t
  misc_feature (306)..(306): n is a, c, g, or t
  misc_feature (335)..(335): n is a, c, g, or t
  misc_feature (347)..(347): n is a, c, g, or t
ggtggctttccaacaggctgttttcaacttgatgcaaactgaagatgagaccaaatcaggcaaataactgcctggtggggttgtagatggaattcagagtaagattcttttcctgagtgaaggggcaggggaacttaaaactccctctgaactttccccgtcattggttgaactttacaattctgacatctcaggcaacccgatgtcagggaacatcaagggcaggacggatgtgcagaccaagagaaataaggaatcacagctcaggagggcaaacggaaggcaccagntttacccttnaccttncccttttgggggcttggggatttcacccngtttgggggggnaaaagccacaggacct

SEQ ID NO: 305559 - DNA, 211 bp, Homo Sapiens
  misc_feature (148)..(148): n is a, c, g, or t
  misc_feature (155)..(155): n is a, c, g, or t
  misc_feature (174)..(174): n is a, c, g, or t
aaaaaatgtggaaaataaaattgatatttcatattaaaattatatctaagacactaaactcaaagcaatgatcagctcctaataacctttagtcatataaaattcacatacccttttgtcagcaatattaggttacttttaggtcatnccaaaanttaacctggaaccacaggntccagcttttcccctttcccctatgcttcaggtaagg

SEQ ID NO: 305560 - DNA, 309 bp, Homo Sapiens
  misc_feature (257)..(257): n is a, c, g, or t
  misc_feature (289)..(289): n is a, c, g, or t
  misc_feature (295)..(295): n is a, c, g, or t
ggcacgagcaagatcagcacaaaaaattgtatgagtcaagtaaaggacccatttaaagggtttgaacttgcttgaaattgcttgaaaaaatactatggttattaagtgctagattgaatgacatagtcaacactgttcaatagaaatgtaatacaagttacatatgtagtttaaaattttctaggagccacattaaaatacgttaaaagaaacaggtgaaattattttaataatatttaatctagtatatccaaaantattatttcaatatgctctccaacataaacanatgganatattttacttttt

SEQ ID NO: 305561 - DNA, 434 bp, Homo Sapiens
  misc_feature (375)..(375): n is a, c, g, or t
agacattcattattctaccatcctaatgaaaactttcagaagtctttctttatccatggcatgcccagggttttacctgaatctgatacaggatctatataactttactaggacttttgattgttgactccaggcttaggtatatcagaaggttctttttgccatttggcctgtggatgtctgagaagatcattcacaatacatgtaaaattcaggtaggcctaaggaaaggccagcctgtagaaagcaaaatggcagtgtctgttctccactgttggagggcattatgttaatttaagtatcctgttaggccactgtctttctggcttaattaagtgggggctggaacaagttaaggcacttaattaattaccngtggaaccacttgggggcaccttgtgggggtaggagtttttgctggccacctagtggga

SEQ ID NO: 305562 - DNA, 354 bp, Homo Sapiens
  misc_feature (43)..(43): n is a, c, g, or t
tgagtcagaacagggactactgggactgtgtcatcctggaatncagtcttttcctctcctttacaccaggaatagaatagatttcctggcatcagatgccagagagatgcatttactgttcactgtgtgtaagttatcagaatcagaagtactactaacaactctcagcaaaaaggcattgggacaaaggcaatgaggaacagttgtttctgaggtagcttcactttatgagaatgagcagcaagggaaatttatggtgaaggaaacagtttctatgttttttgtattaattaatagcttcttccaaggtgttcacagcatctggggtggctttttgaggaggggccacaccct

SEQ ID NO: 305563 - DNA, 160 bp, Homo Sapiens
  misc_feature (58)..(58): n is a, c, g, or t
  misc_feature (100)..(100): n is a, c, g, or t
  misc_feature (139)..(139): n is a, c, g, or t
agccaaacacctgggtgttcagccaggtcccccaggcagcagcgtggaggaacctttngcaggtccagccagcctcatgtccctatctctgccacctctnctcctctgtcgttctatagaaccagatctcttcccactnactttctcttgggcaaacctg

SEQ ID NO: 305564 - DNA, 430 bp, Homo Sapiens
  misc_feature (16)..(16): n is a, c, g, or t
  misc_feature (338)..(338): n is a, c, g, or t
  misc_feature (357)..(357): n is a, c, g, or t
  misc_feature (362)..(362): n is a, c, g, or t
  misc_feature (372)..(372): n is a, c, g, or t
  misc_feature (404)..(404): n is a, c, g, or t
  misc_feature (413)..(413): n is a, c, g, or t
tggaaggttctaagtngggttccttactctattttggactctactggtccaaaatatagtggtacacactattaaatgttcaacatttgggcctttggaaataatgtgacagtctctccaagagattcctgctaaactagtaaggtatgataattgtatccaaaaatccatggaaatcttttccatgaaatctgctttatttgagatgctaagaattctaatttgccgggataacacaatttgggctctcttcagtgttctcatcccattcagaagtatccttctgggagagggaaggaggctattaaaatggaaggagtggaagtcccaataggccntttgtcctccctaggttcnttgtnccacttactncaaatttttcaggatggaggccagggggagtntttccgggnactactctggggggatc

SEQ ID NO: 305565 - DNA, 348 bp, Homo Sapiens
  misc_feature (312)..(312): n is a, c, g, or t
  misc_feature (325)..(325): n is a, c, g, or t
aaaagagggagttcaagtcttctttccaggactcctgtgttttggctgagactgattcttcattgtggccttgggagaaaagctgcctaaccagttctgggccctggctagttacaaccatgtgtgagttgtttacagtacgcacaggtatgggctgaagggaaacaaagcttaagggatgactagaaaggcttgctgaaattgctatgggagggccccaccctccaagccatctccccttcacaccccgctcggttttcagttttctggcagcttggttattgcgacattctctttaatcctttttttgantctgggtctctantttaaggcacttcaaggaaaact

SEQ ID NO: 305566 - DNA, 429 bp, Homo Sapiens
  misc_feature (309)..(309): n is a, c, g, or t
  misc_feature (339)..(339): n is a, c, g, or t
  misc_feature (360)..(360): n is a, c, g, or t
  misc_feature (401)..(401): n is a, c, g, or t
  misc_feature (415)..(415): n is a, c, g, or t
aacaattcaatgtcgtcctcaacaagcacttctcaggtttagaatattgtatactcagtaggcctttaataatttgctatgtccagcctggactgcatcatttggaaaggtaggagacaaccttgaacccttgctgcctttctcccatattgaatttaacctgtgtcatattcctgtaaactgcccagctcatttcatatcactgtatcaaccataaagcaaacacgaacaggcgtatctgagctgaaaagtaaacagttatcaggtgacttctcgtgccatgtgggagctgtctgagggaataggcantaaatgtggaaaccttggccccgtgggganctttaatgggtgttaggacantcttgtggacaggaaaccataattcctctgggttggctgtnggcaattggacccnggggggatggcaga

SEQ ID NO: 305567 - DNA, 305 bp, Homo Sapiens
  misc_feature (29)..(29): n is a, c, g, or t
  misc_feature (32)..(32): n is a, c, g, or t
  misc_feature (45)..(45): n is a, c, g, or t
  misc_feature (63)..(63): n is a, c, g, or t
  misc_feature (83)..(83): n is a, c, g, or t
  misc_feature (88)..(88): n is a, c, g, or t
  misc_feature (94)..(95): n is a, c, g, or t
  misc_feature (101)..(101): n is a, c, g, or t
  misc_feature (112)..(112): n is a, c, g, or t
  misc_feature (121)..(121): n is a, c, g, or t
  misc_feature (125)..(125): n is a, c, g, or t
  misc_feature (149)..(149): n is a, c, g, or t
  misc_feature (244)..(244): n is a, c, g, or t
  misc_feature (254)..(254): n is a, c, g, or t
  misc_feature (264)..(264): n is a, c, g, or t
  misc_feature (292)..(292): n is a, c, g, or t
agaactagaatattgtactagatagaaangangcattataaactntctaaggttaggtatttnagtaaactagtgttaaaatnatttntacctnncgtgtncttcttaaganacatatttncagnatagctcaacacttacagtcatangtgtatgtatagttcttaacttgcagagctgtttcctataacctaacactcatcacacttaaactttttattattttaatcgttttttcttcatngagatggagncttgctctgntgcccagggcaagtagtgcagtagcctnatacttgggctca

SEQ ID NO: 305568 - DNA, 451 bp, Homo Sapiens
  misc_feature (207)..(207): n is a, c, g, or t
  misc_feature (302)..(302): n is a, c, g, or t
  misc_feature (308)..(308): n is a, c, g, or t
  misc_feature (328)..(328): n is a, c, g, or t
  misc_feature (353)..(353): n is a, c, g, or t
  misc_feature (373)..(373): n is a, c, g, or t
  misc_feature (382)..(382): n is a, c, g, or t
gcacacatggccccttctctggaagcctctatatttaaacacgtgtggccccccgtctggaagcctttatactgaaacacacgtgaccggctgtctggaaagtgagctgggcgccgtcactgatgatgtcttttctgtgggacacattcaggcacaccccttgcccttctgagcctgggacgagacagagctgacaggcggaccaanaggtgtgccgagcaccagtgctgccaggggtgagagtcacatgcagctgtggctgcgttgggacgcctgcttttttgccctctgcagtttgcctnaacccntgcagtttgcaggccagccnggggccttctgggacagagcagccngggtttccctgttcagggtngagttgatnccggaagaatctgggcagccccgaggcccccgcggttaaagggagcattcagcaccttcagaaaccccc

SEQ ID NO: 305569 - DNA, 329 bp, Homo Sapiens
  misc_feature (203)..(203): n is a, c, g, or t
  misc_feature (278)..(278): n is a, c, g, or t
aagaaattataagatctgaaaagacaggagaatggaattctacatgggaaaaatgcacacacttggaatcacaaagtgtgttcaccaaaagagggtagaccagctggcctcaaacccacccctaggtctccctgcatttgatcttattcttggaagactcatgtgtcagtttcactattatttcaacaagctgggtaaagganagtacaataatgggctgcttaacatttactgcggaacttgctatgtgggtaggggctgtgtttaattgctatatnttacattattggcatggatgagtaggggacctgactatctccctttcttac

SEQ ID NO: 305570 - DNA, 279 bp, Homo Sapiens
gcgcaggcaatcctcccacctcagcctccagagtagctgggaccacaggtacacaccaccacgcccagctaatttttgtactttttgtagagatggggtttagctatgttgcccagtctgctctcaaactactgggctcaagcaatctgcccacctcaacctcccaaagtgttgggtattacaggcatgagccactgcgcccggcccatctgggtcttatttaaatactttcattctctgcaaatgcagacgttttctcagctctggattattttttca

SEQ ID NO: 305571 - DNA, 369 bp, Homo Sapiens
  misc_feature (195)..(195): n is a, c, g, or t
  misc_feature (303)..(303): n is a, c, g, or t
  misc_feature (343)..(343): n is a, c, g, or t
ttggaaattatccttaaattttaacacacatttaagcatatatttttctatgaatatctggtattagtcaacatctctatactctccctggatagttacctattgatttgacacaattccaaattagtctactttcactttccccatatcctatcccccccattccaaagccactatgttaaggtccatttgagnttttagttttaggtttaggttctattaattattttttccattgtgctatcaacaactttttaggatttaacttataattttacaagtttgtttaacactttccttggntactttatcggaccacttttcttaggcttcattttttttnctttcggctggggaaattctcggggg

SEQ ID NO: 305572 - DNA, 320 bp, Homo Sapiens
  misc_feature (255)..(255): n is a, c, g, or t
  misc_feature (299)..(299): n is a, c, g, or t
atgagcaccatgcccagactaaacacattatttaaagagaagtaaactggcatcttttccttgaagagtaacgaaagctgggatttatgaagcattttgattgagctaacttttaagtatgtgccagtatacttcactatcaaaacgaagaccagaagagaattctagcccaaatcttttaatatagcatttcaaattaaactgtggggaatttaatcacattttccctccctatcaggaatgacagtgttgggncacaacatggcacaaagaggtcccaggtaatatttttgcaggangtacttcaagaggggaggcaa

SEQ ID NO: 305573 - DNA, 433 bp, Homo Sapiens
  misc_feature (401)..(401): n is a, c, g, or t
atcaattttatgctccaaaaacattccacatggcaaccaaggtcccgtagagagcactttttcccccttgcctcttctttaaactcctaattcaaaattttggtttctgataacctgctcaggataaaaagaaaatctcacatagaaatgcctttactacagggaaatggagcaagaaatttcccttgtctctggggattgcttttttctgttttctgggttaagggaaaacatttcaaagttcataaaaacaagggaacttaaaattaggaggaggatgaggaactggaacccttggactcgagggtaggggggaaaaccacttatttttttaaacccgagggaaatattttctagggggcctggtggccttttatggagggaaggggaggacggaggcngttgcctccatggtggtgtggggatggggtgt

SEQ ID NO: 305574 - DNA, 394 bp, Homo Sapiens
  misc_feature (265)..(265): n is a, c, g, or t
  misc_feature (334)..(334): n is a, c, g, or t
  misc_feature (350)..(350): n is a, c, g, or t
cctttgtgttaggctactgtaatttgggagttgtttctgttgcataatctaccctattttaaccttttccctcagtttgttattgaccccttatcctaattattctcagttctctctttgttttgttaataggctttagttgttcttgttattccatacagtctgactttgtcattgaaccttccatgattacattgaaatgtaatgaaatttgaccttttgaaatttgaggacctatcaaacataaaggaggatgttttccagnttctctcaaacaggttctttctgggggcacattgtggttatttcaggaggtaggcctggtggattaggnagggccctttcttccnggggggagggtggtcttgggggacaacctccggggggaacgtgg

SEQ ID NO: 305575 - DNA, 374 bp, Homo Sapiens
  misc_feature (341)..(341): n is a, c, g, or t
gggataaaatagccatctcatgggggtagaatgcatcccaaagctcactcagatttttggcaaaaatcatgtccacaagagtgttgaggtagactagactggaaaaagacacagcttaaccacactgcacattatgagggcttaaatactatttctttgaattgggtgggggaagttctttatgccaagtgcttccaaacctgatgtgtaatcaggaatcgcttgagggatattttaaaagtacagatttccaagcttgacaactgagggtttcaggatacaaaaggaactcccggggacaacttaaaattttatatttgtaattttatttttaaaggggncagcttttatgctatttccattggttaaaaagg

SEQ ID NO: 305576 - DNA, 219 bp, Homo Sapiens
  misc_feature (135)..(135): n is a, c, g, or t
gttcaagcttttaaatacatgtatgtaaaaacaagattgtactgggtttcgaatcctagctgttgttttaacatgttttgcttcaaatcataaactctctttagaattctctagtaagtcatacgggaaagggantccaacaaacccaaggaaaatatgtaaggaaaccagccaaactgattaaaattaaggctccggtaaatttatttatttttggtt

SEQ ID NO: 305577 - DNA, 179 bp, Homo Sapiens
  misc_feature (25)..(25): n is a, c, g, or t
  misc_feature (52)..(52): n is a, c, g, or t
  misc_feature (63)..(63): n is a, c, g, or t
  misc_feature (66)..(66): n is a, c, g, or t
  misc_feature (133)..(133): n is a, c, g, or t
  misc_feature (155)..(155): n is a, c, g, or t
tcccgggaacttgaacagaggctgnaaattccagtaattgctccttggcctntagggactganttnaaagaggaggaagaatcaggcagtgttcctattcattttaaaacccgttcccgctgagtctgcaccnggagaccagagagcacctgccntcctggaaactcaggctgatctct

SEQ ID NO: 305578 - DNA, 233 bp, Homo Sapiens
  misc_feature (46)..(46): n is a, c, g, or t
  misc_feature (110)..(110): n is a, c, g, or t
  misc_feature (120)..(120): n is a, c, g, or t
  misc_feature (135)..(135): n is a, c, g, or t
  misc_feature (141)..(141): n is a, c, g, or t
  misc_feature (155)..(155): n is a, c, g, or t
  misc_feature (163)..(163): n is a, c, g, or t
  misc_feature (173)..(173): n is a, c, g, or t
  misc_feature (181)..(181): n is a, c, g, or t
  misc_feature (191)..(191): n is a, c, g, or t
  misc_feature (196)..(196): n is a, c, g, or t
tcctgatagattattaattcttcagctcattgctgcccttttaacnacttctctacactgcctcccattttaatatattgtcttccattttcatctgccaactgggatangcatatatanatttttaataatttnacactnatcatttttttctntttcatantgaccctttnttgccttntcctgtgttntaccnattgaccaattagaaaccaagtcttttttcttacctg

SEQ ID NO: 305579 - DNA, 280 bp, Homo Sapiens
  misc_feature (13)..(13): n is a, c, g, or t
  misc_feature (34)..(34): n is a, c, g, or t
  misc_feature (89)..(89): n is a, c, g, or t
  misc_feature (116)..(116): n is a, c, g, or t
  misc_feature (147)..(147): n is a, c, g, or t
  misc_feature (269)..(269): n is a, c, g, or t
acaaccataaagnactgtactaagctcctgacanacattatcccttttaatcctcagaatatcttaggtgtagccactattaatatccngtttttcaaatgaggaactgacacccngaaaggctaagtcatttgtccacatgacacntggaagggctgcagtagtatctgaaccccagtagtcttactgccccacagtcttgctgcggaggagggaaggggctaccataacatgatgataatggtgatgtactgctaaataacagcaanaacccccttag

SEQ ID NO: 305580 - DNA, 206 bp, Homo Sapiens
  misc_feature (45)..(45): n is a, c, g, or t
  misc_feature (169)..(169): n is a, c, g, or t
tctatctttggcctgtctgtaataaagttcttcatttcacaccgnactattgaagttagagtagtgagcaaataagtgaggttcatgctctcatagggtttacagacaagtgtctacactttacaaagattactaaaggatatataattatttggatttttatctgggnttatgtaaaagatattttattccctttttcacgtgac

SEQ ID NO: 305581 - DNA, 332 bp, Homo Sapiens
acgagcaaatgagcccagctatggtgacgtattagaaacttttcttccctgttagctagcaacgtaaactgtttgccagataacttccactttggtagacaacatagaaaactgttaacaatgtattcctaagtgattcgtcaggattttaatcaagcaataattaagggctcatacagagatttctgaattcgtaataaattccttgttcaaatttgttataaatttgtttcataaaggccttaaatagggtaatactcccaaagttaatttttatgagggctgcttaggaacttctgtataaggccatggttataagcccagggtgaggt

SEQ ID NO: 305582 - DNA, 343 bp, Homo Sapiens
  misc_feature (93)..(93): n is a, c, g, or t
  misc_feature (105)..(105): n is a, c, g, or t
  misc_feature (114)..(114): n is a, c, g, or t
  misc_feature (159)..(159): n is a, c, g, or t
  misc_feature (163)..(163): n is a, c, g, or t
  misc_feature (170)..(170): n is a, c, g, or t
  misc_feature (181)..(181): n is a, c, g, or t
  misc_feature (211)..(211): n is a, c, g, or t
  misc_feature (273)..(273): n is a, c, g, or t
  misc_feature (289)..(289): n is a, c, g, or t
  misc_feature (308)..(308): n is a, c, g, or t
ttacaacatgcacttacaccattatgatactactactaattatccttttgtgtatgtgttctggagtttaccagccctgttcacatgcttggnaactgattgatngttattccnaactttaaattttaggcagcttataaaagttcattgcagtaaganaaancattttnaaatgctaaanccaaggttaagggagtagagctcttatccnattagatcatcatagcagccttatgagcaaggcaggacaggattagagccttatttttcagnccagaagctgagcccngcactgcactgaccacagncacataggtaagggcaagcagagccccagctgggg

SEQ ID NO: 305583 - DNA, 418 bp, Homo Sapiens
  misc_feature (158)..(158): n is a, c, g, or t
  misc_feature (172)..(172): n is a, c, g, or t
  misc_feature (294)..(294): n is a, c, g, or t
  misc_feature (377)..(377): n is a, c, g, or t
tcaaaattgtttaattagatacattttatatatcctgaacataatggctcccatagaaataaactagtattttgtacacaaactttatttactgtgccacattcataatatactgggccaagtgcaaacatttattacatcccctggtgtgtgcaganctctgctcccacanacacctcattatctaggatgacagagaacaagattagacaagatggataattaaaatccacaaggtaataacaaaaatgtactttatgattataaactcttctccagctacagctgtaaccngtactaagcaaaacagtttaatcaggttttcctccctaaatcccgcccccaagggcactgctccttgggggcagggatcctantaattgattaggtgggggttggctggaagggcctggggcca

SEQ ID NO: 305584 - DNA, 396 bp, Homo Sapiens
  misc_feature (51)..(51): n is a, c, g, or t
  misc_feature (333)..(333): n is a, c, g, or t
tcctgaatggccggtgcgcagactcaattgcgactttgaggctgtcagccncacccggagaccttccagtgaacaggattctgggtttctcaaagctgtaattggagggccactccagaggtgttaaagctccagcacttcgagcctgcctcgtgggaaagtcttaggctgagtctgtaggtgtctgcagttaagaagccagcggtctgcatatgattgctcaggggtggtggctgggtccaacagcattcactacaggcctgccttggaataccacctaggcgcagtgcttccgcattattcacaggggctgggaaacctaaacaatttcanttcctaggacaatttgcttaaaagttcaccttaaaggacagtctggtttactggcccaaaggt

SEQ ID NO: 305585 - DNA, 426 bp, Homo Sapiens
  misc_feature (136)..(136): n is a, c, g, or t
  misc_feature (139)..(139): n is a, c, g, or t
  misc_feature (343)..(343): n is a, c, g, or t
  misc_feature (371)..(371): n is a, c, g, or t
  misc_feature (404)..(404): n is a, c, g, or t
cccaatcactcagctgtcccatcccacctgccccaccacaggcatcttcagtggtgaagtgggggtgcccatccttgtaggcgattctttccccctatgcagagccctctcctctttccaccgatctggcctgagntgntgggtcagtgagtctggatatggagctggttctggggcaagaacagacttgaaggaagcctgcaaaattgaggagaatcccagggctttgagtaacagaggtcagccccccaacttgtcggaaaggaggatgagccagaggcttggctcaaggggacagggagagcccaaggacaggcagctgccagaggcttaggggcattgncggcttcagggacctttacctggggagncagggccctttagggattcccttgggggttttnttgcagggagcttggggaggtt

SEQ ID NO: 305586 - DNA, 164 bp, Homo Sapiens
  misc_feature (48)..(48): n is a, c, g, or t
  misc_feature (50)..(86): n is a, c, g, or t
  misc_feature (100)..(100): n is a, c, g, or t
  misc_feature (117)..(117): n is a, c, g, or t
  misc_feature (130)..(130): n is a, c, g, or t
ccacaggaatattttattaccctattaggccctggtatggtggcacantnnnnnnnnnnnnnnnnnnnnnnnnnnnnnnnnnnnnncttcaggttcaggngtccccaggttataccnggggggggttttntttgaggggggcaactgtggatccagggggtcct

SEQ ID NO: 305587 - DNA, 159 bp, Homo Sapiens
  misc_feature (75)..(75): n is a, c, g, or t
  misc_feature (128)..(128): n is a, c, g, or t
  misc_feature (140)..(140): n is a, c, g, or t
aagatgttcagatttgctgcatttgttttggaatgagtgcctggtgttgcttgtgcacaccccaagcctcctggnctttccaggtttccctgttgaacaggcagctctcctgcggttgggtggcacanggcttttgttanggccccaacatccctcctt

SEQ ID NO: 305588 - DNA, 437 bp, Homo Sapiens
tgttttaactctgaccattccttttaagcttttattgcccatgtcttcgctgagcaagatctatcttgggggatccatgggaagtcaggcacagattgtgattccctaacaaaaaagtcctgaaatccaagggaattaaggcaagaagccagggaacaaagtgcaggagcccacagatatgactcagtgaaaggaggcctttcacagcagggctggggttcattgggtcatgcatttttgccttatgcctcttgaaggcatagcttgtcctcagacgtcagcgtctccaagattctatcccttctcatctttcctatcctgtgtactttctccctacatgtttgggctacttccggggattttgcttataacagtgattactctaaggtttattatctccaggccaattaaattcttggcctaaggttctaggatcc

SEQ ID NO: 305589 - DNA, 278 bp, Homo Sapiens
  misc_feature (193)..(193): n is a, c, g, or t
acttgtcatcagtttatttgaaagtctactggtatgagagtaagggagagagccaggcccaacctcagttggccttactcaattctttcattttctggggacagtactagattaattataagcagcatccccttcccccatgcccacttttcaagcttcaacttttcttgagttcctaagcaggagacctggncctccagtgaaaaccatactcactgctcctaagcagaaatcccttccttctcacctgttccaccagcccaggggtataccctggg

SEQ ID NO: 305590 - DNA, 138 bp, Homo Sapiens
  misc_feature (24)..(24): n is a, c, g, or t
ttgtaaaggacagggtccccctcntgttgcccaagctggtctcaaactccttgagctcaaccaatcctcccacctggacccccaaagtgctgagattataggcatgagcaatgcattcagcctccaaaacaaatgttt

SEQ ID NO: 305591 - DNA, 189 bp, Homo Sapiens
  misc_feature (88)..(88): n is a, c, g, or t
tgtttttatatttttctgtacttctaataaatcgttcttttatagcctccactgaagatctttctctatacatccccaaatatttggnaaactacgtgtcctaggttgtaagtgccgtaaaaataaagcatggccttggctgaacatcagtgtttacatagaaagtggattagtttggtattaggaagg

SEQ ID NO: 305592 - DNA, 463 bp, Homo Sapiens
  misc_feature (71)..(83): n is a, c, g, or t
  misc_feature (101)..(289): n is a, c, g, or t
  misc_feature (385)..(385): n is a, c, g, or t
  misc_feature (429)..(429): n is a, c, g, or t
  misc_feature (451)..(451): n is a, c, g, or t
aaaggctgtatgtgtctgggcttcaatattttcaaatgtatggatgagttgttcgtcttcttgcagtatcnnnnnnnnnnnnngagatggagtcttgctgnnnnnnnnnnnnnnnnnnnnnnnnnnnnnnnnnnnnnnnnnnnnnnnnnnnnnnnnnnnnnnnnnnnnnnnnnnnnnnnnnnnnnnnnnnnnnnnnnnnnnnnnnnnnnnnnnnnnnnnnnnnnnnnnnnnnnnnnnnnnnnnnnnnnnnnnnnnnnnnnnnnnnnnnnnnnnnnnnnnnnnnnnnnnnggaactccctgaccctcagggggatcctaccccacctcggccctccctaaagtgggtggggattacagggtttcaaggccctcgtgcccgaatttnttggggcctcgaggggccaaaattccctataggtgagtccgtanttaaattcgggaatcatgtcanaggctgtttccc

SEQ ID NO: 305593 - DNA, 365 bp, Homo Sapiens
  misc_feature (268)..(268): n is a, c, g, or t
  misc_feature (294)..(294): n is a, c, g, or t
  misc_feature (346)..(346): n is a, c, g, or t
tgggggcagtcgggattataatacactgtagcagttggctggggaaaagtctatcaaattccatgaccaattggacttttctcccacctgtaatataaataaaatatgtactgtttcatactgaattttttcaatgcattggggttcaacataaaaggcacaaataaataaaaatatcattaaataaacggaaattacaatttcaagtttcatgtggagttgtatctcactgtttggttactttttccaatttaatttgacagacttnggtaatagcacccaactggtttaacngagggagggtcccccattgtaaaggaaaggctgggggccccctcccattttnatctcctaaattttatgga

SEQ ID NO: 305594 - DNA, 378 bp, Homo Sapiens
  misc_feature (253)..(253): n is a, c, g, or t
  misc_feature (331)..(331): n is a, c, g, or t
  misc_feature (358)..(358): n is a, c, g, or t
gttagggtgttaaatttagttttcagtatgtgcttaaggaggttatattcgctatgactttcatctcagaagagtaaagatggcgctagaaggtatctgttatagaaacgatacttcattttgggcctgaaccagtgaaggtcccttgatgtagctatcacgggcagtgtggactgagcagaaggtgggctggaatccacacctcaaagtcccagaaggcccagatagcaccttctcctctgtggccctagcntctcagcagtgtcttcagagcgcccacccaaggtgggtaggggttgggaaacccaaggccccctgcttttcagaggtnaggagtatcttgggggccaaattgggnaagctttcatccaacttctt

SEQ ID NO: 305595 - DNA, 132 bp, Homo Sapiens
  misc_feature (53)..(53): n is a, c, g, or t
ggattatagggcataagccacccatgtccgggccccatttttgactttagggnatccctgatggactatgtgcctaggatggataatctttttgcaacggatatcccggggggttctttgaggcttcttggg

SEQ ID NO: 305596 - DNA, 305 bp, Homo Sapiens
  misc_feature (196)..(196): n is a, c, g, or t
  misc_feature (254)..(254): n is a, c, g, or t
  misc_feature (265)..(265): n is a, c, g, or t
  misc_feature (287)..(287): n is a, c, g, or t
gcccagcacccccgctttcttctttataccctaggaaggccaagaaagctcctgctgctagtacacaaatcctatcccataaactgggcattattggttttgccccctagaaagttctgccagctttgtgtgagatctgcagctgtggggcatttttaactgcatttatcattcttcatcacattttgtagtcttnggagttgtgcatatatctttctttgaaggaaggggttcatgtttctaccatggttggntcttcccagtncaggttgggataatttgttaanggggagaaggggaaatga

SEQ ID NO: 305597 - DNA, 283 bp, Homo Sapiens
gtacacagaaaactataaaacactgttgaaagaaattacagattgaatgcaatccctatcaaaattccaaattccatttttttagcaatggaaaagcagatcctaaattcatattatgcaagggacccagaatacccaaaatcatcttgaaaaagaacaaagttgggatgactcgcacctcgcaatttcaaaattcattacacagctacagtaatcaagacactgtgttactgggcatatgggataggaaatatagatccaatgggagtaggcattgaggacc

SEQ ID NO: 305598 - DNA, 172 bp, Homo Sapiens
  misc_feature (149)..(149): n is a, c, g, or t
gaacctcttgggagttattttggaaaaagtacagtgcgagaagttgatagcgaagggttaccttagtaactggagattcgtcacacacacaagatgagccagcctcaagaaccacttgctgaagttgcagaatcagaactcccaccagntcctgcaggagggctccatctgg

SEQ ID NO: 305599 - DNA, 387 bp, Homo Sapiens
  misc_feature (78)..(120): n is a, c, g, or t
  misc_feature (125)..(125): n is a, c, g, or t
  misc_feature (141)..(141): n is a, c, g, or t
  misc_feature (183)..(183): n is a, c, g, or t
  misc_feature (197)..(197): n is a, c, g, or t
  misc_feature (323)..(323): n is a, c, g, or t
  misc_feature (349)..(349): n is a, c, g, or t
  misc_feature (359)..(359): n is a, c, g, or t
tgagttctaaccatttttttgtgtgtgtataatgccattctcttcctctgtgaagtgcctgttcggggtgttgctacnnnnnnnnnnnnnnnnnnnnnnnnnnnnnnnnnnnnnnnnnnncttgntcgattcctaagaggnactttaggggtactgaggtcacccagggtcatgtgttgcagnggaggtgtcacagngtgaaaactggtcttttccttggatactacctttaggattcatatttgggggaggaccttcggctaatcaggactacataggtattcacttttactttcttaggacccttttggttttccattccnttttataggtaaagtctaggccctcngggaatttanggttggttggaataggccaggaaggggg

SEQ ID NO: 305600 - DNA, 158 bp, Homo Sapiens
  misc_feature (16)..(16): n is a, c, g, or t
  misc_feature (64)..(64): n is a, c, g, or t
  misc_feature (114)..(114): n is a, c, g, or t
gaattaccagggtttngcaagcgtaagtaggggatgaaagaaagctaaggtagagcttttattnggggtttcctcaggaaagggcaagggtaaactgtttagggattggctagntatgaatttccatgggactttggagcataggggatgggtctccc

SEQ ID NO: 305601 - DNA, 156 bp, Homo Sapiens
  misc_feature (20)..(20): n is a, c, g, or t
  misc_feature (35)..(35): n is a, c, g, or t
  misc_feature (56)..(56): n is a, c, g, or t
  misc_feature (81)..(81): n is a, c, g, or t
  misc_feature (104)..(104): n is a, c, g, or t
  misc_feature (111)..(111): n is a, c, g, or t
ttgcaacttcaaggctaggnatatagtttcctagntgattaaaaaataaataagantttactccactcacccacccctggnccataataaagctacagctatgnaatcagnacccaccaatatttgaatctcaaccccttgacttactagtttagg

SEQ ID NO: 305602 - DNA, 118 bp, Homo Sapiens
cttttatattcattgccctaaattgtctaattaattcgtgggtgctaaagtacctgggctgagattttagagttcagtggaatccataagcacagaataccccagctccagattactt

SEQ ID NO: 305603 - DNA, 331 bp, Homo Sapiens
  misc_feature (32)..(32): n is a, c, g, or t
  misc_feature (46)..(46): n is a, c, g, or t
  misc_feature (48)..(234): n is a, c, g, or t
  misc_feature (238)..(238): n is a, c, g, or t
  misc_feature (276)..(276): n is a, c, g, or t
  misc_feature (285)..(285): n is a, c, g, or t
aaaagagatcagaaagacccaggatgaatagnaataagtgccaagnannnnnnnnnnnnnnnnnnnnnnnnnnnnnnnnnnnnnnnnnnnnnnnnnnnnnnnnnnnnnnnnnnnnnnnnnnnnnnnnnnnnnnnnnnnnnnnnnnnnnnnnnnnnnnnnnnnnnnnnnnnnnnnnnnnnnnnnnnnnnnnnnnnnnnnnnnnnnnnnnnnnnnnnnnnnnnnnnnnnnnnnnnnattnggtaaaacttcagcggttgggatggacaccctcttttnggtgatggnccctgggggggaacgccaacatgtatttcaaccccccattttaaag

SEQ ID NO: 305604 - DNA, 249 bp, Homo Sapiens
  misc_feature (32)..(32): n is a, c, g, or t
  misc_feature (34)..(34): n is a, c, g, or t
  misc_feature (40)..(40): n is a, c, g, or t
  misc_feature (205)..(205): n is a, c, g, or t
  misc_feature (233)..(233): n is a, c, g, or t
gaaaatcaatgcttagtaatgagcactgtgcnancactanaatattccttaatgtggggaaaaggaagaaagcaatttgttataattaagcaattgaagacaccctttttagacagatattttttcagctctgtatctattttatgactgtggcaacatgtcatttaaggaaaaaatcccatcttcaatgggtcatacttcactncaacaggtaacaggaatacaccaccccnttaatatggccacttt

SEQ ID NO: 305605 - DNA, 295 bp, Homo Sapiens
  misc_feature (279)..(279): n is a, c, g, or t
agtttttataacaggttgaacaaaaagaggcaattgtgtaacagtaactaaattatgtggggaggctaaaacaagatgagaattattttaacaaagtatgtttgcatagaattctcttggctatgaccacttttatggggggagggaggtatctttaacaagggagtttttaatcttgattttagggaaggaaaaggggaggtttaggaatgccccttttttgcattgtctattttccccaaatgtgtttagcctcaaaataatccctttaaaaataanccccaatgtccaaagt

SEQ ID NO: 305606 - DNA, 140 bp, Homo Sapiens
  misc_feature (45)..(45): n is a, c, g, or t
  misc_feature (53)..(53): n is a, c, g, or t
  misc_feature (88)..(88): n is a, c, g, or t
aaacagtgcattaacaggggacaaaggcccaagagactttagggncttaattnaggagagcttttgcacttattttcttccaaaccantttaaagtcttccttagggggcaggaggaaaagggcccttgcttgttagggc

SEQ ID NO: 305607 - DNA, 369 bp, Homo Sapiens
  misc_feature (188)..(188): n is a, c, g, or t
  misc_feature (191)..(191): n is a, c, g, or t
gaaagaaagctttgtgcgacttgcttgtgtgaacgacaagcccaggggttttgttttcttgtgtttacgtaggaaaatcacagacagggacttcccaagagactgtttctcttagccactgtctgctcctaacagttacaagaactgttcttcctcccacagctgtggcagaagcctgcttctcaggngtncttctgatggggaagaactgagctgtttaggattgaactgcccacctactgttaagtaatgttctgtctgtaacacagggatttccacttagggaaaatgtggctgttacacttgggctggcagcattttacttacggcatcttgcttttacaagccttgtttctggcagcttccaag

SEQ ID NO: 305608 - DNA, 357 bp, Homo Sapiens
  misc_feature (284)..(284): n is a, c, g, or t
taattatctgagcctttagccagtggaaatctcttcactggtggaaggtctctcctcgatgttgatggctgctgactgatcaggatggtagttgttgaaggtcagggtggctgtggcaatttctaataagacaacatgaagttcacagcatcagttgactctccctttcatcaaagatttctctgtagcatgcgacgctgtttgacagcattttagccaacagtaggaaaatctttcaaatttgcaggtcaattctctccaaactttgctgcagctttatccanctaggtatatgggatattcttaaatcccttgttggtccattttcaacaggtgttccacagggcatttttcact

SEQ ID NO: 305609 - DNA, 348 bp, Homo Sapiens
  misc_feature (15)..(15): n is a, c, g, or t
  misc_feature (33)..(33): n is a, c, g, or t
  misc_feature (88)..(88): n is a, c, g, or t
  misc_feature (146)..(146): n is a, c, g, or t
  misc_feature (208)..(208): n is a, c, g, or t
  misc_feature (243)..(243): n is a, c, g, or t
  misc_feature (267)..(267): n is a, c, g, or t
  misc_feature (287)..(287): n is a, c, g, or t
  misc_feature (301)..(301): n is a, c, g, or t
  misc_feature (320)..(320): n is a, c, g, or t
agttcggacacaggnaaatggaggaaatgcttntaaggcactcagcactttcttaacacattatacatccccagtcactgactatttnttatttattaatgaagcatgtggggagggctgtgaccttggtggctttgccttcgagntggctggctgaggagagctgaggcttcatctggaactgggaccacatggggcttgcatctgnatcagccgggggataggttggggaatagggcttcnggagagcatggcagggtgggctgnaggtttgcttttcaaagctnccacagttattccnggccccatccccacaactnccaattaggccagtttgaggttattggt

SEQ ID NO: 305610 - DNA, 189 bp, Homo Sapiens
atgagcacggcgcctggcccacaatggactttcttttaatagcaatcttccctgggcaggctttgagatattacgtcagtcacaaaaattgttttggacaattttcccaaagcatctgttatttaaagtaagtcgtgcccctgacagctgggggaggacttgggattcctcgggaggatccctcctcct

SEQ ID NO: 305611 - DNA, 385 bp, Homo Sapiens
  misc_feature (163)..(163): n is a, c, g, or t
  misc_feature (289)..(289): n is a, c, g, or t
  misc_feature (297)..(297): n is a, c, g, or t
  misc_feature (337)..(337): n is a, c, g, or t
  misc_feature (342)..(342): n is a, c, g, or t
  misc_feature (355)..(355): n is a, c, g, or t
ttattttcataaaattatttattccatgtttcaattttacaacagagattcagttcagtcatcattttttttcatggagttttactatttaaccttctgcctctgcatttttcttgtgggcatttctaccaagttcaattttcttggattaaatttattaggnctaacttttttcaaaatatttgattattcttttaatattcagtcaggtacaaaattttgctatctctgggatttaggtcaaagcccaatcttattttcacttggattatttcccaactggtaattntcaccggnggaacctaaataaaatctggccttccaaatccatttaaangggcngggccaacctatntttgggataccatccatcctacctaggggg

SEQ ID NO: 305612 - DNA, 372 bp, Homo Sapiens
ttttttgggggggaccataggtaatttatgatctctcttaatagcacagaatcactgtagcagaaacagactctgtatgaggagcttagaagactggtctttgttttgagtctgttgccaataggagttaaagagtctctggtcctcttggccattcctctccacacccataaaatgagaggcctgtacaaggcatctcacaggactgggatttaatgaatatggttctctggttgatactgcttttggacctcagagtgtgggagtggggaggggatgtgggtttcagcataagagagtaggggagtgggggaatgggagcgcattgccagggcacccagaggaaattaaaaccaagggccaatccaagga

SEQ ID NO: 305613 - DNA, 378 bp, Homo Sapiens
  misc_feature (312)..(312): n is a, c, g, or t
  misc_feature (323)..(323): n is a, c, g, or t
  misc_feature (329)..(329): n is a, c, g, or t
  misc_feature (349)..(349): n is a, c, g, or t
  misc_feature (368)..(368): n is a, c, g, or t
acaggtcaatgtgtagacagaaagtagggaaggggtctgctggaggagaggagtcaccatttttaactaaaagttaaccaggaactccaagacaggagaagatgtgatccttctgaactatagacagaggatgaaggctaagtgcctatttcattatcttgaaatgaaacttattcaatatccatatgcacgtctcctttatcaagagaaggcatatatatgcctatttcaatgaaagttaaattgttcaatgctattccaggcaactttttaaaacatgttttgggctttacaacttaattaccctcaggncggtccccaanttcaanggcactttcaatggaggccngttttacttcttggagggnttcaatgggg

SEQ ID NO: 305614 - DNA, 208 bp, Homo Sapiens
tgagttgaaaaaatgtgtaactctagttcattggttttgattgctataaggtattccatcagaggcatacacaacattttacttacaaattcctctagaaatgaaaacctaggttgcctgcaactcattgtcactgcaaataatacttcagtgatttttttaatacatgggacttgtgtatgggaatccagtttccaaggtatcccca

SEQ ID NO: 305615 - DNA, 422 bp, Homo Sapiens
  misc_feature (27)..(27): n is a, c, g, or t
  misc_feature (253)..(253): n is a, c, g, or t
  misc_feature (303)..(303): n is a, c, g, or t
  misc_feature (309)..(309): n is a, c, g, or t
  misc_feature (315)..(315): n is a, c, g, or t
  misc_feature (323)..(323): n is a, c, g, or t
  misc_feature (342)..(342): n is a, c, g, or t
  misc_feature (352)..(352): n is a, c, g, or t
  misc_feature (380)..(380): n is a, c, g, or t
  misc_feature (387)..(387): n is a, c, g, or t
  misc_feature (405)..(405): n is a, c, g, or t
aggagaggctgcctagcaggaggcagnttggaggtttaaggactgaggagcctgtgtgtaacggaggtggacaataggcaaggaatgaaagataactttgagatataaagcctaggtgaatgatccgtccattagcagatacgaagctgtcggaggagctggtttgggaaatcaggatagtgtcagtggctctagaaaaatattaagtaggttggaggttttaaggacttgagtttttgggaagagttagatngaggttccaaaacgttagatccaaggaattagatttttccgtacctttgnaaaatngaaacncttttccnttttgccattaaaatttgntttccacccnttggggagccagcccacctttttttggnaaatttngcccaccttcccccccgnttttttttcctgacccc

SEQ ID NO: 305616 - DNA, 427 bp, Homo Sapiens
  misc_feature (39)..(39): n is a, c, g, or t
  misc_feature (41)..(41): n is a, c, g, or t
  misc_feature (338)..(338): n is a, c, g, or t
  misc_feature (387)..(387): n is a, c, g, or t
  misc_feature (395)..(395): n is a, c, g, or t
gacatctaccttcggactccagaggctccaaggcctacntnctctcttcaagacaggcttcacctccaccttcatacagtggtactgggagatgaacaggggtagggcgatcaagatttagttcaacctgtagttccagtcgggtggtgcttggtagttgactcattttggtcccatttgatatttgcagccacctgctgggataggtgtaactgttgctcctatttcacagattaggacaggatagtttgctagaggtcagaggacgagttgcgggagggaatggttgtcagttaggtttttaaccttaggagccttcatgttttcttaggatcttngcaggggagaccttgggccaaattcctttttcctcttgggggggtcttnatttaccntttttgttaagtttaaagagtttctgcccatt

SEQ ID NO: 305617 - DNA, 364 bp, Homo Sapiens
  misc_feature (36)..(36): n is a, c, g, or t
  misc_feature (265)..(265): n is a, c, g, or t
  misc_feature (290)..(290): n is a, c, g, or t
  misc_feature (310)..(310): n is a, c, g, or t
  misc_feature (345)..(345): n is a, c, g, or t
gcgtggtttttaaaggcttggctagcgtgcccccgngggtactaaaagagggctgcttgcgcaaatctcattcccacaggatgcaagtacagaagcagaggaacgccggaaggtcacagagagacaggcggggcggttgaccagctgactggactcactttggagaaatgcaaattaccgagccacagtccaaccaatggtatcaaaacagaatctctacagatgtagctcagcgaagatgaatctcggcctcaccccagagaanttaaatatattgggggtaccaggantccccattttaaaaaacctntccaagtgataagttttgaacattaaaggtacagngaatcacaaactgggcagg

SEQ ID NO: 305618 - DNA, 201 bp, Homo Sapiens
ttctgtattaaaaccactttttactatatctcaggtatggaaatatgaaaacactgttgtagcaggcgggtagttgaagctctgcactcagggtaggctgacgtactgccaggctctgaccaggaccttacaacaatacccatccttggaaggtttgagtcaactttatagctgaatttgatgccagggagcacaaagcaa

SEQ ID NO: 305619 - DNA, 388 bp, Homo Sapiens
  misc_feature (329)..(329): n is a, c, g, or t
  misc_feature (338)..(338): n is a, c, g, or t
  misc_feature (376)..(376): n is a, c, g, or t
ataccatacttttgtgtttcttttttggttatatctaattatgtttagttttaactcaagattgacttcagaaaaggtaagttattttgcaaaggatttctgcatatttaaaaaaataagagctgaagttattttaagtaacagattgacatattctgtgaattttcatgcagtgttacagaaaagtagctcactctaaagtttatactgtgcttgctgtatgctctgtgacataaaaatctttaggtccaaaaccaataccaataactgctataggggtattttaaggggaccccggtattattggctttccggggggcttatccccnatttggggntttaggcccttgggtttttaaatccattacccgggggnttccaattggcc

SEQ ID NO: 305620 - DNA, 263 bp, Homo Sapiens
  misc_feature (45)..(172): n is a, c, g, or t
  misc_feature (183)..(197): n is a, c, g, or t
gaattggctgatcactaagattaagacaaactgttgttatgagtnnnnnnnnnnnnnnnnnnnnnnnnnnnnnnnnnnnnnnnnnnnnnnnnnnnnnnnnnnnnnnnnnnnnnnnnnnnnnnnnnnnnnnnnnnnnnnnnnnnnnnnnnnnnnnnnnnnnnnnnnnnnnnnnctcatttcttnnnnnnnnnnnnnnngaagccttctggatacccatgtacttagggagggacacaacatcactttttgtgttattctttgac

SEQ ID NO: 305621 - DNA, 477 bp, Homo Sapiens
  misc_feature (45)..(224): n is a, c, g, or t
  misc_feature (341)..(341): n is a, c, g, or t
  misc_feature (374)..(374): n is a, c, g, or t
  misc_feature (396)..(396): n is a, c, g, or t
  misc_feature (403)..(403): n is a, c, g, or t
  misc_feature (437)..(437): n is a, c, g, or t
  misc_feature (457)..(457): n is a, c, g, or t
ggtttagatcatatggggtctcatagccattttaagggctctggnnnnnnnnnnnnnnnnnnnnnnnnnnnnnnnnnnnnnnnnnnnnnnnnnnnnnnnnnnnnnnnnnnnnnnnnnnnnnnnnnnnnnnnnnnnnnnnnnnnnnnnnnnnnnnnnnnnnnnnnnnnnnnnnnnnnnnnnnnnnnnnnnnnnnnnnnnnnnnnnnnnnnnnnnnnnnnnnnnnntaagtgttcatagggttcactggcctactatgttgaggaacagacttaaagggggtgcaagctgggaaaaatagggagggtaggtacctcaggagacttgaaagggaattgaaggtnaggatttccaccagggagtttgccagttgattnggggtattggccatgggttttnatgggtnttaggggtattggcccataaggccttaaggtttntttaaggaaaggccccaggnttaaaatttttttgggccca

SEQ ID NO: 305622 - DNA, 359 bp, Homo Sapiens
  misc_feature (24)..(24): n is a, c, g, or t
  misc_feature (26)..(26): n is a, c, g, or t
  misc_feature (45)..(45): n is a, c, g, or t
  misc_feature (49)..(49): n is a, c, g, or t
  misc_feature (89)..(89): n is a, c, g, or t
  misc_feature (91)..(91): n is a, c, g, or t
  misc_feature (108)..(108): n is a, c, g, or t
  misc_feature (182)..(182): n is a, c, g, or t
  misc_feature (210)..(210): n is a, c, g, or t
  misc_feature (262)..(262): n is a, c, g, or t
  misc_feature (274)..(274): n is a, c, g, or t
  misc_feature (305)..(305): n is a, c, g, or t
  misc_feature (320)..(320): n is a, c, g, or t
  misc_feature (326)..(326): n is a, c, g, or t
  misc_feature (339)..(339): n is a, c, g, or t
gtgaccctggaaaagggtatcaancnctgaccattaataaatttncttnctaattaattaggctacgatgagtttaaatagtctgggtncnctacccaaatttaatanctggacatgcaaagctgaggactggatgctagaatgaggtagcctacccaagacactgtgctgtgtgtgaagtnccatgagggccacccaacttgccttccncgcttaccatttctatcttttctccctgttacttaaagcagtggtttgggangccctttattancgagtgttaattcattacatttgagggagtntagtcttgggagtgntagttnccactgagggggnccattttaaaaattatcttt

SEQ ID NO: 305623 - DNA, 220 bp, Homo Sapiens
  misc_feature (35)..(35): n is a, c, g, or t
  misc_feature (85)..(85): n is a, c, g, or t
  misc_feature (106)..(106): n is a, c, g, or t
  misc_feature (159)..(159): n is a, c, g, or t
atttctggcaatttctacagaaacaagttgaagtncctggctttcctcgcaacgatgaacacacccttccgaggccctacacttncgggccccagcgcatcttctngcggaccgtgcgaggtatgcttccccacaaaacaagcgagggcaggttctctnggacctcttaaggtgtttttacgggattccaccgccttacggacaagaaaaagcggatggt

SEQ ID NO: 305624 - DNA, 163 bp, Homo Sapiens
  misc_feature (23)..(23): n is a, c, g, or t
  misc_feature (56)..(56): n is a, c, g, or t
  misc_feature (74)..(74): n is a, c, g, or t
aaatactgcctttaagaatcaanctttaagtataaagcacaaatagattaaatatncaaaggtggaaaaagatncatcatgctaacactagtcaaaagaaagttggggtagctatgttaatattagacaatgtaggatttcagagcaatgaataaggctgggg

SEQ ID NO: 305625 - DNA, 255 bp, Homo Sapiens
  misc_feature (144)..(144): n is a, c, g, or t
  misc_feature (149)..(149): n is a, c, g, or t
  misc_feature (155)..(155): n is a, c, g, or t
  misc_feature (187)..(187): n is a, c, g, or t
  misc_feature (206)..(206): n is a, c, g, or t
  misc_feature (235)..(235): n is a, c, g, or t
cagtttagtttcttcttcttgaagatgagggacccatagccagctggtactgttttcctggcatcctctcccctgcctgcagcttccttgttcactgggccaagtcccgcagtaatcttcctaagcatgggagtaggaccgggnccttnctgggncagaacattcccatctacttcagggtttactncagtgggccagatgtgagntttttctcttgttccgttaattaactttnttgtggctgttttgggccct

SEQ ID NO: 305626 - DNA, 494 bp, Homo Sapiens
  misc_feature (18)..(18): n is a, c, g, or t
  misc_feature (67)..(67): n is a, c, g, or t
  misc_feature (401)..(401): n is a, c, g, or t
  misc_feature (423)..(423): n is a, c, g, or t
  misc_feature (428)..(428): n is a, c, g, or t
  misc_feature (441)..(441): n is a, c, g, or t
  misc_feature (453)..(453): n is a, c, g, or t
  misc_feature (474)..(474): n is a, c, g, or t
gttcatggttccacaggntatacaggaagcatccctgggcatgcctcaggaaattttcagtcatggnagaaagggaagcaagcacatcttacatggctggagcaggaggaagagagtgaagtgggaggtgctacacacttttaaacaatcagatctcgtgagaactcactatcatgagaacagctagtgggaaatgtgcttccatgatccaattacctcccagcaggcccctcccgcaacattgggggattacaatttgacatgatatttggggtgggaaacacaaatcccaaaccacatcgcccaacttcaaatttaactttcttgtcttatgggtattaagggtaggggaggccaaccatttgtttattttttcccattacttgatggtcttaggtttntttccaacccccattttgtttnaaaanggcttttcttttncccctttggggnttgcttttgggcaccctttcntcgtgccccgatttcttggg

SEQ ID NO: 305627 - DNA, 129 bp, Homo Sapiens
  misc_feature (43)..(43): n is a, c, g, or t
  misc_feature (62)..(62): n is a, c, g, or t
  misc_feature (113)..(113): n is a, c, g, or t
ccgattgtcttctgcctctgcaccacttctggtggctgttccntttacagtgatactatcanctcctcacggcattgcattgccctctcagggctgccttttaattcctcacnacagagtgccagaaca

SEQ ID NO: 305628 - DNA, 260 bp, Homo Sapiens
  misc_feature (78)..(78): n is a, c, g, or t
  misc_feature (80)..(80): n is a, c, g, or t
  misc_feature (83)..(83): n is a, c, g, or t
acaaatgtgtgtaccttaatcatacccatatgtaaaactagagcggtggcatgaatcccaagaagtgggcggttgcangnctngtacttctgtctcagatggataactgcaatcactaaccttttttgaagaatttgatatgatactgagaaaatagtgattaatcaaagccccttttaaaatgggaaggactttcatctatagggcattaactttttatggatccagaggaaaaaagcagttaaaggatagggtggaac

SEQ ID NO: 305629 - DNA, 421 bp, Homo Sapiens
  misc_feature (238)..(238): n is a, c, g, or t
  misc_feature (267)..(267): n is a, c, g, or t
  misc_feature (295)..(295): n is a, c, g, or t
  misc_feature (331)..(331): n is a, c, g, or t
  misc_feature (388)..(388): n is a, c, g, or t
  misc_feature (409)..(409): n is a, c, g, or t
ggcacttggaaatctcataggaagctagaaacagccttccagctgggcctcctgtttgtctcggatagggttcaggagtgagaagctcattgtgggtctgggacagttctagaactgcctcaccatcaccatggccccgaaagtcttccatccctgccatgcttcacgtgccttcttgctgctttgtccacagccagcgcccacttcagattgccctcacagcttttatcagcctccnggggtttttacgttttacttatatctttnggtctttttacaaatgcctttttatgtnaaacttttatgttaaagtttttattgcagaggggtnagaggccataggacgttggggcgatggcccaaaacgcaattggggcttttctgttgnccaccggaaggggggtttttncacattaatttt

SEQ ID NO: 305630 - DNA, 166 bp, Homo Sapiens
  misc_feature (86)..(86): n is a, c, g, or t
  misc_feature (95)..(95): n is a, c, g, or t
ctcaaattgcctactggaacaggaaggaaagtcatgaggcagcgtgtccccatgggccaccccattgcggcaccccacagggcacngggggggcntcgccttcgggtttcagttgcccttccttcaggacacgtggcattcggggcccggccattccgtttcgttt

SEQ ID NO: 305631 - DNA, 317 bp, Homo Sapiens
  misc_feature (188)..(188): n is a, c, g, or t
  misc_feature (211)..(211): n is a, c, g, or t
  misc_feature (290)..(290): n is a, c, g, or t
agtttgaaacagtagggtggggtttctttgtcttgagaaaaatactgtctataattaagtactaatgtggcagtgttgggttaaggaagttatagggtggaaaaacaggcataggccacctctctgtcacttaggaaatgatttctttttctaggacataaatatttcttcaacccacccaaattccnttgactttcaaacttgaaccccnggggcacagatcccttaagggtcatccccactgtgctcttcaaggagaggggctcttcttgtgggtgtcttgggggttnggccagggggaaagggtgagtctttcc

SEQ ID NO: 305632 - DNA, 352 bp, Homo Sapiens
  misc_feature (41)..(41): n is a, c, g, or t
  misc_feature (182)..(182): n is a, c, g, or t
caaattctcaaagacagaccccacatgtcaagattcctggnagcaaaggttctgccttcgccagttttccagctaattagcagcacgtgggctacaggtgctgctagacacagctcccgcctggctgctgcctctcatcctgccaatggacaagaactggtccaaacaggaagaaccagggngttgcaggccttgacttcctaactctctggggactggcccagcagggggactttgggcacctctgcagagtcggagcattgcatgcacagggtgcccacactcacaggggcctggggagcggccttgctacctctattttacagccaacagctgctcttgagaaggctgt

SEQ ID NO: 305633 - DNA, 106 bp, Homo Sapiens
  misc_feature (76)..(76): n is a, c, g, or t
  misc_feature (83)..(83): n is a, c, g, or t
gtcttgatgtccccttaaaagtgttttgttggttgtttgtaccctgtgctgggaatgcctgtctctagcttttccnttatatngaggaaaagataccattggtttc

SEQ ID NO: 305634 - DNA, 368 bp, Homo Sapiens
  misc_feature (331)..(331): n is a, c, g, or t
  misc_feature (352)..(352): n is a, c, g, or t
tgagtcaaaacgatcttgacgggaagctgttagaggtctcatggaaataggcctggagcacaggatttggctgaggctttcaactgacatcagacaagactgcaatcaagggaaagcagacctggggaccacgggcaatcacatgagatgagaaataccaaagaatgtgaccatccagggtagccgggggacacagctccaaaaaagtgagagtggtgctggattagctccattggagggaacttggaggttccatttcccttttgccaaaccaggggtaaataattgcatattctataatggtgaattttgcgttttccctgctttcttncccagcatgatccaccccgtnggacttaattgggaat

SEQ ID NO: 305635 - DNA, 356 bp, Homo Sapiens
  misc_feature (212)..(212): n is a, c, g, or t
  misc_feature (217)..(217): n is a, c, g, or t
  misc_feature (226)..(226): n is a, c, g, or t
  misc_feature (286)..(286): n is a, c, g, or t
ctcttactgaagtcttgggcccctttacctctcaaatacattcaggttgatgtggccacaggtaattaagccagaagggtgaaaaatactcacagtatttacaataaacgttagcgcgaccacatcaaatgaccacataacaaagtcaacatgtaagctttctataacccacacataatgctgctcgggaaaaggggaagtgcaaagagggntaacnaaaaagganaataaaaaccaaaaaccagtagctccagggggggtctttttatttccccacattgtgggnattaattttttcccattcccccaggatggattttaggtttgaccaattgggggtcttctggggttgctta

SEQ ID NO: 305636 - DNA, 303 bp, Homo Sapiens
  misc_feature (39)..(39): n is a, c, g, or t
  misc_feature (133)..(133): n is a, c, g, or t
  misc_feature (208)..(208): n is a, c, g, or t
  misc_feature (270)..(270): n is a, c, g, or t
acaggtttgccagtggatatgggagtgaggcatctagangatgtctggaattagtaatccctgacatgtacacaggggcatactcagaggatttcagtatcttctctgctgtggttcagtagcaggtgcttgncatgctaaatcttaccaaagaacgtcatcttgcctcatgaaagttttaggattcctgtcaaccttgagtattctnaagttaggggaaagttactttgatacaaaagtgttgggagggaaaagtttgagagagggttncagaggaaagagacatgttcttaaactgttttt

SEQ ID NO: 305637 - DNA, 295 bp, Homo Sapiens
  misc_feature (188)..(188): n is a, c, g, or t
gaagaggctaaaattcattcagttaggatatactatgcactagccattatttaaatattagctcatttgattattttgacaacccttatggggataattatcttcatcatggagataaagaaactcaggatcaggctttttgaatactctgctcaataccacaagtcctctatgtgacaaaggtaganttcaaactcagatttattgaattattcagcttaggatttcctcactgttacaccttacagctctatacttccctaagtgtccctgaagagggcaattaaccccaatt

SEQ ID NO: 305638 - DNA, 271 bp, Homo Sapiens
  misc_feature (76)..(205): n is a, c, g, or t
  misc_feature (233)..(233): n is a, c, g, or t
  misc_feature (243)..(243): n is a, c, g, or t
  misc_feature (254)..(254): n is a, c, g, or t
ccaccctgtctggccctattttgtgaagcttcatactgatgaaattattgatgcatctttatcactgtggttggcnnnnnnnnnnnnnnnnnnnnnnnnnnnnnnnnnnnnnnnnnnnnnnnnnnnnnnnnnnnnnnnnnnnnnnnnnnnnnnnnnnnnnnnnnnnnnnnnnnnnnnnnnnnnnnnnnnnnnnnnnnnnnnnnnnctgtgggtggcacaccaggattatattntggcctatcnaatccaacctnaatcaccatgagtctgt

SEQ ID NO: 305639 - DNA, 422 bp, Homo Sapiens
  misc_feature (358)..(358): n is a, c, g, or t
  misc_feature (375)..(375): n is a, c, g, or t
  misc_feature (409)..(409): n is a, c, g, or t
tcggcacggcaaacaggtaggttgtcctcatatagatccttccagtattctgaaaaacatccttttatttcttaaaaccagtaacccttacatttttcctataggatagttatttttgttgagatcaaatagacattctataaatgttataaattatgcttgcagttactcagcctatctaggcttaaggtttatcaatatttgaagttgaaacatcatcttatgaggtttagttttagggaaggataaataaatatatcaaagtatttcataaagttgtatcaatgttccttctaacattagggaggactttactgactgagggccatctgtggaacggactgggtgatctcaggantccttcccggctcttantacccctctggacttaacacttcaccccggattngctgttctgtggc

SEQ ID NO: 305640 - DNA, 351 bp, Homo Sapiens
  misc_feature (49)..(49): n is a, c, g, or t
  misc_feature (67)..(67): n is a, c, g, or t
  misc_feature (69)..(69): n is a, c, g, or t
  misc_feature (320)..(320): n is a, c, g, or t
cacagcagaggctggaaaagctgacactgccggcttcctctgccgctgncaggcaggccgcaggtcntnttacacagctctgtttgtcaatagagatggagctttgtctccccctccagattctaccccaacccacatcccagcacccaacaaagacccttttagatcagagcctgtgtggggtagaatgggagaccagaggcagagttatttgccccacggctgtgaggcagggccccacgcagagttaggttcgttaccagggccagaggaccacccagccaaggttccttcaggctttaggactttcccagttcccntttttttccccagggtttttcccaggcagtt

SEQ ID NO: 305641 - DNA, 414 bp, Homo Sapiens
  misc_feature (95)..(289): n is a, c, g, or t
  misc_feature (311)..(311): n is a, c, g, or t
  misc_feature (388)..(388): n is a, c, g, or t
tttcggcacaggatcatgtggtactccccaacaaccagtcattaacgatgtgtccaagattgctgaaatacttctcacaacttctgtctagcatnnnnnnnnnnnnnnnnnnnnnnnnnnnnnnnnnnnnnnnnnnnnnnnnnnnnnnnnnnnnnnnnnnnnnnnnnnnnnnnnnnnnnnnnnnnnnnnnnnnnnnnnnnnnnnnnnnnnnnnnnnnnnnnnnnnnnnnnnnnnnnnnnnnnnnnnnnnnnnnnnnnnnnnnnnnnnnnnnnnnnnnnnnnnnnnnnnntgtagtagtgttatttcggtanttttcatttgtccccccgttgtctttgtgactgtatcttcacaggcaaacagaaggcggagggcaggggggggtaanttgtgggtttttaagggcttttctgg

SEQ ID NO: 305642 - DNA, 385 bp, Homo Sapiens
  misc_feature (196)..(196): n is a, c, g, or t
  misc_feature (338)..(338): n is a, c, g, or t
  misc_feature (356)..(356): n is a, c, g, or t
  misc_feature (374)..(374): n is a, c, g, or t
cctagaacaacccctgtggtttctctatcatattgacgttggtgttgttttctcgtgatacgtttaaatattcctccatttcttgctgcttcctatgaacttgtaattgaattcagaggagaggttggcaaagggcggatagtaagcaccttatgcctttgggtccacgaggtctcagatgggctgagttcagctntagtcacctcatgtcccatgttaggctgttccttcttcttacttctgtcctgggttccaaggccccagcctatttctggaaaagggtaagtgggtcaggctgcataggatggaccatttaggaggggtgtaggattttactnctggaaatcccagagggnttgtggctcttgaggtcnttattcagtgc

SEQ ID NO: 305643 - DNA, 443 bp, Homo Sapiens
  misc_feature (364)..(364): n is a, c, g, or t
  misc_feature (371)..(371): n is a, c, g, or t
  misc_feature (423)..(423): n is a, c, g, or t
gggcgaggcctttgggctaaaagacccacaaatgtgttgactttgttgtcacctgcacaggctcttttccctccttcaaaaagggatgtaatattcagttctccaccttaacatcatccccagaggacctgaccctcagactgcactcatacactatgttgacatgaggctggttggatacagtgaacagaaaatgaacacattttagataacttcatatgaaatatacacaacagagagcttgtcattcagggggccatagtttctacggagttcagcagtctgggattacataaaggcatcccctcccgatatggcaccctcccaagttacttgcaccctccatggacaccctattaacccnaaaaggnggggcaccaacactctggcaggtcctttttaattttaggggggggcacggtnttttaccagcgtttaccggt

SEQ ID NO: 305644 - DNA, 288 bp, Homo Sapiens
  misc_feature (33)..(33): n is a, c, g, or t
  misc_feature (70)..(70): n is a, c, g, or t
  misc_feature (127)..(127): n is a, c, g, or t
  misc_feature (140)..(140): n is a, c, g, or t
  misc_feature (146)..(146): n is a, c, g, or t
  misc_feature (171)..(171): n is a, c, g, or t
  misc_feature (173)..(173): n is a, c, g, or t
  misc_feature (188)..(188): n is a, c, g, or t
  misc_feature (206)..(206): n is a, c, g, or t
  misc_feature (227)..(227): n is a, c, g, or t
  misc_feature (263)..(263): n is a, c, g, or t
  misc_feature (270)..(270): n is a, c, g, or t
gatccgggggccccagctgacagagggcgtggnggggtaaggcattaacccatcccagcctctgcctgangaaaccacccagccttgggccggcgctgggtgacttcgcgtagaggccagggaactngccgcggcgaggnatctcngccattggagtgctccgctgcggangnaggggaccccgactncgagtaagtttgcgaganacttacgcagtcaggcggggncagcagcaagatgcgaagaaggccgtacagatcccnggctctncgaacgcaactttgccct

SEQ ID NO: 305645 - DNA, 472 bp, Homo Sapiens
  misc_feature (423)..(423): n is a, c, g, or t
  misc_feature (431)..(431): n is a, c, g, or t
  misc_feature (440)..(440): n is a, c, g, or t
ccagcgccaggcacattcctcctttctaggaaggtgtggttaagtgtaagtggtgaaagaagggaaaccattgcttaatgtcgcaaaggagacagactgtcctatgttgtgcagaaagctcccacaccaggtaggcaagttggccaccagcaaggccctcctatgagcatgacagcctaaaagtgcaggcaggccctcagctcaactattggtatatggaaaatgagaaatgttctgtgagataagaaatgttttgtcatttttctcagatttgctcccagtcccccatcagctgcttttcccttgtataaaagaggttcaaagggaattttacagggtctttttcacaggttcccacaagggaaggtggttgggaggagttcacaggttaaggggtgtttggggttgaggaggagtcgggantgagttcngaggtttgnaatttacagggaggcccctttagttcccaaag

SEQ ID NO: 305646 - DNA, 366 bp, Homo Sapiens
  misc_feature (323)..(323): n is a, c, g, or t
aataagcaatcatattcttacgattattcacatgtaagtacttaacagtaagggatatggcgtaccattaatacaattaaaaaataatgcgtggagggtaactaagcagcatagttgtatcactggaatacctgtaaccgctattaaacagcagcagatgcagggggctgggagggtctttttccccttggagacgcggaataaactgtgttgtgtgcctgcattttgactgtggtctgtcacatgaggtcaaggtgggaattttttacttgtgggtatttaaaaatgtttgggattttgggagcatttcttgattttggggnttgttttgatgaggggacggctccaaccctattactttttata

SEQ ID NO: 305647 - DNA, 372 bp, Homo Sapiens
  misc_feature (267)..(267): n is a, c, g, or t
  misc_feature (295)..(295): n is a, c, g, or t
  misc_feature (329)..(329): n is a, c, g, or t
  misc_feature (345)..(345): n is a, c, g, or t
  misc_feature (360)..(360): n is a, c, g, or t
gctagtaagtaaaaatgttccttccctgaaatccctcaataattagccaactgctattgttacttgtaacctattgatgtaagtattaagaagtttttcatcaactttaacccatttttaaaaataaggctgtgtacaatcacaccttaaatacagctttcattgctgaattatccagattttgtaggcgagattgattctgtttgaacaaaataaggaatgaaaggaatctcaaacaattacattggataattatgggcacctggnggggcatgttttggcataggatttggantcttggggtttggtccataatggaggtatttgtncaggggtgaggggggntaaaatatttaaacngtttggctaggc

SEQ ID NO: 305648 - DNA, 358 bp, Homo Sapiens
  misc_feature (59)..(221): n is a, c, g, or t
  misc_feature (249)..(249): n is a, c, g, or t
  misc_feature (298)..(298): n is a, c, g, or t
  misc_feature (317)..(317): n is a, c, g, or t
aagaaacattacctgattgtaatgtatagatcatattttgatccaattcaaggaaacannnnnnnnnnnnnnnnnnnnnnnnnnnnnnnnnnnnnnnnnnnnnnnnnnnnnnnnnnnnnnnnnnnnnnnnnnnnnnnnnnnnnnnnnnnnnnnnnnnnnnnnnnnnnnnnnnnnnnnnnnnnnnnnnnnnnnnnnnnnnnnnnnnnnnnnnnnnnnnnnnnaatccccagctacttcagggagggcttnagggtggggagggctgggaccccgagagggcaggagggtttgcagttangcttgaggattcacggccncttgcacttccccgccttgggggaccgaccaggaggccaag

SEQ ID NO: 305649 - DNA, 353 bp, Homo Sapiens
  misc_feature (142)..(142): n is a, c, g, or t
  misc_feature (144)..(144): n is a, c, g, or t
  misc_feature (242)..(242): n is a, c, g, or t
  misc_feature (259)..(259): n is a, c, g, or t
  misc_feature (279)..(279): n is a, c, g, or t
  misc_feature (308)..(308): n is a, c, g, or t
  misc_feature (327)..(327): n is a, c, g, or t
gagaataaaatatgaataagacatggtctttgcccccagtaaatagctcactatacaaaggtttccttgtcatttaatttataaattaggagagccactctttatgtatttattttgcttctgtgtaatttgagttttgttntntcaggattgcctcactgaaggcaagtcctaaatcaaatacagtctttgtcatgggagtcaaagtttcacaaacaaacacgcatagtttgctaggattnaaagtcccaataacggntattactagggctttacccntcaacttgaatgtggggtccccacaggcntaggatccatggcctgttnttcagttctggcccaacagcgtgggc

SEQ ID NO: 305650 - DNA, 310 bp, Homo Sapiens
  misc_feature (291)..(291): n is a, c, g, or t
atggagatgccttagagctcggcattcctgagtttgctgcaatgagtagttaagtttgaagaatctagatatgtgaatgatgtaatagataaggcagacagattggatcagaggggttttaatattaagataagtgacaatgatagctcacagtcatgaccttatgcctatatcatagagtgacactagacagccagtgaaatgcaaagcagccatgtgccctggggattaggattcgcacctctctgtagcctggggcagctttcagtaggagccatgtcagggagtttnccgtatgtgtgccatgcat

SEQ ID NO: 305651 - DNA, 164 bp, Homo Sapiens
  misc_feature (20)..(21): n is a, c, g, or t
  misc_feature (126)..(126): n is a, c, g, or t
  misc_feature (143)..(143): n is a, c, g, or t
ctcggcgtggaaacatatcnngcagattacagcaacagaaggcagtaagaacatcataacagatgagcaaggaaacggtaggggaaaaggtcagaaaggccgagagggcagctcaggtaaggcctntagacaactgcactccnaggtaaggagggaacccactg

SEQ ID NO: 305652 - DNA, 440 bp, Homo Sapiens
  misc_feature (13)..(13): n is a, c, g, or t
  misc_feature (53)..(53): n is a, c, g, or t
  misc_feature (57)..(57): n is a, c, g, or t
  misc_feature (92)..(92): n is a, c, g, or t
  misc_feature (348)..(348): n is a, c, g, or t
  misc_feature (353)..(353): n is a, c, g, or t
taactatgtgggnagaataagatgaggttttcagactccagggtttaataagncccngatttctctatctacaatggcctcttgtgtttggngcatgatatgtccaatggagccaccatgttgaaatagttgtggactattcaagagcagactaaaagcatgaagcctatgatgaactgggattaaatattatcaagttgttgtttatcatgacgacaaagcagagggatggaagatgagagcataatgagggttatttccttgatgtgcagcatgatggaaaagcaaagagccatgggttgaggaggaaataacccatgttggaatacagagggactgtattcaagntcccnagggttgtttgataaatctgggatgtcaccttggaaaatgtattaaggattaggctaaggtcttagggttccagggggaggaaaaac

SEQ ID NO: 305653 - DNA, 502 bp, Homo Sapiens
  misc_feature (332)..(332): n is a, c, g, or t
  misc_feature (431)..(431): n is a, c, g, or t
  misc_feature (459)..(459): n is a, c, g, or t
atcattaaaacaacaatacaaaagtgtcatggcattcacggtggaatcagatggaaagtctgggggagttcccagtggaatcagccttcctgctactttactagtctccagccatccttcaaaccagcagaaacttaacagtatgactgaggtctcagagccaagcaccaactactactgggctctgtgtgatttctgaaatgtaggggatatgcatgaactgtttaattacttcccatcatttagggaaaggggctgaggggctggggactcctaggaggacaaggggtgttgctggataaaggctgagggacagctaggcgtgggccccnttgcctggggcatcaggggggttgtcatcccagccctggtggtcttctttcccaggcactacttgggccaagggaaggacggtgccagacgttgcatgncccagaaagttgggcagacgcagggttncccaggacaccacacttcccaaaggcatcatccttcgtatact

SEQ ID NO: 305654 - DNA, 437 bp, Homo Sapiens
gtgttagctttcaagttgtcactaggtaaaacttgtgtaggaaccagttactactaccaggcagcatcatacgttatgatttgatcctcgctacaatcctccaaggacttatgattgccctcattacgtagatggagaaggagaagccagaaaagttggagatgctcatggagatgttgctgggaaaagaggagatgggatttgaaccttctgagtttatattctaagcttttctccccccaagaaaatcaaggaagatatcaaagggcacatctatctaaaggctcagtgaacttcccaatattaaccagggtggataaaaatttaaaattacccctatttccacttatgaccatttctaggatgttcttaaaccagcttcatccggggagggaacgagtttcatgggagtccccacttattatattcagacactc

SEQ ID NO: 305655 - DNA, 225 bp, Homo Sapiens
atatatcatataaacctttgtggtcctatcctttttctcctatcttttcagaaagtaatcaatataaaaaacatgatgttaaataaccttaagtatattttcacactttataaggtactgtaggcatcatgtgttatgcatcattctgcaatttgcattggggccctttaaaatcccattttttaaaatttattcggtactggggtaccctggggaattctaggg

SEQ ID NO: 305656 - DNA, 160 bp, Homo Sapiens
aacaagcgtcccgtcctctccagcttcttgactgtggggctgatagggtgtacctgtttccgtaatggactgcagactgaggcaacactttcaggatggcttgcgggtggggataggtatggaaatcttggaagggggaaaaatggaaattttatttctt

SEQ ID NO: 305657 - DNA, 318 bp, Homo Sapiens
  misc_feature (108)..(143): n is a, c, g, or t
  misc_feature (162)..(219): n is a, c, g, or t
ttttctcattcagtaatgcaatgaaattgggattcatctaagaaaactggtgtagtgaaaaagacatgaactttgaggtcacatctccaagatcaaaccctagggccnnnnnnnnnnnnnnnnnnnnnnnnnnnnnnnnnnnnttgagtctcactttgtacnnnnnnnnnnnnnnnnnnnnnnnnnnnnnnnnnnnnnnnnnnnnnnnnnnnnnnnnnnggctacatagggagtgtccgggcatttgttcatctacttcaatttgttaaagggacctactacgtacttaggacacagttgttgggctcttcacaggat

SEQ ID NO: 305658 - DNA, 428 bp, Homo Sapiens
  misc_feature (255)..(255): n is a, c, g, or t
  misc_feature (336)..(336): n is a, c, g, or t
  misc_feature (345)..(345): n is a, c, g, or t
  misc_feature (354)..(354): n is a, c, g, or t
  misc_feature (366)..(366): n is a, c, g, or t
  misc_feature (380)..(380): n is a, c, g, or t
  misc_feature (400)..(400): n is a, c, g, or t
  misc_feature (408)..(408): n is a, c, g, or t
tggatacaaacaaattaacaattacagactatcgccaacttataatgcttaaactttatgatcaatagtaataaattacacgagatattcacactttattataaaatagggtttgtgtaagatgatttttcccaactgtaggttaacatcagtgttctgagcacatttaaggtaggcttggctaagctatgatattcagtaggggtatgtgtatttcatgcattttttacttacaatattttcaacttatggggngggatttattgggggacattaacccccatccctaggtcagggaggcatctggtatacatggagggcttaccattcctattnccctatccnggcccggtngcctgcctcctnaagggtttggtccnccctggccaaaccttagggncccttccnggggtaaatgggtcccgggt

SEQ ID NO: 305659 - DNA, 440 bp, Homo Sapiens
  misc_feature (102)..(140): n is a, c, g, or t
  misc_feature (149)..(149): n is a, c, g, or t
  misc_feature (252)..(252): n is a, c, g, or t
  misc_feature (305)..(305): n is a, c, g, or t
  misc_feature (349)..(349): n is a, c, g, or t
  misc_feature (385)..(385): n is a, c, g, or t
  misc_feature (398)..(398): n is a, c, g, or t
  misc_feature (405)..(405): n is a, c, g, or t
  misc_feature (416)..(416): n is a, c, g, or t
  misc_feature (423)..(423): n is a, c, g, or t
gctgaatgcaaagagaaataacagagacatagtccctgtcctaaatagattttaatctactgtgaccattctgaaaatgtggtccaagattaatagcaacannnnnnnnnnnnnnnnnnnnnnnnnnnnnnnnnnnnnnnatgagcacncacactcggccattattttgtgtttgaataaaagtcttcagtgctttttaaatgtgtacataagcctggaatttcggtttagggggacaggaagtaaccagantgggggcacagttcagggttgtttatttggcattttttcgccctttttggaantagctttcaccacttttcattaggatcttgtaggttccctggantcacaggaagggttttgttaatcctttttttatggnggcctctttcccnttaatgnaatttcccccngtggccncggggggggtccagttc

SEQ ID NO: 305660 - DNA, 406 bp, Homo Sapiens
ttctgaggttccctttgtttatttactttcacctgtctgttttggtctttgtctttcactttagatactttcctcaaatatctggtgatctttgatgtcctttcttattcaaagtgaggtctccaaagctggatagaagaatcttgcatatatgtatggggtttgtgggatggggtggggcatcactgcagggtgtgttacaaaggggcctgggactctcccatgccagcatctgactgggatttcccctcttgggatccagtttgccccagagctgcatccctccagtttcctgcagggggaggcaccaaatctgatgggccagtattttcaggagggggcatcaagggtgttcagggagagtgactctcgtgcaaggctaggcctcacatttctcctcaactgt

SEQ ID NO: 305661 - DNA, 209 bp, Homo Sapiens
actctgcggctccagtccttggaggtgtgtccttcgcccacattggggtcgtttgtctgtcttcctgcacttttcccggctgtgaactggattgatggggccagtctcctcctcccctgtcctgggggtcattctccacattccttccagcccacctgtcctttccgtaggccctctttgggacctttacaaccacagatgggtaggca

SEQ ID NO: 305662 - DNA, 376 bp, Homo Sapiens
  misc_feature (92)..(92): n is a, c, g, or t
  misc_feature (99)..(99): n is a, c, g, or t
  misc_feature (136)..(136): n is a, c, g, or t
  misc_feature (145)..(145): n is a, c, g, or t
  misc_feature (170)..(170): n is a, c, g, or t
  misc_feature (209)..(209): n is a, c, g, or t
  misc_feature (319)..(319): n is a, c, g, or t
  misc_feature (345)..(345): n is a, c, g, or t
  misc_feature (364)..(364): n is a, c, g, or t
ctccttcactttcagtaaagaccttacttcacagagataatagaaatcattaagtaagaaatccctcaactattatactccctagctaaatnatttatntctggatctattgtatcgctttcttttcagtctcagngaaagaggnattgcagcctgcactgttccaaagntaatccttccatttaaattcttgggtcctttcccagggngtataccctgagcctgccatcaattatcccctctctttcctcaattttcaggcttctcccactctgctggactttttcccaaacctgtggggatggtggctcaaggtctntttccatctgtaaaagggaaaatccngggggcagggggagcgggngtgggcctcatg

SEQ ID NO: 305663 - DNA, 355 bp, Homo Sapiens
  misc_feature (263)..(263): n is a, c, g, or t
  misc_feature (273)..(273): n is a, c, g, or t
  misc_feature (325)..(325): n is a, c, g, or t
  misc_feature (341)..(341): n is a, c, g, or t
caatactgcatgtaaaacactgggtatgcggtggacagcattcgttcatttgctgacaacttttatcaggctaaactgtcatatccactatttcaatatgtcaattactcttataaattgcactaggacagaaagattgtatttcttctctggggactaaatagtgtttaaaataaccaaatcactaggaaatgggatttgtcccgtctgggctggcctgaactctaagagggagtaaggccaattcaaaacagaaaagaccnccaatcaaanggcaaccccggggcccggaccatgggtggggttccccacctggtattccccnggccattcggggggtnggggtggggtccct

SEQ ID NO: 305664 - DNA, 328 bp, Homo Sapiens
  misc_feature (215)..(215): n is a, c, g, or t
  misc_feature (249)..(249): n is a, c, g, or t
  misc_feature (306)..(306): n is a, c, g, or t
cttctctgaaataaggaagtactaagaacaaagtaccatgaaccttactgagaagacacattctcactacagtagcatgtacaatttaggaagaaggggactgaaacattccaaagtgtgcagagatggtgggccatcccaatgatggactgtgacaatcttacattccatatgatgactgacaacttcctgagaccttggctccaccatcagtntttctaggaccccataaataggccatatcaaagngctattatctaccctgaatactctaggtgccccttttctattttgggcaggggtctncccctcaaggaggaagctgtgg

SEQ ID NO: 305665 - DNA, 332 bp, Homo Sapiens
  misc_feature (199)..(199): n is a, c, g, or t
  misc_feature (254)..(254): n is a, c, g, or t
  misc_feature (256)..(256): n is a, c, g, or t
  misc_feature (313)..(313): n is a, c, g, or t
taatgtccgtaagttaatgcctagatttaatttagattttcatcacatagccactactcagaaaggctcagcttgtccatgatttcaacatttccttccatgaaggtctaaagagcaactcttaatacttaagcacagacagatcatacataaccaaaaaagaaggtcaagagtgcactcaataagctcttccgtcagngtcttccgatttgacagctcgtcaagttgacaagctgacacccgaggctttcagngntccatctgggaatgttggatggatatctggtgccctttttcaaggcccaggaacttntagggccacttggccaggc

SEQ ID NO: 305666 - DNA, 420 bp, Homo Sapiens
  misc_feature (52)..(52): n is a, c, g, or t
  misc_feature (288)..(288): n is a, c, g, or t
  misc_feature (342)..(342): n is a, c, g, or t
  misc_feature (398)..(398): n is a, c, g, or t
  misc_feature (410)..(410): n is a, c, g, or t
ggagtttattgaaaatctgactgtggacccttgaagttactgcttacaggancagctgactttggagagaaagccattatcagaatcaagcagcaaattactggccccagagttcctagcttgctacaatatcagctgtctaaaccaaaacaaagcattttgttgaagcggggaaaaaaaggcagatcaaagagtagctcatccacgtgtcagttagattagcatttgaaattccttgtgaatgtatccacatgtttatgacaggcatggtgttcagctttagcagcnattatgggggagttacgaaattctctgtgtaaaaatagcgaggtcatgaggganacccctcttgctgtgtaaggccctgacagccatgcccaacaccgtcacgctggggnctggccttcggntggcacgggg

SEQ ID NO: 305667 - DNA, 268 bp, Homo Sapiens
  misc_feature (240)..(240): n is a, c, g, or t
  misc_feature (247)..(247): n is a, c, g, or t
ctttattcatgtccacaggaaccatatacaaaagtttgtcaaaaagcaatacaaattaaatatttggaaagatatcacaatcagatttcttagttaagtattcagattccaaaactgtgttaatgataaaagtatatgaaaacatttgagagcaatgtctggctttgggttcagctaaaaattatccataggcagtctcttatttattttcataaacaaagaacatattctatctttctnaccaagntccaccaaccataatttggaa

SEQ ID NO: 305668 - DNA, 297 bp, Homo Sapiens
  misc_feature (40)..(40): n is a, c, g, or t
  misc_feature (281)..(281): n is a, c, g, or t
acactaatgtttattattgagtgcataacacgccaggcanttgtgcaaagtgtttcagcattgagtttaagtctcctggagcacagaccgacagtatccattctcttcccttcccttaccaagcgaacccctgaattctagctgaatatcttggctatacagtctcccctcaagctgaactgtagctgtggggaatcagttctgggccacaggaattaacggaaggaaggtgtgtacaatttttgaggctatgctctttaggaaggagtgtgggagggggngtctttcttccccttc

SEQ ID NO: 305669 - DNA, 128 bp, Homo Sapiens
caccagcaggctcccatgctctctgtgtcctttcacggaaaataatatttcccttggagggtgtgtaggttttaaattgggtgatcgtaaaagcatcggcgcatagagtgtagttcagtacatgttaa

SEQ ID NO: 305670 - DNA, 439 bp, Homo Sapiens
  misc_feature (160)..(160): n is a, c, g, or t
  misc_feature (166)..(166): n is a, c, g, or t
  misc_feature (336)..(336): n is a, c, g, or t
  misc_feature (362)..(362): n is a, c, g, or t
  misc_feature (404)..(404): n is a, c, g, or t
  misc_feature (422)..(422): n is a, c, g, or t
ttcctgtgcaggcttgtcacagtttggcttcatttggaggctggcaccagacccccgggctctgcgttgtatgtcttttgacctcaaatgagggggagagacgtggtgtttcccacagatagtgagtagtgagccacctggaatacttgttctgtgggangttaanggtcgtttcatgaaaaggattttgtggtcatgtaagtttagcaaatgccaaagcaagccgagtgaaaggtgttgttatcatctctcctaagccgcttttcttttgcttgacctgcttgaggggagtcttgcaagagggcggggggagggaaatgcccctttcctggaggnttgccttgcaccccagcacccttttncatggggaacaccttccccaagggccagtattacggaagggntggaggcttttggggatnttggttttttgggccaa

SEQ ID NO: 305671 - DNA, 124 bp, Homo Sapiens
  misc_feature (55)..(67): n is a, c, g, or t
ataaaaggcatatataggaatgaatatttttttcattgctttgtttatactaacnnnnnnnnnnnnntcccaaatttctataataaacaggataattgataaactgtggtatatttaaactctg

SEQ ID NO: 305672 - DNA, 152 bp, Homo Sapiens
  misc_feature (24)..(24): n is a, c, g, or t
  misc_feature (40)..(40): n is a, c, g, or t
  misc_feature (107)..(107): n is a, c, g, or t
  misc_feature (114)..(114): n is a, c, g, or t
  misc_feature (126)..(126): n is a, c, g, or t
tgaaaaggaaagcatgaccttctncccagagagtattatnaggttagcatagaagcccatttagaaattcattaatgtctatatcaaagatgtctttactgaagaantttggtnatgttgtacaantccacttgcacttatcaagctttgcc

SEQ ID NO: 305673 - DNA, 280 bp, Homo Sapiens
  misc_feature (203)..(203): n is a, c, g, or t
  misc_feature (217)..(217): n is a, c, g, or t
  misc_feature (234)..(234): n is a, c, g, or t
  misc_feature (244)..(244): n is a, c, g, or t
  misc_feature (251)..(251): n is a, c, g, or t
  misc_feature (258)..(258): n is a, c, g, or t
gtacccagctgagctgtgttatctaatatgactttcaggattcctagtaaggagtgtcacactttgcatgggtatcttgctgagtttgtgcataccagtcgagatgaatctaaaaatactgaggtatatactctttctctttgcttgggtacagccatgcaagcaggaaggattcaaaatacatcattgaaggaataggactnatttatgccatccncaaggggattatcctgncctaggggtnaggaagnccccagnaaggtccttccttttttaaagg

SEQ ID NO: 305674 - DNA, 214 bp, Homo Sapiens
  misc_feature (108)..(108): n is a, c, g, or t
aatgcaatatttaaatattactgaatccactgaattggattatcttagcagtttcctgactttagttttgctctccccaaatccattttccacatcacagcctaaggnaaactttctggaaacggccaatacggatggacatcgctggccctctacttaaaaaaggggggttcactacttattaatacattcaggggaggaggttcctatcctt

SEQ ID NO: 305675 - DNA, 408 bp, Homo Sapiens
  misc_feature (269)..(269): n is a, c, g, or t
  misc_feature (288)..(288): n is a, c, g, or t
  misc_feature (378)..(378): n is a, c, g, or t
  misc_feature (384)..(384): n is a, c, g, or t
aagcttattggtcctgtttagaatgtataaaaggttctgcatttagagatttaccatcaggtacaaatatggaatccattcattttcctgaagcttagtttacgtgccacagctgaatgtatatgtatatttgtttcaacttgatttctcttaaccttacaaatcaattcaactcaaaaggtacagaataattcagatgggtgacttttctgaccccatgagtgacaacaacggctactgatagctcttgccttccctatttccagagngcccttttcattttagggngtgaggcagggcctaatcccattagggggactcctaggggaaatgtggggcccagtcatcaggtcggtggtattttggaatgagggatanggggtntggggccagggagaggaggaggcc

SEQ ID NO: 305676 - DNA, 293 bp, Homo Sapiens
  misc_feature (109)..(109): n is a, c, g, or t
  misc_feature (122)..(123): n is a, c, g, or t
  misc_feature (182)..(182): n is a, c, g, or t
  misc_feature (199)..(199): n is a, c, g, or t
  misc_feature (218)..(218): n is a, c, g, or t
ggccaagagattcccccacctcagcccccgagtagctgggaccacagccatgcactgccactcccggttaatctttgtatattttgtagagacggggttttgtcatggngcccagggttggnnttgaactcccgggcccaagcaatccacccgcctcagccacccaaagtactggggatcanaggcgtgaggtcaccanacctgggggccttgcttantttcgtaattcccaagagggcagggttaccaaattggggggaaattaaccataacatcattgtgatgggggcaag

SEQ ID NO: 305677 - DNA, 357 bp, Homo Sapiens
  misc_feature (308)..(308): n is a, c, g, or t
  misc_feature (338)..(338): n is a, c, g, or t
ctgataatgatatcctacattaacacatttgaaattcaactaaattatgcttttgaacagttaatgagtaccccagtgatcaatatttcatattttcaacttttttcatttacaaattctttgattgagtactatatgctaatcacctttcataaaacagtccattgctctgagtgtacggctcatgtttaaatatgtatgcagaagagaaatccatttgataaaaaggatatgtcctggaattaatgcgggtgggttttaaaatataggcccgtaaccctgctttagggcagggttaggacataggnggttgcctttcaaagggggaggctgtgctngggagggacacagggcagg

SEQ ID NO: 305678 - DNA, 279 bp, Homo Sapiens
ctctgaggtgcaggcattcactaggacttcacccgtggtatgttactgaaactccggggagccaactgctggagcatttatgagacacactatgccaccatccggggcttcagcagcgtttggtgaaaacctgcctgtggggttgctgttgaatttgctggagagctgactgaggtgctagcagaactcctcaggaaatcaccagggaggagcatccctggggtgccccatgcaccagttcaagagcagggagcaagagggaaaggaaggtagcctctt

SEQ ID NO: 305679 - DNA, 270 bp, Homo Sapiens
  misc_feature (28)..(29): n is a, c, g, or t
  misc_feature (108)..(108): n is a, c, g, or t
  misc_feature (118)..(118): n is a, c, g, or t
  misc_feature (149)..(149): n is a, c, g, or t
tggaatggagcgtttaagctgagcgttnnttcaggtcagcaggcaaagcaaacctcccacaaactgggtgccgtaagtgggaggtgacacatggagagcttcgtcctngccgagcagnacccagccccatgtcccccgccagcattctngatgtcagaggagggtgcgtgtgatggcgtcacattcatctgaagcacactgattgattttccacaaggtggcaagtttgatcaaatttgaccgtttttcatgagacaaccagatgctgtt

SEQ ID NO: 305680 - DNA, 267 bp, Homo Sapiens
  misc_feature (170)..(170): n is a, c, g, or t
  misc_feature (245)..(245): n is a, c, g, or t
  misc_feature (256)..(256): n is a, c, g, or t
tgagccaccttacccagcctacctaaaacctttcagtctcttttctaaactccagaaaagagaagactctgaaaagctgaaatctgtggggggctgtaggaaggttctagggattgatgtgggtatttgacatttgtataggaaaaaattgccaatttcttttttttccntatgggtaattctgggatacccagtttaaataaattttggggaggatattttaaaactgtccaatatggaggggntaatttccatnacctgtgtaac

SEQ ID NO: 305681 - DNA, 413 bp, Homo Sapiens
  misc_feature (185)..(185): n is a, c, g, or t
  misc_feature (240)..(240): n is a, c, g, or t
  misc_feature (242)..(242): n is a, c, g, or t
  misc_feature (273)..(273): n is a, c, g, or t
  misc_feature (298)..(298): n is a, c, g, or t
  misc_feature (376)..(376): n is a, c, g, or t
aggtgtgtccacatttacatagtctttctagctacttcaatctctcttgccacttctgccttcaaataagcttcaattttttaaaaaagacttttgactttactttcaactactgccctttgcctcatattgtgttttcaatacaattccagggaaatattagggatgattgttttttacttctnaatcacctatatctactttcactccttcattaaggtctgtttttttcctaagggncntcattaattatttcaaacaaatctaaagggntgttgggggttttttccccttaggnctttattattcttggatcctatcttttggcaaagggaccaagggctaatggtcccattttatttaggtagcctccttnctctctctccctgggtatttaatacccccaggggatt

SEQ ID NO: 305682 - DNA, 416 bp, Homo Sapiens
  misc_feature (37)..(37): n is a, c, g, or t
  misc_feature (49)..(50): n is a, c, g, or t
  misc_feature (60)..(60): n is a, c, g, or t
  misc_feature (80)..(80): n is a, c, g, or t
  misc_feature (82)..(82): n is a, c, g, or t
  misc_feature (137)..(206): n is a, c, g, or t
  misc_feature (348)..(348): n is a, c, g, or t
gagagccaggatggtctctatctcctgaccttgtganccgccggcctcnngtcccaaagngctgggattataggcgtgcncncacgcccggcctacattctgtaattttatataattttctaatgtagtatatttannnnnnnnnnnnnnnnnnnnnnnnnnnnnnnnnnnnnnnnnnnnnnnnnnnnnnnnnnnnnnnnnnnnnntgttaatgaatctcatgtacctaggaacaatgcctgggagtacaggtaattgctcgataaaggactactggaatgactggaatccccattttaggaacagaggggaaactgaggtttgggaaaggatggaacggaaccaatntttccctatggcaggcacagcctaatagggttccagagcccggggtttcagggccacccatctggttt

SEQ ID NO: 305683 - DNA, 420 bp, Homo Sapiens
  misc_feature (310)..(310): n is a, c, g, or t
aatactcattaacttctgcgccaagttcatgacacatgcagcttttgagtgttgactcatccacatccttggtgagctgactagtgaacgagtggcagtgtcttcccatagcagcgtgttcgtgtgattgggtataggtcagaaattttcagaacgttttagtgaagagtgaatggggcagcattttcaaaaagaaactttctgaggggtcactctattttcatatggttagggaaactgcttgaattggtatccggttctttgctgatttattgcctgagcatttgtgtttatttcttgatattacggnttcatggggcaaccatatttttacttttaggaattttcccccccatccatggcagggcatttctaggcctttgaggaggccgtaggtgtttccatatttccaggagtgtt

SEQ ID NO: 305684 - DNA, 289 bp, Homo Sapiens
  misc_feature (105)..(105): n is a, c, g, or t
  misc_feature (154)..(154): n is a, c, g, or t
  misc_feature (170)..(179): n is a, c, g, or t
  misc_feature (212)..(212): n is a, c, g, or t
  misc_feature (232)..(232): n is a, c, g, or t
  misc_feature (237)..(237): n is a, c, g, or t
  misc_feature (242)..(242): n is a, c, g, or t
  misc_feature (270)..(270): n is a, c, g, or t
cagccaaaatttcttaactacatataaattatcttaatgatctagggtattttgttagggggaatacatacagtcagggatagggataagagggggaagttaatngagtgggtttacttaaatatattaaggacaaacattttcaagttaaaanttttcagggaggaaannnnnnnnnnagggtttcctaaggaattatattttgtgggggngtgggggattttttcctgtncaggnggacngttagggggccaagtttggagggtagcntaatacctggggggggttt

SEQ ID NO: 305685 - DNA, 430 bp, Homo Sapiens
  misc_feature (289)..(329): n is a, c, g, or t
  misc_feature (384)..(384): n is a, c, g, or t
ttggctgtgtcatttcctgctgagggaccaggcactgaatttcctacctcttagggtcattacctatgaggttaaagctacctcatgggattgttatacgccactaatgttgaggcagacacctcttggcagggtgactgctcatcttagaccctccccttttctgcgaatttgggccccttgatcctctgatgggagctgaaaggatgagaggtgggcatctagatttaggggaggctgttcaggctttgcaggtcccttacctgaacacataggaaaccctgggagnnnnnnnnnnnnnnnnnnnnnnnnnnnnnnnnnnnnnnnnntgcggggggatggggcaccttgcatggaatgtgggtaggagaaaatgggctctgntcagaggggaagatacggcatagccaagggcaggggacccagagga

SEQ ID NO: 305686 - DNA, 437 bp, Homo Sapiens
  misc_feature (30)..(30): n is a, c, g, or t
  misc_feature (179)..(179): n is a, c, g, or t
  misc_feature (188)..(188): n is a, c, g, or t
ggaaagataacggccttttagtccgacagngagcccgtatttcatggtttgggtctccaacaacatctttccttgctctttcacaactctccccctttttagaaaacttccagtcacgctttaataagaagagaaagggcctgtatcgcaaggctatcacagaggcagctaaggctcanagcagctgnacccccgaagtgcgggctttgttgacacagtttgaaacgtgaacatggggcagtaaggtagggcaagaccattgggaagttcaccacagatttttcttagtcttagtttagggaataattttcttaccaaaattaggcgtgggcccagatttgggaggaggaggagtttgcacttcagtttggctgggctttttttaattactttaccctttattaggcccatttttttaggacttgaggagcttttaa

SEQ ID NO: 305687 - DNA, 332 bp, Homo Sapiens
  misc_feature (132)..(192): n is a, c, g, or t
  misc_feature (270)..(270): n is a, c, g, or t
  misc_feature (291)..(291): n is a, c, g, or t
  misc_feature (306)..(306): n is a, c, g, or t
aagtaactgcctttagttagtgtccacctgttttcctgagtgatttgcaaagacaggacttttatgccaaaacctctgttttagaaaaaagtagaggacaatattttttaactttgaggtatagaagcaagnnnnnnnnnnnnnnnnnnnnnnnnnnnnnnnnnnnnnnnnnnnnnnnnnnnnnnnnnnnnntaaatttctatatgacagtggggcagcattaaacaaagttaaaataatgacagactagggaaggtaggatttacaacnttttacacccaaataaggggnttatcccggattacnttaaccattttccctttaggttaaaa

SEQ ID NO: 305688 - DNA, 407 bp, Homo Sapiens
  misc_feature (326)..(326): n is a, c, g, or t
  misc_feature (357)..(357): n is a, c, g, or t
  misc_feature (362)..(362): n is a, c, g, or t
  misc_feature (373)..(373): n is a, c, g, or t
  misc_feature (396)..(396): n is a, c, g, or t
gctacaaaataagattgaattatgagttgcagctctgatcctaacagacaaacaaaataaggctgaaaatacgtactagaaagaatttgaattccttccgtggtggactagggcaaagatggtgtgaattccagtaacccaggctcacgtcaggatggggtgacagaagtcagctgggatgggatcaaattgttacccagaaggtctgggaaaccaacgaggtccctgggtgttagttgaagggagaatggggctggcattcagatgttcagaagttgggaacccagaggcttggaacttgagggtaacccattaagcagtctttnggtagggtaaattaagtaggagattttccanggganttaacctcttngaattaccacaggttttcccttnaaagccccttt

SEQ ID NO: 305689 - DNA, 382 bp, Homo Sapiens
  misc_feature (285)..(311): n is a, c, g, or t
  misc_feature (320)..(320): n is a, c, g, or t
  misc_feature (336)..(336): n is a, c, g, or t
  misc_feature (348)..(348): n is a, c, g, or t
  misc_feature (354)..(354): n is a, c, g, or t
  misc_feature (370)..(370): n is a, c, g, or t
ttgcttcctcaccctatttgtgatatgaaaataaacaaatcatttgcttccaactaaaggtagtggacagaactcacctgtttttatctctactccctgaggaagtcccatcaaaatgaaagtaaggaaattgaaaaaggcatgaaccagtggtttttaaccttgggctgaatttttgaaataggcagcagaggatttttaaaaatcctagtgtccagcctgtaggcccaggataaattggaatcaggaacctctggcagatgaggactcagggcattcaaggannnnnnnnnnnnnnnnnnnnnnnnnnnccaaagggnaattaggggggaccancccttaccaccntagggnattccattggcctttngggggactttgg

SEQ ID NO: 305690 - DNA, 101 bp, Homo Sapiens
  misc_feature (81)..(81): n is a, c, g, or t
ctgggaatggggtatcttacggacagtccaaacacgggtagggtcagatccatttcttttccccacccagtttttttacanaggaaggggggattggggga

SEQ ID NO: 305691 - DNA, 107 bp, Homo Sapiens
gtggttaagacttggagaaatctagagatgactttggcacatatgaaatttcccttcagataagaatgttttttaaagtattgaaagaatgatggctgctggggcca

SEQ ID NO: 305692 - DNA, 144 bp, Homo Sapiens
ataagaactgtaatctatttccccaacttcattattaagtgagttttaggcctaggtcttccagaacagtttcctccaaaacatacagtgtaatatctggttactctttatgtgtgcataagaaatgtcactgtgacaaatgtt

SEQ ID NO: 305693 - DNA, 356 bp, Homo Sapiens
  misc_feature (96)..(185): n is a, c, g, or t
  misc_feature (301)..(301): n is a, c, g, or t
caccacacttggcccttttctcatttctaaagtgggttgtcttttattgttgagttttaagagcttttgtttgtttttgccatcctgtgccactcnnnnnnnnnnnnnnnnnnnnnnnnnnnnnnnnnnnnnnnnnnnnnnnnnnnnnnnnnnnnnnnnnnnnnnnnnnnnnnnnnnnnnnnnnnagtgagccactacgcccgcctaatttttgtatttttagagagataggagtttcaccgtgttgggccagggctgggtctcaaactcctgacctcagggtgatcccgcctgcctcggnctcccaaagagctgggggatatagggcatgagccaccatgcccggctgagtttta

SEQ ID NO: 305694 - DNA, 296 bp, Homo Sapiens
  misc_feature (186)..(186): n is a, c, g, or t
  misc_feature (213)..(213): n is a, c, g, or t
  misc_feature (280)..(280): n is a, c, g, or t
ccttttaaaatcatattaagaaacatgtgcccaaagatataatagttttacacgaatagcctaatacttgagctttgctgaagaaaacggtattcacaaaactcaaaattttattaaaatttagaagttaacttgcattataactttaaaatggcaggctactcaaatacgtatttcaatacaccngaatcttatattttaaggtaattaccnatgtaaaatttcttataaaacatggtatctgggcataaatcccggaactgccatatccatcttatcnaattactttattatac

SEQ ID NO: 305695 - DNA, 409 bp, Homo Sapiens
  misc_feature (152)..(152): n is a, c, g, or t
  misc_feature (229)..(229): n is a, c, g, or t
  misc_feature (296)..(296): n is a, c, g, or t
  misc_feature (323)..(323): n is a, c, g, or t
  misc_feature (376)..(376): n is a, c, g, or t
agagcattacacaattacattttctcattttctgacctgcaaacagataccttaaacggaaattattttgttttaattatcaaattaggtacatccaaaatgcaacaattacacatatgacaattaattcacaaagtataattttactgggncatatcctaagaatttaggaacagccagtcaggagaaatctgaccaaatttagcaatcactatttacaaatccaaantcaaacctatctaaactcccaaaccaggaaggcttggaaaggtattttatttaaatccccactgggncggaaggacaggtggatggacttaacnccctatcccggtctttggacaggttttttaatccccaaaccctggggggcttnttttcccccaggtctggttaactgggagtttgg

SEQ ID NO: 305696 - DNA, 405 bp, Homo Sapiens
  misc_feature (65)..(65): n is a, c, g, or t
  misc_feature (158)..(184): n is a, c, g, or t
  misc_feature (253)..(253): n is a, c, g, or t
  misc_feature (267)..(267): n is a, c, g, or t
  misc_feature (295)..(295): n is a, c, g, or t
  misc_feature (346)..(346): n is a, c, g, or t
  misc_feature (392)..(392): n is a, c, g, or t
gctcaagcaatcctcctgcttcagcctcgtgtgtagctgggaccaggggcatgccaccacctggntaatttttaaaaatttttttgaagagatggggtctcactttgttgcccaggctgctgctgaactcctgctgaagcaatcttctggcctcaagnnnnnnnnnnnnnnnnnnnnnnnnnnngtatgagcctcgggtgccagccaaaagactccttttgataatcaaggggggaaagttttatccctacantgctccctattccngttactcctgggggttcccaaggaaatntaggctttaaaccctaaggggaggacacccaaaatgcttgcttttgggggnaaaataaggcaggtaccccaaggctttcaaaaattaccaggttttntcaaattcagggc

SEQ ID NO: 305697 - DNA, 224 bp, Homo Sapiens
  misc_feature (73)..(73): n is a, c, g, or t
  misc_feature (91)..(91): n is a, c, g, or t
  misc_feature (106)..(106): n is a, c, g, or t
  misc_feature (118)..(118): n is a, c, g, or t
  misc_feature (120)..(120): n is a, c, g, or t
  misc_feature (135)..(135): n is a, c, g, or t
  misc_feature (143)..(143): n is a, c, g, or t
  misc_feature (147)..(147): n is a, c, g, or t
  misc_feature (150)..(150): n is a, c, g, or t
  misc_feature (165)..(165): n is a, c, g, or t
  misc_feature (167)..(167): n is a, c, g, or t
  misc_feature (176)..(177): n is a, c, g, or t
  misc_feature (183)..(183): n is a, c, g, or t
ggcacgaggattaatttaccaaacacattgaaataattaaaaagaatcaagaagcagaaattctggagttgangaaatgcaattgacatgnggaggattcccatangattttttaacnanattttttcaacaggngggaggantttntgngccttttaaaaaggntntttttaaanncacagngtcagaggagacaaaagtgaaaaggatttaaaaaggagggg

SEQ ID NO: 305698 - DNA, 119 bp, Homo Sapiens
aacagggtctcaatctgtcacccaagcttgcacgcaatggcacaattatggctcactgcagcctcacaatcccaggctcaactaatcctgcccctcagtctctcaagtagctgggacca

SEQ ID NO: 305699 - DNA, 374 bp, Homo Sapiens
  misc_feature (331)..(331): n is a, c, g, or t
  misc_feature (340)..(340): n is a, c, g, or t
tggagaattgactaaatttcctggggaaaaaattcagactaggaaaaacttgttgaataccagctttagggacagtaaccctttctagttcatgttgaggctaattcagtagattagctcctctcctttggatgaggatttccctccccagggtttggttagaattccaggggatgcaggcatggggtcgtttgggggcatgtcctagtgtgctgtttttatagactatatatatgtgtccatcagtcaacttatagtatgggaaagttttcttctatttcaaattggggcgatttggcccactttctttgcccaaattcttgggttttcntgaatactngaaggttgggagtttgagccaacttgcagggtca

SEQ ID NO: 305700 - DNA, 337 bp, Homo Sapiens
  misc_feature (298)..(298): n is a, c, g, or t
agagattctggccacatataatggcacatgccttggtctcattggtgtgccattcccacagatcagcgaaatactgcctgctacacccctgaacatttccactctgccattgctggcgaacccccactctcagagagcaggtggatttctgacatccagggaaaagctgtgacccagtgcagcgttgagtctcaggctcctggggtctctggggactggaagagaccagaagccttaacaattaccctagggaaaggagaatacaatccagggttcatcttgctgggagcttgcacgnctttcttccccccctttcccttgcagggggccttcccca

SEQ ID NO: 305701 - DNA, 287 bp, Homo Sapiens
  misc_feature (61)..(61): n is a, c, g, or t
  misc_feature (189)..(189): n is a, c, g, or t
  misc_feature (203)..(203): n is a, c, g, or t
  misc_feature (269)..(269): n is a, c, g, or t
aggaaaagagtcgttaaaatcaataacaataccaacaaagcaaacctttacacagattganaaaaaatggccagcagtaaccaaacaaggaaatatatcacatacctagacaactagcagccaataaaggataattctagcataggagattctgtctccactctttagataacagcactgaccagaganggagattttatganccctaagaactcttgctaccaccttgattttatgggggagacagagtgagcaggtgagttcagcanttgccagaggaaggttcc

SEQ ID NO: 305702 - DNA, 204 bp, Homo Sapiens
  misc_feature (116)..(116): n is a, c, g, or t
  misc_feature (180)..(180): n is a, c, g, or t
  misc_feature (192)..(192): n is a, c, g, or t
gctataattgctgcttctcactatagaggtgcaaagagggcagtggtcattgttgttgtgcctgccaccattactgcaagcccctcctcctcctctggatgaagtgatttccaggngtacttaaaggaccagtccccctttttccctttgggagcccagacattcagtactcatacattncaaaagcaactncttatacaggga

SEQ ID NO: 305703 - DNA, 286 bp, Homo Sapiens
  misc_feature (188)..(188): n is a, c, g, or t
  misc_feature (226)..(226): n is a, c, g, or t
agccaccacgcccatctgggatgccttgtcttttatacctttactccacaaatatgtgcttaggcattgcttgctgtggccagaaccttgcaggggtgagagacacaggtaaatgagagctggtcccagccctccctcagaaagctgctgggaccacaggggtgacaaaactgaagctgtcttgtcanatccggggagcagggtgcttattgaggggataaggcangcccagaggaaggccccctaacttgatcttttgggccattcaaaggaggggaccccaggg

SEQ ID NO: 305704 - DNA, 327 bp, Homo Sapiens
  misc_feature (124)..(124): n is a, c, g, or t
  misc_feature (196)..(196): n is a, c, g, or t
  misc_feature (209)..(209): n is a, c, g, or t
  misc_feature (217)..(217): n is a, c, g, or t
  misc_feature (242)..(242): n is a, c, g, or t
  misc_feature (245)..(245): n is a, c, g, or t
tgagctgaagtgattctcccacctcagcctcccgtgtagctgggaccataggtgcattgccacacccagctaattttcaaaaaattatttgtagtgaagtcttattttgttgcccaaactggtntccaactcccgggctcaagcaatcctcctaccctggcctctcaaagtactgagattacaagcgtgagcaccnacacccggccagntttgccanttttataggctcacaggcaagttanttntccaagcctgttttccctccctggggaaaatgaaaaatgtgagcattaggattgtttgggatgcagggctttattctattgg

SEQ ID NO: 305705 - DNA, 400 bp, Homo Sapiens
  misc_feature (261)..(261): n is a, c, g, or t
  misc_feature (275)..(350): n is a, c, g, or t
  misc_feature (367)..(367): n is a, c, g, or t
gtggtaccaatttatctcctttcttaatatatttctcataaaaggagcatagtaattttaattgaaccaaaataatcccaactctttgcaaggaatcattgtcagagaggaaattgatcttctatctgctttatgttctaaaaccttctgggcttctacagatgctcacttcatctctttttaaataaagggcagactatttgagatgtttttacagtgagaaatgagaaaagttaagcgctacgagtgagaaaccagggngtctaagttctctnnnnnnnnnnnnnnnnnnnnnnnnnnnnnnnnnnnnnnnnnnnnnnnnnnnnnnnnnnnnnnnnnnnnnnnnnnnnactatttggaattgggntgacatttacccattctttccggggctctctat

SEQ ID NO: 305706 - DNA, 311 bp, Homo Sapiens
  misc_feature (265)..(265): n is a, c, g, or t
  misc_feature (286)..(286): n is a, c, g, or t
  misc_feature (295)..(295): n is a, c, g, or t
tccaatgtatgagctcccctagcttgaactgtcaacccatagttctattactagcaaaaatatccttcagtaatgaagtgatgaaataaagacatcctcagatgaaggaaaactaataggagttgtttttagtaagcttgcactaaaagaattgctaaaggaaattcaccatatagtaggggaaatgataccaaaagggaaacttgggaggcattagggaattaaagggaagggccaacaggaaatgggccaaattacccaaggnttaaggtattaatatttcttncttccctanttttaggtttcttttt

SEQ ID NO: 305707 - DNA, 373 bp, Homo Sapiens
  misc_feature (332)..(332): n is a, c, g, or t
  misc_feature (356)..(356): n is a, c, g, or t
caatggacactgcctcgctggatcacaagtgcagcagatccacccctgccagatccagagggttggaagtcagctgcgggtctgcaatgacggcaaacagtggtggacggcgagtgaaagctcagctcgagccataaaaaacacagaccagaagagtgtgcagttgcaagatttaatagagtgaaaacagagctcccataaaatgggaggggacacaaagggggttgccctttcattctgttttttcattaaggactgttactaattttacactcccaccaacagtggaattaagggtttccatttttttgcacgttcctttggccaacacnttttatctttctgttgtttttttngatagttagttcttttt

SEQ ID NO: 305708 - DNA, 384 bp, Homo Sapiens
  misc_feature (354)..(354): n is a, c, g, or t
atagactcactggactcagaagaactgctgttctcttggttgcagcttattaaagtgagagagaacattacaatgaacaaaggaaaaagcacatgggataagcttgcaggagttctttcccagtagagttgtgtggatgcgcttaattctccctgcaactatgtgtgacgtggcgagttggcagccagagaatctcacttgagccttgtttagggtttttattggggagtcagtcaggtattgtgtaactgaccttaactatgtatactccatcccgcataggagtaaaaaatggcatttaacacaaatcacatagtttagccttaaactcttcttattcaagctgggtgcccntgttgacccccagggttcttagggaccttg

SEQ ID NO: 305709 - DNA, 439 bp, Homo Sapiens
  misc_feature (393)..(393): n is a, c, g, or t
  misc_feature (417)..(417): n is a, c, g, or t
  misc_feature (429)..(429): n is a, c, g, or t
aaatcccttccttgcccacctctatgtcagcaggactgaccacatcactcccgcgagttcccaccaccagcatttcctccaacctttttccatcacaaccagttagaaccctacaggcaacaaggccttctagaatccgcttaacccttggctgataacaggcaaatttcagtctgctacactttgttaggtccagaaggagctgcccatactactttcttatgaggcatgctcagtatgggcatatgggacatgtaatgtcacatctttgtgggagtgtggattttctttttttacatatttgtatggcagtagaggggcctgttgtaggaaaacggttccctgttatcttggctggtactgtttaaaaggaaaggctggaatttcccaccntttggcccaaccaaaggcggtggnaaaatgtttccntgggaacctt

SEQ ID NO: 305710 - DNA, 360 bp, Homo Sapiens
  misc_feature (305)..(305): n is a, c, g, or t
  misc_feature (350)..(350): n is a, c, g, or t
gacattttccatctagattaaagacctagattaagggattgtttgagtctattttataacagattgtcactgtctttcttactaggcacttcttcacttgaaagcctaggctgtggtctttctccttcaccagacagttaaacactgtagtgttggtcacatttttctaaaactatgttgtttatccacattcaattcctcttcttaagatctctctttaaaaattttgggctatattcatgggaaatttaaatttctgtttggggatgggactttgttccccctttattactgtcaccattccnattatttctctttgggcctcccatggctgggacacttattacttnctattaaatc

SEQ ID NO: 305711 - DNA, 225 bp, Homo Sapiens
gttcggcacagagcaaagtgtcttattaagttaactcaaaaactggttgctttaggagattatgggactcagtatcataggggattgagtcagaagacacaagttgtggagttggacctgaggccctagcatagagttctttaggacagtaactccatgaagagaaaaatctccacttatatgaggaagtttgtctctacctggggctcttctctgaaaaaaccc

SEQ ID NO: 305712 - DNA, 154 bp, Homo Sapiens
tttcggcacagaaattagttcattaaaatgtttataactattcctgacacagagctaagagctttatgagtgttagattttatcattactatattttcccatgattttaagtcatattttaaacgttagtctaatgaaaaggcagtgttgattt

SEQ ID NO: 305713 - DNA, 387 bp, Homo Sapiens
  misc_feature (117)..(130): n is a, c, g, or t
  misc_feature (135)..(190): n is a, c, g, or t
  misc_feature (281)..(281): n is a, c, g, or t
  misc_feature (328)..(328): n is a, c, g, or t
  misc_feature (345)..(345): n is a, c, g, or t
  misc_feature (367)..(367): n is a, c, g, or t
cgcgtatctataaaaacacaaatacccaagaaatgtaaaacaacaataggttgtttctggatttttctctacattttctttgtgagaaacatactgtgttgtggcacccttgctgcnnnnnnnnnnnnnnctttnnnnnnnnnnnnnnnnnnnnnnnnnnnnnnnnnnnnnnnnnnnnnnnnnnnnnnnntaaagtaaaattgtaaaccattatatattaacataagtaaaccatttagtgggacctgttttcaatgacggaaacaatgaggaaaggtggntttgttttcacaaatctgtttgggctttaactggacagcttctgggnttttcctttccgaattncaaacttaggtgttctccgttncggctttctgaaattgctct

SEQ ID NO: 305714 - DNA, 436 bp, Homo Sapiens
  misc_feature (312)..(312): n is a, c, g, or t
  misc_feature (383)..(383): n is a, c, g, or t
  misc_feature (389)..(389): n is a, c, g, or t
  misc_feature (408)..(408): n is a, c, g, or t
  misc_feature (415)..(415): n is a, c, g, or t
gaggcaagggtcccccattttacacagaagagaaacagattcacagttgcctaagatcacatagctggccaggaacagaacgtggttcaaacacaggcctctctctagccagagcccaatgctctgtttaccatgcaactgaaacggcttgagtctccatccaaaatcattgagggctttaacgttgtagggagcctgttaaaggtttccattcttacctgccccactccctgggtgcccagttttattaagggcagtgaacggtgatggtcatttttgctctcgctttgaaattcaagtgagcttggctgnagggcctgggcttattcccaggaccttttaggaggcagggaagttgccttgcacccctttgggcttacctnaagganggaaagtggggtttccctnttaggtnttggggttgggggttttcaca

SEQ ID NO: 305715 - DNA, 442 bp, Homo Sapiens
  misc_feature (375)..(375): n is a, c, g, or t
  misc_feature (383)..(383): n is a, c, g, or t
  misc_feature (388)..(388): n is a, c, g, or t
  misc_feature (403)..(403): n is a, c, g, or t
  misc_feature (420)..(420): n is a, c, g, or t
aattcttactaatcagaatgtctcttgttgtagacaaagatgcatcacctagaaaccagagaagactgacatcaaatttatcaaagaatctattgacaagttaaatagagagttccatatttataacaaagaaaattgtattagaatatcaacattaacttagttgccagaaaacaaaatatgctccctctaattaaataactcctatttgaatcagagggtgtgtgaggggctttacttagggatatacatataagggacactgggacccttttccccatttttggaaaaaaggaacacaggaagggaggtgtatagggacaggaggcccttaaccaaagggcatcttggaaccaaaccattttcacttttaantagggggnaaatnttacctttggccctncccattaccctggtggnttcctaaggggcaggggggcag

SEQ ID NO: 305716 - DNA, 288 bp, Homo Sapiens
  misc_feature (21)..(21): n is a, c, g, or t
  misc_feature (42)..(42): n is a, c, g, or t
  misc_feature (62)..(62): n is a, c, g, or t
  misc_feature (68)..(68): n is a, c, g, or t
  misc_feature (99)..(99): n is a, c, g, or t
  misc_feature (127)..(127): n is a, c, g, or t
gtatttccttttttctttcancctctcttgctgtctgccatngtgatcagatgattttcttnagtggngtgctataattgctcactatttttcttttgngtactactatagctctttgcttaatggntaccatgagactgacataaacatgagagttacaagaggcttcataaagttgacttcaatttaactttgcattaaaaaaactctacacatttttcctatttcctccaccctttttattttaggatgtggccaactttaccatcttttggatattatatatat

SEQ ID NO: 305717 - DNA, 382 bp, Homo Sapiens
  misc_feature (257)..(257): n is a, c, g, or t
tgtcatctggtatccctccagactgcctgggcctccacgagtcttagatgcctgaccctgcaggccaacatgaagggagccaccacttcaaggtcccatccaactgctgctaggaagccaggcctgagaggggctctttagtgttgttctgttttaagacctcaggctataggatctgataaaaattatcttcagactagtggtgtcataaaaaccccttttcccctgaagggacccagcaatttgaaagtgccttncaaagcatgttctcctgggattcttcagagcctttcctgaggcagacgagcatctgctcccaagtcagacagggagggaaactttgtctctgggggactcggcccataatagggccttagaaacc

SEQ ID NO: 305718 - DNA, 153 bp, Homo Sapiens
  misc_feature (41)..(41): n is a, c, g, or t
  misc_feature (48)..(48): n is a, c, g, or t
tcagcaggaaaaccagccaaggacagacacgtcctctaggnggcactntgacccagagaacaaactcggacaaagttaactggttgccgcagctcaaagttgtcctgggctcttgctgtgccaggggtctagttgataattaggaccccggca

SEQ ID NO: 305719 - DNA, 389 bp, Homo Sapiens
  misc_feature (14)..(14): n is a, c, g, or t
  misc_feature (29)..(29): n is a, c, g, or t
  misc_feature (52)..(52): n is a, c, g, or t
  misc_feature (65)..(65): n is a, c, g, or t
  misc_feature (137)..(137): n is a, c, g, or t
  misc_feature (147)..(147): n is a, c, g, or t
  misc_feature (165)..(165): n is a, c, g, or t
  misc_feature (175)..(175): n is a, c, g, or t
  misc_feature (188)..(188): n is a, c, g, or t
  misc_feature (193)..(193): n is a, c, g, or t
  misc_feature (214)..(239): n is a, c, g, or t
  misc_feature (261)..(261): n is a, c, g, or t
  misc_feature (279)..(279): n is a, c, g, or t
  misc_feature (301)..(301): n is a, c, g, or t
  misc_feature (331)..(331): n is a, c, g, or t
ttcatttatccagncagtattcaaacttncagttgtttcataaatgtcttanttcacagtttatntgcctcagggtccagataaggtccatgaataggaattagtatatctctgatatctgttctaatctgtatgtnccttcttttngttttacggccatttagntattgaaganctaaagttgtttntcttntttctgtatggttttctgggnnnnnnnnnnnnnnnnnnnnnnnnnnagtcaggatctcactctcgccngggactaggagtgcagtnggcaaagctgcactgcaggccntggaactcctggggcttaaggcggatcccnctccgaggtaggctggggtgctataggggcacttcacccacccatggccctaggggct

SEQ ID NO: 305720 - DNA, 363 bp, Homo Sapiens
  misc_feature (56)..(56): n is a, c, g, or t
  misc_feature (310)..(310): n is a, c, g, or t
  misc_feature (341)..(341): n is a, c, g, or t
  misc_feature (348)..(348): n is a, c, g, or t
gaactatagggttctgcagaataaatatgtggttaccaaatactaggctttgctantgaatgtctcatatagtctttccttcccttgtttctcttctctttttaaagttaaaggtgaattaaaatgaattttgtttggggaaattttaaggtggcctttgatattactggaaatgttttagtataatatcaaattaggaattggggaatcactaatacgaattttaagtttgttggaaaattatattacatgcagatgttttttgagggactttggataaatggaaaggaaaaaagtggattttacaggnaagttttatatatttttggaaataattcccnctttttntaaaaatagggtgtt

SEQ ID NO: 305721 - DNA, 218 bp, Homo Sapiens
  misc_feature (136)..(137): n is a, c, g, or t
gcttcaataccctgtcctaaattaaagctattcagtaaactgagacaaagtatttgaaatgaaaagtaatcttttagacactcaaatgtctaattaaggcttgcacctcccattcccccgagtctcccttccctcnnctaccctctatcttgccctgagaatgacaggaaggtggtgggagatttccttctaaaaataaatttcatcaataaactgtt

SEQ ID NO: 305722 - DNA, 277 bp, Homo Sapiens
  misc_feature (262)..(262): n is a, c, g, or t
atgagccactatgccgggccaaggcttttaagagtacagatcttgtctcatttgtttctatatacaatgtctcacacaaaatgtttcgtacacaagttgctaaacacacatttattgaatgaagaagcaataattaccaaattaacttcacaatgtaaactcgtgttacattaaaggaacattagggggcaagtacaagggcagttaaaggccaagggggtatttggttttctttaattcaaatattttttaaaggaagtcngggcattggggtttc

SEQ ID NO: 305723 - DNA, 321 bp, Homo Sapiens
  misc_feature (206)..(206): n is a, c, g, or t
  misc_feature (209)..(209): n is a, c, g, or t
ttatcattttgttaattagccaagcttctgctgttgactccagataaagagagttaaagcacttggggtgaccacctaagtagattttttcatggtgaacaaatggaagcaacagaagcagctcagacttttgaaaagtgatgaaaaaggcccatgatgccctgctccttgaaaatgaagaagaggatgacttagccctgcaggtnctntttctttgcatgttcttaccaaccctcaggggagattcagtctactaggctgggcttccccacgtgggacctcacttctgtgggccaagtaactggggagtaattttacctt

SEQ ID NO: 305724 - DNA, 252 bp, Homo Sapiens
  misc_feature (194)..(194): n is a, c, g, or t
  misc_feature (237)..(237): n is a, c, g, or t
gcctacagaaatgagatgcttgtttcctctagttgctaagactctatcttgtttttcttgctctctttacaaactcaagttcctttaaagattcttcacgttgatataaggagcctgcttcctcattgccatttgggtgcagagttcttcctgtcagcccactcatcatgctcatcataccttggctgccgggnctctctatggctggatggactcgagggaaaacacggctcctcnggggttggcaaggag

SEQ ID NO: 305725 - DNA, 290 bp, Homo Sapiens
  misc_feature (61)..(61): n is a, c, g, or t
  misc_feature (170)..(170): n is a, c, g, or t
  misc_feature (260)..(260): n is a, c, g, or t
gctggctcagggaggcctctttggagatggagcccagtcccatctctcttgctgtggacancccttgaacactgcctcaaacaagtgggaggtcagcttctggctgggggtgctgtgtgtcaagctctgaagagcagtcaggtcctctcttcctcttggggactttgtcntgccacagtggggacagacaccatggaggctcaccagcatctgcaggccagatggcttccaacaagcccaggctgtgggacatgagcttnggggagcgccttccggaagaggccctgtct

SEQ ID NO: 305726 - DNA, 386 bp, Homo Sapiens
  misc_feature (135)..(135): n is a, c, g, or t
  misc_feature (206)..(250): n is a, c, g, or t
  misc_feature (253)..(253): n is a, c, g, or t
  misc_feature (333)..(333): n is a, c, g, or t
acatctgtcgcccagatcacggcttgatgcagcctcgaccacctgggcaacttcaacctcccaggctcaagcaatcctcccacttctcatcctcttgagtaggtgggaccacaggaatgcaccaccacacctggntaatttttatattttttgtagagacagggttttgccatattgccgaggatggtcttaaactcctgggactnnnnnnnnnnnnnnnnnnnnnnnnnnnnnnnnnnnnnnnnnnnnngtntgggccaccacaattcagccctgacttcttcttcaacaatgaaactaaaatgggggattttttcaagtaggaaggcagtntcatccctcaggtaggaagccctgcacttacaggcaattgacttagcgttagg

SEQ ID NO: 305727 - DNA, 188 bp, Homo Sapiens
tgtataattactatcattaggaagcattaggaagagaacatccaaatttggcatcacaaaattatatgcaccatctcattctaaaactctgtcgagatgagaatttaatttaggataaaaggtggtatctctgatttgtggaggatagattaatcaataaatgctggctaaatcaggtatctatctag

SEQ ID NO: 305728 - DNA, 410 bp, Homo Sapiens
  misc_feature (49)..(132): n is a, c, g, or t
  misc_feature (164)..(348): n is a, c, g, or t
cacaatgaaatgtgcagagatttgtatatgtaaaactaaaataggttannnnnnnnnnnnnnnnnnnnnnnnnnnnnnnnnnnnnnnnnnnnnnnnnnnnnnnnnnnnnnnnnnnnnnnnnnnnnnnnnnnntgcagagagttatgatcttgccacctcacacnnnnnnnnnnnnnnnnnnnnnnnnnnnnnnnnnnnnnnnnnnnnnnnnnnnnnnnnnnnnnnnnnnnnnnnnnnnnnnnnnnnnnnnnnnnnnnnnnnnnnnnnnnnnnnnnnnnnnnnnnnnnnnnnnnnnnnnnnnnnnnnnnnnnnnnnnnnnnnnnnnnnnnnnnnnnnnnnnnnnnnnnncatctttttccagtaatatatatattaatactgtatatccctgaaagccccaattaatcccg

SEQ ID NO: 305729 - DNA, 151 bp, Homo Sapiens
  misc_feature (54)..(54): n is a, c, g, or t
  misc_feature (63)..(63): n is a, c, g, or t
  misc_feature (89)..(89): n is a, c, g, or t
  misc_feature (100)..(100): n is a, c, g, or t
  misc_feature (120)..(120): n is a, c, g, or t
tcaagacctgaattaggatggaaatgcagatgaaagagttaaatgagaaacatntgaaacaantaggacagacttggtgatagagcatnaggccaaaggntagacagtaaaagttgattnccaagaggccttaaagattggaggtttaggg

SEQ ID NO: 305730 - DNA, 128 bp, Homo Sapiens
  misc_feature (112)..(112): n is a, c, g, or t
gaccaggtgcccggccttgggggttgttttcttaaggaggcccagagagggatgtctgacgtgggctcaggggtcacataggtacagaaggataaggatgctctgccttctnccaaggactagggggc

SEQ ID NO: 305731 - DNA, 255 bp, Homo Sapiens
  misc_feature (236)..(236): n is a, c, g, or t
tgagccaccaaacccagccccttgttagtttcttaagcccagcccacgcctttggaaatagtctgttttatttcttgagatagggtcttgttctgttgcccaggctggagcgcacagtggtaggatcacagctcagtgcagccttgacctcctgggctcaagcaatcctcccacctcagcctcctaagtagctgggtaccacaggcatgtgccaccccacctgggctaattttttnatttttatagagcagggat

SEQ ID NO: 305732 - DNA, 302 bp, Homo Sapiens
  misc_feature (36)..(36): n is a, c, g, or t
  misc_feature (57)..(57): n is a, c, g, or t
  misc_feature (65)..(97): n is a, c, g, or t
  misc_feature (117)..(117): n is a, c, g, or t
  misc_feature (221)..(222): n is a, c, g, or t
aagagatgggggtcttactatgttggctaagctggnctcaaactccttgcctcaggnaatccttnnnnnnnnnnnnnnnnnnnnnnnnnnnnnnnnngcatgagcaccatgcccganttccctttgtgtaaaatgagataatatgtatgtcacagaattgttttaaggatgataaagggactaaggtgaggataatgagggtgaaggtttaggtatgatgnngggggtcataggttaggtgctggaattatggataggtaatcaatatctacttcctaacctctttcttcaaggattttagg

SEQ ID NO: 305733 - DNA, 262 bp, Homo Sapiens
  misc_feature (171)..(171): n is a, c, g, or t
cctttatcattgagttctaagagttctttatatattctggttacaagtccctttatatgatatatgatttgcaaatattttctcccattgttttagggtcatcttttgttggacagtgtcctttggatggcacagttttaaatttttatggaggtccccatttattttttncttttgtcacttgtacccttgtgttatttcctaataattcatggccaatccagggtcaggaggattacccccaggtttcctacagggtggt

SEQ ID NO: 305734 - DNA, 373 bp, Homo Sapiens
  misc_feature (333)..(333): n is a, c, g, or t
  misc_feature (338)..(338): n is a, c, g, or t
  misc_feature (356)..(356): n is a, c, g, or t
caacattcagtagtttattcaacagtcaacaggaaacttacaaggccaaggtcaattaagtcatccataagagaaacaagtaactttaaacttcacacactagataggaaagcagtaacttttggggaaaaaacctcagtgctggacatcgtcaaaacaaggtgatgtgcagatccacagattgacaagttgtcttggggatcttaagctctcctctatcaaactcctgtaatcccacacccaaaacactagggatgcctctccctgatcattgtttcctaggtgctggaagccaaggactcctttattaggttggaccgctaatactgggcnggggncttggttcaggtctatcnggcttttaaattataaa

SEQ ID NO: 305735 - DNA, 167 bp, Homo Sapiens
aaaattagaaaaattcccataagtagattaaaaaatttgaaaaacggaaaacgagtagaattggaaggatggagaaaaatacagcttgaaacacacagagcagaagatacagaaagtacatctattgtttgattcattcattttatgcaatataataaaggcttttt

SEQ ID NO: 305736 - DNA, 246 bp, Homo Sapiens
  misc_feature (71)..(79): n is a, c, g, or t
  misc_feature (137)..(137): n is a, c, g, or t
ggctcaagcaatcctcccaccttctcccaagtagctgaggactacagagatgtgccaccatacctggctgnnnnnnnnnatccataaaattcattgttatgtgcccagccacaatcatttcaagtttttttcttccntcagcatgtaaacctaaatgccatgcagcataaccagttctctaaatttatctgcttaacagacaatttgattataatatatagggcaaggtatgattaattctatatg

SEQ ID NO: 305737 - DNA, 205 bp, Homo Sapiens
  misc_feature (115)..(115): n is a, c, g, or t
ttatcaattcctcaaaattcaagcatgccctcaaatatttttgcagcctcatatagctcttaatttggtttatattcatccagatggtaggatatgattcatgttccacctgggntttcttcagaaatacttaggacagtgtctatgggaaaaaaacattgaaccagatttagcttttagggtaaataatataatcacctgggga

SEQ ID NO: 305738 - DNA, 210 bp, Homo Sapiens
ctccttcccctacactattaaaggccaagtgctgaagttatttatctataggaactacagaaatttgggtaaaaattatgccctagtagtggtctccccatgagagggtgactggttgcccactgccttcacactgaatttacataataggaacaactgactttcagcttttcgagcttaggaaacttgttccttttctcttttaggcat

SEQ ID NO: 305739 - DNA, 351 bp, Homo Sapiens
ctaactcaaactttgtgtcctttgaccaacatttcctcatttctcccagcccctggtaaccactattctttctgcttttgtgtgttcaaattttttagattccacatgtaagtgagattatgtggtatttgtctttctgtgcctggcttattttactttgtcctctaagttcatccatgttgtttcaaatgacaggatttccttcttttttaaggctgaataggtccggctcagtgggcacatgcctgtaaatcctaggcactttggggagggcttagggtgggaagggattgcttggaggctcccacctcaagcaccccttgagggtgttgagcctgttgatgggcacta

SEQ ID NO: 305740 - DNA, 405 bp, Homo Sapiens
  misc_feature (325)..(325): n is a, c, g, or t
  misc_feature (338)..(338): n is a, c, g, or t
  misc_feature (361)..(361): n is a, c, g, or t
  misc_feature (384)..(384): n is a, c, g, or t
tgtcaggacacacagtgtgatttcttgcctggcattccgttccttgcttgtccattttcaagagcagaacattttcacgttgatggaagcccgatgtctttcttctacggtatgtgctctgcatccaaagcagccttcgcccatcccacattttagataattttttcttctaaaaacttcactgtttaagcgctcatgtttggatctgcaatctattttgggatgaattcttgtgtatgacgtgcagtagggaataaaggcttcatgtctttccatacgggataggccagttttatttcacaggacacaggtggttggccagacnggggaacacgggntgcagctggaccccggggaagcntgaagggggcagtggaaaccccntctggattaaggatgcttcaa

SEQ ID NO: 305741 - DNA, 410 bp, Homo Sapiens
  misc_feature (326)..(326): n is a, c, g, or t
  misc_feature (392)..(392): n is a, c, g, or t
aaatgggatgtagatatttgggggacagaagaaggattgaacaaccagtttatttctctgttgcctgttgccttgtagcttgtcgtcattgttacagccatatttgactctgtgtagaagacattgttgatgccctattgcaaatccacccttctttgcttccttgcccacagaaccatgaattgtttacatatttacccatcaggggaagaggactttatcaccacaaagggctatatcttaaatagtcttaggcaggtggggataatccctctttccttattccataagtgggagggagaggtgaaagtgttcacccaagtctnggccagtatgcaggggcagttttgcaggggggatgtcttgcaagaggtttcttcccttcaccaatnattttttgggggggttgc

SEQ ID NO: 305742 - DNA, 177 bp, Homo Sapiens
  misc_feature (47)..(47): n is a, c, g, or t
  misc_feature (155)..(155): n is a, c, g, or t
gcgcccggcctcattttttaaaaatatggtgtaatactgcaccaggngcggtggtatttaaccaaccgtgatgtcctagtggcttagctaatttctattcatcctgatgtaactcaggggtcacctactctaattctaacaatacctccgcatcntacggccagaatgaattcctta

SEQ ID NO: 305743 - DNA, 277 bp, Homo Sapiens
  misc_feature (237)..(237): n is a, c, g, or t
aaaacagtctccctctgttgtccaggctggagtgtagttgggactacaggtgcccgccaccacacctgggctattttttgtacttttggtggagatatggtttcaccatgctggccaggctagtcccaaactcctgacctcaaagtgatctgcccacctcagcctcctaaagtgttggggattacaggcattagccacttgcgcctgtcccactgtaagggtttttaattgggcctnaatttcaatattgctgtgtcccaagaaagaagggaggctt

SEQ ID NO: 305744 - DNA, 249 bp, Homo Sapiens
  misc_feature (67)..(121): n is a, c, g, or t
  misc_feature (156)..(156): n is a, c, g, or t
  misc_feature (172)..(172): n is a, c, g, or t
  misc_feature (200)..(200): n is a, c, g, or t
  misc_feature (228)..(228): n is a, c, g, or t
  misc_feature (233)..(233): n is a, c, g, or t
catcaggtttctgtgctgaaaagttatcaagaccagctctctgctgcatttgcattgttattaggannnnnnnnnnnnnnnnnnnnnnnnnnnnnnnnnnnnnnnnnnnnnnnnnnnnnnnttgagtttaatgtgaggctagtacagaaacagagngattaaacacaaaggnaatgtaaacagctctcacatgcaagggnaactagggttacggggatcccagcaccnggggnttcacccgtcaccctg

SEQ ID NO: 305745 - DNA, 442 bp, Homo Sapiens
  misc_feature (348)..(348): n is a, c, g, or t
  misc_feature (369)..(369): n is a, c, g, or t
  misc_feature (401)..(401): n is a, c, g, or t
  misc_feature (427)..(427): n is a, c, g, or t
aataattaaagaagaaaaaattcccaaatgttgcctatttaatggtttatttaaagacaaggtcgaattcagccttaaaaccttgattatctaacaatggttccaatacagtttagcagatgagccctcttttcaagccaaatctcccctaaattcttacaaaatacagaaaaagcaaagttctgtttgtagttgaggagggaacatagggaccacggtctgggcttatctccctccatacctgttaactggcatttcacagggggccttttaggcactttccaacaactcagtagggggaaggggattttgggttgcccccaggacctttccatttagggggcaggntccggctttttaccaaggccntcttcactttggattactgggttttggggggntgggggtgccgttggggaccacggcntgttattccccggca

SEQ ID NO: 305746 - DNA, 343 bp, Homo Sapiens
  misc_feature (100)..(161): n is a, c, g, or t
  misc_feature (328)..(328): n is a, c, g, or t
gcgtacactggcatcaagctacactccaaatctgtgcattattttcagattcatttgttccctcggcaggtaatccatattaagatgttttctagtctcnnnnnnnnnnnnnnnnnnnnnnnnnnnnnnnnnnnnnnnnnnnnnnnnnnnnnnnnnnnnnnggttgtgcacatgggtattctgaatacctaggatttgctcaaagctaaaattcaaaaataaaatactttaaaatgaagcccttgtcagtctcttgccaaaacagttgtctctaaaattcaagtctttctagggcttcagactaaaaaacaaaacaggtacttgtccntaggtccatttaaat

SEQ ID NO: 305747 - DNA, 217 bp, Homo Sapiens
  misc_feature (181)..(181): n is a, c, g, or t
ttgtttggatggcaggtaatcattcacctgtaaacaagcagggtgtaattttggaggtaccactagtctttagttctattccagctgtagggagggctggatagggtcagaagtaatgggattctttgctgctttcctctactacaggctgtttgggtcttctttggaagatgaagctttngctcttaaatccttattcctggggcaggatagctcc

SEQ ID NO: 305748 - DNA, 244 bp, Homo Sapiens
  misc_feature (23)..(23): n is a, c, g, or t
  misc_feature (30)..(30): n is a, c, g, or t
  misc_feature (180)..(180): n is a, c, g, or t
  misc_feature (212)..(212): n is a, c, g, or t
atatggatagtctcttctaaatngagaaanagggattttccctcctgatactgagaagctataaatattttcatttacctttactcccacctttttaattttagaatgaaaacagcccctctcatccctcccaaaattagtttttcccagtgcccatgatttctcttgggtggggaaggnctaaggtgagtctttaacttttcatcctggantcaagttcactgccagtgatggaccccggtat

SEQ ID NO: 305749 - DNA, 210 bp, Homo Sapiens
  misc_feature (187)..(187): n is a, c, g, or t
tgacagccacgcccagccccttcctagctttctgatggtcatgtttttagtctgtctccttagatctgcccactaagttgttttataaaatctgaaccttaacagataaatccactgcataagtttactgtatccctcctggcctccacaggtctgagtttctgagaccccctaaaccactgactgnagcatgtcctccatttcacagga

SEQ ID NO: 305750 - DNA, 252 bp, Homo Sapiens
acatggctaactggaaaaataaataaaggtaccatagaggaaaaacaaaattgccctgtgggaggaacatgtggtgtcatatggtgtgactaaataggatccagtaagataagacaaggtagagcatcttgggagtgattccatgtttcaaggttaaaatgttaactacattaaaggtagtaaaccagtgaaagaatcctcaagatccccagtgcagaatgtttgcccaggggataggaggtccactgtttt

SEQ ID NO: 305751 - DNA, 316 bp, Homo Sapiens
  misc_feature (295)..(295): n is a, c, g, or t
tagagatgaggtctcgctatactgcccggtctggtcttgaactcctgcactcaagtgaccctcccaaagcgctgggatttgcagcaggccaccacgcctggcccagcttcacttttgaaggatgatgctggggattcttccacaatacaggccttctagctcagtttggctaagcgagtaatcgagtttgtttctatcagactctgctaaaacacagtagggcagcaggaggggaagaaggtaaccctcacccaagccctggggacaactgagccagccacgcagagatcacggnatccccagaacaagcaggggc

SEQ ID NO: 305752 - DNA, 134 bp, Homo Sapiens
ctaagctggaaggcatggggaagatcacagctcactgcgctcttgatctcctgagctcaagtgatcctcccaccacagcccttccaagtagctgggactacagatacacatcaccacgcccagctaattttttt

SEQ ID NO: 305753 - DNA, 318 bp, Homo Sapiens
  misc_feature (30)..(30): n is a, c, g, or t
  misc_feature (246)..(246): n is a, c, g, or t
  misc_feature (278)..(278): n is a, c, g, or t
  misc_feature (293)..(293): n is a, c, g, or t
attcggcacagaacaaagttgtatataganataacttcgtcagaatcgacacaaatcacatcgaatagttgactgtttaattccttctacattcaaatatctaattaaaatactgtgtgctttgttggaagcatctgctcaaacttttgacttttgtaaatatgcatgcagctgggaagggattcatctaaggggtaaggaaatgaaaaagacactctaaggacctgagggaattcaaataggggncttcggttttttaaaaaggaatgacgtggganatggtctgttttccntgttaaaatccttatctcgtagggg

SEQ ID NO: 305754 - DNA, 352 bp, Homo Sapiens
  misc_feature (53)..(61): n is a, c, g, or t
  misc_feature (175)..(175): n is a, c, g, or t
  misc_feature (317)..(317): n is a, c, g, or t
  misc_feature (330)..(330): n is a, c, g, or t
  misc_feature (339)..(339): n is a, c, g, or t
gctgtggagggtgaaggaaaggtcactttgaaagtgtctgcagctgcattcannnnnnnnnagagccactttaaatcagtatgttactaaaccagaattctgagcctgattggttttaaaaattcaaatctcgtatcacctttattgcttatctacaaaaaactgggcatcaggnaaaatgaggatctagccctaggtctgctgctcactagatctgaaggccctgggttaaagcttcccttcttcagcagggccccatgtattcatctaaaatttgaactgggatgggattattcccatctggtatgattctgggntcaagcttgctcngtgccggantggggaaggtggg

SEQ ID NO: 305755 - DNA, 166 bp, Homo Sapiens
  misc_feature (55)..(55): n is a, c, g, or t
  misc_feature (102)..(102): n is a, c, g, or t
  misc_feature (117)..(117): n is a, c, g, or t
aagagtggggattttccttactcactgtggggatcccaagcatccaggaacaatntcagggcacacggcaggccctagatatatgtttaaaggaacggaaantcatccatccccgantccataagttggggggcataaacacggggggtttctcaagttgccctca

SEQ ID NO: 305756 - DNA, 121 bp, Homo Sapiens
tcacgtcttactgtactgactaggaccaacacagactgaatggaactggtaactcaccgcccttatcttattctgtttcttgagctgcttgcttggtggttatgtagttgtttattctcta

SEQ ID NO: 305757 - DNA, 408 bp, Homo Sapiens
ttacatcagctgatgaaatcacaaggtctgataagctgtctccttaaagactccacttttggttaagcaacaggtaggcgagtgcattaaaaatcatctgttttctcgctgtgtaacgcggcccactttggaaaacgcgtggaagtgcccattatgggacgcttaaatgtgagatgcgatcccaggggaaaggagaacctcccctcactttgtgaggccccaccttatctttacaacttataatttacatttttgggggctgggcgtgagacttactgggagggaaggggcgtaagtaggcatttacactggggaagggctttcatggacattaaggctacttgttttacaaaactgcagttgctgttaaactgctgctgggtaatcaatgggctcagagctacggga

SEQ ID NO: 305758 - DNA, 323 bp, Homo Sapiens
  misc_feature (142)..(142): n is a, c, g, or t
  misc_feature (178)..(178): n is a, c, g, or t
  misc_feature (194)..(194): n is a, c, g, or t
  misc_feature (217)..(217): n is a, c, g, or t
  misc_feature (223)..(223): n is a, c, g, or t
  misc_feature (257)..(257): n is a, c, g, or t
  misc_feature (276)..(276): n is a, c, g, or t
  misc_feature (305)..(305): n is a, c, g, or t
aagactattattaaaggaactgaatgtatcagtttagcctgacctagcagaagttgagaaagaattttatttttttgaccttggtcaggcaagtataattaagtcagcaggaaattcaaaattggcaacacttctatgagantaaatcaccttgtgaagggaaacagcactacatgantgtctacaggctatantttttaaaattagtcttatgggnattttncctgattcaccacagggggatgatatttatgggnttgggggtcttggggcccntgggccagggggccccttaggggcagccngagcccccggagccgggg

SEQ ID NO: 305759 - DNA, 267 bp, Homo Sapiens
  misc_feature (213)..(213): n is a, c, g, or t
gaaattggctagatgacagcttctaatgggcttccaatttagtctggtttgtactgtctcttttagagcaattttgcagctcttcagaggcttacaggataagaaagtgagaaagtcaactggggatcaaatctttgacaacatctatttcaggtcctgtgctccacaggggtgaagaggagtttccagactatcagctgatggggactgggngctgtctacccagggggaaggaaaagatttaccaagacacaacgctgctttcac

SEQ ID NO: 305760 - DNA, 283 bp, Homo Sapiens
  misc_feature (158)..(158): n is a, c, g, or t
  misc_feature (243)..(243): n is a, c, g, or t
  misc_feature (266)..(266): n is a, c, g, or t
caaccactttcacagccaccacacagaccgaaggatgagacaaagccaatttctactttctgcattctgctttcgggctaccatttctgttctttctttgagtttgtcttctgtcttctcttttgatgctaaagggaaggaagtgggactaggatccntttcctttctcttacacaggataggagctgtggtcatctgtggacacaggtgttcttccctggtttattcccattttcttggggntttatttacttagggtggggggnaacctggttacctaggg

SEQ ID NO: 305761 - DNA, 423 bp, Homo Sapiens
  misc_feature (316)..(316): n is a, c, g, or t
  misc_feature (348)..(348): n is a, c, g, or t
  misc_feature (378)..(378): n is a, c, g, or t
  misc_feature (386)..(386): n is a, c, g, or t
  misc_feature (393)..(393): n is a, c, g, or t
  misc_feature (401)..(401): n is a, c, g, or t
aatgaataaccagaccccattgtgcagcccgtggaaaaacaaccaactcaaacaacactgggactgttagaaatatgcttgtgattggcagcttggagagcctccaaaattagtttcctttggcttccctgctgctccctgttctccaagcctgggcttaatggggtttgagttttcttttaagtgctcactttaacccttaaactgccgggctgatggcctggggattctggggaagagctgccgctggacccacaaagccagtgaagcccattcccctttctttgtctcttcattttaggactgtaggctgttntaaaggggcgtgataataagagggagagggtngttttagcttcccctgggagaagggaggtntttgaganttgatcntgagggtntttaaaccccttttatctccct

SEQ ID NO: 305762 - DNA, 432 bp, Homo Sapiens
  misc_feature (333)..(333): n is a, c, g, or t
  misc_feature (417)..(417): n is a, c, g, or t
gaactcccaggaatatcagtaatagggaaaaggcaaagttcatgatgaaatcctttgctaacattcagtataaaagtattaataaattaatcaacaggtctacatagatatggcagttactgtattttcaaattatttaccacgcctaaaagtatctgtgtttcaactgtcattggttatatacttcctctatgaaattcactagtatgaggaagaaactagcaaagggacaaagagggaatgtcactgtgccaagagccagagtacttcccctccatcccgggggctgggtcacctcctgttctgtcaccagttgccctggggtatgtcccnggggtattcagtgcttttgcacccagtttaaggtgtatcccccatttctcttttctctcttggacggtgtcaggagtctttggntacataccctggctt

SEQ ID NO: 305763 - DNA, 314 bp, Homo Sapiens
  misc_feature (64)..(64): n is a, c, g, or t
  misc_feature (244)..(244): n is a, c, g, or t
  misc_feature (247)..(247): n is a, c, g, or t
  misc_feature (257)..(257): n is a, c, g, or t
atgagcactgcacctggctgagatgaaaggtcttactcacttttcctggctctttactcctggngtggcactatacaaagccatgacgtggaaactgagtcacatacctcctagttgggccactcaaaataactcagattgccatccacccatctttttgggaaacgtaagtttcacttaaatgttctatgtggggcacagaccagtacagaggggaaacaggttattaattaggggagagctnttnctcttggganccttctgggattttaatggccccgagaaatcaagtcaaaacaggcttccatgctgtt

SEQ ID NO: 305764 - DNA, 185 bp, Homo Sapiens
  misc_feature (22)..(22): n is a, c, g, or t
  misc_feature (124)..(124): n is a, c, g, or t
  misc_feature (139)..(139): n is a, c, g, or t
  misc_feature (155)..(155): n is a, c, g, or t
  misc_feature (161)..(161): n is a, c, g, or t
caaccctcatgatctcaatggntatgtttgccttcccattgaccaccaacagccatatctctctaacctcccctgacctcaatggccccatcactgatgccgtcatgactccagtgaccctcanttctctgatcttagngtctttgtctctgggntccccnggggatcccatgtccttgacccct

SEQ ID NO: 305765 - DNA, 435 bp, Homo Sapiens
  misc_feature (380)..(380): n is a, c, g, or t
  misc_feature (386)..(386): n is a, c, g, or t
  misc_feature (403)..(403): n is a, c, g, or t
  misc_feature (421)..(421): n is a, c, g, or t
ccaatttctgagctcagtgatacaacctgaagccttactttgtggcagaagcaacaagaccaacatctctgattttcagctctttggagcagcccccacctccttctaagggtggacttagccaggattccctaccagtccctcctccctactcttttttcccctattggccaatggtcccctactcagctaactgggcagttcttccctctgcggagttgggttggtccctgatactggtctttgcaccagggaatttcagattgtcttgggatgtcaatagttttcagtgccattaaagaaaacaagcttaaaagaatgggagtttgtgtttttcagtaaggcaaggattcctctttaaagctggggcatgggtaggntcacgnctgttaattcccaacanttttgggaggttgaggtnggccagaaggccct

SEQ ID NO: 305766 - DNA, 301 bp, Homo Sapiens
tgaaaatactgtgaggtttaacaatgaaggcaggtgactggtgaggagagttccagccactggattctccctcagtcccctgtgctgtggcccttggtgacccctagatttcagtgcccctgcctgacactggagtccctctataaagaagcccctttctagctagctagctgttccatcccgcacacccccacagaagccttttgctgccattagtaaggcacgcctctattttcttcacctgtgattgatcatggcatgattggagttttgtctatttaaagcaattgtttaagttact

SEQ ID NO: 305767 - DNA, 313 bp, Homo Sapiens
  misc_feature (185)..(185): n is a, c, g, or t
  misc_feature (220)..(220): n is a, c, g, or t
gaagggtctactgaaaataggttgctaacattgacaacaaagtattttaagtcattgcagtaaggaattactggaaattgagtagacaaagaaaattaatatgagttccattttgatggttacttagcaagttgaacttatgagagtctttgaaatagttgcagtatgagaattgttctattgancagcgaaacaacccaatcaggtaatagtttttccngagagtgacttgctataagggacagaagttaggagacttaggattctttccaaaataagggttttttttaattgcttgaggagggtttttggg

SEQ ID NO: 305768 - DNA, 141 bp, Homo Sapiens
  misc_feature (52)..(52): n is a, c, g, or t
  misc_feature (68)..(68): n is a, c, g, or t
  misc_feature (79)..(79): n is a, c, g, or t
  misc_feature (95)..(95): n is a, c, g, or t
  misc_feature (116)..(116): n is a, c, g, or t
  misc_feature (129)..(129): n is a, c, g, or t
tgacatttggcacccggcaagccacttgccttttttcacttgccaagaggcngattgacacaaaaggnagacgaaaggnaaaccctgatgagggnagatggccctgttggagtctntttgttcttagtngaatgcataggt

SEQ ID NO: 305769 - DNA, 396 bp, Homo Sapiens
  misc_feature (306)..(323): n is a, c, g, or t
  misc_feature (330)..(330): n is a, c, g, or t
  misc_feature (340)..(340): n is a, c, g, or t
  misc_feature (383)..(383): n is a, c, g, or t
tccagaagctgatagtgttgatcaacaaaatgagacaatttgtactataatccctggtttcagtagtttcttggttttgtctttctcatacctagactacctccttgtaactggaagtcacagacatgctatctaatgttccagcataatttttccttttggagtgaccctgagactagtgactgcagcccagactggctgaagtctgagcttggcccagtgtcaagatctgtcctaacattctcttgtattttcattttaggctagtacaggtaggcagtaacaaagggaattgtttcattaacnnnnnnnnnnnnnnnnnnagggggngtcttgtganattgccccgggtttcgagtgcatgggctcactggagggcttgnattcccggggttc

SEQ ID NO: 305770 - DNA, 264 bp, Homo Sapiens
  misc_feature (145)..(145): n is a, c, g, or t
  misc_feature (198)..(198): n is a, c, g, or t
gctcagtaaggtatttgatgggagggagcttctgcagttcattctgcacgtcagccatgggtggggtcctggctcttcagcctccaaggcccagcagcttccggggtgggcttgcagtttttctcatcgggaaataggaggaagngtaggcagtgcccgattctggccttcctttgcagggtcggttttagtggcatntagttgggggaaattacagggcaggttttgcagggggaacacagttttcaaagtgttaaagttcag

SEQ ID NO: 305771 - DNA, 254 bp, Homo Sapiens
  misc_feature (212)..(213): n is a, c, g, or t
  misc_feature (219)..(219): n is a, c, g, or t
  misc_feature (229)..(229): n is a, c, g, or t
  misc_feature (239)..(239): n is a, c, g, or t
agagccactgaacctgcctacctttattttctttacatgtctgtggatgctgtattacattttgttggtatagtccttctgtatcttactactgttttaaatttgcttgccttccactaccatcataacttctctgttgcgttagtgctaacaaaacatttttgaataatttacaacatctaatctgtctttttgaaatgttttaaattctnncatccncaaggcaatncacttacctnggggaggaatttggg

SEQ ID NO: 305772 - DNA, 139 bp, Homo Sapiens
  misc_feature (81)..(81): n is a, c, g, or t
tgcgacccgtgcccagcaacagaggattctagtgggggcccattttaacagaaggggcactgggaaatgaatgtgtccagnaggaaggtaacttggaaagccaaatttcagggatgagaggaagggactgctttagtct

SEQ ID NO: 305773 - DNA, 277 bp, Homo Sapiens
  misc_feature (37)..(37): n is a, c, g, or t
  misc_feature (43)..(43): n is a, c, g, or t
  misc_feature (46)..(46): n is a, c, g, or t
  misc_feature (51)..(51): n is a, c, g, or t
  misc_feature (74)..(74): n is a, c, g, or t
  misc_feature (77)..(77): n is a, c, g, or t
  misc_feature (117)..(117): n is a, c, g, or t
  misc_feature (144)..(144): n is a, c, g, or t
  misc_feature (153)..(153): n is a, c, g, or t
  misc_feature (190)..(190): n is a, c, g, or t
  misc_feature (206)..(206): n is a, c, g, or t
  misc_feature (252)..(252): n is a, c, g, or t
agctgtattgtttatttgctgatgtgagtattacggnactcanccntttgngcatgtaaggactcatttctccnggntgtgtaagcaagagtggaaatgctaggccatagggtagangcgtatttaacttgatgagaagctggncagtttccngccgtgggtgcaacaaagcacatttgcaccagcagcncctggggagctctctntctccgtatccccaccagcacttgggtactggcagaccttctcctntgagctattctgatagtggggcagt

SEQ ID NO: 305774 - DNA, 385 bp, Homo Sapiens
  misc_feature (41)..(41): n is a, c, g, or t
  misc_feature (51)..(51): n is a, c, g, or t
  misc_feature (60)..(60): n is a, c, g, or t
  misc_feature (68)..(68): n is a, c, g, or t
  misc_feature (73)..(73): n is a, c, g, or t
  misc_feature (78)..(78): n is a, c, g, or t
  misc_feature (91)..(91): n is a, c, g, or t
  misc_feature (101)..(101): n is a, c, g, or t
  misc_feature (105)..(105): n is a, c, g, or t
  misc_feature (142)..(142): n is a, c, g, or t
  misc_feature (148)..(148): n is a, c, g, or t
  misc_feature (153)..(153): n is a, c, g, or t
  misc_feature (273)..(273): n is a, c, g, or t
  misc_feature (296)..(296): n is a, c, g, or t
  misc_feature (303)..(303): n is a, c, g, or t
  misc_feature (310)..(311): n is a, c, g, or t
  misc_feature (328)..(328): n is a, c, g, or t
  misc_feature (334)..(334): n is a, c, g, or t
  misc_feature (339)..(339): n is a, c, g, or t
  misc_feature (351)..(351): n is a, c, g, or t
aattgcccacaattgaaacaatggcccaagaaatggggcanattctttccnactttcaanccagccanagccngagcnaaaagattagccntatgtaagtnaccnccaatgccatcgcaagccttaatacattcagctaacngaaccntcccngtcaggggtctaatagcagtttgacactgcattagcattattgtatgtaagaagctgtattaaaacatcccgagcaggaatgtttgctttcactttgtgcccattgttacccgggggccntccgaggtgctcaggctttcccngctgagncttcctnncaggcggccccgggggngtcccnctgangaaggcaacccnctttcacacactctagggggttcccctcacgggg

SEQ ID NO: 305775 - DNA, 356 bp, Homo Sapiens
  misc_feature (308)..(308): n is a, c, g, or t
  misc_feature (326)..(326): n is a, c, g, or t
tctgtagagatggagtttcaccacgttgtccaggctggtgcagaactcctgggctcaagtgatctacccgccttcacttcccaaagtactggaattacaggcatgagccaccatgcccagctgtggtctggcaatattgaactgactccagaaccagttgggaggataggaatcccagatatcccagtcccaagggattagcaggaggtggggggcagttctccaaagcagcccgtgtcctgtccagctaagggacagacactttgaccctgaaatcaggccagtttccctcagcagtctgggctganccctgggtccacaaggtnacccacatgaagcattggtcttgcactttt

SEQ ID NO: 305776 - DNA, 171 bp, Homo Sapiens
  misc_feature (12)..(12): n is a, c, g, or t
  misc_feature (58)..(58): n is a, c, g, or t
  misc_feature (99)..(99): n is a, c, g, or t
  misc_feature (115)..(115): n is a, c, g, or t
ttattaaaagancacactcagaggttgacttaaggaaatacatgtttgaaagtgtccngaaatatgtactaacttctgtacagtttcttaataggcccntctcttttttgaaccntcaaattctaaagcaataaacagatttaaagggatgtgtagttgattaaaaaatat

SEQ ID NO: 305777 - DNA, 173 bp, Homo Sapiens
  misc_feature (152)..(152): n is a, c, g, or t
  misc_feature (159)..(159): n is a, c, g, or t
tgcacccgcacccagcctatttctgcaaccttctaagcccaacagtccctctctctgttccagcttgtgactttgccctttgcccccttttccaatggggaaaaatgagtgacaagaaagcatggggggaagatgtgctaactacttgtgtncccgganatgtaagggtacat

SEQ ID NO: 305778 - DNA, 447 bp, Homo Sapiens
  misc_feature (291)..(291): n is a, c, g, or t
  misc_feature (402)..(402): n is a, c, g, or t
  misc_feature (411)..(411): n is a, c, g, or t
  misc_feature (420)..(420): n is a, c, g, or t
tagcttgcagcaggggaaaaatctgtgattgacctggctgagaccttcgccccatacgctgctgggcatcccgagagatccaagactctggggtccatccggggagtggctgtggagcagctaagaggggaagtgggcattagacatgtcctctctggaaagaaaaaggtgaacacccagggagaagagctagcagggagaaggaggagcgggccaatcacgaaggagaaagtccttagatgggagccttctcattccttcagaaaccacactggtttaaattcagtgggntctttaacttttgggcttgcatattcgggcattcaccacagggaagttttcaaaaatttcccagttgccttgagttccccaccacagggtttttttggttggcttcagatngaaccattncccattgcntttttaacatttgggagattaaggagg

SEQ ID NO: 305779 - DNA, 361 bp, Homo Sapiens
  misc_feature (325)..(325): n is a, c, g, or t
  misc_feature (341)..(341): n is a, c, g, or t
acatgaaaaacattttcagtacccccttgttcacctaccaacatcgggaaataaaaccttctatttatgtccattttctagaagcaatgccataccaacttgatcatgagaagcattttttcctctaattggagatgtattaatttaactgttttggtgactaagtcatacccctctcaacttgagtgacagtgtttttttaaagctaaaaccagagctgtcctcaggggctgtcgagggcgtgggtaacattttgcccctttggcaggaatgggcccgagggtgactgtggacttccaggatttcttgttacctacttttaaantttgtgtgtgtgttcnttcctcccgggggcaaatct

SEQ ID NO: 305780 - DNA, 349 bp, Homo Sapiens
  misc_feature (38)..(38): n is a, c, g, or t
gtggaagaacagagactttgcctgagattgcgttctantttataaaccctccatttacactgaaccaatttgattagagatgatgctgttttgtgcgtccggttggagggcaggaactcccaaaactttgtcatccagcagttggatctgcaacttggtattgcgctctaaatacaagtcagggagcccaggaagagacagtaacactgactgagctgggctcttccctgttatctgggacagatgcttaggtaagcctggaggatacttattgttgggaccacctacttgatggctgctttgggcaaaatgcaggattaggccaccattttacccaaacaccaccttc

SEQ ID NO: 305781 - DNA, 279 bp, Homo Sapiens
  misc_feature (178)..(188): n is a, c, g, or t
acatgcaaaaaatcattaaaatagcagtttgacacaatgtatttgacaatttcattttttcgtctctaagttatttcagaagtgaattcctgctttgaacactgaaaatgcaactctgaaagattcccaaaaccctgggatccagtcccaaacaaatcaggaaacaggctgttgggcnnnnnnnnnnnccttgtttccttgttttctcaattgccaatttgttttattatttgaggggaggagggagacaaagtcccaaaaataaaggccctgcttgtt

SEQ ID NO: 305782 - DNA, 346 bp, Homo Sapiens
  misc_feature (48)..(170): n is a, c, g, or t
  misc_feature (178)..(262): n is a, c, g, or t
  misc_feature (319)..(319): n is a, c, g, or t
atcagtagttgccaagaggtagaggtgggagaggagttggttgtagtnnnnnnnnnnnnnnnnnnnnnnnnnnnnnnnnnnnnnnnnnnnnnnnnnnnnnnnnnnnnnnnnnnnnnnnnnnnnnnnnnnnnnnnnnnnnnnnnnnnnnnnnnnnnnnnnnnnnnnnnnnnaattacannnnnnnnnnnnnnnnnnnnnnnnnnnnnnnnnnnnnnnnnnnnnnnnnnnnnnnnnnnnnnnnnnnnnnnnnnnnnnnnnnnnngcaccaggccttcatcccattacattctaaagattgtgtccaaaatggagttattgnttctttgtggaggtgatggggaccctt

SEQ ID NO: 305783 - DNA, 353 bp, Homo Sapiens
  misc_feature (326)..(326): n is a, c, g, or t
  misc_feature (332)..(332): n is a, c, g, or t
gagaatatattcttctttcatctgcctttttgttctttctgtgccctcagctgattggatgatgcccacccacattgagagcaggtattcctcactcagtccactgactcaaatgcctgtctctcctgggaaacatccccacagacatgcccagaaataatgctttaccacatgtctatgtattcctcaatccagtcaaattgacacaaagttaactatcatgggtggggcacagtggacttcacccctgttaatcccaggcatttgggggagggtgagggtggggtgggatccgctgggagcttcaagagctttgaggaccagcngggggnaacatggggccgaaacaaccg

SEQ ID NO: 305784 - DNA, 329 bp, Homo Sapiens
  misc_feature (291)..(291): n is a, c, g, or t
  misc_feature (297)..(297): n is a, c, g, or t
  misc_feature (304)..(304): n is a, c, g, or t
gttctggagcctggatcctctggacagacaggtggccagctaaccagggtggaggcaccaaagataactgtggggtggggagaagacaccagcccaagagatttgactggggattggtctacgcaagaatggaaaatggaggcagaatgagttagcagcaagcacacgtacacttgctatagaatcttgagggacccggccagttgctggccaattaggaaatagaatgttgagccacagacataattttaaacttttctttgttagttcacttaaaaacatgggtaattntttganattgganggtttgctcgtgcaaataaatgaac

SEQ ID NO: 305785 - DNA, 364 bp, Homo Sapiens
  misc_feature (35)..(35): n is a, c, g, or t
  misc_feature (302)..(302): n is a, c, g, or t
  misc_feature (312)..(312): n is a, c, g, or t
  misc_feature (332)..(332): n is a, c, g, or t
aggtccaaaatgaccaagggagcaggcagtgcagngaggagaggactcaaactcagatgggcaaggcaccagtgccacatctgggcccacctggccttcagtggctccagctctttaagcaacagcatgtggctgagatttgagacaggcagatgatacagtgtgggacctctcgtcactgcccaacgatgttacctcaggagaagcactgactctctgggctttggttctgttacctccttacccatgggccaagaggcattagcgggtttcagtgggtatttttggaaaacagcacaagnttaagctttnccccatttttgcccattttncagttcagggattgacccaaggttgcggaacc

SEQ ID NO: 305786 - DNA, 320 bp, Homo Sapiens
  misc_feature (299)..(299): n is a, c, g, or t
  misc_feature (304)..(304): n is a, c, g, or t
gccttatgtattttgtgacattttatcaggagctcatgcgtcttagtattttatgggtgggaattctttgaagcttggattgaggttaattttttaaagaaaggattatatttagtcacaccagttgactggggaacactactaacctaatcattttgaataatttattttaaattaatcattagctagggggtgttatgggactttgtgggccttccaaattctcaagggggaaaaatttttgttccccctcccatccaggcagccatgttttgcccacagaccaatttcccgggggnaggtnaggggggagaggggtg

SEQ ID NO: 305787 - DNA, 438 bp, Homo Sapiens
  misc_feature (223)..(223): n is a, c, g, or t
  misc_feature (275)..(275): n is a, c, g, or t
  misc_feature (341)..(341): n is a, c, g, or t
  misc_feature (347)..(347): n is a, c, g, or t
  misc_feature (397)..(397): n is a, c, g, or t
  misc_feature (412)..(412): n is a, c, g, or t
aaatattgattggtccctagcctacaccaggacaattaactagaatggcagcatttaggcaaagctgggttaaatcagtatgacaggacacactaactagacttctcttttctgtggaagcattttaatcacatctctcagacctcactaggtgttgtattcatgggcaatgggaaacctgaatattcatggggatggggaaaggagcctgcctgggttctgncagtgtcttgattaggaatttaatttctttcgtgttcaaaagtgggggcaantaggaacttcttctttgtgggggtcgcagtattttaggaagggcaccatagtggggggttaggganaaattntccactttccccttaaactcccaacttgttgccaggggcccaggagttcngaggagttttgcccntttttgttggccaaccaattacctcc

SEQ ID NO: 305788 - DNA, 134 bp, Homo Sapiens
  misc_feature (51)..(51): n is a, c, g, or t
  misc_feature (56)..(56): n is a, c, g, or t
  misc_feature (71)..(71): n is a, c, g, or t
  misc_feature (78)..(78): n is a, c, g, or t
  misc_feature (86)..(86): n is a, c, g, or t
  misc_feature (93)..(93): n is a, c, g, or t
  misc_feature (116)..(116): n is a, c, g, or t
tgccaaaagcagcccgaagcggccccgccacccggttccgccccctccatntgccngggtgaagttcgcgnccagggncttagganagccagnttcttcagggggatggggggcanattttgggggatagggaa

SEQ ID NO: 305789 - DNA, 102 bp, Homo Sapiens
  misc_feature (72)..(72): n is a, c, g, or t
ttcggcacaggtggaacatgggtgtatcctgcaggtgctcacagtatctccctttgctcaggctctagctantatttctggctcataaggccaaagggagcc

SEQ ID NO: 305790 - DNA, 120 bp, Homo Sapiens
ggaaaaggggttaaactgatggtgttttgaaagcctaaagcatgaaatatttttagatttttatgagtcagcttcagtactcaaatatttgtgattgtgctgcttgtaccagttttgcac

SEQ ID NO: 305791 - DNA, 231 bp, Homo Sapiens
  misc_feature (14)..(14): n is a, c, g, or t
  misc_feature (49)..(49): n is a, c, g, or t
  misc_feature (53)..(53): n is a, c, g, or t
  misc_feature (62)..(62): n is a, c, g, or t
  misc_feature (72)..(72): n is a, c, g, or t
  misc_feature (79)..(79): n is a, c, g, or t
  misc_feature (92)..(92): n is a, c, g, or t
  misc_feature (96)..(96): n is a, c, g, or t
  misc_feature (127)..(158): n is a, c, g, or t
  misc_feature (216)..(216): n is a, c, g, or t
tctgttgcccaggntggagtagtgttgtgaccaaagctcactgcagccncaanctcccaggntcccaatccncccaccncagccttctgagnagcngggaatacaggcacacactaccacacctggnnnnnnnnnnnnnnnnnnnnnnnnnnnnnnnngggagagacagggtctcgctatgttccccagataagcatgtattttataataaatagntttaaatattgggga

SEQ ID NO: 305792 - DNA, 288 bp, Homo Sapiens
  misc_feature (42)..(42): n is a, c, g, or t
  misc_feature (74)..(74): n is a, c, g, or t
agagaaattcagaaacagctaaattattaatacttggaagcngatggaatgaatcaatatggcatggcaaaagnatctcgcagttgccatttccatatttcctgagtttaagacatgctgattagatgctcttagcacatccattttgaaaaacagcacatattttaaagacatatggcatttaggaaatgtcacaataaatgaaacagtagcttaattgtttagggtaaacatttattttacagctaggataactttgtaaaattatattaatttaactccaatgtt

SEQ ID NO: 305793 - DNA, 294 bp, Homo Sapiens
  misc_feature (45)..(45): n is a, c, g, or t
  misc_feature (54)..(54): n is a, c, g, or t
  misc_feature (124)..(124): n is a, c, g, or t
  misc_feature (174)..(174): n is a, c, g, or t
  misc_feature (219)..(219): n is a, c, g, or t
  misc_feature (232)..(232): n is a, c, g, or t
  misc_feature (255)..(255): n is a, c, g, or t
  misc_feature (270)..(270): n is a, c, g, or t
  misc_feature (274)..(274): n is a, c, g, or t
aattcttgcatctttattatcatattattagcaattgcttttgancagaaaatnctctgaatgcagtgagttttacatattttaaaatggctgattcattgaagatgtgttgaggaggtgtggncataccatcaatatttttataattgaaattgcagaactctcttttttccntttcaacatttccatcttttccctgaaagtggggatttgtctccngggaggagagagnaaattaggacttttacatggganccaaccaaataaccncccngattgggaggatataaatct

SEQ ID NO: 305794 - DNA, 270 bp, Homo Sapiens
  misc_feature (31)..(31): n is a, c, g, or t
  misc_feature (46)..(46): n is a, c, g, or t
  misc_feature (69)..(69): n is a, c, g, or t
  misc_feature (72)..(72): n is a, c, g, or t
  misc_feature (130)..(130): n is a, c, g, or t
  misc_feature (229)..(229): n is a, c, g, or t
aagggaggtaggaaacctggacatggcctgncagcagctgagaagnccccctgagatcctggcggcccncancatctgaagatttaggccagtcccttgggcttttcaggcaggcccttatggtggccgnccagtttgggaccctcccattttgatacattagttccccctcagctactggagatctcagccacaactgggctccagctgtgacccagactccgccagnttcccctagatcctcagctgtcagataatcccctgtccccc

SEQ ID NO: 305795 - DNA, 272 bp, Homo Sapiens
  misc_feature (35)..(35): n is a, c, g, or t
  misc_feature (137)..(225): n is a, c, g, or t
agtctcgctctgtcgcccagggtgtagtgcaacgncacaatcttggcttactccaatcttcacctccgggttcaagcaattctcctgactcagcctcccgagtgggattacaggcacccaccaccatgcctggctannnnnnnnnnnnnnnnnnnnnnnnnnnnnnnnnnnnnnnnnnnnnnnnnnnnnnnnnnnnnnnnnnnnnnnnnnnnnnnnnnnnnnnnnagaatttctctttaaattcaacaaggattcagttttacagtctgggg

SEQ ID NO: 305796 - DNA, 304 bp, Homo Sapiens
  misc_feature (72)..(72): n is a, c, g, or t
  misc_feature (107)..(107): n is a, c, g, or t
  misc_feature (114)..(114): n is a, c, g, or t
  misc_feature (140)..(140): n is a, c, g, or t
  misc_feature (189)..(189): n is a, c, g, or t
  misc_feature (219)..(219): n is a, c, g, or t
  misc_feature (285)..(285): n is a, c, g, or t
tttatattttgcatatctactttctttttatattttgcatatctactaagggttttttgcaaacgttgtggntaccatgaaccttaaacagtctcttacacttatgngactatnttaaattaatacaactaaaattagancaattactcaaatgctatgcttttactttcaaccccacattgtgttccngatgacacaatttatatcattttataattngtataatttaaattattgttgctacaggttaggttttgtcttaaccttttatggataaataccatnatttggttttcacaccccc

SEQ ID NO: 305797 - DNA, 143 bp, Homo Sapiens
  misc_feature (88)..(88): n is a, c, g, or t
ttatgtgacatttattaaaatgtcggcaactcatttttttaaaagtagtgaaagggtcaaaggggacatgtcagcaggttggataccncttgtgggattccagattgcaacccatgagctttaggaaaatagaatccaaaata

SEQ ID NO: 305798 - DNA, 407 bp, Homo Sapiens
  misc_feature (307)..(307): n is a, c, g, or t
  misc_feature (360)..(360): n is a, c, g, or t
  misc_feature (382)..(382): n is a, c, g, or t
gagtaccccttgccataaatagcaagcagtcattcagacatggaaatgaggcattcacacttgttcttgtttcacactaaggccctaagcctaaggagggtttctctatgttgaaaggaaattaggcagtgttcagaggggtgttaaagatagactagcaactaattgaaactttctcctcaatgtaagcactttaggaaggggacttgaaaagaggaatgttctccccttacatgtacccattatcaccctaccaatttccctcgtgttcccacttatttttggccaaattaaatgcccagagggnaggaggtaccattttttgatgcttttaggccttaggcactttcaaggcccctncctcggattttggaatcttttnccaggccttcatctttggcacaggc

SEQ ID NO: 305799 - DNA, 342 bp, Homo Sapiens
  misc_feature (197)..(197): n is a, c, g, or t
  misc_feature (204)..(204): n is a, c, g, or t
  misc_feature (299)..(299): n is a, c, g, or t
  misc_feature (305)..(305): n is a, c, g, or t
  misc_feature (320)..(320): n is a, c, g, or t
cgtgagcaccgcacccagccaagctgccctgtgtccatcaataccccactaggcactgtctctgcgccactgtcttgtacatatcatgtctctcaattccctgaaccatgcacttacttatgtgttaaggtacaatttacttatcctcacttttacaggatacaggaaactgagggctggggggcagggtctggggnaggcttngggtgttggaaaccacaacttattacagcttttaggacttcttaaggttttttttattccacaggggggcttaaatggttcaggggtttactttngggggnaaaaaaattaaagtnggggaaggatggaatttgggga

SEQ ID NO: 305800 - DNA, 434 bp, Homo Sapiens
  misc_feature (374)..(374): n is a, c, g, or t
  misc_feature (394)..(394): n is a, c, g, or t
  misc_feature (419)..(419): n is a, c, g, or t
gaatgtacaaagttcattgtccatccggacacccaggaataagtgagaggtacatactaattagtattttctaacattgcttacttctgccccctgcctagtcacaggctgagagaagaatgcagcaagaagcatcttaactggaggcccattctaagtccattttgaggatgaggaaacaggccagggaggttaaacgacttgtcccaggtactgtggctggaagagaggctataccttacctactctcctgggtgcccttttacctctgtctttagaggaagtgcatagatttttctcatttggctcttgagacctggggataaacatagtgctaccctaagtcttgcagttacaagaatgggaaatattcntgattttaagttataggacnttgttttgaatttttaccttacacntttttaaaatcacag

SEQ ID NO: 305801 - DNA, 417 bp, Homo Sapiens
  misc_feature (382)..(382): n is a, c, g, or t
aggcatcctctccaggtgagccgaaattccaccctcccaggttggacatcatcttttaaacccaatggtctactcccctccttctttatgaaacagtgatttcccgtgagtaactctggttctgattttttgtaccggcgcttaaattctttctgtagacattggaaagccacaaagaacgtgactgcagtgagcctcccactggagcagccttaaccaacactttggccaaagcccccccacctcccctgtgtactgtgtgtgtgtttggtggatacagtattccttttcagtgtccctaaagctgtgatgggggagtccccactttacctaggaaagcattaccagtcacctactctggcatttttcaggatgttaaacnttgtgtagtgttctttttggcaatggacctattta

SEQ ID NO: 305802 - DNA, 418 bp, Homo Sapiens
  misc_feature (11)..(11): n is a, c, g, or t
agcaaagcaanaaacggctctcagagcaaggcttcctgggctcaattcatgaccatgggctttgggaccaggggaagctaaagatcatcatcacttctgcaaaacagcggacctcgaagacgggaaacaacaaggccagaataggagcgagaagagatgaacttccctctcgaagtggttctctgagccccccggtaagagaaataatgaaggaggaagcgagagaggattcgtggtgtgtttagtaaaacaaggaagggctacagatacgctggaacaaagcctcagagcttgctttccaagtagcagtccggatacacaaatgggtcagctctgactgtgttagggcttcacccctttagggaaacctgaccacaggattgccctttgcaaagaaacggagacaaaattagggttc

SEQ ID NO: 305803 - DNA, 464 bp, Homo Sapiens
  misc_feature (310)..(350): n is a, c, g, or t
  misc_feature (391)..(391): n is a, c, g, or t
  misc_feature (412)..(412): n is a, c, g, or t
  misc_feature (428)..(428): n is a, c, g, or t
  misc_feature (445)..(445): n is a, c, g, or t
agagagctatgagctcaatatatgcaaaattgcactgatcctatttaccttcaccatggtgatcgccttccctaccaacaccaaatctaaattctcgccttgtcaataaacttttaaaaacatgagcactccttttagctgaaaagacgtccctaaagcttcttaccctgccgtcaaaagaaggtaatcaatgagccagaggaatgtcccatcttttttctacaaacatcctccttaggcgttacttaaatttaacaccaatgtaagtttttaccgctgagcagggtccatgggttggcctgcaggactnnnnnnnnnnnnnnnnnnnnnnnnnnnnnnnnnnnnnnnnntttcaaagtagggttgagggaggttttttcagggggtcttngaattgttgggtcatgggggnttccacagggttgttncaccttttggccccaancttttttaaattgtttatt

SEQ ID NO: 305804 - DNA, 248 bp, Homo Sapiens
  misc_feature (120)..(120): n is a, c, g, or t
  misc_feature (156)..(156): n is a, c, g, or t
  misc_feature (168)..(168): n is a, c, g, or t
  misc_feature (187)..(187): n is a, c, g, or t
  misc_feature (196)..(196): n is a, c, g, or t
  misc_feature (201)..(201): n is a, c, g, or t
agaacactggttatccaatatggttctaccatatctaatgacaaactaactgatgatctccacatatctcatttcctaggaaagaaatggtgtatcatttcactgtgtaccctgcagggnaataaaggttctgccctacctaccaagatcatattnccgtagcatcanaaagccccatacaaaattnaaagctttnaaaancacagcctgggtatttaaaaggggcatctgtgttttaaaaagtctcg

SEQ ID NO: 305805 - DNA, 284 bp, Homo Sapiens
  misc_feature (242)..(242): n is a, c, g, or t
  misc_feature (248)..(248): n is a, c, g, or t
atgagctccatgcccagccttaacagtgtgttttctccagaaatttattacacacaatctttggcctaaagagagcaacaaaattccttggggattgtttgtgtcacaacaaaggatcactccttgtcttaggagttgctcaaatgggtaggaattaggaacagtgtgcacatatcctaaagctatcctcattctcagggggatgatatttctctaggcaagcaagacttttgcccgggggnccaggnctagggatgggccagccccgggggttattcacaggg

SEQ ID NO: 305806 - DNA, 113 bp, Homo Sapiens
  misc_feature (62)..(62): n is a, c, g, or t
  misc_feature (74)..(74): n is a, c, g, or t
  misc_feature (81)..(81): n is a, c, g, or t
  misc_feature (93)..(93): n is a, c, g, or t
cacccgtccaattttgtgctatatttgaatttaatgctacatgtcaagttcttgtcttattngagcctgggggnaaatggntaagggtgcctnctgtttttctaggaggtaag

SEQ ID NO: 305807 - DNA, 354 bp, Homo Sapiens
  misc_feature (281)..(281): n is a, c, g, or t
  misc_feature (308)..(308): n is a, c, g, or t
  misc_feature (334)..(334): n is a, c, g, or t
taatttattttataacaatccaaaatgcatgatgtcatgaataggtgctgacaggagagaattggtatacagaatattgagaaaaatgtgctcttgagggataattattcatctaagagagattgtctttttgttgaaatgccaaacatttgcttattttttaaagcacttgggaggaatcatatctaagggggtgggcatgctgtacttgacttaggggaaaaaaggtattcagtggggtttgaggagtcaaggtttaaaacagctgtccaaattaaccncgaagggctagtgactgtagcctgccnttgggactcttaagtagtgacccccnttcccccaatggggactggg

SEQ ID NO: 305808 - DNA, 335 bp, Homo Sapiens
gggagaggggccatggtcttccatagcaatggccagagctcctctgtggctgtcactttgacaggagatatacttctggttggtcactgttggtatcactcccatttgcttttcttccctcagctacattaattccctgaaagcttctgtctcctgtaagagctgagcttatcttggagtagaagccagattatccctcaaggctacctagggtttgcccaagcctctgtttcccttagcattgtatttttttccccctggaattctaaggaagttgttttgtctccgaggaaaaatgttataactaaggtccatggacataaatcctcttatta

SEQ ID NO: 305809 - DNA, 441 bp, Homo Sapiens
  misc_feature (271)..(271): n is a, c, g, or t
  misc_feature (313)..(313): n is a, c, g, or t
  misc_feature (405)..(405): n is a, c, g, or t
  misc_feature (411)..(411): n is a, c, g, or t
  misc_feature (417)..(417): n is a, c, g, or t
ttttttttcacagaaatgtctttcagatctggtttactttccacatttctacccagccagaagcccctctcactcaggcacacatgttttttatacattcattcaacaactgtttgctttaatctctctcccatggctcctcgtgttagcagttattaaagttttaaaataaacctgttgttgctgaggagcacatttccaaggattatatttaggaggaaacttatttgggattgccttgctttcacatccacggcactgccccgggggntggaatattcctggtcattcaccacattttactcccacgggnctcttccctgtttcccaaaattaaattccccaggcagggactgggggtggtggacactaggggggcacctcttaagggcacttcaatgtggnaagggnaatatngggaatttggggggttttgggagg

SEQ ID NO: 305810 - DNA, 140 bp, Homo Sapiens
  misc_feature (54)..(54): n is a, c, g, or t
taagtaaatagcagtttggtcttttgttgggaaggacgtctattcttaagcttngacacttcggtttttcctttgggcaacaagaagcaatgttggccaattttaaggaagttaccctaaaacttttgaatgttaaggga

SEQ ID NO: 305811 - DNA, 255 bp, Homo Sapiens
  misc_feature (94)..(94): n is a, c, g, or t
  misc_feature (219)..(219): n is a, c, g, or t
ttttgttgttgttgcagcaggaagtttcctttataaatggagagttggatgatacacagttctagcgtaaggcctcagtcactgggccccaggngacagaaaggagcagggctgagagggacgacatgctccagggctcatgtcacactgatatgtgcgccagggaatgaccgcccatgtactcctaaagttcaacccacccaccagttcagtcaaganttatgcttttaattcttcatgtttggccactgaaga

SEQ ID NO: 305812 - DNA, 381 bp, Homo Sapiens
  misc_feature (344)..(344): n is a, c, g, or t
  misc_feature (351)..(351): n is a, c, g, or t
ttggaggaaggtgggtggagagcctgctgcttgtttctcacaggtgtttgccacacaagagatcaaacttctgtttcctgttgagattggtttccatctctctccattcatctctgacactccctatctctcttaattatgtcttatactgacgtctataaccctgctcagccctctccctccagaccccctcccagcaggcaactgctgttagtaggagctattaaggaacacagggcctgtggatcttcggaactcctgggccttcaaggcaatcttccccagcttcagcctcttcaaagtgctggaggattacagggcatgaggccaccatggctgggggncacattnctttttttcaaaggccaccttgaggagcta

SEQ ID NO: 305813 - DNA, 375 bp, Homo Sapiens
  misc_feature (314)..(314): n is a, c, g, or t
  misc_feature (322)..(322): n is a, c, g, or t
  misc_feature (354)..(354): n is a, c, g, or t
  misc_feature (362)..(362): n is a, c, g, or t
aagagagtagaaatccaaaagatggttacctttggagaaacatgtgcttattccattaatgttgctattgctctaagcatgctgggaagtactggagagctgttaactcttcaggtattagaaggagaatctcatgtttctccaaatttccttgcttctgggatacaatttctggttcttttgttaccctaattgccttcatctcgtatgggattcgtatctctccttttatgcccggctttcagagttcattgtcttcactggcagggtatggatatgaggcaggcacagagcctatgggttccatttaacanggcagggnaatgacatggggattcaccaccgtaaactgtngactccanttcctttaatttt

SEQ ID NO: 305814 - DNA, 321 bp, Homo Sapiens
  misc_feature (186)..(186): n is a, c, g, or t
  misc_feature (212)..(212): n is a, c, g, or t
  misc_feature (214)..(214): n is a, c, g, or t
  misc_feature (238)..(238): n is a, c, g, or t
  misc_feature (298)..(298): n is a, c, g, or t
  misc_feature (310)..(310): n is a, c, g, or t
aactggatgtctttgggcatgagagccaactctcttaccgtagatggcacacaaattagcatcttcaaaccaacccaccaggtacacttcactagcctccaggtacacttcactagcctcctgcagcaccccaatgactgtgctctgaaacctaaagttggttttgaaatcctggggtgatctctntcaccaacctctagaaaggcagcttncnagatgagaagcttaggtcaatttntggtaacgagaatctcttagaagtgccacagtccccaggcccgtagcgatgaggttcttncacccagacccngttagagggga

SEQ ID NO: 305815 - DNA, 345 bp, Homo Sapiens
  misc_feature (298)..(298): n is a, c, g, or t
  misc_feature (312)..(312): n is a, c, g, or t
  misc_feature (319)..(319): n is a, c, g, or t
  misc_feature (334)..(334): n is a, c, g, or t
taacaatgtttgtcttcagtattttctgaatctgcctgtggtttccatccctcctacccctacagctgtcctcagtccctgacattaagaccattgtaatgttctcccaaccaggttccttgccttccatttttcccgtctaatagattccatgtacgtttgccagattaatcttctgaaaccacatctcttaaaccattctctgcctcaaggaccccttaatgaggtgcccattgcccgcttaataaagttaaaactctacagcatgggtatttaaaagtcttcctgcttgggagtnccagtaggcttttnctccganttaaatttccagggnattggtccttg

SEQ ID NO: 305816 - DNA, 420 bp, Homo Sapiens
  misc_feature (227)..(227): n is a, c, g, or t
  misc_feature (270)..(270): n is a, c, g, or t
  misc_feature (307)..(307): n is a, c, g, or t
  misc_feature (315)..(315): n is a, c, g, or t
  misc_feature (320)..(320): n is a, c, g, or t
  misc_feature (337)..(337): n is a, c, g, or t
  misc_feature (364)..(364): n is a, c, g, or t
  misc_feature (369)..(369): n is a, c, g, or t
  misc_feature (400)..(400): n is a, c, g, or t
acacgtaagctttggcaggtgagtgacatgatcatcactcgacagacatgctgccttaggcccaagtcacctggccaaggtccaccactcattgagcaccatgattctccatgttggacctctgcctcaaggattcatgaagaaacagagaaagtaaggggctgataaaggttcttgtgtactaaaattgcacatctgggaaactgactctggaaagcggtgccatnacctaggaacataattaggtggcagggtcaaaaggcaaacccntcatcctgcgtgtttgtttccctctgggcgcttcttnctgctccnggggngccatgtttggcatttnaacaaggacagcttgagtggggtatgnttttnacacctctttgcagtatttttgggggttttnccggggggggccttcccgga

SEQ ID NO: 305817 - DNA, 395 bp, Homo Sapiens
  misc_feature (198)..(223): n is a, c, g, or t
  misc_feature (331)..(331): n is a, c, g, or t
  misc_feature (346)..(346): n is a, c, g, or t
ggcacgagcctggtccaagtctttattctgtgttaccagaattattgcaaaaacctctcagctagtgttcatactcctgggttttcctgtctatttctgtaagtaagtgctgcctgatcctgctaaaatgcatgctactaaacttttaatgatgtcccaatatgtataggaaaaacctacatgctttgggcacaggcnnnnnnnnnnnnnnnnnnnnnnnnnnatctttctagggctagtcttcttcctgcttccttattataccctatacttacagtgggcccatattaattttcccaatgggggacacttaggtgtggaaggggggccntaggtaggtaattangttgggggggaacaggggcctaagggacattaccggttaccggtaaata

SEQ ID NO: 305818 - DNA, 353 bp, Homo Sapiens
  misc_feature (201)..(201): n is a, c, g, or t
  misc_feature (223)..(296): n is a, c, g, or t
gaacaataacggactacttaaagtaaaaattattacaacactgtggggagggttacaacatatgcagaagtaaatgtattacaatagcagcacaaaggccagaaggaaaaaaggagctttgataaagttgttagactgtatgtgaagatgtgtaataccacttaaaggcaaactgatttgagttaaagatgtatactaacngcaactaaaataactggccagnnnnnnnnnnnnnnnnnnnnnnnnnnnnnnnnnnnnnnnnnnnnnnnnnnnnnnnnnnnnnnnnnnnnnnnnnngggagtttaaagactagccctgaggcaaccatggccaaaatccctgtcttcttacca

SEQ ID NO: 305819 - DNA, 298 bp, Homo Sapiens
gttacacagggtagcatcagtaatatacccatttaaaaattatctgttcctctcttagtggtttgaccctacatttctaagtacatacataatttctgctgctagttttattttaacatatctacattgcacaaagacaggtacaagtaactgaattcaagtgagccttgacactttaatgaggggtgttctgtgctgattaagcacttctgtaaaatatcaaggaattatactatggcaaagacttgtttgtacggtcaggcactagggacttctattgagtaggggaatgaggagg

SEQ ID NO: 305820 - DNA, 213 bp, Homo Sapiens
  misc_feature (164)..(164): n is a, c, g, or t
  misc_feature (173)..(173): n is a, c, g, or t
  misc_feature (180)..(180): n is a, c, g, or t
  misc_feature (200)..(200): n is a, c, g, or t
ggaaggagtgagtgcaccacctccctacacacaccaggcatgcccctccttcttaactttccttttaccttccaaagtaataaactctccatcgggtaggaattatttcaggcggaggctggaaacatcatctgttcgggggtatggctactgagggggttccnggaggtganggggggnatggacggttgggtttaccntccaggttttttt

SEQ ID NO: 305821 - DNA, 458 bp, Homo Sapiens
  misc_feature (42)..(42): n is a, c, g, or t
  misc_feature (82)..(141): n is a, c, g, or t
  misc_feature (148)..(161): n is a, c, g, or t
  misc_feature (236)..(236): n is a, c, g, or t
  misc_feature (383)..(383): n is a, c, g, or t
  misc_feature (392)..(392): n is a, c, g, or t
gacaaggtcttgctctgtcaccctggctgtagtgcagtgatnagtcatggctcactgcagccctgacctctggggcacaagnnnnnnnnnnnnnnnnnnnnnnnnnnnnnnnnnnnnnnnnnnnnnnnnnnnnnnnnnnnnttattannnnnnnnnnnnnngtagagatgaagtctcactatgttgtctaggcttgtcttgaactcctggggttcaagcgaccctcctgccttggnctcccgaaggtgctgaggattaaagggcatgagccactgtgcccagcaggttgcttgctttttgggatcatacatactttgtggttcctctaaacctttctcacaaatgacactaattgtggggggttcatggtaccttggaaaggntaagggtgnccaaattgggagggggaaaatcacctttgtggttatggttatcccatggtggtcggtttacccttg

SEQ ID NO: 305822 - DNA, 188 bp, Homo Sapiens
  misc_feature (27)..(27): n is a, c, g, or t
  misc_feature (149)..(149): n is a, c, g, or t
  misc_feature (160)..(160): n is a, c, g, or t
gtgtgatgattacaggcatccagaganggaggaggaaacgtgtggggtcccattcacctccactccaagcggcggctgcaccccacagtcccccatgccgggacctcagcatgggcctctgggttggactgaggggtcctcagcatgangctggctggtnttcacggggcaggggttccaggctgacc

SEQ ID NO: 305823 - DNA, 421 bp, Homo Sapiens
  misc_feature (363)..(363): n is a, c, g, or t
  misc_feature (371)..(371): n is a, c, g, or t
  misc_feature (384)..(384): n is a, c, g, or t
  misc_feature (396)..(396): n is a, c, g, or t
gtttttgtctgcctctcttatttcagaaagacagtcttcaagctctgagattttttcttgtttggtctattctggtattaatacttgtgattgtattgtgaagtcctcgtagtgaatttttttaactctgtcaggtcgattatgttcctctctatactggctattttgtcttcagctcctgtattgttttatgattcttagcttccttacactgggttacaatgtgctccttcagcacatgaagtttgttttaatccacattctgggagcctacttctgtcatttcagcccatgtcagcctcagccccagttctcaatccttattgggggagggtgtttgcaggtaatttgggaggaaagggnggtgcccngggctttttgggngttttcagccanttggacctgattcctttctcaccct

SEQ ID NO: 305824 - DNA, 315 bp, Homo Sapiens
  misc_feature (259)..(259): n is a, c, g, or t
atgagccactgagcctggccatattttaacttttaaaaactgtatttttactatactttttctatatttagatacacaaatacttaccattgtgttacggttgcctacagtattcaatacagtaacatgctgtacacaattatagcacagaaccaataggctatagatacagcctgggttgtgtagtagggtgataccacctaggtctgtgtaaggtactctatggatgtttgcacaagggaagggaattgccctaacnaacgcatttctcagcatgtcattaagagatgtatgactgtaatttgaatgctaggt

SEQ ID NO: 305825 - DNA, 274 bp, Homo Sapiens
  misc_feature (238)..(238): n is a, c, g, or t
  misc_feature (248)..(248): n is a, c, g, or t
atgcctgcagccaccgtgcagacccccatcaagcctggaagaggctgcaccctgtcctcaggacctcacagtgtgagtggggtctcctctgtccctgacccctcgctgttctcaggacttcacagtgtgggtggggtctcccctgtccctgacctctcactgtcagcaagtccttgcaatatcaggtgaggccttttgtgtcacttgaccattccttgtccactggaacttcaaaacnaacatgatanacaagtagtaaggatttaggaacttt

SEQ ID NO: 305826 - DNA, 190 bp, Homo Sapiens
gaccaaaaattacatccaataatatgcatatagataacttatctgaaacaatgaaaacaagcaatgttcacaaagctgccatcattaacaagactcaaaccaagacttgtgatggtgccgaggccattggagctatggtcacataccccaatacctacaggtagcaggggacaacccctctttctagaat

SEQ ID NO: 305827 - DNA, 398 bp, Homo Sapiens
  misc_feature (290)..(290): n is a, c, g, or t
  misc_feature (315)..(315): n is a, c, g, or t
  misc_feature (343)..(343): n is a, c, g, or t
  misc_feature (363)..(363): n is a, c, g, or t
  misc_feature (375)..(375): n is a, c, g, or t
aagtttgaagcagaatctatgattgatgtcagataccagatagataacaaaaagatgataagatgataacaaaaatggtatttaaattagtgcttaccaagtactttagatcatttactcttcccaaaaattctatgagctagttactattttatatgcactttttaggtgagatagctaaagtagaggagattaggtaactgtcagtctgattccagaacctaaagttctattaattacaaaatgctgcttctccaagttccaaaactacaaacattccctttgtcttnaaataggtgttttctaaccttttgnaggccttgtccatacctgtggacctctnactggggacctcttccttcntggccttctttnccctttttccctggtttctctcc

SEQ ID NO: 305828 - DNA, 428 bp, Homo Sapiens
  misc_feature (332)..(332): n is a, c, g, or t
  misc_feature (383)..(383): n is a, c, g, or t
taacattacaatagtgacatggcaactcccattaattagtaatatccatttaatcaaataatgacactcattattataagctgtaagtaaattaccatatactatcacttctatcttgggaatgctgaaattaattcacttccttgacatgtggataagcatggatgacagatacaacagacttaatgaatcccatagtcaagagaataatattgccttggcattattaaactaggaaaaaattcactacacacatcatcatcatgttcataaaccagatccatctttcagtattaaaatttcaggttgtggcctctcttctctggtatggncggccttctttcttttcactctcctctggtcccttcccatcttcccttccnggggctgtgggggaacgcccgggctggccatttattgcggggggg

SEQ ID NO: 305829 - DNA, 185 bp, Homo Sapiens
  misc_feature (65)..(65): n is a, c, g, or t
  misc_feature (79)..(79): n is a, c, g, or t
  misc_feature (87)..(87): n is a, c, g, or t
  misc_feature (148)..(148): n is a, c, g, or t
  misc_feature (170)..(170): n is a, c, g, or t
aaacctgctgaccctcgtgctctgccccgccctcaagccctccccaaaagtgctgaggattacangggagtgaggccantgctgcanagggccccctaattcccctgctcctttgaaagctgtcaacttataggataggcacaaaggntctattaaggggagcaagactncctcttgaaagcccc

SEQ ID NO: 305830 - DNA, 272 bp, Homo Sapiens
  misc_feature (139)..(139): n is a, c, g, or t
atggggccttggaattcacaatctgtcatttccaacaccctataagatacacaggtagcccgattcagtatggggaaggggacttcacagggggtatgactatgggggatggggagactgaagccagcctggggaggtngcccggcacagccacatttgtgggtctttccctaaccccttgatgtaggacccatctcccttttcaaccctcaaggacagcccttgaagggcagggcatttttcattttacaagacataggggtccctgcgta

SEQ ID NO: 305831 - DNA, 344 bp, Homo Sapiens
acccacagtagccattcaggaaaggcattcctcagtatcagagaacaatgcttccatttctgattcacaaagtgcttctgctacgtgggtttatgaagccagcaaggcaaaacaaaatcaagcagactttctgtctagatccttgctgggaccacacagaaaaatcccattttgttttgcaagcttgtaacaagtctcattgctatgggttccctaatacccaaggtctggagggattcccccaaggcactgcttgtgaggacggggcctttccttggggctactttaaaaatgctgcatgggctgctctctgtgggctggggcactatagggtaaaggggtcc

SEQ ID NO: 305832 - DNA, 269 bp, Homo Sapiens
  misc_feature (38)..(38): n is a, c, g, or t
  misc_feature (41)..(41): n is a, c, g, or t
  misc_feature (52)..(52): n is a, c, g, or t
  misc_feature (116)..(116): n is a, c, g, or t
  misc_feature (174)..(174): n is a, c, g, or t
  misc_feature (198)..(198): n is a, c, g, or t
  misc_feature (243)..(243): n is a, c, g, or t
tccaatatactaatcttgcagttcctgttttttctacngtntttttaaagtnaggctaattatttagtgaatgttgataggaattatcttcacatttccctgatacaggtgaagangttattctcatcacatcaaatactcaacctttttcactatgtattctatcacatcaantaatactaaagactcctacttttnttctgttttaaaggatatgttaggtacttcaactcagtgggtccntaacctttttgggcaccaggggttat

SEQ ID NO: 305833 - DNA, 363 bp, Homo Sapiens
  misc_feature (317)..(317): n is a, c, g, or t
  misc_feature (345)..(345): n is a, c, g, or t
gcttgttcactttttcatcaaaacacgacctcatccatcttccctcacccacatgattgagagctgagacatagaagttctgttgaggattctgtctgtgttcagtgctgtggttgaacagcacgatgagaaaagcagggaaggtgaactcctcagctcctgtgagagggcaccactgaccctcttgggccttcaggtccacagtcacagtccgcagtgggtgacagggttcttaggatgcctgcatggggtctctaaatgtctcttttaaggcacagtttacttcctcaggaatctaggcctggattcccggggtnttttcctgcagcttgcacaaccagcgtnttaagggttttttaagga

SEQ ID NO: 305834 - DNA, 361 bp, Homo Sapiens
  misc_feature (311)..(311): n is a, c, g, or t
  misc_feature (322)..(322): n is a, c, g, or t
ctttgtaacttagcaatgattcgtagtctccttcacctaacctaatggtgctgaaaccctttccatcacccctaccaacccaaagaaaaacattccaggacagctgtctcaggtaccccttcagaagggaacctgattatgttgatagagtaaaagaataaagacagggaacacaggtgggctggcccgtcttcagaagtgctgggcatggctgtcagcacataggaaggactgttttataaaagctgtgttttagggtaggagtgtctgtttcttctttggaaacatctttattggaattactggaatantgatttgggcngggggagttactattcttgataaaccatgtcttgggttt

SEQ ID NO: 305835 - DNA, 136 bp, Homo Sapiens
  misc_feature (37)..(37): n is a, c, g, or t
  misc_feature (50)..(50): n is a, c, g, or t
ggagctaaagctctagggcagaagtggtatctgactnaggccagggattngtgaataacctgttgaaagtgtgtgcagaattgtgtgtgtaattctctggaaaggtcttatcagattttcaaagggaatgtattct

SEQ ID NO: 305836 - DNA, 424 bp, Homo Sapiens
  misc_feature (64)..(157): n is a, c, g, or t
  misc_feature (296)..(296): n is a, c, g, or t
  misc_feature (350)..(350): n is a, c, g, or t
  misc_feature (365)..(365): n is a, c, g, or t
  misc_feature (377)..(377): n is a, c, g, or t
  misc_feature (392)..(392): n is a, c, g, or t
gtagaaagagaatatgagagatccaagagcaggctctggaagggctagcacaaggaaagttgtnnnnnnnnnnnnnnnnnnnnnnnnnnnnnnnnnnnnnnnnnnnnnnnnnnnnnnnnnnnnnnnnnnnnnnnnnnnnnnnnnnnnnnnnnnnnnngagtcagtcaagaaaaggaatggtcagagtaaaaagaaaaagaaggtgaagatagtgtccagtaaaaaaagccaaagaagagagtttaatggaggaggaggtatagttaagtatttcaggaagggtttatttatatatncaagtaaaattaaaaggtgcttttagacatattaaagcagtactttaaatccangttcctgttggggcngagtgggaggtnttttcagcctttacngtgttaaccaattgcccttttccaaatttgat

SEQ ID NO: 305837 - DNA, 472 bp, Homo Sapiens
  misc_feature (429)..(429): n is a, c, g, or t
  misc_feature (457)..(457): n is a, c, g, or t
tggatttgaaaactggatgttatgtgttctactcataagcctattactcattggctgtgacctgggatacatcactgcttttgcttttagagaatgagggtcattgggctaggtatttacagctcttaatattttagggttgcagtctagcaccgtatttttaaaacaagaattctaagcttctaatatccacctgttctttgcaaggttaacttttttttaacaaactctgagaatcagaagtcttagacatttacttgataattttagcatttgaggaattggctgatgttcctaggaatcaaattctgacagaaactttaatgccccctctatctcactgttttatttaacaagagttctggattgcttttcattgggttgggtaaaacagatatttccaggtaatggccacactggattaatttncttttgggtgacctttccttaatgtccntttgggtgacctttc

SEQ ID NO: 305838 - DNA, 130 bp, Homo Sapiens
ctgtaaagctttctgattagactccttgccaatggtattattctcttcttaactcaacttcttaatctgccttgctgtcagttatttattaaaatgtcaattttgattatacaggattccacaattaaaa

SEQ ID NO: 305839 - DNA, 416 bp, Homo Sapiens
  misc_feature (32)..(32): n is a, c, g, or t
ttccatgcttctttttataacagtttccaggnacttaaaccaaagcatcctgccagacttcttccacaagatctacgatggcatgtgctcaggtgccaggcacatcaggcactctatatccgttattgctaatcctcactacaaccttgtaagggaggcaaggaaggtgatattatccattttatcataagcaaagggagctggagggaaaatatttctctaaggcaaaagctagcaggagggcaggctagcatttgaatgtagattggcccggctctaaagccctattctttccactatactctgctctccaaggtaagctctattccttctggaaatcctaatatttcctgtcctgattatatgggcaccctgactatactgtagggggtcaccaaacaccagcaagtagcatt

SEQ ID NO: 305840 - DNA, 344 bp, Homo Sapiens
  misc_feature (279)..(279): n is a, c, g, or t
  misc_feature (302)..(302): n is a, c, g, or t
acaagccaccacattcagcatcctctactattttgattcctagaagtttccagttgtgtgtttatgatggtatttctgtgccttgtcttcccaaggtctggccttggaaaataatattagaaaattatattgctggtattatcagtataaagtaaaactgtgccaaaggttacagccattaaaggtcacaatggggtaacatcttcataggaatgggctgcccagttttgtcaaaggtgggagggcagtaatgggaagttgggtgaaggattctggggnccctctttagccagtatgtccangtattaccttgtgtagcttacaaattccttttgcctcttggg

SEQ ID NO: 305841 - DNA, 361 bp, Homo Sapiens
  misc_feature (81)..(81): n is a, c, g, or t
  misc_feature (321)..(321): n is a, c, g, or t
tttaatttataaaggaaagaggtttaattgagtcacagttctgcaggggtgaggatgcctcaggaaacttacattcatggnggaaggagaagcaaacatatccctcttcacatggcagcagcaaggaaaagtgccaagcaaaagggggaaaagcccctcataaaccatcagatctcatagaactcactcacaatcatgagaaaagcatgggagtaacggcccccatgattaaattacctcccactgggtccctcccatgacatgtagggatcatggggaactacagttcaagatgagatttgggtgggagattcagccaancccaaatcagctttgttctggggacacagttaatgtatgt

SEQ ID NO: 305842 - DNA, 320 bp, Homo Sapiens
acatatcttgccagaatctctcttatgatacttagaaagttttcatgtacttggagctaaattagtccccaaaccaaattcattattttcttcttaaaaatgtcttttacttccttgaatctgcttctgtatttcccatgtaaatttacaatgtattttgtccagttactgaggataaatacctctacttttgcacctaggacatttagggaggccattgtttactaaattcatttggatggctggtcttctaaaggaactaaaatctaggcatctcctcttcatacctcctggccacggtctttcattttccaacgggg

SEQ ID NO: 305843 - DNA, 214 bp, Homo Sapiens
  misc_feature (160)..(160): n is a, c, g, or t
  misc_feature (176)..(176): n is a, c, g, or t
  misc_feature (198)..(198): n is a, c, g, or t
cagaaaaagtacacagtcaaactgagaatatgctaatactgtaacggtggtgtgaaaacaaattatgtatttatcataaaagttaagacaaaacttaacttgtaggcaacaataattttaaattatacaaattattaaaatggatattaaattgtgttcntcagggaacacatgtngggggtttgaaagttaaaagcntagccttttgagttat

SEQ ID NO: 305844 - DNA, 363 bp, Homo Sapiens
  misc_feature (175)..(175): n is a, c, g, or t
  misc_feature (237)..(237): n is a, c, g, or t
  misc_feature (250)..(250): n is a, c, g, or t
  misc_feature (306)..(306): n is a, c, g, or t
  misc_feature (313)..(313): n is a, c, g, or t
  misc_feature (323)..(323): n is a, c, g, or t
ccaaacccaagtactgtgtccaggaagatggttacaaaggagtttctaactcatcatatactcttcccaaaccagccttcctctccatcttgagcctgtccttaagatgtcctgtctgtcttgagcctgtccacactctgcctgccctaatgataacatcactcccctttgggancttcccttattcattcatggcagagtgggttcacttccttccaagtatttcagctctgcatnaccacagggggantctccaggggttaggccatgggtgaggttttctaaggttttttaggtacaactttnctttgtnaactacgggnggtattcatttcaagtgggctttcccaggaggaatgtgaa

SEQ ID NO: 305845 - DNA, 224 bp, Homo Sapiens
  misc_feature (137)..(137): n is a, c, g, or t
  misc_feature (152)..(152): n is a, c, g, or t
  misc_feature (187)..(187): n is a, c, g, or t
gcaatccacagcaccacagcaaggattatcatgtgccctccagagacatactctcaggtggatgcgagaaatatccagctgttgcagcaactttcatcccactcgaaatccagctgagtcacactcacaggtgggantgggagggctttcgnggagggccatgggggcaagggtgaccctttccttnttcatcttatttacagaccttcttcaaggtctgtttc

SEQ ID NO: 305846 - DNA, 421 bp, Homo Sapiens
  misc_feature (78)..(78): n is a, c, g, or t
  misc_feature (87)..(87): n is a, c, g, or t
  misc_feature (147)..(147): n is a, c, g, or t
  misc_feature (247)..(247): n is a, c, g, or t
  misc_feature (350)..(350): n is a, c, g, or t
  misc_feature (370)..(370): n is a, c, g, or t
  misc_feature (383)..(383): n is a, c, g, or t
  misc_feature (406)..(406): n is a, c, g, or t
aacgtggctaccctagtagacagtacagaaaacaaatgtggctgtgattgcagatggctctctgactgcactgctctngagattttngggagccctagaggacccccgcgtgctgctgcagggccttcagggcttccatcctctcanctctccagaaaagcagctctgatattgtcttctgtcaaccttttgcatggagagatcatgttttccttgccaaaagggaaagtttgaagactgctgtttncttcaatgtatttattttacattaggggaacagaggcccaggggaggccaagttgagcccttcaaatgggtgtcttgtgaaaacatggcgttaaacaagcctngggatttcagattattcctnggggagccggttncattggctggctttacacgttgnattgtcccttgtttt

SEQ ID NO: 305847 - DNA, 414 bp, Homo Sapiens
  misc_feature (398)..(398): n is a, c, g, or t
aaagtgcctttatgagtatgtgtgtacacaaacacagccccagaggttttccaagtgtactaaaactcgagattttaagtctttcctcgcatgacagccataggtgaggaaccaggaaacatactaacactaagcaggagtcacgtggccaggccagaacagaaagcagagcatggaagaaacctaaatgcagttaagaagttttacccaaaagggtctattaagccacctgtcacatggccacccaaacaaagttcctacttatacttcagcacctgttcccaatgcttgccaattccccatcttgcggggtgggtgggtatgggtcagtcttgaggcattatttaaacaggaatttaattagcccaaaggggaaaatgagggatttaggatttctncctaatgccccaactt

SEQ ID NO: 305848 - DNA, 311 bp, Homo Sapiens
  misc_feature (281)..(281): n is a, c, g, or t
gtacatgcctgtggttcggtggcaccccttttatggatggatccagaagccaacccaagcagtcgcctagttctcttgggctggggactgactctggtactctctctactggtggggcactgccgacccaatgtgcatggatttaattgcaatgggagaaatagtcctgagatgtcccttaactgtaccccatcacagggatatctgtctgtagccccattgagggggtgtctgggattgggtgagtattgctgccaaggccaccttccttctcccgactnggttctgtaggccctatgggtggggggttt

SEQ ID NO: 305849 - DNA, 107 bp, Homo Sapiens
  misc_feature (52)..(52): n is a, c, g, or t
gtcaggataagggtagggtcagagacttttcttttatgggcccagcgctttnccacaggaaaggcttgggggaaagtttccgagtacttagttccttggatttttat

SEQ ID NO: 305850 - DNA, 176 bp, Homo Sapiens
agagaagaggctttgacaagcaaagattcctgcagtgctattgccatagagctgtatttagcaggctcccaagctctatgcttatatagaacctcttaaggtgttctagactctgagatttgggaagtgctttttctatattgagtctaaatgtgcagtttattttatgaaatgat

SEQ ID NO: 305851 - DNA, 135 bp, Homo Sapiens
  misc_feature (92)..(92): n is a, c, g, or t
  misc_feature (116)..(116): n is a, c, g, or t
tgtgtctggctctaattttcttttgatcattggaattcagggactttttttccaaccagggtatgccttggttttgtgtttgtataacattnaaccctgccttttagtccatgccntttttcagtgttcaggttt

SEQ ID NO: 305852 - DNA, 284 bp, Homo Sapiens
  misc_feature (79)..(79): n is a, c, g, or t
  misc_feature (92)..(92): n is a, c, g, or t
  misc_feature (95)..(95): n is a, c, g, or t
  misc_feature (158)..(158): n is a, c, g, or t
  misc_feature (170)..(170): n is a, c, g, or t
  misc_feature (216)..(216): n is a, c, g, or t
  misc_feature (241)..(241): n is a, c, g, or t
  misc_feature (249)..(249): n is a, c, g, or t
  misc_feature (273)..(273): n is a, c, g, or t
ctgagctaaaataatgtgatttcccaattgcacaatttagtcagttacttataggagaggataaccactgttgcaaccngaattagtaaccnggnagatcaataaagaaataatgtcaagagacacagcataaatataaaatgacagttatcataagngaaacatatccngtagacctaaattgcaaaaactagaagttccacaaggaggagaaanttgctgatggaaggaaatagttaantaacagangaaacttcctctgaaatgaagcantacttaaacct

SEQ ID NO: 305853 - DNA, 327 bp, Homo Sapiens
  misc_feature (280)..(281): n is a, c, g, or t
atccaatatttattcactttatgaaaacagatttatttgtactgtcaggcttattataggccttgattgcatttccaaaagggcctgtcatttggcagctacagtttaatgcttttattcacaatttgtagaagacatgtaataactactcatcacattttgggatgtcataaagatgggaaagacaacagatgtaaaagataatggagtaagattcaaaaatactttgatgtgttggaacaaatggccttaaacccacaaagatgaagtttaatggggnnaaaatataagagcatgaggagtcacctgtggggccttgttggccat

SEQ ID NO: 305854 - DNA, 390 bp, Homo Sapiens
tttctgaaatattttctaagcaaaactaggatggagttttgaaaagccaaattacatacgcactggctcctgtgtaccttgagaatgcaccttgcagactttcaactacttgactattggccccagctgccacactctgaaatgcattgtttcatttgcactcataaaattggggcagagagccaagcctcccaacagccgcttgtagacaattatcaagtgccgcagttcctaaggcagcctgtcactgagagcctgagaacttgttcaactttagggccaactttggcttaaaggcaccagtggcctgggccgcacttccattaggactttcagggataggtccaggggtgctttttaccccaactttttccttcttggtctcttcct

SEQ ID NO: 305855 - DNA, 310 bp, Homo Sapiens
  misc_feature (113)..(113): n is a, c, g, or t
  misc_feature (138)..(139): n is a, c, g, or t
  misc_feature (143)..(143): n is a, c, g, or t
  misc_feature (146)..(146): n is a, c, g, or t
  misc_feature (171)..(171): n is a, c, g, or t
  misc_feature (180)..(180): n is a, c, g, or t
  misc_feature (196)..(196): n is a, c, g, or t
  misc_feature (213)..(213): n is a, c, g, or t
  misc_feature (216)..(216): n is a, c, g, or t
  misc_feature (219)..(219): n is a, c, g, or t
  misc_feature (223)..(223): n is a, c, g, or t
  misc_feature (231)..(231): n is a, c, g, or t
  misc_feature (240)..(240): n is a, c, g, or t
  misc_feature (244)..(244): n is a, c, g, or t
  misc_feature (255)..(255): n is a, c, g, or t
  misc_feature (258)..(258): n is a, c, g, or t
  misc_feature (262)..(263): n is a, c, g, or t
  misc_feature (266)..(266): n is a, c, g, or t
  misc_feature (276)..(276): n is a, c, g, or t
  misc_feature (285)..(285): n is a, c, g, or t
  misc_feature (300)..(300): n is a, c, g, or t
agtgcagcgggcagcctggcagtgagtgaaacccaggcctccagccctccaaagcctggggccaccccctgtagcaggcgatgctagaataaggaggagagccagagctgagnctccttgccccttggcccctccagnnttgnggnattctctgtctcccacacccctgtnacggcccgnctggagcagcccagangccgaagaggttcttanttncancctnccggagtntctagggangccntagatttcctngtnttcnncgnattcaaaatnaggcttatnatcaatacttttttnagccccacat

SEQ ID NO: 305856 - DNA, 313 bp, Homo Sapiens
  misc_feature (19)..(19): n is a, c, g, or t
  misc_feature (298)..(298): n is a, c, g, or t
agagtttctctaatttggngactggctatggtatgtagtaaatggggccctgtatatgggattgccaacccctgatgacaaatgtcagatgctatcagggagagcaagaacacagattttgtgaaccacagtagcactgcagatcacaaagggattctcagaggtcgataaagcatcaccaaggtactaggaaggtttgggtaagttgaacaatgaggaataaggagtagaggcaaattaattataggacagctcttcaatctatggggaattaccatgctccccattaaaacactgnaggccccattttaat

SEQ ID NO: 305857 - DNA, 188 bp, Homo Sapiens
  misc_feature (107)..(107): n is a, c, g, or t
  misc_feature (138)..(138): n is a, c, g, or t
  misc_feature (148)..(148): n is a, c, g, or t
  misc_feature (154)..(154): n is a, c, g, or t
  misc_feature (168)..(168): n is a, c, g, or t
  misc_feature (174)..(174): n is a, c, g, or t
ccctatctttaaaatgagaaaatgaggtgagggaactccctagtctccttgggcccttgtgttttgtaaaatctcatgaggactctgcccttgagggggctttgggnatttgtgctcattgagggatgggggtggggnaggcttgtantatttncctaaatttgaatnctaaantttccctaaatttt

SEQ ID NO: 305858 - DNA, 423 bp, Homo Sapiens
  misc_feature (212)..(282): n is a, c, g, or t
  misc_feature (313)..(313): n is a, c, g, or t
  misc_feature (336)..(336): n is a, c, g, or t
  misc_feature (351)..(351): n is a, c, g, or t
  misc_feature (374)..(374): n is a, c, g, or t
  misc_feature (387)..(387): n is a, c, g, or t
  misc_feature (397)..(397): n is a, c, g, or t
  misc_feature (403)..(403): n is a, c, g, or t
atatggaggatgcaattgacatggtttcgattttgctcctatctgaccccttgttgatttgaggtccgttttacacttcacagaacccaaatgtcattttcattttatatattaagattttattctccttggaataaaaatagttctaaggaaatgctaagagtttcaacacagactatcactaccataaaaaacttagggtcatgggctgnnnnnnnnnnnnnnnnnnnnnnnnnnnnnnnnnnnnnnnnnnnnnnnnnnnnnnnnnnnnnnnnnnnnnnnggtcaaaagatccgaggcccatcctgggggntaaccatgggggtggaaaccctngttcttcttaccttnaaaaattaccaaaaattaggctnggggcattgggtngggccgcatncccttnccaggtccctaggctacttc

SEQ ID NO: 305859 - DNA, 409 bp, Homo Sapiens
  misc_feature (63)..(63): n is a, c, g, or t
  misc_feature (168)..(168): n is a, c, g, or t
  misc_feature (254)..(254): n is a, c, g, or t
  misc_feature (269)..(293): n is a, c, g, or t
  misc_feature (303)..(303): n is a, c, g, or t
  misc_feature (356)..(356): n is a, c, g, or t
  misc_feature (371)..(371): n is a, c, g, or t
  misc_feature (379)..(379): n is a, c, g, or t
taggaaaaagacagtgagcaggaggtggggagaatgccaacatggtcattatccttgcctggntgaaaggctgttgagtggatgatgggtggactgcatctgcagggtatcaggaggctcagccagggaccaaggtattcaaagacaaatttagtttaacacaaggancaactttttaacaagatggctgggaaaatagggcaatcctgggggggagttctgggtgaaatcttcttatccagtgattgaagctnggagagaaaaagggnnnnnnnnnnnnnnnnnnnnnnnnnaagtcccttnagggggtttttttccccccaccagttccagtttggccttccccgggggctttnttagccttttttccncccctttngggccttttttggcccccttcatgggttct

SEQ ID NO: 305860 - DNA, 389 bp, Homo Sapiens
  misc_feature (155)..(155): n is a, c, g, or t
  misc_feature (270)..(270): n is a, c, g, or t
  misc_feature (293)..(293): n is a, c, g, or t
  misc_feature (327)..(327): n is a, c, g, or t
  misc_feature (343)..(343): n is a, c, g, or t
  misc_feature (352)..(352): n is a, c, g, or t
  misc_feature (359)..(359): n is a, c, g, or t
tagactgtattatttcagaaaaccagtcttcaagttctgaaactcttccctcagactagtatattctgctgataatccttgtgattgcattgtgagattcttgtattgcgttattcagctctgtcagacccattaaattctttctaatactgggntatttcatccttcagctcctgtatcacattattgtggattcttattccttgggattggggttttgtcttccctccccaaatctcaataatctttggtttctgcccatatactggnattctggtcattctaggccaggntcaacccttggttaggggactcttggtggggggnaaactggctggagggnctttggggnggggggnaatagggatattctgggggcccatttggag

SEQ ID NO: 305861 - DNA, 304 bp, Homo Sapiens
  misc_feature (213)..(213): n is a, c, g, or t
  misc_feature (240)..(240): n is a, c, g, or t
  misc_feature (248)..(248): n is a, c, g, or t
  misc_feature (257)..(257): n is a, c, g, or t
  misc_feature (264)..(264): n is a, c, g, or t
  misc_feature (287)..(287): n is a, c, g, or t
gtacatggcacacataaacctctcaattattattgtaatagttattgtttatttttatgattaccgtcttcttctactgtagggcattctgggaagtgaaggatcattgttccccaaacttctgggcttattcacttgttaacaaatgggaccccctaggatcccgcaggatgttcaggagccaggcagcttcaccccagtgcttccgggggngaggcacaggattcattaaggggattnagggaccnggccttganccttgantttttaccagcttgagggaggtngaagttccagggggagg

SEQ ID NO: 305862 - DNA, 440 bp, Homo Sapiens
  misc_feature (323)..(323): n is a, c, g, or t
  misc_feature (343)..(343): n is a, c, g, or t
  misc_feature (366)..(366): n is a, c, g, or t
  misc_feature (386)..(386): n is a, c, g, or t
  misc_feature (397)..(397): n is a, c, g, or t
  misc_feature (416)..(416): n is a, c, g, or t
gcatgttaacatttatgagcctgttacgtttcttacatgtgtatactcatttaattctcactactattctttattattcccatttaaacagatgaggtaacttgaggttcagagagcttcaattatttgcccagagtcacagttatttgtaaaactggggctgggagtccagggtcttctgattcttaatccagggggtttcattgcctcataatagtaacagtgggatgtctcttcgctttcacttcaaatgctcttttggataaaatatggatttgcttcttgggagcttgttaaataaccccttattttcacagttcccngctggatactggggacaccngtctggacactttaaggacactnggggaagctttagggggacnttttttgtttnattaaagggaaaggcaggntccagggggcccctccttatggcc

SEQ ID NO: 305863 - DNA, 358 bp, Homo Sapiens
  misc_feature (285)..(285): n is a, c, g, or t
  misc_feature (298)..(298): n is a, c, g, or t
  misc_feature (338)..(338): n is a, c, g, or t
atgtgacatttagatacattgcaatcatgacaaatatttggatttcaaaatgacgtgtgagccatttatatttttgttgtgctttgttatcttatgggctcccataagataacaaggcttcaacactatggcttgaaaatgttttgatctgaaaggtatattagggaacacacagcataatcctaccactttgcttctgtctgggtgaaatgtcaattgtttcctctctctgaggcaccagctgtcccaaatgggcatggggaagggggcagtgggaggggggangaggaatggaaantgaggggaggttcttaaggaagggtgggccaagggatttngggggtggccaaatccctgt

SEQ ID NO: 305864 - DNA, 381 bp, Homo Sapiens
tcaatgaggcgaggcatttgtccattatggggatgaatcgtgctctcagaagagaatcctgtcattgaggttttgtttcaatagtcctctttttctccagagaactgttgtctcattgttaataatagcagcgtggctttttcagatgctggttggtggctgctgtacattttaaaaatgggaatctcatggttgtgtctcttaaggaagcttttcaagaactttactgggcaccagaggttattcagagttttgaagtttggggtgcctagtgtctcacagtgttttaaggcactaatgttctggggtcagttagggtgttgagtaccaaatcccatcttcagctcattctgaggaggggacccttgggctaattgcttt

SEQ ID NO: 305865 - DNA, 343 bp, Homo Sapiens
  misc_feature (227)..(227): n is a, c, g, or t
  misc_feature (253)..(253): n is a, c, g, or t
  misc_feature (268)..(268): n is a, c, g, or t
  misc_feature (301)..(301): n is a, c, g, or t
  misc_feature (333)..(333): n is a, c, g, or t
tgggatgggagctggtcttagaggggcctctcccctccccagacaccatggccaggttgggaattgaggcatctgtcacttccatgcagctctgcgcactcgggaagcccaggacaatgctcttaggtgcccaaagcactggcatcaagtttgagctttcactggtcaggcacctcagtgatggtcaggaagctcctggggtggaagccctgcaggtccaaaaggantgcctctaagtcatctgggccggtantgttcaggtgggggntgcagaaagaaatttattaaggcttgcacatgntgtgggcttcattgcctgttaattcccagcanttttagggag

SEQ ID NO: 305866 - DNA, 355 bp, Homo Sapiens
  misc_feature (276)..(276): n is a, c, g, or t
  misc_feature (299)..(299): n is a, c, g, or t
  misc_feature (322)..(322): n is a, c, g, or t
attaaacacccacagcccttttcaaatgggaaataaatagcaacatctgacaccttcttggggacccagaatcattgtaatatacttatggaagcagcatgtgctgttctcagcagtggcctagaacttagtttatagaaagtgttgcagccatctgcttgcctatttgactatttgcttcttttccataaagctaggcattaaaaagggtatagttttcttacctttaggagatggacactttattaaaaaaggcagtttcttaaatggaagggntttcccattcatctcgtaggacnggggggcttcttcaagctggccnggcatcatcggcccggggggggctttttaggag

SEQ ID NO: 305867 - DNA, 317 bp, Homo Sapiens
  misc_feature (302)..(302): n is a, c, g, or t
ctttcccaaaatattttccaggatttctggaattgaccagggaaacattacctttacaccccttcaacaaattcagtgtaaatacaaatagaagagagtttattggagttgaattggacctgctgtctcatgtttctgctgataagttaaaggacagtaagggatgataatgaaggaaggatgatcagcacttctcaaacatcacaatgccccacaaatcacccggggggatttttgtttaaaattacaggcttgctcagttggggcaggggttgggggcttttaggagtctttcacctctnataggctctgggggg

SEQ ID NO: 305868 - DNA, 146 bp, Homo Sapiens
  misc_feature (118)..(118): n is a, c, g, or t
  misc_feature (125)..(125): n is a, c, g, or t
ggtccgttgttgtcttctggggacttctgtccatatatgtgggtctggccttttgacccaaaatgttgttatggcagtgcgtggactataccccactatatggttcaagttcttaatngggattntggggggaggcttgatttaag

SEQ ID NO: 305869 - DNA, 115 bp, Homo Sapiens
agttatctgggaaaagggagattttcacacctaatatgttgagttccaactttacctctaaactcctaaatggcactttacacagtagtacatgaatggtacacacacttaaggg

SEQ ID NO: 305870 - DNA, 386 bp, Homo Sapiens
  misc_feature (333)..(333): n is a, c, g, or t
cggccttaatttctaatacaataaaaaacaatagatataacctccttaaatgaaagttatttgaggttcacaataattattacaattgtaacagggccttaagatgaaagtttgagaactactgtcttggagtaaaagagttcagaaaaatgcacactggggaagctcacctgaaccctcttcacccttctcatccgaagccctccccaagcctcttgctgtaactaggaccatcttgctgcagtctgttatcagatcacaatatttttcacagctatttttcccaatgccatgcactcatcaggccctatgctaggaggctgggaggctagnggaatacatgggggaaatggacacctggtcacccaatggacctcggggtctac

SEQ ID NO: 305871 - DNA, 257 bp, Homo Sapiens
ggagaatgccacaaaagactctgcaatgggaaggaggacaggagatagaaggagaaaccgggggcaatcttaactactcttgtgtgccaccttcctctgagatttgaatgcacagatctcagatggaggtatgaaattattacagaaaaagagacaaaaaaatccttatatcgtgtcactaaaatcatgctaataggaaatgtttttccttgaggattgtttaggagggctctgggagggagcgtttcttcagtttt

SEQ ID NO: 305872 - DNA, 261 bp, Homo Sapiens
  misc_feature (48)..(59): n is a, c, g, or t
  misc_feature (153)..(153): n is a, c, g, or t
  misc_feature (203)..(203): n is a, c, g, or t
  misc_feature (237)..(237): n is a, c, g, or t
aaagaaactttgttcatattccaggctgaaagactgaattcttaggcnnnnnnnnnnnnaaggctgttttcacacatcttcttgcctattaaaaaaagtaagcttgtgtgttctgccatgtattatcatcttaccaatcaaatgtcttaaagntttttctctgaaattttactgattaaagtatttaaaatcagagacttccncaattcattgatggaaatgcttttacagctaggnatattatataaccaaggcccaaaa

SEQ ID NO: 305873 - DNA, 152 bp, Homo Sapiens
  misc_feature (99)..(99): n is a, c, g, or t
  misc_feature (111)..(111): n is a, c, g, or t
  misc_feature (135)..(135): n is a, c, g, or t
atgagctgttgcgaccggcctcaatttcccagtttttcatttcagactattttattctccttcacactacttccactgactataggcaattttaaaggnaaactctaggantacaactcactggtaaatacatgnggggttttctaatatag

SEQ ID NO: 305874 - DNA, 271 bp, Homo Sapiens
  misc_feature (84)..(84): n is a, c, g, or t
  misc_feature (147)..(147): n is a, c, g, or t
  misc_feature (176)..(176): n is a, c, g, or t
  misc_feature (259)..(259): n is a, c, g, or t
gaaagggatggccaattggactaaagcatgagtgctgctttaattacttggcagagtacccagcaatagtcccctgcaataccnctacacatctgctcggggatgaacaagggcagactgatgggtaacctcttgaaaaggcttggnttcactgcaccctgttaagtctccaaggnatgctaactttttcctctgccatgaaaggcaggaggtgaagtaaacaccaggggctggaggctggatggacctcaggggctgncccgcagcttct

SEQ ID NO: 305875 - DNA, 312 bp, Homo Sapiens
  misc_feature (23)..(24): n is a, c, g, or t
  misc_feature (45)..(45): n is a, c, g, or t
  misc_feature (100)..(100): n is a, c, g, or t
  misc_feature (147)..(147): n is a, c, g, or t
  misc_feature (155)..(155): n is a, c, g, or t
  misc_feature (158)..(158): n is a, c, g, or t
  misc_feature (226)..(226): n is a, c, g, or t
  misc_feature (251)..(251): n is a, c, g, or t
  misc_feature (258)..(258): n is a, c, g, or t
  misc_feature (279)..(279): n is a, c, g, or t
  misc_feature (286)..(286): n is a, c, g, or t
  misc_feature (299)..(299): n is a, c, g, or t
aagctagcgtttacattcttggnncatacccccaaaggccaaggnttcccactggccgcttgcagcagggctgtctcctgtgaaggcaagagacaaacgnggagcgttatgacactttgctcccagggctttggcgcacagttcccntgagtccnggnccgtccagtcaacatcctgaagccaggggctggcaggtcctgaccctccctttttgcacccgtaaggnaaggggcccgggaatctgggacctngtctagnagtcccggcgccagttacccngttcggngggcatcctgggngggttgttactta

SEQ ID NO: 305876 - DNA, 187 bp, Homo Sapiens
  misc_feature (169)..(169): n is a, c, g, or t
tatcttttaaagattaaaaaaagtataaagataaatcactttggccatatgctatattttgtttttctctgtttaggggtgggagactttgattatattcgtcccaatgccatgttggcgggctttctagtggcagctccagtaggcaaggtttcacatttgtgttcanaactcttcagctcttaca

SEQ ID NO: 305877 - DNA, 402 bp, Homo Sapiens
  misc_feature (385)..(385): n is a, c, g, or t
ttgttccaatctatgcttccgggtttatttgtatacagagaaaactgtttggaatttgcaaagcccggttgaatatttccttgtttcatcagtggcattgttttaacccattggtgtaccagtttttaaaacttgcatataggagtggaactgccagtgagtttgaaaaactttgagggtataaataggccagaatgtttctaataagggaagatgccctgatgatgtcaccatatcaggggacatctcgtgttttgtgggggaccaaacaaagctgttttgagggaaagagagagacactgaggagagattcacttgaaggtagggggcccttaggttatttatctttgcctcttgcttccatccctaggcccagcacttgggnatgatgctgtcccccag

SEQ ID NO: 305878 - DNA, 341 bp, Homo Sapiens
acaaattgcagcccatttcatttgttcttcacaagctggaacttttcttgtaagctaaatattaaatggttcaagtaaattggatacataagcctgaaactaggcgtttctcattatacatagagtataaattaagacagactttttcatggtgaaaggtttacagcctttaaaacatctgggaagaagtgggaaagtagggaataactctgttaaatatgataaaagacaaagcaccaacaaaggcctagttctaaacttgttataatttttcatggggagttgtgggtttgtcacaaggttatgggcggtcccaagccaagtttaccattatttttttg

SEQ ID NO: 305879 - DNA, 415 bp, Homo Sapiens
  misc_feature (381)..(381): n is a, c, g, or t
  misc_feature (389)..(389): n is a, c, g, or t
  misc_feature (399)..(399): n is a, c, g, or t
gaacttcccctccactgaggagagccacttcctcccagcactgacacaatgatgaatgacaccaggagttctaacctagaaacagagggcacgtggctctgggctggaacatgtctcaggagttctgaggttttcagggaagggctctgcacagcctcagggacaggcttttggtgaagactgatcttccatgggaatctcaaggaaaagctggctgcaaaacatccccagtatgctggagggatccagcccccttggagaaggccattggagatcggtcgtgctgttgaacttgatcagcatcagagccagcatgttaacctattcttgaaagcaaagccacacgttccatgatgggagggatcgtcccttgggttcccntcattttnttgaggaagntgggacagtgttaggg

SEQ ID NO: 305880 - DNA, 378 bp, Homo Sapiens
  misc_feature (316)..(316): n is a, c, g, or t
  misc_feature (364)..(364): n is a, c, g, or t
tactatctatctttagagatctcaaagcaatgagtatgttgaaaataatagaatagaggacatgtgatgaattaggagtcaagccagttattcatacacctatacaaaagtgcctggagtttttaaaaaagctgtaggaagagaggatgtaaacaaatgctgcttataaatcatttttcttcaggcagtgggtaaaatgagtgatgcataggaatttgcatttctacattggcttacgctatcacatttaatcataactattgattttcttaataaaacatttctttctatagaacacatttattatttaccatantcatgttttaattttttgaaacatcctagtctatcatagttttaggtntattgttgttcctt

SEQ ID NO: 305881 - DNA, 429 bp, Homo Sapiens
  misc_feature (34)..(34): n is a, c, g, or t
  misc_feature (359)..(359): n is a, c, g, or t
  misc_feature (381)..(381): n is a, c, g, or t
  misc_feature (400)..(400): n is a, c, g, or t
  misc_feature (411)..(411): n is a, c, g, or t
tggagggagcagtgtgagtaaaggccctgaggantttcatgttcagggagggttgctgcccactggcttgcttggcacacaggagagtgggtattcctgccttagtaactttatgtaaacaagtatttcctcagtctgttcctctcaaactgcctgctctggcacattcaggatgtcacagaactcacctgggatgcattcagccccttgcctaaaggtgacagtgcatctccttccccaccccaccccttcataccactgaagcacctgtcagactggcccagtctgtgggcaaggagcctagagagggcttagtttcagcttgaaaggagctggggatttaccaaggaaggcaaatnagagacgagggtttgcaacaantgttgccattttccccagntttcagctganttcctgtatttttgattg

SEQ ID NO: 305882 - DNA, 440 bp, Homo Sapiens
  misc_feature (215)..(215): n is a, c, g, or t
  misc_feature (321)..(321): n is a, c, g, or t
  misc_feature (342)..(342): n is a, c, g, or t
  misc_feature (380)..(380): n is a, c, g, or t
  misc_feature (412)..(412): n is a, c, g, or t
aaaaaatcatccacacacagatttgcctataatcttatggacttcacagacatcctcaagcgcatggacaaaaaccccaagattcaagaaaagccgtccacatggtcggcagctcaagaaagcctgccagttgtccaagcaatgcttagttacagttcccatgctgggagctgctctctagagaaatgttatttgcagatgtgcacctcgtggtnctgtgtgtgttgttctgcctgtgtccaaaatacatgctttttctagatgagagcctttcccccacaaagcagaaatgtgttctgtcatggggatttgatgatcatncaaattactttccctcaaganttgggctttcttgggcggattagttaatttcagttttncaaaacttttaggtaggggttaattcaacgtnaaaactgctttgggggccgttgccttgt

SEQ ID NO: 305883 - DNA, 180 bp, Homo Sapiens
  misc_feature (30)..(30): n is a, c, g, or t
  misc_feature (47)..(47): n is a, c, g, or t
  misc_feature (50)..(50): n is a, c, g, or t
  misc_feature (53)..(53): n is a, c, g, or t
ttccaatgtgaaatgaagacatgatggttnaaaaatgagaaaaagtnccnganaagctgtgggggtgcttcacttgccagctcatgcccattccctctgaaacaaggtgtctgttacccataaacaactctctgtaaagccccagggagaggtcacagctggacgtggctccctcaggct

SEQ ID NO: 305884 - DNA, 136 bp, Homo Sapiens
  misc_feature (63)..(63): n is a, c, g, or t
  misc_feature (123)..(123): n is a, c, g, or t
tggggtcaagcgattctcacctcaatcttccaagtagctgggaccacaggtgtgtgccaccanatctggctaacttttaaattatttgtagagatgaggtcttgctatattgcccaggctggnctcaaactcctgg

SEQ ID NO: 305885 - DNA, 360 bp, Homo Sapiens
  misc_feature (228)..(228): n is a, c, g, or t
  misc_feature (236)..(236): n is a, c, g, or t
  misc_feature (249)..(249): n is a, c, g, or t
  misc_feature (287)..(287): n is a, c, g, or t
  misc_feature (297)..(297): n is a, c, g, or t
  misc_feature (309)..(309): n is a, c, g, or t
  misc_feature (315)..(315): n is a, c, g, or t
  misc_feature (350)..(350): n is a, c, g, or t
caccttgggttcccatctcagaacctaaaatttttcccaaagaaattattttaccacttgcttctcctaactgcgtgtcatgaattaggatcacttaagtgtgagagttgcagtacattcttgaggacggttcatctaaaagtgggcaggtagtaattttaaggacctcgcactcccttataggatacacatccacaccatgtcacacaggttacatgggtgttttgntcatgggnaacaactcagggnttttcaaaggaccggggtttcctgttccccggcaagtnttttttaccntttggatttttnggtttntttcatctggtaaaaggggggtggggtggaaggcntttcccgtgg

SEQ ID NO: 305886 - DNA, 293 bp, Homo Sapiens
  misc_feature (94)..(94): n is a, c, g, or t
  misc_feature (196)..(196): n is a, c, g, or t
  misc_feature (208)..(208): n is a, c, g, or t
  misc_feature (229)..(229): n is a, c, g, or t
  misc_feature (238)..(238): n is a, c, g, or t
  misc_feature (247)..(247): n is a, c, g, or t
  misc_feature (262)..(262): n is a, c, g, or t
  misc_feature (276)..(276): n is a, c, g, or t
tctctgctagtcagggctctgaaaaccttccctaatgagcccttccccttgccggggtcacaggacttcagcaggctgtgcgcagggagccatnggcctgtgcgctgggctctgtgcacatccatctgctttgtgtcggctcacaaaagcacacggcaggaaaccagctgcagcgaggctgaacactgggaatctngggcttgggctncaaatctggttgcggctgctncggctgctnctgctgctnctgcttgcttcggtngggtcttcagcttnacacacaaacagctagg

SEQ ID NO: 305887 - DNA, 365 bp, Homo Sapiens
  misc_feature (298)..(298): n is a, c, g, or t
  misc_feature (308)..(308): n is a, c, g, or t
aataaaaataaattggtcctattttacagatgggaaactgatacaaaagagatctaacggcaggtagtaagattaaattttaggctattttcgaacttgggtcactattaaaaacagaatattaattcaggttgcttcgtaagtctcctgtctgctctttcctgcactgtgaagcatacctgcagtggcagaatttttcttaccaagttccttcctcctgcaatgtgggtactgggaaatttctacagtaaagtaatccagtcacactgaggctctccctttcttcattggacctggngtctattttnaaaacatggggctttaggggttttaccctctttccctggaaatgttctttggaggta

SEQ ID NO: 305888 - DNA, 412 bp, Homo Sapiens
  misc_feature (296)..(296): n is a, c, g, or t
  misc_feature (302)..(302): n is a, c, g, or t
  misc_feature (324)..(324): n is a, c, g, or t
  misc_feature (335)..(335): n is a, c, g, or t
  misc_feature (343)..(343): n is a, c, g, or t
  misc_feature (350)..(350): n is a, c, g, or t
  misc_feature (357)..(357): n is a, c, g, or t
  misc_feature (369)..(369): n is a, c, g, or t
  misc_feature (389)..(389): n is a, c, g, or t
  misc_feature (396)..(396): n is a, c, g, or t
tctgcagtagagcaagatggagagccatctggaattgacttccttctgtctttcttctgtgttcgcttactacttgggcccatgtgggaaaaaaactttaaaaggaaggaagtcttcttagggatccagttcaaagctatttgggggcatcaaactgaaactctcttctccactactcaagactttgtgcctcagtccaagtaggtaagagcaaaagggaaatgcatctctacacaatggcccatgggtcagggccaccagagcaagctggggcctaggatctccacctgtcagtngacttnggccatttcttaaggagggttnaaacagccagnttcgtttnagggctnttgaggngggttcttttgnatttcccctggaggacattngcctttnggtagggtttttcttt

SEQ ID NO: 305889 - DNA, 337 bp, Homo Sapiens
  misc_feature (239)..(239): n is a, c, g, or t
  misc_feature (277)..(277): n is a, c, g, or t
  misc_feature (301)..(301): n is a, c, g, or t
  misc_feature (324)..(324): n is a, c, g, or t
tagaaggggcagaaattcaacaaactttgcctaatctgaaagagacttcagtagaataattactctacttgattcagtatgagaaaggaaggagttattttgtacactgcagatattcatgtagaccaaaatatcatctccatcattaagtgtaggtaatatttaggggttatctcattcatttccatttgggtagtataggaatgcttaggatgataccttattactctaaagcagtnaggaatttcaacaggatacaataataatcttatatttnaaaattaatcatgggctgggcacngtgggttcacggcctattaattncccgcccttttgg

SEQ ID NO: 305890 - DNA, 398 bp, Homo Sapiens
  misc_feature (286)..(286): n is a, c, g, or t
  misc_feature (302)..(302): n is a, c, g, or t
  misc_feature (348)..(348): n is a, c, g, or t
  misc_feature (365)..(365): n is a, c, g, or t
  misc_feature (384)..(384): n is a, c, g, or t
aacaatggataacaatttagtataagtatgccccatgcaactcaaatttaactgggcattttgtaattttatttggtatatgtggcaaccctaatccctatacatgcatatgttcatatctgtgtaacatagttcttgggctaaatagttactgacatctgtagtaagcctcagtacctttcattcctaaaaccccagttcaaactgggaaccaggatcattgtttctgtcatcattaccattctaggggaagtacaggggattatcttcccttccacccctgggnttcaacttgtgggggnaaaattcttggtactttacacaaattggtttccaatttttttaggnattatttactggggggnaaatattccccgggggttncattttaaaacccc

SEQ ID NO: 305891 - DNA, 125 bp, Homo Sapiens
tagggcttggcgtggggcaagttccaggagagcctggacccgtcactgcaacctggctcaaacctttctcttctaaaatgtggagaggcaaacataattgctcctgaaagggacaacgtaacatg

SEQ ID NO: 305892 - DNA, 374 bp, Homo Sapiens
  misc_feature (101)..(265): n is a, c, g, or t
  misc_feature (326)..(326): n is a, c, g, or t
  misc_feature (334)..(334): n is a, c, g, or t
  misc_feature (344)..(344): n is a, c, g, or t
  misc_feature (356)..(356): n is a, c, g, or t
agtactatgaggtaacatggaacaatacaaagtaaaaagataattggcaaacctagaaaaacatattcacatcatataacatcaattaaggaccaagaacnnnnnnnnnnnnnnnnnnnnnnnnnnnnnnnnnnnnnnnnnnnnnnnnnnnnnnnnnnnnnnnnnnnnnnnnnnnnnnnnnnnnnnnnnnnnnnnnnnnnnnnnnnnnnnnnnnnnnnnnnnnnnnnnnnnnnnnnnnnnnnnnnnnnnnnnnnnnnnnnnnnnntgttggtggtgcacacttgttggtacccagcttcttcagggaggctttagggcagggagantcgctttnaccccggggngacagaggtttncagtttagcccaggttcg

SEQ ID NO: 305893 - DNA, 169 bp, Homo Sapiens
  misc_feature (121)..(121): n is a, c, g, or t
  misc_feature (136)..(136): n is a, c, g, or t
gtaggtcctaggctccttgaggagggctaagagggattgcttggggtctggggagtttgaggactgcaggtgaggctatggcctgcaccagggggcactgcagccttgggggccaaccagnggtgagggggagggnaggatttatgggggaaaccttttttcctgaggg

SEQ ID NO: 305894 - DNA, 330 bp, Homo Sapiens
  misc_feature (120)..(120): n is a, c, g, or t
  misc_feature (132)..(132): n is a, c, g, or t
tttttaagggaattagaaaaattctatttttaggagaaagaggcaaattgtaagaaagcacatggacgtcaggctttcggaaggacagaaggaacctccgtttccaggggatgccctggngctcctgtgganccgcccgtgtctcctacgcctcctccgagaatggcttcgacttctagaagtggaagtgcttggggtcctcagcaagtccctctgtttcgaatgaggaaatggcccctgggtggttatgtaagtcagactcatgaatctttgagcttggcaacttaaggagaccttgagttcaatccttccctgctctcgtgagaaggc

SEQ ID NO: 305895 - DNA, 413 bp, Homo Sapiens
  misc_feature (43)..(43): n is a, c, g, or t
  misc_feature (46)..(46): n is a, c, g, or t
  misc_feature (63)..(63): n is a, c, g, or t
  misc_feature (125)..(125): n is a, c, g, or t
  misc_feature (164)..(164): n is a, c, g, or t
  misc_feature (373)..(373): n is a, c, g, or t
  misc_feature (395)..(395): n is a, c, g, or t
ctcctgtggccagcagaccttgatttctgttgctaggaaaccnggnaggtactttttagtccncatagaaaccatgttttaatgcaatcactttcaatgactctttattggctgttttgcttggngccaactcaaagaaggttcacatcaaacccttacaaggngaacctgatcgtgtcaaactgcgctagcctgggggactttgtgggaagtgcctcaggggtttcttgggggatagggaaagggtggggagccaggggggcaatacccctccccacttcaagcagagcaattctactttgatctgctttaatgttagggctttctttgaaggaaaatgctttatggggaggggagtatttgaaaagccttnaccctaatctaacacaccaggnaagctgaatttctgcgga

SEQ ID NO: 305896 - DNA, 200 bp, Homo Sapiens
ttttgctaacacccagttctgcctgctacaccacctgggaattgaccatccagctgtgttctctctgcctctggccagtagcaactgacctgccctattcctggctgatctcttgctgctgaagttcaaggcgctggacacactaccctgatttttgttgcacctggcctagcctcattaacttggcaattagttggtgg

SEQ ID NO: 305897 - DNA, 366 bp, Homo Sapiens
ttaggtcagcacctctttctaccttactcctttcagggatgttatatcatgcatttgtaacagttaagattcttttgtcactgtttgcattgcatcctggtatcccccaacctcctaattgattgtttaaaattttgcatacatcaggttcactttttgtgcacttctgtggggttttgataagtgcataatgtcatgtatccaccactatagtattatggcaggaacagtttcaccaccctaaaatatcccttgttttaccctacttcaatccccttccacttctttccggaaactttggggtaaccacttatttctggtttttctggttcttggataacttttggcttttttctagggaatggt

SEQ ID NO: 305898 - DNA, 303 bp, Homo Sapiens
  misc_feature (249)..(249): n is a, c, g, or t
  misc_feature (269)..(269): n is a, c, g, or t
atgagccacagcgctcggcttgttttatgggttaacagtaattagaatatttaatgaattctggattttaacaacagatataaggtaataaaaaggaatatgacccttttaacttaaaaaagcatgaaagtctgcagtctaataagaaggcattttttttctgtaaagaccaaatctggcaaatcatggaacaatttaggatattataggtttctttcctggagggggggattttacttcacatatccntttgtcttttcttgaggggngattttggcagttaacttattttaggtagggggg

SEQ ID NO: 305899 - DNA, 268 bp, Homo Sapiens
  misc_feature (157)..(157): n is a, c, g, or t
  misc_feature (206)..(206): n is a, c, g, or t
cttatcagtcccttgtatttacctggtcaccctccatctctgagggtatgggggccagatggctcttgctgccctgatgttttggggggtctgcctgggcccctcctggtgtgtcacacgcgtccagtcctggccccctaggaggcagcatggcagngactgggaggccgagcgggcccagctgcagagtcagctgcagcgttganagggaggagctgctggcccggcggaaggcttgagaaggaacagctgagtgaggagatttgct

SEQ ID NO: 305900 - DNA, 281 bp, Homo Sapiens
acagagcctggccaccgggagacagtgggctcgcccttgtcaaccagctcactgcagctgcagacttggggttcagggacactaagaggaagactgagggaagaagagacgaggcctctgggacctcctctggaaaacgtggtccagggaccaggggcactgtcccatgctccctcccgttggctctgagcctcacatgggcatgctgagtgctgggcacagaggccttcagtggcacttcgggagaacgagttcaggagacacaatttccgtcccacctt

SEQ ID NO: 305901 - DNA, 199 bp, Homo Sapiens
  misc_feature (93)..(93): n is a, c, g, or t
  misc_feature (158)..(158): n is a, c, g, or t
  misc_feature (168)..(168): n is a, c, g, or t
  misc_feature (176)..(176): n is a, c, g, or t
  misc_feature (181)..(181): n is a, c, g, or t
tgaggccaccgcacccatccagggaaggcatctttcgcttcaatgttcaaacttccccaaacaaggacgggcaccattacccttgtttatgtncaattaattatttgaatgtagggtaatttacatatggatatggtaacttatttgggggggacatnttcatggggnaatcaggncattnggtaggttttttttcact

SEQ ID NO: 305902 - DNA, 353 bp, Homo Sapiens
  misc_feature (278)..(278): n is a, c, g, or t
  misc_feature (328)..(328): n is a, c, g, or t
tctgcccttgtttctctgtatacatgaggttgggtgactgtcctagatatttacatgcctatttcaggcagctcttaactagcatccctgaagttcaatcccaaactctcaagagaggaagaagctgattggctcatgtgctcagctttgagcacatgtccctccttggtccagtcagcactggccaggggaagatcccagcacaaatatgggtgccatggatagcgttgtggataggggtctgataatacttgtcaaggaagaaaattgtggggctnggagttctcttaaaattggaccacttacctaaaatttgaccactaccctnatggatatcttaggcaggtctgggg

SEQ ID NO: 305903 - DNA, 388 bp, Homo Sapiens
  misc_feature (202)..(202): n is a, c, g, or t
  misc_feature (218)..(218): n is a, c, g, or t
  misc_feature (238)..(238): n is a, c, g, or t
ttcatcccactgatcacccctttggtaccaatacacaataagatggacacaaaaactatctttctcttgaacacaggcagctctctccagctcatcctgaactcaagtttctagcagaaacaccttaaataagagctcagtgagggcaggggatagctcttagctgaagcttggccaacaaattagctgccagataaaaggngacaggtacctgtggnagaagccatctcagtagccntgggtctgtgttggttcctaattctctcctccatctaattaggcatttctcaaaagtcagtgctctacaattatcaggggtatcttgttaccacggggacttttaccacaatagggcctagggggaaggggcctgaggagtcttgcattt

SEQ ID NO: 305904 - DNA, 300 bp, Homo Sapiens
  misc_feature (135)..(135): n is a, c, g, or t
  misc_feature (242)..(242): n is a, c, g, or t
  misc_feature (275)..(275): n is a, c, g, or t
  misc_feature (283)..(283): n is a, c, g, or t
acatgcagcctagtatgtatttccttaatggtcaattaacgctgaaatagtcttttatagatttttgggactgatttttcatttgtggagagcttaaagaaagcaaccaatttataaaatattttataagatganccataagggaaataatacttgtacatttgggttcaccagagctggggttaacccaaactatgttgtaatccaaattgtgaggtatagggaaggtttacctcctcccnggcggtttcttcccaccacccaaaccattcggntttgcggnttttcttccccacccct

SEQ ID NO: 305905 - DNA, 424 bp, Homo Sapiens
  misc_feature (220)..(220): n is a, c, g, or t
  misc_feature (283)..(283): n is a, c, g, or t
  misc_feature (289)..(289): n is a, c, g, or t
  misc_feature (318)..(318): n is a, c, g, or t
  misc_feature (330)..(330): n is a, c, g, or t
  misc_feature (356)..(356): n is a, c, g, or t
  misc_feature (390)..(390): n is a, c, g, or t
ttgtactcttccttcccttgtgctatttggttggcaaatgtcattctgggaagaagctgggaaatgctaagaggctgaagtactcaaaggtcagttaggcttggctaagggccctaaccaagctgtctggagtttgggagtagggaggagagaggagcagaggactcccaggactgtggccatagaggaacgtgctcctggggcacaagtccaacagctncagctgcaagaaacagaaagcaagaaggttctcaagtaaatccagttgcctcttgaggtcttncccttnaagcttgccttcaaggcaaccaagtcttncttggtcctttncttaaagcatccgggtacaagggttnccccattacccaaacttaggttcccgatttcctntttttttcagcattttcaagtattttttcttgaa

SEQ ID NO: 305906 - DNA, 279 bp, Homo Sapiens
  misc_feature (264)..(264): n is a, c, g, or t
cttttaaaagtggtaaacagtaccatttcgttcaagtttagccagtatgacctaaagtgtcacaaaagcatcaccgtaagaataatgtaagaatgctatcattttataaatcccattgttctgcctatatgcccgtggacgtgttcagtgattatttacaaatgtttgacctgccctgctccctactgaggattcttgagggaagtccggggcttcatttttatgggccacatctctactggcttttccctcaggcttcactgnccttttcacggattt

SEQ ID NO: 305907 - DNA, 374 bp, Homo Sapiens
  misc_feature (17)..(17): n is a, c, g, or t
  misc_feature (72)..(72): n is a, c, g, or t
  misc_feature (98)..(98): n is a, c, g, or t
  misc_feature (125)..(125): n is a, c, g, or t
  misc_feature (285)..(285): n is a, c, g, or t
  misc_feature (310)..(310): n is a, c, g, or t
  misc_feature (333)..(333): n is a, c, g, or t
  misc_feature (344)..(344): n is a, c, g, or t
  misc_feature (351)..(351): n is a, c, g, or t
cacagtccggcctcaancgacccagacttacgctgctggtcaaggctcgcagctaaagacagcggaataganccaaggagatggagctggaggaaggnacgagacactcatctgctctgccgcgncatccagaccccaaactcagctggaaccaattggggggagccgcagagcaatccccggacggagggttgggtgagagtctctgaccctgaaagttaccagcgccttagccgcgatggatcttctgttaagcttcaacccccacgggaacaagcgcatgtntttcacttttggcggcgttagcccnagacttccagggttgagttgccntattgggttgncgttagnttgggctcttcttcttgtcgttt

SEQ ID NO: 305908 - DNA, 417 bp, Homo Sapiens
  misc_feature (37)..(37): n is a, c, g, or t
  misc_feature (42)..(42): n is a, c, g, or t
  misc_feature (64)..(127): n is a, c, g, or t
  misc_feature (147)..(194): n is a, c, g, or t
  misc_feature (290)..(290): n is a, c, g, or t
catccctgctttctctctttccccatcacttgtcaanaaccnacttctctacagttttacttannnnnnnnnnnnnnnnnnnnnnnnnnnnnnnnnnnnnnnnnnnnnnnnnnnnnnnnnnnnnnnnccctgctggattgccagttnnnnnnnnnnnnnnnnnnnnnnnnnnnnnnnnnnnnnnnnnnnnnnnntgtctcactaacataatcgtgagcagaggcaaggattgggctgctcagaatatttttctggagctctagcgggtgcctgggatgcagggggagggnatttcttgggtcagaggtgagcctgggaaggccaagggaagaggcaccagccagacagtgggcagaatagggggagcctttaaccgccaaggcaagggctattgtttttttcttcaacctgtgtctt

SEQ ID NO: 305909 - DNA, 161 bp, Homo Sapiens
  misc_feature (116)..(116): n is a, c, g, or t
  misc_feature (134)..(134): n is a, c, g, or t
  misc_feature (146)..(146): n is a, c, g, or t
ggcgtgacattttgttgcttcgggccattcagttatttttctgtttccttagtaggagcccaatggataatgaaggattaggctgcagagatccaaagtatcccggaaatctattnctgattttttggaaaagnatttaaatgggnttttcaaaatagttt

SEQ ID NO: 305910 - DNA, 429 bp, Homo Sapiens
  misc_feature (295)..(295): n is a, c, g, or t
  misc_feature (301)..(301): n is a, c, g, or t
  misc_feature (320)..(320): n is a, c, g, or t
  misc_feature (378)..(378): n is a, c, g, or t
  misc_feature (383)..(383): n is a, c, g, or t
acattttagcaaactaaagcagaacaaagatgagttttattgcatttatttctactacgtgatttaacacatcactttttgcacacatggtgctttttatttcaacactatttaaaatgtattaatcatcagtcatcacaggagccactgaaaagctaattttatatgggaattttaacaacaaggataaaaacatgtggcataatgaactatcaagtcccggggcacaaacatgggttttcacttaggcccttattaaaaattctggggagggggttgttattctctccatttncacagntgaggaaacggggggcacngagagggttggttttatcctctggccaaaaaggctccgggggcccatgttgtgggggntcccnaccaatccttctggggtagggaccaacgttggttacgtggtttacc

SEQ ID NO: 305911 - DNA, 445 bp, Homo Sapiens
  misc_feature (26)..(26): n is a, c, g, or t
  misc_feature (29)..(29): n is a, c, g, or t
  misc_feature (118)..(118): n is a, c, g, or t
  misc_feature (234)..(234): n is a, c, g, or t
  misc_feature (242)..(242): n is a, c, g, or t
  misc_feature (352)..(352): n is a, c, g, or t
  misc_feature (363)..(363): n is a, c, g, or t
  misc_feature (383)..(383): n is a, c, g, or t
ttgctacttcaaataacaaactaaancantgcctttacacatacatctttaccaacttgtcaaattatttctttagtacattcttgcattgggtgttgttggatgaaaagctataaanatttttaatgttctgaatatatctgcttaaattctgttcctaaataattgtatcaaattatattcccattctatttgacaaaaatatccatctcatcacagtcaatgccattgagnattgtagnctttcaatcactgtccctttaataggggaggggtataatattgcaggttactttaatttttatttttcatgactacaggaggttaaacattttgcatcctttataaaccnactggggaggnggttcatctccctttgaggntggtttctttcttcaaaacctatccattcccttacatattagggggtctcatttgtgggggg

SEQ ID NO: 305912 - DNA, 106 bp, Homo Sapiens
tgacacttggggcccgacctctgtaactttttatattactgtttatcatgagtacggacaaaaaaccactttttcaatatctttttctcaggattttcaattatta

SEQ ID NO: 305913 - DNA, 429 bp, Homo Sapiens
  misc_feature (358)..(358): n is a, c, g, or t
  misc_feature (368)..(368): n is a, c, g, or t
  misc_feature (377)..(377): n is a, c, g, or t
  misc_feature (398)..(398): n is a, c, g, or t
  misc_feature (409)..(409): n is a, c, g, or t
  misc_feature (414)..(414): n is a, c, g, or t
gactccctaagccagtgcattaaagagaaggctgctaatcagctaaatagaaagtggaatctgttcacatgaagtctctctttccttccatcaccagagggacaccaccgtgttctgaaatacactcttgacatcgtttggcaggaaaccctattttgctgaacatgattcatcccttaggttactgtttttaatattagaaagtgagctttcaagtgccaaacaaattttgcagcaggggacaaaagatattccaagtggtctccctgggaccttctaccaactgcgggccaccaaatggcttaaaaggaaaaccttcctgtgggtgcttcaggaaattgaagcaggagacataggntacatccaantatttaccntaattacagggattttgtttntttgagtcttngggtntttttggggttccgg

SEQ ID NO: 305914 - DNA, 287 bp, Homo Sapiens
atgtgcttgggaaaaactctgacatcttaagaaatgatgttactcatggctgacgcatggctggcatatgaatccatatgaatatgatatatgaatccatgtcacaggccctccctctttccataatagaacacttccaaaatggcttcccatctcttgttaagccatcgttagctccctgataatattaacccatgaataatggcctctagaatacattttttattatgatgaaaggtaaaatttcctttgctaaaaactataaaattttcctttgctaaaattat

SEQ ID NO: 305915 - DNA, 313 bp, Homo Sapiens
  misc_feature (12)..(12): n is a, c, g, or t
aagaaaatcagnttcagattactagtaattatttaggtactaattaaaaaataatgaatctcagttactaaagacacaaataagggagttatatgaaactgtgcaatagtcattctatggatagtcatatttaaaataaaatgaaaagagactaaaatatgcgtttgtgcttttaactctgaaaacctgaatacctattcaactgttgattctgagtatttacagaactttatttcttctttgggacatgctttggcagtttttacctaatgtatacacatttttgccttgttcttaataattgaaaaatctg

SEQ ID NO: 305916 - DNA, 448 bp, Homo Sapiens
  misc_feature (285)..(285): n is a, c, g, or t
  misc_feature (335)..(335): n is a, c, g, or t
  misc_feature (344)..(344): n is a, c, g, or t
  misc_feature (357)..(357): n is a, c, g, or t
  misc_feature (380)..(380): n is a, c, g, or t
  misc_feature (396)..(396): n is a, c, g, or t
  misc_feature (418)..(418): n is a, c, g, or t
  misc_feature (437)..(437): n is a, c, g, or t
cccacaagtgtcaaatgcagtagtgagaaggggggaagagtagaataaagagttggatgcgtaactgactgtgaataatcaattcagttgactcactgccttcagaccagtcccacccagcttcttaacttctgaaccctccagtcaacatgatgtcaatgcccaaagaaattcttgaggccaaggaaaaggattttacagtattcacttcaggcaaggaaggaacaacaggggttaggattatgggactggggtttggattaaacattaatcaggcttttaggntgtttagggaattttttaaaaatatttttttctttcaacttataggggcnttaggtttnctggaaacttacngggattgtttccaggcctaccanaaatttttgggacccntgtggtaccccttcggctaccnttccaattttgtagggggntttttaggccc

SEQ ID NO: 305917 - DNA, 509 bp, Homo Sapiens
  misc_feature (340)..(340): n is a, c, g, or t
  misc_feature (353)..(353): n is a, c, g, or t
  misc_feature (369)..(369): n is a, c, g, or t
  misc_feature (393)..(393): n is a, c, g, or t
  misc_feature (403)..(403): n is a, c, g, or t
  misc_feature (419)..(419): n is a, c, g, or t
  misc_feature (451)..(451): n is a, c, g, or t
  misc_feature (460)..(460): n is a, c, g, or t
  misc_feature (465)..(465): n is a, c, g, or t
  misc_feature (478)..(478): n is a, c, g, or t
  misc_feature (483)..(483): n is a, c, g, or t
  misc_feature (492)..(492): n is a, c, g, or t
atgggatttgataagatctgttcttttaggaagacctctctgatggctgtgttagtgatttggggttgtggatacagcataatatagcagtgatagcagagagaacaattgggaggcaacttggaattgtgtcaactctcatctttaatgatagctatttttaaatattttttcaataattaaaaatctcgaagtttttccaatcagatatcctcatcttcctgagttcttatttccagtcagggaaacacattttctcctcatttaatttggaactcagaggattaaaataccctgagttttttctaaaagttcattactcattctatccttgaggtgnagtgggcttatanaaaatgcattactttnaaaataccaaaattttggaatgtncaagtgtacngtaggcaaacactgtnaggataagggctggtctcacaatggggggtcncgtaagggnggatntttgggggggccngcccncactggagnggtccggggtggttggg

SEQ ID NO: 305918 - DNA, 553 bp, Homo Sapiens
  misc_feature (77)..(77): n is a, c, g, or t
  misc_feature (184)..(184): n is a, c, g, or t
  misc_feature (186)..(186): n is a, c, g, or t
  misc_feature (188)..(188): n is a, c, g, or t
  misc_feature (372)..(372): n is a, c, g, or t
  misc_feature (424)..(424): n is a, c, g, or t
  misc_feature (467)..(467): n is a, c, g, or t
  misc_feature (483)..(483): n is a, c, g, or t
  misc_feature (499)..(499): n is a, c, g, or t
  misc_feature (506)..(506): n is a, c, g, or t
gcagaatctcctgcctaggggatcagagcccagatgagtgcctctaaacagggctgaagagaaggctgcaggctggnaacagaggtgatagaattagatttcagctttgtgtctcagtgaaggaaacacaggcatccattaaaagcaccttcccttctggccttgctgctgcggagagcggcantngncaaatccagcccctacctctcctcactcatctgttcacagcactgtggccttcagaacagtgtgtcagaaattaccttcttccataactgatcttcaggcctgaaaaggaaaaatttccaaggcatagatctcctgaaatccctaagggagattggggcaaagagccttaagggaaaacagganttttgcatgtttgtttcctcatggcctacctaaaaattgctggttggcaccngggcaagttccttggtttattgcttcagttgaattgggttttnttagtttcccagcacntgcattattgggagtncccggcntgattttcatgcccgcattttttatttgggcagggcagcttacctta

SEQ ID NO: 305919 - DNA, 415 bp, Homo Sapiens
ggacccacacatagatcctcacaaatatggccaattgattgttttaaattgcggtaaactacatgtaacataaatttaccatcgtaaccatttttaagcatacagttcagtatggtttaatatattcatattgttgtgcaactaatttccagagctttttcgtcttgcaaaacaaactcgatttccgttaaacaacaactgcccctttctcctttccccagctcctgggcaacccgcattctactttctctttctataagcttgactatgttgggtgcctcatataagtaatcatatagtatttgtgactgggcttatttcacttaatgtgggtgtcctcagggttcatccatttgtcaggaaattcttttcccttttaaacactggaattaatattctctcgtttgtgtataca

SEQ ID NO: 305920 - DNA, 298 bp, Homo Sapiens
ccatgctttttggatgtcaaggcgctgttggaggctgggtgtgacagcacagagccaggttgtcttgtggaaaccacagccacgggtttgccactggcttcagcatggcctcactgccagtcccagcctggctgagggacaagatggtttctcttgggagttcctgagtgggagcacccttccagggtttttgaaagccagctgatctgtgggagccttgtttaagggactcaatacggtgtttggatattgatgtttttccttgagactgtcttgttccatcaataaagatggaaga

SEQ ID NO: 305921 - DNA, 187 bp, Homo Sapiens
  misc_feature (139)..(139): n is a, c, g, or t
  misc_feature (148)..(148): n is a, c, g, or t
  misc_feature (154)..(154): n is a, c, g, or t
caaccatggccggggtcgatcctgactctcaataggctgccatactaactcctcctatcttccgtgatatcattaggctgttccaaggtcattcaaattcactctttattctggtaactgaaacaggggcccaagggtngaggtaagngatatnttattcaaggtaggggggggcatttacagtgaa

SEQ ID NO: 305922 - DNA, 300 bp, Homo Sapiens
  misc_feature (20)..(20): n is a, c, g, or t
  misc_feature (259)..(259): n is a, c, g, or t
  misc_feature (282)..(282): n is a, c, g, or t
gaattttaaaatatcttggngttaaaataatcatcagtacaagcatatctcagatatatttagctccagatcagcacaataaaacaaatattgcaataaagtaaagtcacacaaattttttggtttccccagtgtatataaaagtcatgtttacactttactgtattctgaatgtgcaaaaacttgtctaaaacaacaatgtatataggtttaatttaaaaatgctttattgcctaaaaaaatgcctaaaatcatctgnggccttcattgaggtgggggggnctttttgctgggggggtc

SEQ ID NO: 305923 - DNA, 270 bp, Homo Sapiens
  misc_feature (137)..(137): n is a, c, g, or t
tttcattaccagctgcccattaataaccatcaaattagaagtgtctctagcagcatgacaatttagtgaggggaataagaacagaaaatcacaaattgttcagaaaagttgctgcatagcgggcctcctggggccgnggccgaatgccccttgggtgtttagttcaaggccatggggcttctcttgggtgacatcacttctaacataggatactgtgtaattcagttacacaaaagcagcccaggacaaggcagggttcacattcatctc

SEQ ID NO: 305924 - DNA, 362 bp, Homo Sapiens
  misc_feature (170)..(170): n is a, c, g, or t
  misc_feature (218)..(218): n is a, c, g, or t
  misc_feature (262)..(262): n is a, c, g, or t
  misc_feature (284)..(284): n is a, c, g, or t
  misc_feature (303)..(303): n is a, c, g, or t
gagtgtaggagaggggagcataggggatttctgggagataaaaccatttatgcagaaagcaaggaagtataataggtgaaaagcgttccggaactacaggtggtgtgggtgaggatggctgcacacaggtcccttgtaggggagtggcaagcgatgaggctgaggaggtnggcagggcttggctgccacatcaaagggcttataccctgaagccagtnaagcagaagcccctgtaatgttattgttttaacttcttattttnagataatttcagacttaaaggnaagattgcaaagtagtccnggaaattcctctgtaccctttaacccaaattcccccaatgtttaaattcccattttttc

SEQ ID NO: 305925 - DNA, 357 bp, Homo Sapiens
  misc_feature (40)..(40): n is a, c, g, or t
  misc_feature (315)..(315): n is a, c, g, or t
  misc_feature (338)..(338): n is a, c, g, or t
tttagaatttttccagcatttaaatctataagcacaaaantgtaaaccctgcttattgattccaaacatagcctaaatggctcttctgtcttctctactcctcctctcactgccttaagatcagggccccgctcttgaatgaactactgtaagtaactttttccctgttctcacatctctctcacatccaaacatttcagagtaatctttctaaaaggcaaatctgtccatggcactctcttgggaaaatcagctagtagaattgtttcagttaacaagcatgctaaaaattaggtaaggcaaagggatgagggngaaataggggtatttacataggnatctttcacaagggcattt

SEQ ID NO: 305926 - DNA, 330 bp, Homo Sapiens
  misc_feature (206)..(206): n is a, c, g, or t
  misc_feature (241)..(241): n is a, c, g, or t
  misc_feature (274)..(274): n is a, c, g, or t
  misc_feature (304)..(304): n is a, c, g, or t
  misc_feature (315)..(315): n is a, c, g, or t
cttgataactccataaaaagacttggattattactgttcccacttcacagataagaaaaatgaggttcacagctagtcaatagaagattacatcatgaacccgtttgcctttaaggtgtgtcttctgtgaacacccttggagatggtttgcctgagacttggggaattcttaacatgtactgtgagcacaggtggggtctgtgccnatctctcccggcttccctgcacaagttccctgggnaactgagggtcacaccccaaacacatttttccnctcatggggggagggctcaggcctcagggnttttatggcanctgaggtcaggcttg

SEQ ID NO: 305927 - DNA, 329 bp, Homo Sapiens
  misc_feature (283)..(283): n is a, c, g, or t
  misc_feature (300)..(300): n is a, c, g, or t
tactggtcacagaagtcttctatgctgattgttttgtggtgtgagaacagaggaaaaatagtttgagcactttccactcaactattaaggaattgaatacataattttaaaactcccccaaaagaaatctccagacccagatggttcactggagaattctaaaaaatgtttaaaaaagaattaactcaaatttttaataatctctaccagaaaacagaatagggaaaggatacttcccagttcattatataaggcagtattaccccgataccaaaaccagganaaagtactggaaaaatnaaaactggcggacccattatccctcctgg

SEQ ID NO: 305928 - DNA, 410 bp, Homo Sapiens
  misc_feature (84)..(95): n is a, c, g, or t
  misc_feature (341)..(341): n is a, c, g, or t
  misc_feature (347)..(347): n is a, c, g, or t
taagtggaaataaccaaaagttgtttagtgcccaggtgtgtgacccaggagactgagcaaactgagtaggtaatagcagcaccnnnnnnnnnnnnggtccaaaacaaggtgtggcaccaaattaagaaattgatttccttgtttggtgtataatgaagtctaagatcaattcataaggggaagtaaagtccaaaaatgctttgagcaaatttggttttgttggcctaggtgtgtagggtccactttttgaatgtataggattttgcaggtgaattaggaagcaaatgatatgtgattaggaggccaaaccatttacattgcagagttttgcctttcctttncagganaaaataaagttgagcccggtgaggctcttcacttgccttctttaggtcctgggagttttgatg

SEQ ID NO: 305929 - DNA, 437 bp, Homo Sapiens
  misc_feature (306)..(306): n is a, c, g, or t
  misc_feature (331)..(331): n is a, c, g, or t
  misc_feature (386)..(386): n is a, c, g, or t
  misc_feature (405)..(405): n is a, c, g, or t
  misc_feature (417)..(417): n is a, c, g, or t
  misc_feature (424)..(424): n is a, c, g, or t
tggggtctaattaacgaggagatttgccttctctgcctattcctgtcaacttatttcaattcatggggtcagtagttagattcaaagtcagctgactctattcttcccttttcctagaaatcacatgcctattgttaagatgctggatcattaaaagtcagaaccacagagcatcagtgctgcctactgtagacgcctcctcttccagctcatggggctggatgagctcatcctaattacatgggaaaactgaaggtcagtgcatcaaattaatgcaggcagcattatttcaaagggggcgcatgnacctcccctccctatttacaatttnggtcagtgaaaatgggttgttcttcttcccttgcttgcccaatttttgttcaacngggcctttcaggccggagnaccatttggggngttactnggaaaccttgtta

SEQ ID NO: 305930 - DNA, 407 bp, Homo Sapiens
  misc_feature (264)..(264): n is a, c, g, or t
  misc_feature (371)..(371): n is a, c, g, or t
gcagtgtcagttctgcatcaggaacccctcgcgcttaatcctttgatatttttcaagccatgagaaaaatgaagtggacttaccagggtccctccagtgacctagtggatgttcttacaggactgccgtgtgccactggctgtggcttccctgggtcctgtgcttggccaccgggagctggcatctccaaaatagagcctccttagcctgtgcaggtgggctgtcttccaaagtcaccacaccagtgacttgtgctgtgcgganctttcctcaccagggaccactgggcttgctcctgtgggctagaagtcacaattatagggcttcatttgcaagagccagcattttgagtttcttcttggggcaacttnccactgtggcatgtgttgaccttaaattgttttgtg

SEQ ID NO: 305931 - DNA, 393 bp, Homo Sapiens
  misc_feature (300)..(300): n is a, c, g, or t
  misc_feature (317)..(317): n is a, c, g, or t
  misc_feature (343)..(343): n is a, c, g, or t
  misc_feature (381)..(381): n is a, c, g, or t
tgagacttggacttaactcttcatcaagggcactgcttttcacacaaccaggctttatgacgaaaacgtagaaattaattgctttctggtcttgtttcattttttttctctagattaaacctcatgcatttttaaatcctctattttttgttggtgacaaacacagacaagctgacatctgtttttcatggtaaatcctttccctgttaactaataggaacaataagtcattcatttatagatttactaaatttgtaagtttctcatatgtatcagggttatacaaaccacacctaaggnggtctgctaacttctgnaggcactccccggccacttttaggtnacatttttatggccaggtcaatgtgttggtccgtgggntggatggcttac

SEQ ID NO: 305932 - DNA, 373 bp, Homo Sapiens
  misc_feature (286)..(286): n is a, c, g, or t
  misc_feature (346)..(346): n is a, c, g, or t
gagtttttaaatgttgaacacctccaacaaaatatgcttcctggacttccaactcaatgcatggaaagtgacatcttcatgatctccttaccccttgcccaaccacccttgccttcttgaattgcctttatatgttagtaaaactagtgggttctgtctcaaacttgcttatacatggagttacttttgagtcctctcctccatcctaggcttgcataaatccaactcatgctttgaattcgtattgacactgtcctaggctcaggacctagttaggctttcacgngggattattggcattaggcttgttaggccgtcctccttcccctggccacctttccacctncaatacttttcttactttctgttgtag

SEQ ID NO: 305933 - DNA, 132 bp, Homo Sapiens
  misc_feature (114)..(114): n is a, c, g, or t
atgagccactgagcctgggcctatttcactaatgataattcctattaatgcttcatatcctattaggtacttgaataaaatcagattcaaggtaggcaatacggtttaaggctngaacctcaggaaaaacgg

SEQ ID NO: 305934 - DNA, 378 bp, Homo Sapiens
  misc_feature (276)..(276): n is a, c, g, or t
  misc_feature (284)..(284): n is a, c, g, or t
  misc_feature (319)..(319): n is a, c, g, or t
  misc_feature (354)..(354): n is a, c, g, or t
tttacacaggacttacttctgacttctgagatgcaagcccctagccctctggtcctttcctgcccacatccttcacccccgcggttaccttcagccagaggagaagggggacgggccagaaccaagggatggggaggaaaccactatggggcccaggaagcctccagagacagaccacccttgctaagaggctcaccccaccccaaaccccgtgccaacaccacttgaggagaagcatgtgtgtgtgttttaggagcagtttttaactttgacttnggcacacnttgacagacaacatttcacaaacaggacacacttnccttcacactctttctttattcttgcccgttaatngattttgaccagagggcacagttt

SEQ ID NO: 305935 - DNA, 287 bp, Homo Sapiens
  misc_feature (268)..(268): n is a, c, g, or t
ttcatttattttgaccttggagaatctgatgagtatgtatcttggggatgatcttctttgtgaagtattttacttgggttctctgcaatccttgaatttgaatgttgtcctctctaggtaggttggggaagttctcatggatgatatcctgaaatatgttttccaagttggttccattctccccatctctttcaggaacaccaatgagtcataaatttgggctctttacataattccatatttcttgggagggttttgttcccttccntttcattcttttgcctcta

SEQ ID NO: 305936 - DNA, 122 bp, Homo Sapiens
  misc_feature (67)..(67): n is a, c, g, or t
  misc_feature (79)..(79): n is a, c, g, or t
  misc_feature (94)..(94): n is a, c, g, or t
gtaggcatataaggtattaggcttaataattaataattaaaccaatggaaaatgaggggtgaggggnggccgggacctnttaacccttggactnccctttgtgggggaccctctattccggg

SEQ ID NO: 305937 - DNA, 358 bp, Homo Sapiens
  misc_feature (42)..(287): n is a, c, g, or t
gcagacttagaagcagatgtgaagcatcttaaaaacaactannnnnnnnnnnnnnnnnnnnnnnnnnnnnnnnnnnnnnnnnnnnnnnnnnnnnnnnnnnnnnnnnnnnnnnnnnnnnnnnnnnnnnnnnnnnnnnnnnnnnnnnnnnnnnnnnnnnnnnnnnnnnnnnnnnnnnnnnnnnnnnnnnnnnnnnnnnnnnnnnnnnnnnnnnnnnnnnnnnnnnnnnnnnnnnnnnnnnnnnnnnnnnnnnnnnnnnnnnnnnnnnnnnnnnnnnnnnnnnnnnnnnngttgggtaaggaatactggtacataatggcatagggaacataccaggcggttaaccaattccccaaaatgg

SEQ ID NO: 305938 - DNA, 300 bp, Homo Sapiens
ggagtaatactttgaaaatatgtttaatgttgtgaaccactctgtgcgcgagaagcaactccggctaaaatatatttaatgcttagagtcatttggcggtttcgaaaaaaagaaacttcttgttaatttttaacatttattgctgatcagtggctgctaaagtaactatcagtacagcatgatttatatttaggggacacgctgtgctggctactaaaacaattcatactcttctctcaagggctacacaaaaggtgtccataggcattaccccttggcaattggcacccacttaataaa

SEQ ID NO: 305939 - DNA, 394 bp, Homo Sapiens
  misc_feature (253)..(253): n is a, c, g, or t
  misc_feature (358)..(358): n is a, c, g, or t
acagttgtctacagtattcagtacagtaacatgctgtacagatttgtagctgaggagaaataggctatagcatagagcctagatgtgtagtaggctctgtcatctagatatttgtaagtatgctctattatgttcacacagtgaagaaattgcctaacaatgcaattttcagaatgtacccccatcgttaagtgatgcatgactgtattgaatattacccgggcaaacaaatactcttctactttgctggttngggatataaattgggtacaaccctttttaggaacagtttgggtgggttatgtatcttaagggcccttattaaacctacagggctctttcagctcccttttacccnaattatggtatttggaaccccttattctggtggccc

SEQ ID NO: 305940 - DNA, 380 bp, Homo Sapiens
tcccacactcaccattaataagactgctttacagaacttcacttgcttcttccacaagctactccaactctgatgttgctttttgagtccctgctctgttttaaatactgaattagacagctttgtgtacaactcaaagacagggaacaggttataatcttgtttgtatcacagtgatcccttatgggtgcttatctcttgggaaatccacttgtgaccttcaataactgggaccactgtccaaatgacattgctgaggtgactggaaatgttcattttctgttatataggtctctctattcaaggcctactggactgtggggcctatggtcatcacagttttggcttttgtgggaaccttttccattctttctgggggt

SEQ ID NO: 305941 - DNA, 436 bp, Homo Sapiens
  misc_feature (275)..(275): n is a, c, g, or t
  misc_feature (310)..(310): n is a, c, g, or t
  misc_feature (346)..(346): n is a, c, g, or t
tatgtatacatatacttcatacatttctttataaagtgagtaagaaatttatttcttagtaaatcggcttgaggtcatgaaaatgatgtatgcgaaggagttatgtgctacttttgattagtgagaagaagtggaggtgagcctaacacagtaagtaatgtgtttgtggctggcaaagcccaagtgcttcccagtgtattaaaggtgtaagggctttgctgtagtcgagtattccctatttgaagacgctgacagcaataactgggatttaaggnccaaagtgcccttccaactgggtatgactgagccntttcaggtaatactgcttttcttccaccagtttganagccggtaaaatgggatttttttcctattttacctgtgctggaaatgggatttttccctcctgccaattattttaaaaggtggtatccgg

SEQ ID NO: 305942 - DNA, 355 bp, Homo Sapiens
  misc_feature (327)..(327): n is a, c, g, or t
tggaagcattttgagaattcagaagtcgcttgggatcctgcaatatctcatccgtgtaagtctcagctgcagtttatccattgcttaaagtcatatgcgtggctaataatcaggaactagttactttcctattatattagctcaaagtattattccttaggtaaaaatagattgtgtctcaccacagcaccacgggagtttattccaggaacttactttccctcatatctcataatggaactaactgtatccatcacccaggaacaaggccaggcaaatggaccatggggcaaccttattttatggggtcttccccacttattcttnacaacttaactattacaggtctttcacc

SEQ ID NO: 305943 - DNA, 270 bp, Homo Sapiens
  misc_feature (260)..(260): n is a, c, g, or t
gacacttcaaaatagtttaaaaatataaggcacgaaaagagatgtgacagtgtaacagagaagagatagacttgtctctgcccttatgggagtttacattctactggggaagagaaaccagtaattacacagtcagttatttcatgggtaactgtgctcagtgttcggagggaaaaatgtaatgtgcctatgacagcatgtgccaaagacaaggggggcccccaagcttgggggcagctcagggagagggcttcttcttnttgggagggg

SEQ ID NO: 305944 - DNA, 304 bp, Homo Sapiens
ttaaagttagacctattcagaatgttgcagagtacagagaagtgagcttagggtgatcatttattttctctaatattcaaacctcaactcaaaacctttaggattaaaggcctgccactgtaagccaccctactctcatagaaagtgtataattatttaggaagacactatatcctccaaatgtacatgctttccaagagctgtgtgtccacactaggccttttgtctcttaactataggaaaggctggaaacttcaaggggttttgtaatagggtgctgctgccatggtacatacagaccttt

SEQ ID NO: 305945 - DNA, 323 bp, Homo Sapiens
  misc_feature (298)..(298): n is a, c, g, or t
ccattcataactttcagcatttaactatgagcatttcccttttatagagatttttttctatccattataaggattatagatttttatgatctaataagaattgaactgaaaaagaatgcttaaaaagctacttatagcagccaaatatttattattaaaatggggatattagaggcaagatttgaaaggaagtaaaattaaaccattacaataagttacactccttaaatgatggctcttgtattaggagggacaagtatctgccttacagtccccaggataaggccactgccccagnctttattatccctgtctttggggct

SEQ ID NO: 305946 - DNA, 370 bp, Homo Sapiens
  misc_feature (350)..(350): n is a, c, g, or t
  misc_feature (358)..(358): n is a, c, g, or t
ctccactgattcaatagtatttagttttacgttgtttaaaaggaacattcaatctcctttgcagtcatagttcttgatttcatattactgaatggttgcattaaaatcccttttgactaattatgaggttgggaattctaaagtctgttgagcagacagcttgtgtcaagtgagggcagctgggtgatttctgggacactcttggattccatctgaggcttccttttccaggcacagccttatcctggaacacctgattttgggggtaacttcttattaaaggcccactgtgtgttattgtggggacacgggtctccggggggggttcccccccttgtggatggaccacnagggatgncctccggggttt

SEQ ID NO: 305947 - DNA, 309 bp, Homo Sapiens
  misc_feature (146)..(146): n is a, c, g, or t
  misc_feature (157)..(157): n is a, c, g, or t
  misc_feature (209)..(209): n is a, c, g, or t
  misc_feature (221)..(221): n is a, c, g, or t
  misc_feature (232)..(232): n is a, c, g, or t
agttttcccgatggaattagttaactccttcaaaagtaatctatttttattcctgctcatttgactgttgtatttctacacgtacatgcttaattgagcaaagtctgctggacattttctctacagaggtaacactgcacagcttnttgaccggaangaacagcaaccatgtcgccaccattgcggtaccctggacatcagtgggctgnacatggtaaatnggtcatggggnaacaacagggggtgaggttccaatgctggggcccggggcggcacaggccacattacagggcgggtccttctatgggg

SEQ ID NO: 305948 - DNA, 288 bp, Homo Sapiens
ctcaagataaagcttttccactcttctgtctgcttactgattcagggtggcaggcacaaaacaaaacgttccggttatattttccatcctgtttatatttaaattgggctgtttattctttaataaagtgtataactgttgggtctattaacattatggaatgtgggggattaagtgggttaggacttaggcagggaatttggaaaatcaggggtcccaaatgttacttaccctaggtacagtaggcggatttacttcttttaagggaaaactttccctaggttacag

SEQ ID NO: 305949 - DNA, 282 bp, Homo Sapiens
  misc_feature (121)..(121): n is a, c, g, or t
  misc_feature (255)..(255): n is a, c, g, or t
  misc_feature (260)..(260): n is a, c, g, or t
agctcaggtgatcctcccatctcagcctcccaagtagctgggactacaagagtgcacctccacactcagctaatatttttgtacttttgtggaaacagggttttgccatgttgcccagggntggcctcaaactcctggggctcaagtaatccacctgcctggggcctcccaaagtgctgaggattacaagacatgagccaccgtgcccgccttttcagggcctcttgactccatttctaaccttctgatgagggngtttnggaaattggaaaaacttaaaca

SEQ ID NO: 305950 - DNA, 385 bp, Homo Sapiens
acagctgctgctggttttgtgggttcctgacaagatgagtgaatgcctgcccatcaacccgttactcttcttttagctgtaaagtgaattctctggttgggtgcagtatgtgaggaggtcacatgatgtttatggcatttgagaattccatggatattgatggcaggagaggcatgatgggttagaaaagcaaatccaaatccagaacaagggcccaaaaggcacaggacaaattactgcccctctcagagccacaggtgtagacaggtgaaaacactgggacagtgagtgagctacccacacacgacccactggtgcctttcagagccttagcctgggagcgaccagtgttaccgtttgataatgggaacggcactgggccatg

SEQ ID NO: 305951 - DNA, 364 bp, Homo Sapiens
gttcttgctctaaccacaaacctttaatttctggctattatagtgttttattgctctcctagctatttacttaatggtaacagtagtaataatggctatcttttaatggtaatgggagcgcttagtttttgaccacttactgagtgctaagctctgttgttgagctcttcactgacactattttatcctcactatactgtgcaaagtagggtactattatcccatttaacatatggggaaactggaacttttgagtgggtaaaataacttgggtgacagtccacacagccaggcaggaggtttaggtctggggtttccggggactaggggccctttaaaccccgttaacctttgatccttactt

SEQ ID NO: 305952 - DNA, 330 bp, Homo Sapiens
  misc_feature (254)..(254): n is a, c, g, or t
  misc_feature (290)..(290): n is a, c, g, or t
  misc_feature (316)..(316): n is a, c, g, or t
atccctgtagttgcctcagcagcccctcaagccacaaaaaccccagcaagtgacaaacctgcggttgatctttctgagcatctcctcacccttgatgagtacagtaacttctagtgatagtgaagaaagcagatcttcatagagttcttgaggcatatggcatggggactcttttgccttctgattttattagtgggcagacagcagagggaagaggctacattttttctttactgggcacctgcttggcgganacccagaggatgcttcaacaaactgttttggaatgnaataaatttatatagtgttaagacantctggaattttctt

SEQ ID NO: 305953 - DNA, 136 bp, Homo Sapiens
atcacttattccaaatgcaaaaataaggtccagggaagataattatgtaacttgttcatgattggagagctaataagtgtcagagatgaattgaaccaaagttggtgtgacaaagcctctgttttaagcaaaaggg

SEQ ID NO: 305954 - DNA, 339 bp, Homo Sapiens
  misc_feature (241)..(241): n is a, c, g, or t
  misc_feature (248)..(248): n is a, c, g, or t
  misc_feature (259)..(259): n is a, c, g, or t
  misc_feature (301)..(301): n is a, c, g, or t
  misc_feature (328)..(328): n is a, c, g, or t
agtaaagcttgacaataacttggctgcacaaatatggggttttaaaaggttgagaaacagtgtttcacacctgcctttctacactatgttattaactaattgaatcgagttgggaataaactaggttaggacttgtgttgcacaatgaggtcaaatgggctcaaatcaagggcttagggggcctccatggaccaggggggcttgaggctgtgtggatgtttagggttcaggggataccccngcacggnttcattcagcncttggggtcattgaggtcccctccagtctttgggattggggnttcccttttaccaatttttttggcccnttttaatcccc

SEQ ID NO: 305955 - DNA, 372 bp, Homo Sapiens
  misc_feature (239)..(239): n is a, c, g, or t
  misc_feature (324)..(324): n is a, c, g, or t
  misc_feature (345)..(345): n is a, c, g, or t
aatgagaggattttagggaatgtgtctaacctgcagcagtggaaccagggggaactgtgtcgttctataacagatcccttggtgtctttgttatagccagaattcagggttggatgaaccatattttcggacccattgtgatattttatttttcttgttctgttaatctggaatgttaggtgttaaaaggaagatggtagttgtaaaactagcaagacattttctaggactcctgactngtggcatgtggcatggcaaaaggagatagctcccttttctggctgtagggagacaacttctcaaggcccaggaaagccagcatgncccccagggagccacctttgngggaattggaggcccacatgagctacc

SEQ ID NO: 305956 - DNA, 300 bp, Homo Sapiens
  misc_feature (146)..(146): n is a, c, g, or t
  misc_feature (281)..(281): n is a, c, g, or t
aaattctgtaaagtacacaatttccaaaaaattatatagctgaaactgtataacaagctttgggatcaaaccctactgaatcttgtcagaatagaactcaagaggtgggaatagtgcatggcttgtccagggagcatccacggagncatccttggacactaggtggggtgctctatagaggggaatggagagccctgcccgatctagtgagttagttatgtggaggttggttaaaaaaacttctatatttgtttattttgcatgctactttacagttcttngaagtactttccaaattga

SEQ ID NO: 305957 - DNA, 367 bp, Homo Sapiens
  misc_feature (247)..(247): n is a, c, g, or t
  misc_feature (254)..(254): n is a, c, g, or t
  misc_feature (298)..(298): n is a, c, g, or t
  misc_feature (339)..(339): n is a, c, g, or t
  misc_feature (344)..(344): n is a, c, g, or t
gaatcctgatgtaaaagcataggttcttgcattactgagtaaacattgaattgggagcatcagtgtgtgaattcagctttgattttagacctgcagttcaattatgctttccttggaaaaagtatgtccaaaaacattaggaaagtagtgtgtattttcatatataacagtgtcaccagacccaggaaaagaaaccatctctattttattgaaagttggtggtagattttttacaaagtaaggaganaagaganaaactaaatagtgaattgataatgaataaagttaaacttaggantttttaccccaagtgtaggactttaaatgttgctttgagtntggcngggtcttggggaggattcccggg

SEQ ID NO: 305958 - DNA, 230 bp, Homo Sapiens
agaaccttataagtatgaaacagttcttattccagataatataagcattcactcaggtaatataatcacatctcagtggaacttcagctatagggagtagatcttcatagtaaattaacattctgaggaattaacaagtaactgcaatgccttccttcccagcctctctccatgaaaaagctgaggcaccttacaaagatcgacctaaaacaaggtgaaataagaagatg

SEQ ID NO: 305959 - DNA, 327 bp, Homo Sapiens
ttatgggtatagaagcaagggagactcaaacgtagaagacgaataagaatctgtaaaataaagaacccagataacagaatgttaggttttagatatagctttagaatgagtggctctttgatgactcttgccacttggaactaaaagacccagaagagcttattttgggtgggcaggcagacttgacagagcaaagactgtgagcttgccatttaccgtcataattgcctttcattagctgacccacttgattacactttttccacacaaaatcctttcccaagggcatctggcttttgccaatgggggaaatgcccttttgaaacc

SEQ ID NO: 305960 - DNA, 305 bp, Homo Sapiens
  misc_feature (169)..(169): n is a, c, g, or t
  misc_feature (215)..(215): n is a, c, g, or t
  misc_feature (242)..(242): n is a, c, g, or t
  misc_feature (266)..(266): n is a, c, g, or t
  misc_feature (281)..(281): n is a, c, g, or t
attaaaatatttatataaatgaaggaggaggtactatataaaacattagtttcattaaagtgcccttttgtttgcagccattcaaaataaaatgctatacaaaggtgtttcaaggactccacagtgtgctttctgtaaacaagattatatacaatagttcagtataggnttttattgccttagggtaactgctgaggaatgacagccaacagganttaaaaattaactatggggtgaccagntgtttttgggacatttctccattntttaggatttagganacttaggtaggttaggtccaattt

SEQ ID NO: 305961 - DNA, 142 bp, Homo Sapiens
  misc_feature (17)..(17): n is a, c, g, or t
  misc_feature (26)..(26): n is a, c, g, or t
  misc_feature (85)..(85): n is a, c, g, or t
  misc_feature (131)..(131): n is a, c, g, or t
ccagcagcatttggttnttgccggtnaggagcccacaggaggcggccagtggggttcctcgtacaagacgcagatggacgccgtnttccccaatgcggtagggacactcatagggggtccaccacagggtnagttcgctggg

SEQ ID NO: 305962 - DNA, 348 bp, Homo Sapiens
  misc_feature (254)..(254): n is a, c, g, or t
  misc_feature (299)..(299): n is a, c, g, or t
  misc_feature (316)..(316): n is a, c, g, or t
actggagctaattagcggctatccactttatatgaggtatgtgctcttcagttcaacatagtttccattacttcaccttcaaactatatccagaacccaaccattccacaccacttcactgttatctccttagttctaactgacatcacctctcacctgggattattacaaatcacctcttaacggaactctttgctttcttccattctccctttgggggatatactcttaatataatgggccagagtgatccngtttaaaaggctaaggttattcattttattttaaccaacattttnttgaggcacccttatantacccagccacagttttaggtgcttggggggt

SEQ ID NO: 305963 - DNA, 278 bp, Homo Sapiens
  misc_feature (200)..(200): n is a, c, g, or t
  misc_feature (206)..(206): n is a, c, g, or t
aaatgtctcaggctttatgaatcccagaaggatcaaaccttagaaatatagatgatagctaagaactaagaaattaattatagaaagagagacaaacctgaagcattgaaagtttctgtcaaataataaaaccagtcctcttcaaatcaaagtggtcgactagtaatttaataacctgctaggaggaaaaatgcattgcnttaggngaaaggtaacccaaacccagagtttgtattaatatccatggcacatgttccactgttaattccaaaattacc

SEQ ID NO: 305964 - DNA, 190 bp, Homo Sapiens
  misc_feature (69)..(69): n is a, c, g, or t
  misc_feature (99)..(99): n is a, c, g, or t
  misc_feature (136)..(136): n is a, c, g, or t
aagactataccataaggctcctaggagctggatagggcaacttacaataaagttttcaggggtacaaantcaatgttacaaaagttcaggcagttgacnttttaaccttaagggggcccaaaacagggaaccacanttcccattttttaccattagggcccaccaaaatttaaatttttcttggggggtt

SEQ ID NO: 305965 - DNA, 414 bp, Homo Sapiens
  misc_feature (57)..(57): n is a, c, g, or t
  misc_feature (60)..(60): n is a, c, g, or t
  misc_feature (329)..(329): n is a, c, g, or t
  misc_feature (369)..(369): n is a, c, g, or t
  misc_feature (387)..(387): n is a, c, g, or t
gagagcttgctatttcccaaagaaatggacacaattaaaaggtaataaaaattactnaanaaagaattcctaatccagaatagaccctcccatggaattgttcctagaacagcaaaggaggcaagctgtccctatcagagtttctgacccacattaaacaaagctctgtctgaacacaggggtttggggctcttctccatttcattgttcttgttcatgctttttcttcataaaagtatttttctgttggaagatgcagggcttcctcttttatggcggcaatggggaatgctctggggcagtactttatttcttacctggaacatggnggggaggggaggcctaggatgggcttgggccggagggagncacaggcccccacgttgnaggtttttcaggcacccgttccctttt

SEQ ID NO: 305966 - DNA, 387 bp, Homo Sapiens
  misc_feature (12)..(12): n is a, c, g, or t
  misc_feature (42)..(42): n is a, c, g, or t
  misc_feature (49)..(49): n is a, c, g, or t
  misc_feature (66)..(66): n is a, c, g, or t
  misc_feature (73)..(73): n is a, c, g, or t
  misc_feature (78)..(286): n is a, c, g, or t
aattcgggcacnaagggacaaatgtcatctctcttgggatcntaatctngaaggatcaaggcactnaaggganttttnnnnnnnnnnnnnnnnnnnnnnnnnnnnnnnnnnnnnnnnnnnnnnnnnnnnnnnnnnnnnnnnnnnnnnnnnnnnnnnnnnnnnnnnnnnnnnnnnnnnnnnnnnnnnnnnnnnnnnnnnnnnnnnnnnnnnnnnnnnnnnnnnnnnnnnnnnnnnnnnnnnnnnnnnnnnnnnnnnnnnnnnnnnnnnnnnnnnnnnnnnnnnnnnnatctcttggacatcatgaacccacctaccttgggccttcccaaaggcgttagggattaacagggcgtgacaacccaacggcccagccttcattaaaggggg

SEQ ID NO: 305967 - DNA, 360 bp, Homo Sapiens
  misc_feature (180)..(233): n is a, c, g, or t
  misc_feature (254)..(254): n is a, c, g, or t
  misc_feature (262)..(262): n is a, c, g, or t
  misc_feature (314)..(314): n is a, c, g, or t
  misc_feature (332)..(332): n is a, c, g, or t
aagctgtcatgggaatttgtacataactgtacagagtacatggtgtacttaacataattccagaattaccagtttttataaccatgataaaagccctctccaggggcttttgcctctttggccaaagtatcagtggccactcttagcttcaagaaggctgaaagatgggaataatcaagnnnnnnnnnnnnnnnnnnnnnnnnnnnnnnnnnnnnnnnnnnnnnnnnnnnnnnggactatggggtacttaccanaccgtgtnatgtactgtttgggtattatatttttttctattacatacatagctatggatnaaaacttaatttattaangggggcacagtaggaggtttattaataa

SEQ ID NO: 305968 - DNA, 532 bp, Homo Sapiens
  misc_feature (186)..(247): n is a, c, g, or t
  misc_feature (312)..(312): n is a, c, g, or t
  misc_feature (329)..(329): n is a, c, g, or t
  misc_feature (384)..(384): n is a, c, g, or t
  misc_feature (398)..(398): n is a, c, g, or t
  misc_feature (417)..(417): n is a, c, g, or t
  misc_feature (428)..(428): n is a, c, g, or t
  misc_feature (450)..(450): n is a, c, g, or t
  misc_feature (459)..(459): n is a, c, g, or t
  misc_feature (466)..(466): n is a, c, g, or t
  misc_feature (474)..(474): n is a, c, g, or t
  misc_feature (486)..(486): n is a, c, g, or t
  misc_feature (505)..(505): n is a, c, g, or t
  misc_feature (514)..(514): n is a, c, g, or t
tactccaaggagtattggtttctgcctagaattataggtatgacacataaaacaaatgtattcctttaagacatgtacaaacctaatgtttataaattagcactactctataaatgcatgatgggaaatgctacttaaaataatccttagaaaaagaaatattaagtatctaataaatcttttttnnnnnnnnnnnnnnnnnnnnnnnnnnnnnnnnnnnnnnnnnnnnnnnnnnnnnnnnnnnnnngtctggatggatacaggtaaccaggggtataggggaaaacaggttcttacccctggtttgtgggnaggctaaattttgcccntaattgccccttccaaaagggtatttcctggccttttgtccctgggggaatcccncttctggggggggnattttcccctatgggggtntcccatttccntattatgggtccatggcctccntccatgggngggaacngggggggncccctctccatntcctcctgggggggcccgncctccctanttggggcccccggccggg

SEQ ID NO: 305969 - DNA, 122 bp, Homo Sapiens
  misc_feature (79)..(79): n is a, c, g, or t
  misc_feature (94)..(94): n is a, c, g, or t
  misc_feature (109)..(109): n is a, c, g, or t
cacaggacaggatggggtaatgcattcattaccaacagctgtggacatcactggggctacaggggcattttttctggcncccattatggtggtnaatgttagggggggnccctggggtgtat

SEQ ID NO: 305970 - DNA, 383 bp, Homo Sapiens
  misc_feature (257)..(257): n is a, c, g, or t
  misc_feature (293)..(293): n is a, c, g, or t
  misc_feature (339)..(339): n is a, c, g, or t
tcccttaatggctaccatgttttgcatcttattagaaatgttcttcaattgtctgcaaattgattaatgttaacatttctttctcagcttaagaagtcttttcttttgaaaccattgtatgtataattattgatgtcttatgaagctgaatgttaaagaaatctaattgatttacaaataaaaatgatatggggttaataatattcctaaggcagggatgcccactgcttaaccaaaccggaataatttgttatttngtattatatatggtatattatacacacacaccaaantaggtattatatgtgtgtagggtggtaatcaccataatcacggtantcacaggctcactaccggcctcgacccccggggggttcaggggt

SEQ ID NO: 305971 - DNA, 404 bp, Homo Sapiens
  misc_feature (55)..(103): n is a, c, g, or t
  misc_feature (390)..(390): n is a, c, g, or t
ggcacgagctcactctgtatatacacacatatatatttttgagagacagggtctnnnnnnnnnnnnnnnnnnnnnnnnnnnnnnnnnnnnnnnnnnnnnnnnngcctcaacctcctgggctcaaacaatcatccgacctcagcctcccgagtaacaaggactacaggtacacaccactacactcggctaattttttaaacgttttgtagagatgggggtctcacgccacgttgcccagggtggggactttgtattttaaatttaatctttggtttttaataggatgacttttgtgtatattatgacttgatctacatgtattatggacttgatattatttggaacttcttttagggttggaaccattatggaaattggatattcaaccanttttggacccacgg

SEQ ID NO: 305972 - DNA, 374 bp, Homo Sapiens
  misc_feature (207)..(207): n is a, c, g, or t
  misc_feature (275)..(275): n is a, c, g, or t
  misc_feature (280)..(280): n is a, c, g, or t
  misc_feature (292)..(292): n is a, c, g, or t
  misc_feature (299)..(299): n is a, c, g, or t
  misc_feature (332)..(332): n is a, c, g, or t
  misc_feature (342)..(342): n is a, c, g, or t
  misc_feature (349)..(349): n is a, c, g, or t
  misc_feature (359)..(359): n is a, c, g, or t
gcccttcatcttccctaacaaactccctattccctcttgtattgtagacatttctgtatttagtttattcccaaattataatctagcaattatgtcctacttgtgtatctatcccttacaatgccctgcacaggggaaggtgttcaagagctgtgggaactggaaatgggaatcttcccatttgggggcatcaagggaaactacggncttttaggctaaccaataactattttacccaggtgttcactctgtgcctagggtatcatattaggggnatctnacttatttcatntaatctnccccacaatggctatgggaaaggggtattggtnattttctccntaattcngtgggggggnactacaatttaaagg

SEQ ID NO: 305973 - DNA, 175 bp, Homo Sapiens
  misc_feature (75)..(75): n is a, c, g, or t
  misc_feature (108)..(108): n is a, c, g, or t
  misc_feature (129)..(129): n is a, c, g, or t
  misc_feature (137)..(137): n is a, c, g, or t
  misc_feature (151)..(151): n is a, c, g, or t
atatttatttcacaaatttggaaacacaattttctttcctattctactgatttaacattgaatatatgtattttnaacacattaaactgtcattaatactcctgaggntttcaagatgttctttttganaaatggcnaccttctaaaatangtcacaaaatttgaacattttatc

SEQ ID NO: 305974 - DNA, 235 bp, Homo Sapiens
  misc_feature (51)..(51): n is a, c, g, or t
  misc_feature (110)..(110): n is a, c, g, or t
  misc_feature (123)..(123): n is a, c, g, or t
  misc_feature (131)..(131): n is a, c, g, or t
  misc_feature (179)..(179): n is a, c, g, or t
  misc_feature (195)..(195): n is a, c, g, or t
agttgtccttttgatggctgtatgttcctcttgcttaaaatatgtttacancaatggtagagtagctgtgattgggaactcaagtagccagtgtcctgtgtgacctgggngcctacccaaatnacctatgngtggggtctattaaaactgtctatgacttccccctttgactattattnacagtgggaggagttntgggactcttcaagtttaatcatgttaagggcttggggaa

SEQ ID NO: 305975 - DNA, 464 bp, Homo Sapiens
  misc_feature (297)..(297): n is a, c, g, or t
  misc_feature (429)..(429): n is a, c, g, or t
  misc_feature (439)..(439): n is a, c, g, or t
  misc_feature (447)..(447): n is a, c, g, or t
ttgagattctcaggtcactggagttgtgtacctaggaggattatcgctgcctctgctgagtcatgcaggttgtcagacaggtgggggaaagctggcagtcacaggcctcacccagctcccagcaaacccaagggccggtctcactcccaccatgtcccctcaacaccccccagactgtttctaggcagagagcaatacaggcttgaaaatctactgcaggctgtctgaccccaacctgtgaaagaaaagggcttggttcttcccctgcctgtgggagtctgcacaccagattcacgnccttccccaagttctgggacagaaggcttctcactctgttcaaattgttacaaagttcagctaggaggatttgctttctctctgtgtaggtttttacttcctgctttctctcccattggatccctgtgggtncaggggaggnatgggctnctaggagggacccagtg

SEQ ID NO: 305976 - DNA, 455 bp, Homo Sapiens
  misc_feature (145)..(299): n is a, c, g, or t
  misc_feature (339)..(339): n is a, c, g, or t
  misc_feature (417)..(417): n is a, c, g, or t
  misc_feature (434)..(434): n is a, c, g, or t
gagcaccaaaggttggtgtacatggtctgcaaatttcttactatggtagagtggtaaggcatactaaaaccaccacaatcaaaaaaggttaaactaccgaacgcagttgttcttgaccgtgtttccaaataagaatcatcttagnnnnnnnnnnnnnnnnnnnnnnnnnnnnnnnnnnnnnnnnnnnnnnnnnnnnnnnnnnnnnnnnnnnnnnnnnnnnnnnnnnnnnnnnnnnnnnnnnnnnnnnnnnnnnnnnnnnnnnnnnnnnnnnnnnnnnnnnnnnnnnnnnnnnnnnnnnngggggtccccagctccttagggaggcttgagggtggggangacttctttgacccagggagtctttagggctttcagtgagcctattgatttcaccactttcacttccagccttaagcnggcagagcaagaccctntttttcaaaaaccaaacccaa

SEQ ID NO: 305977 - DNA, 296 bp, Homo Sapiens
  misc_feature (90)..(90): n is a, c, g, or t
  misc_feature (107)..(107): n is a, c, g, or t
  misc_feature (148)..(148): n is a, c, g, or t
  misc_feature (159)..(159): n is a, c, g, or t
  misc_feature (202)..(202): n is a, c, g, or t
  misc_feature (215)..(215): n is a, c, g, or t
  misc_feature (247)..(247): n is a, c, g, or t
  misc_feature (253)..(253): n is a, c, g, or t
  misc_feature (265)..(265): n is a, c, g, or t
gcattttattttttctttaacagttctccaaatagggactccaatctgaggtcccttccgctaggtgcaacaggttctcagccctggggngcaccctggaaaacacngggggaggcttccaggaaataccctactcggtgcctgtgtncctgttgaggncagctcagtgtcagaatttggggtgaaagagttttcaaaccgncactggggtattncaatgaggaggcagagttgaggacctgtgacngggggnatcgcctcgttntcacagggggagagaaggcatctgccatctg

SEQ ID NO: 305978 - DNA, 315 bp, Homo Sapiens
  misc_feature (15)..(15): n is a, c, g, or t
  misc_feature (302)..(302): n is a, c, g, or t
gggcacgagcctgtntcattatgcaattccctaaatgtagtatatccttcatgatcttattctcttgtctgtgctgcaggctaatgtttcatatgcatgtattttatttttatttaaagttatttttacatggcagtggaatgtgccttcatctgtcaacattaaccccattgggacttgcagggcactcccttaaaagggaactgtcgcttagggggattagggcaactaaaccgggacctcttggaattacttcttcactgtgctttctgagggaaatgctggttgggttactggctaangattccacttaac

SEQ ID NO: 305979 - DNA, 420 bp, Homo Sapiens
  misc_feature (78)..(105): n is a, c, g, or t
  misc_feature (217)..(217): n is a, c, g, or t
  misc_feature (248)..(248): n is a, c, g, or t
  misc_feature (341)..(341): n is a, c, g, or t
  misc_feature (374)..(374): n is a, c, g, or t
  misc_feature (379)..(379): n is a, c, g, or t
  misc_feature (389)..(389): n is a, c, g, or t
aaactttccaaatcttacaactgaagatttttaagcaatttctgttttgcacttaaattggctctgggcagggtaaannnnnnnnnnnnnnnnnnnnnnnnnnnntttggttaaacacgtggaaataagctatgggtgtagcagactatcaaggccttgtcactttaaacattcaaacgatagattttcctttgttctaattgcattgtcaccaggnaaccttttgattattttcattcctattaggnttgggctacagaggggcaaccatttctgggccacagaggtgtggggtttctggatcggttttgacaatttacatgttacatttttttgtatanttactaaattggatccattttatttttaggaancaggnttcattggcnttaaaagtcagtgtcaggagtggggggggta

SEQ ID NO: 305980 - DNA, 329 bp, Homo Sapiens
  misc_feature (58)..(58): n is a, c, g, or t
  misc_feature (102)..(102): n is a, c, g, or t
  misc_feature (109)..(109): n is a, c, g, or t
  misc_feature (116)..(116): n is a, c, g, or t
  misc_feature (138)..(138): n is a, c, g, or t
  misc_feature (149)..(149): n is a, c, g, or t
  misc_feature (191)..(191): n is a, c, g, or t
  misc_feature (274)..(274): n is a, c, g, or t
gcacctggcctgttccgggacagatcgcaaggctgagggttaagtaacacctggagtngttaggaggctgggcacctccttgtgaatctcccgggctgcgtngcgggtngcgggtngctggcaggggagggacccttngcactgctgtngctttgtatttgctgccagcggggcctttgatgccccagggnttgcttcgcccagccaagggattgtagaacacaaaagctgcagaaagcacaacaaataaagtgaaagcgacccagggaaactnccaggggagttattcagcctgttttcctgattcataggtattggggtttagggga

SEQ ID NO: 305981 - DNA, 355 bp, Homo Sapiens
  misc_feature (142)..(168): n is a, c, g, or t
  misc_feature (336)..(336): n is a, c, g, or t
attttattgatgaagatttagaataataggtagagatgcagtatttgcatatgtgtttattgccacatcgatgcacatgaggattctttgtcacgtccagccatcatgtcttcttgttcaggtctaggtaccatctattagnnnnnnnnnnnnnnnnnnnnnnnnnnnactgttaaatgcactgggataatattaccttgccccctgcccttcatgaggaaagaggtaggcaagagggtgatagtactcacaatgctatggggttattgggaactgttcgtattggaaatcacgtaggatcttcttgcccctacgggttcccctaggaaccccttnatttaatgctggggctact

SEQ ID NO: 305982 - DNA, 400 bp, Homo Sapiens
  misc_feature (72)..(105): n is a, c, g, or t
  misc_feature (327)..(327): n is a, c, g, or t
  misc_feature (336)..(336): n is a, c, g, or t
  misc_feature (341)..(341): n is a, c, g, or t
ggcacgagaagagagattggtaactattagagagagaagttaaagacatgagccttattgtggcttgtttgnnnnnnnnnnnnnnnnnnnnnnnnnnnnnnnnnnttgtgaatggaactgatagaaggttgcatttctttttgcaagaaagctgtagagggaaaataattatataaacctgttttttaaaatacaaagatattactgcacagttctttaggcctcaaaccttgaaattgggatttgccttgggaatcccaaaatattctggaatttttaaaaactgtattaggtgggtaaatactatatattatggtaacatttccnaggaggggncctanttgccgggacccctataatccaatatattaggccattctgggatttggaaaatacttat

SEQ ID NO: 305983 - DNA, 452 bp, Homo Sapiens
  misc_feature (326)..(326): n is a, c, g, or t
  misc_feature (387)..(387): n is a, c, g, or t
  misc_feature (403)..(403): n is a, c, g, or t
  misc_feature (411)..(411): n is a, c, g, or t
  misc_feature (417)..(417): n is a, c, g, or t
  misc_feature (425)..(425): n is a, c, g, or t
  misc_feature (438)..(438): n is a, c, g, or t
ctcacattttagaagcttataactaaagtgctagatgctggctttgctgatgttagcctgaactacttaaacttaacctgattttctgttttaaattccttagccctgattattcctttcctatcaaacatttgggcctgttagcctgaactacttaaacttaacctgattttctgttttaaattccttagccctgattattcctttcctatcaaacatttggggcctgttgagtcctccaaaatgggggtcatcagaccaggatcctgtgaggcccaatctaggccccacctgcggggaacacagccttcacacattcgtttacnggggtttgggctgcttgtgtggcttcagcaggcaagggaggatgggttggggacagaggantgtatgggcttccccntacccctnaaattntttatttntctggggcctttnacaaaaattttggg

SEQ ID NO: 305984 - DNA, 464 bp, Homo Sapiens
  misc_feature (366)..(366): n is a, c, g, or t
  misc_feature (400)..(400): n is a, c, g, or t
  misc_feature (418)..(418): n is a, c, g, or t
  misc_feature (429)..(429): n is a, c, g, or t
  misc_feature (441)..(441): n is a, c, g, or t
  misc_feature (448)..(448): n is a, c, g, or t
gctgagggcagtgctacccacatatgttaccttcaaaagacacatctatccatagccctggtaacagcctgctgaactcaccctacctcagtgctgaagcagccctgtgacttgactctatcccccatctattgtggttaatgggtgtctagtaggagccatgcctattaagaccctgctaatgggcctgccatctgcagacccagaagtcctcttgtgacccacctccaaccttgcttgaccatggttccagaggtagttcccatctgattgggtaccaggggagggaattgtggcccacctgtggcccgcagtaaacagggcctttcaattgtgtaacctggattacaggacccaggcaggatncatgttgacaaaggttttaggccccagtttaatngtggatttttgggagggnaggccttattnaatttggggggnaccaggnagggaggaagtttttt

SEQ ID NO: 305985 - DNA, 315 bp, Homo Sapiens
  misc_feature (269)..(269): n is a, c, g, or t
  misc_feature (305)..(305): n is a, c, g, or t
gtatatacattaaaagcaacaataaccaccacctacttttaccatcttttcctaaaagaacattttaatgccaacaaaacagatggcatgagctcagagtggtaacagtggctgaaatctacctagacagcacccatgtgccaggtcctgttctgaggagtcatggaaactggaaagggcgaaaccccgaggctcacagattccacgttggttctgttccacccccactttcaccttgcattcacctcgcctctgtgggcagacaggantaatgggcccccaaaggatgtacacgggtcttgatnccccaggaac

SEQ ID NO: 305986 - DNA, 319 bp, Homo Sapiens
  misc_feature (237)..(237): n is a, c, g, or t
ttccagtaggttgattttttagtgacaaattctcactctgtcacccaggctgaagtgcagtgtcactatcatagcccactgcagctttgaactagtgggctcaaacaatcctcccacttcagtctcccacgtatccaggactataagctcggccaccacattcagctgatttttttatctcttggcagagatagggtctccctatgttacccagggctggtctgggaatccctgggnctcaagcaatcctcctacctagggcctcccaaattgctggggattacagggtgcgagccactgcacctggggccaagttcca

SEQ ID NO: 305987 - DNA, 292 bp, Homo Sapiens
  misc_feature (210)..(210): n is a, c, g, or t
cagttttagtaatttgtgtgtttctaagatttatctatttcacctgaattatctaatttttgaagaattattattcatgttatcataatccttttagtttctgtaaggtagtagtatccccactgtattttctgtttgtacatatttactctgtctatctattttagagacagagtcttgctatgttatcccagttgggcttaaactccnggggctcaagcgatcctcctgcctcggcctccaactgggctagggactaggacttgcatagcccatgggtgcccagctcttc

SEQ ID NO: 305988 - DNA, 311 bp, Homo Sapiens
  misc_feature (64)..(64): n is a, c, g, or t
  misc_feature (206)..(206): n is a, c, g, or t
tgacggagaaattgagttgaaatatgaggcagtatgtgaagttatttgccttcgggtttaaganttagtaattactaattgtattagtaacagcaatagcttggaaagctattttatgagtaattcttaacaatttaatatcagtaaaaaggcatgtgattttttacattcaacaaaggaggaagcggtcaagagaaagactagancagattctcttggaggccttcttggttctaccatcccgaggttctattcatatacaaagctcctttgggcaggaatgcatatttgctccctgcctaaacccaatc

SEQ ID NO: 305989 - DNA, 480 bp, Homo Sapiens
  misc_feature (302)..(302): n is a, c, g, or t
  misc_feature (320)..(320): n is a, c, g, or t
  misc_feature (336)..(336): n is a, c, g, or t
  misc_feature (358)..(358): n is a, c, g, or t
  misc_feature (409)..(409): n is a, c, g, or t
  misc_feature (422)..(422): n is a, c, g, or t
  misc_feature (433)..(433): n is a, c, g, or t
  misc_feature (450)..(450): n is a, c, g, or t
cccagaaaacaactcctagttaaccttggctcctcttcactcggcctctgtctttaagtctgagtgacctggtgggattgatcagctttgaagtcctaaggtgctattttaatactgttcttttacgttgcaggcttcgagactgatttaactagattctggagggagcttactttacagcattcttaagagctcgaacaatcttgaaagagttaaactctaattaggctcattcctaaggtatttaatgcccttattaaaactcaactgctcgttcacttttttctttagtggaatcaggnttcttgagggagctgagnctttcggtcctcaggncacagggctcacagttggaggnggggcagtgctaggagggctaggttcccatccgtgtggacaggcatttttnaatttaacagggnccgcctttggngttcccccaaaattttnggggagctttgggtccatttcagggtgtgg

SEQ ID NO: 305990 - DNA, 272 bp, Homo Sapiens
  misc_feature (125)..(125): n is a, c, g, or t
  misc_feature (134)..(134): n is a, c, g, or t
  misc_feature (237)..(237): n is a, c, g, or t
attatcaaatgaagatgatcattatagtgcttacctcacttagccatcaagagcatagtaagtgcttgataatcttgtctgttatctatcttgtctgggcccacattcatgcctttgcctgtggntttgagccntttgtatactttccctaatcccaggaaggaaccaacataggtcatgaggccctgaggcttgaggagcttcactcttctggattttcttcagtgttccaggatnatgggttttggcacaggggcagtggctcatttagg

SEQ ID NO: 305991 - DNA, 187 bp, Homo Sapiens
  misc_feature (82)..(82): n is a, c, g, or t
gatggcaggagacagggtacaggcagtgctgtgccccagatcaaccaccacagcaattatgtgccacactagtgatcgacanccagggtggctcctcagcaagtcgtggtcataccctgccgtgtaactaacaccatgaggtctcaatttgacagtatattagtctaactggaacctcatgctttgg

SEQ ID NO: 305992 - DNA, 279 bp, Homo Sapiens
  misc_feature (235)..(235): n is a, c, g, or t
tcttttttacgaagtactgcatgagtaacttggggttgcaaccaaagggtgtccttgctttcaaatagggatatttcatagaatatgactttaaataaatacatgatgacatagagttatattcccaagtgagctcccacttaaattatttgctttttcaaattctttttgggttacccattgggttcacatggtacctatcctttccttaatatgggggatcacttaatattgnggggggatccccattttattaaaaccaatcacttggggtctagg

SEQ ID NO: 305993 - DNA, 420 bp, Homo Sapiens
  misc_feature (350)..(350): n is a, c, g, or t
  misc_feature (381)..(381): n is a, c, g, or t
gaaatcaacaaccttgcagctatttaactcttttttggccacaaagacgtatccagaatggtctatgatgaagaatgatatatccagaatggcccaagactaagaattatctctgcaactctggatccactgtgaattatgaaagccagaaccaactccaagaagaaggagaaggcgtttgtaacaggctccgggtctcttctgcctgcccagagctagggcatcaatgacatcttttgggccagctgggctccggggaaggatctcagacttcagtctggatgttcacagtgggcacttgacttttgtgttgttgaataggatgttgaaattccccgtcatgcagggangattctgtcaggatctaggatgttgggcctnacctcccctttcctgacccagcaaggtagggggccccct

SEQ ID NO: 305994 - DNA, 312 bp, Homo Sapiens
  misc_feature (200)..(200): n is a, c, g, or t
gcagaagccagtagaagcaatccacttgccaggttgccctcctggaaccagggtccacccatgagagccaacgacaaccacatcagcctttgtgctccttggggcatctggtcaatctcctgcatgggatagaagctccgggaataccccaaagggaggaagcagagaagagggcctatgcctttccttgtccagggttngagtgcctcgcttgggatgatacttgctagccccaactggttcccagacattcagagagggaagtgaggtcctccttgaggttttggggcccaggacaggggttttgctttg

SEQ ID NO: 305995 - DNA, 341 bp, Homo Sapiens
  misc_feature (14)..(14): n is a, c, g, or t
  misc_feature (40)..(40): n is a, c, g, or t
  misc_feature (140)..(140): n is a, c, g, or t
  misc_feature (145)..(145): n is a, c, g, or t
  misc_feature (265)..(265): n is a, c, g, or t
  misc_feature (298)..(298): n is a, c, g, or t
  misc_feature (322)..(322): n is a, c, g, or t
cagggtcctgattnttgacactgcgtgtggagcgtcaagnggctagccatggacccagggggtgcagagactctccagcgtcatcttggtgagagtgatgttgggatcagagtggaaacaagacagagaggatgcggcanaaagnccataagtgaaagtcactagggaacggtcactttcggcatcagtgaaaatggtctccatgggccgcagcacattgtgggggacagggcagagtgggagttcagcagaggggagggaggcntgttgggggctttcaggggagcccgggcacagntcccagattcctccctggggggantttccagggccacgttccc

SEQ ID NO: 305996 - DNA, 278 bp, Homo Sapiens
  misc_feature (254)..(254): n is a, c, g, or t
  misc_feature (259)..(259): n is a, c, g, or t
gtgcctggcccctggaactactttttaatgccagtacccaaagcgtaactctttgaaacaaaaaatcataaatcccatgctattccctacaaccattcattttccaagttttccagttctgaaatatagcttagactctattaattccacccctcaatagtaaccatttccaacatgcaaacaaataggaggaaaaaattattaggtcacccatatctctcagctgctgggggaggaatgcctaaggccacttntaggncatcatattcctaaatagg

SEQ ID NO: 305997 - DNA, 149 bp, Homo Sapiens
  misc_feature (14)..(14): n is a, c, g, or t
  misc_feature (29)..(29): n is a, c, g, or t
  misc_feature (47)..(47): n is a, c, g, or t
  misc_feature (51)..(51): n is a, c, g, or t
  misc_feature (72)..(72): n is a, c, g, or t
  misc_feature (74)..(74): n is a, c, g, or t
  misc_feature (76)..(76): n is a, c, g, or t
  misc_feature (82)..(82): n is a, c, g, or t
  misc_feature (91)..(91): n is a, c, g, or t
  misc_feature (94)..(94): n is a, c, g, or t
  misc_feature (96)..(96): n is a, c, g, or t
  misc_feature (101)..(101): n is a, c, g, or t
  misc_feature (107)..(107): n is a, c, g, or t
  misc_feature (123)..(123): n is a, c, g, or t
tccgtagatttttnaaagtgggaaaaggnacatagggaaacaaagtntatnggttatttggcgaatttttantntnatcacnttttttggnaangngcacncgggtntgggatggggaatttntcatttttttgggggagaaagctttc

SEQ ID NO: 305998 - DNA, 439 bp, Homo Sapiens
  misc_feature (347)..(347): n is a, c, g, or t
  misc_feature (354)..(354): n is a, c, g, or t
  misc_feature (403)..(403): n is a, c, g, or t
  misc_feature (414)..(414): n is a, c, g, or t
  misc_feature (421)..(421): n is a, c, g, or t
agcactctatgtttgctgaggcacttctttaatgctcagtcaggttaaactcatccttggctttcacaccttgcttgtgggtagtgtcaaaatcagacacaggtgagaaaatagagctttctcaggcctttcctgaacaagtatgcgtccctgcacatgtgcttagtcttctagattccagggaatatgccaaagcttttcagatctccctgggatatctcattacacaggttttcttttcaaatgtttgttcaatcacttgttttttgctggattcgttttactgttctaaacagtgaggggtgtttaaataattgcctggggatccattttttaaccaaacaccnggggggnaggggcattttttacttgagtaagggtctggacctatggggtccaaatnagggccaagtnttccaantaggtttttttccagggg

SEQ ID NO: 305999 - DNA, 357 bp, Homo Sapiens
  misc_feature (309)..(309): n is a, c, g, or t
  misc_feature (330)..(330): n is a, c, g, or t
accattgcaccgggagctgaaaatatacagagaaagctgagaatgcaagagtcgctggcttccatgcccatcggagtgccctatcactccctttatcctgaatgttaatgtgtattggaattctgtcacttgcaactgaatgagcccagttcaatataaaaattaaccagggaaaagagcaggcctatgagaaggcttcaggcaaaggaagacatgggaatatgtatgaatgggtgggcaagcggcagggagggagcatttccttttgttgggagtcctggggttgtctccctagctccctaacacatngctaaaccccaaacacatttngcagtctttaggcctggggtatttcag

SEQ ID NO: 306000 - DNA, 327 bp, Homo Sapiens
  misc_feature (18)..(18): n is a, c, g, or t
  misc_feature (29)..(29): n is a, c, g, or t
  misc_feature (51)..(53): n is a, c, g, or t
  misc_feature (57)..(57): n is a, c, g, or t
  misc_feature (59)..(59): n is a, c, g, or t
  misc_feature (74)..(74): n is a, c, g, or t
  misc_feature (77)..(77): n is a, c, g, or t
  misc_feature (79)..(79): n is a, c, g, or t
  misc_feature (90)..(90): n is a, c, g, or t
  misc_feature (92)..(93): n is a, c, g, or t
  misc_feature (95)..(96): n is a, c, g, or t
  misc_feature (113)..(113): n is a, c, g, or t
  misc_feature (120)..(120): n is a, c, g, or t
  misc_feature (126)..(126): n is a, c, g, or t
  misc_feature (137)..(141): n is a, c, g, or t
  misc_feature (159)..(160): n is a, c, g, or t
  misc_feature (162)..(162): n is a, c, g, or t
  misc_feature (166)..(167): n is a, c, g, or t
  misc_feature (175)..(177): n is a, c, g, or t
  misc_feature (182)..(182): n is a, c, g, or t
  misc_feature (187)..(188): n is a, c, g, or t
  misc_feature (190)..(190): n is a, c, g, or t
  misc_feature (197)..(197): n is a, c, g, or t
  misc_feature (202)..(202): n is a, c, g, or t
  misc_feature (206)..(208): n is a, c, g, or t
  misc_feature (222)..(222): n is a, c, g, or t
  misc_feature (224)..(224): n is a, c, g, or t
  misc_feature (235)..(235): n is a, c, g, or t
  misc_feature (237)..(237): n is a, c, g, or t
  misc_feature (247)..(248): n is a, c, g, or t
  misc_feature (250)..(250): n is a, c, g, or t
  misc_feature (275)..(275): n is a, c, g, or t
  misc_feature (297)..(297): n is a, c, g, or t
  misc_feature (299)..(299): n is a, c, g, or t
aattgctgaatttccaanaatgaggtaantcggagaaaatgcggatttctnnnttananaattgacaaattagnagntntggaaaacccntnntnnataattctgctaggcanatttggntgttgnttcggagccgnnnnnattctaacggcgggcatnntntctnnattccatnnnaaggngttannangctctanagccnttannnaggggcgactttantnatgtactggananagcagggggnnanataggaaatttgagtttgtgccccnttggatttattatttaattgtncntttattaattaaggccctggaggccacg

SEQ ID NO: 306001 - DNA, 446 bp, Homo Sapiens
  misc_feature (243)..(243): n is a, c, g, or t
  misc_feature (359)..(398): n is a, c, g, or t
  misc_feature (411)..(411): n is a, c, g, or t
  misc_feature (436)..(436): n is a, c, g, or t
agataaatgcttatgatcttagaaggaaagaaataaaacacggtaatgggaaaatcagttcagaggtaggaaggaagctgggtttgcaaaaacaaaatggaagtatcagtgaagcatggcctagaagtccaagagcaggggtagagttttaaagggactgctatttagatcacagctatccctcagagcgcccccatgccagggaaactacggcaactgctcctgcatttgggtaactcactntaatcttgggtaattacccctatgggggtagggtgctacttgtcatcccccttaatccccacttcaccctgtcttctcttttttcaagggtggggaataattaggtatcccacacnnnnnnnnnnnnnnnnnnnnnnnnnnnnnnnnnnnnnnnncggcttcttggcnggacccattccctagggggcacatnggggagctcc

SEQ ID NO: 306002 - DNA, 451 bp, Homo Sapiens
  misc_feature (102)..(367): n is a, c, g, or t
  misc_feature (431)..(431): n is a, c, g, or t
tattcaatctcaaaacacaccattatgtaagtgggaaaaattcaaggaaagaataggaggctggataaatattttataaagtctaaaggcaaagaacaaggnnnnnnnnnnnnnnnnnnnnnnnnnnnnnnnnnnnnnnnnnnnnnnnnnnnnnnnnnnnnnnnnnnnnnnnnnnnnnnnnnnnnnnnnnnnnnnnnnnnnnnnnnnnnnnnnnnnnnnnnnnnnnnnnnnnnnnnnnnnnnnnnnnnnnnnnnnnnnnnnnnnnnnnnnnnnnnnnnnnnnnnnnnnnnnnnnnnnnnnnnnnnnnnnnnnnnnnnnnnnnnnnnnnnnnnnnnnnnnnnnnnnnnnnnnnnnnnnnnnnnnnnnngagggctttctccagcccatgtggggacctgtaaggtccccatttaacccccttttgtttttgnggaattgctcagtctccggg

SEQ ID NO: 306003 - DNA, 446 bp, Homo Sapiens
  misc_feature (327)..(327): n is a, c, g, or t
  misc_feature (375)..(375): n is a, c, g, or t
  misc_feature (387)..(396): n is a, c, g, or t
ctttaaatcagtcgtaaccctccctgataagaaattaaattagatttgaggattaatagtgggagaattaaaattttgacctatctcaccaagcgagagggaggcaagcggagggatggtttatcatagcctcgccacccaagagcagagaagccgcagaagctttaccagctcctgcctggggccacacacaggccaaaatatgctccaatttttgaatcaattttttgttgtctctacttttttaatgagtttttctcattattaaaagtatttgtgtgtatataggaaaatctggggaaaatataggcaggtaaaggaccaggnccaaaaatcacttattattccccaccttcccctaccaccccaccttcnttgtcttccccnnnnnnnnnncaggctttttgtcctggtggcacatggtaccccccggtattttttttccc

SEQ ID NO: 306004 - DNA, 403 bp, Homo Sapiens
  misc_feature (157)..(172): n is a, c, g, or t
  misc_feature (174)..(273): n is a, c, g, or t
  misc_feature (326)..(326): n is a, c, g, or t
gagacagggtcttactctgccaaccacgctggagtgcagtggtacagtgataactcactgcagtcttaaactcctgggctcaagcaatcctcctgtctcaacctcatgagtagctaggactacagactacaggtgcatgccaccacactcagctaannnnnnnnnnnnnnnngnnnnnnnnnnnnnnnnnnnnnnnnnnnnnnnnnnnnnnnnnnnnnnnnnnnnnnnnnnnnnnnnnnnnnnnnnnnnnnnnnnnnnnnnnnnnnnnnnnnngtgtgagccaccatgccagggggatgacatatttttactctttaaaatgaagnttttttcctcaccttttactaggataatacatcaaccatattttttaacagagtgttcccctaacccccacccacgg

SEQ ID NO: 306005 - DNA, 326 bp, Homo Sapiens
  misc_feature (192)..(192): n is a, c, g, or t
  misc_feature (269)..(269): n is a, c, g, or t
  misc_feature (289)..(289): n is a, c, g, or t
  misc_feature (305)..(305): n is a, c, g, or t
ggtatggtacagtactgggacatgaacgagcagtttccccacaggaaggggaaatagaaaaacgcccaaaggaagtactgtaggtgagagagacttgagggttgttagagactgcttgaaaagagaatgctgcataggcgtagtttgaagttgagggtcttctgtccagggtaggctggcttgctgtacttngtgctggcaagtacctttaaaaggtattcattgggtattttcacaagcacatttcactcatgcaagttcgacctctngagcatagcaaaaagtgagngattttcgttccactnttttgacttgagttgatatct

SEQ ID NO: 306006 - DNA, 366 bp, Homo Sapiens
  misc_feature (65)..(193): n is a, c, g, or t
  misc_feature (304)..(304): n is a, c, g, or t
  misc_feature (313)..(313): n is a, c, g, or t
  misc_feature (321)..(321): n is a, c, g, or t
  misc_feature (356)..(356): n is a, c, g, or t
tgagtgtctacaggggaaagtatagagcacacgaggtctgggatgagactcccagggtttgcatnnnnnnnnnnnnnnnnnnnnnnnnnnnnnnnnnnnnnnnnnnnnnnnnnnnnnnnnnnnnnnnnnnnnnnnnnnnnnnnnnnnnnnnnnnnnnnnnnnnnnnnnnnnnnnnnnnnnnnnnnnnnnnnnnatatgtgctgaataaacatcagctattatcatgatcactttgggccagactccaggggtaagagttctacctcagcccttttttttcaatcctgacaacaccctacaaggntgagtattntttttccnttcttaaaaggttaagtggacttgttttaggggcnttagctaata

SEQ ID NO: 306007 - DNA, 342 bp, Homo Sapiens
  misc_feature (98)..(274): n is a, c, g, or t
  misc_feature (288)..(288): n is a, c, g, or t
  misc_feature (324)..(324): n is a, c, g, or t
aggacttcatcaggacagacacatcatcctgtctaagaggtgtcatcttcctttggctctgccaactgccacatagccaaggcacttcatactacagnnnnnnnnnnnnnnnnnnnnnnnnnnnnnnnnnnnnnnnnnnnnnnnnnnnnnnnnnnnnnnnnnnnnnnnnnnnnnnnnnnnnnnnnnnnnnnnnnnnnnnnnnnnnnnnnnnnnnnnnnnnnnnnnnnnnnnnnnnnnnnnnnnnnnnnnnnnnnnnnnnnnnnnnnnnnnnnnnggggaaaacccctntccgcctgggttcttttcattgtttctttgtctggntgccatgttaaggacgtg

SEQ ID NO: 306008 - DNA, 415 bp, Homo Sapiens
  misc_feature (322)..(322): n is a, c, g, or t
  misc_feature (337)..(337): n is a, c, g, or t
  misc_feature (376)..(376): n is a, c, g, or t
  misc_feature (401)..(401): n is a, c, g, or t
cagaagtcggctttttgggtttattattacagtaagcttttccaatgacaacattagagttgtcatagcccccatccgtggagctcccatgtgccctaggaattggtccgccagaagccgcccctccccgtgtcaaccttcccagcctccctttgtgtgggatactaattattccaccttggaaaaagaggaaggacagggtgagtggggattaggggggatgacagtaggcaccttaccccataggggtaaatttacccaaggattaaggtgagtttacccaaatggcagggagcagtttgcgtagttttcccggggcatngggggggcgctcttnagggggatagctgttgatccttaaataggccagttcccnttttaaaaactttttaccccctggntttttggggacttt

SEQ ID NO: 306009 - DNA, 213 bp, Homo Sapiens
ggaaaatttgtaggatttttccaaaagggaatatgtaaaagcaaattattcagagactttatggttagtgaggaaaactgggatgggtgaggatatcatatattgtatccatatcaaacataccagctatccaaggctctatcagggtttttgtattaggggagttttcacaaggaaggatctcaaacccaaacatttaggaggagggggtcc

SEQ ID NO: 306010 - DNA, 465 bp, Homo Sapiens
  misc_feature (374)..(374): n is a, c, g, or t
  misc_feature (411)..(411): n is a, c, g, or t
  misc_feature (427)..(427): n is a, c, g, or t
  misc_feature (432)..(432): n is a, c, g, or t
  misc_feature (449)..(449): n is a, c, g, or t
agtagtcctagatttgtgtgatgcattcttattctagcccacatctcgctttgtgttgcctccctgtatatcttataagctgccccaagacttcctctttaccattctcaaacccacattggcttgactccttggctctgagctcttgcttgttctccagcatctgaatcactttcctgcactgggtgttgggtgggcctatccacttagggtatatcacagggcagaaactatcttgtgaagcgggcctatttgggggcaactccagctgggggaaccaggggacttcttgggaactctcttttttgggcttccagctttaaatgatagggggagataggggacaattgcaggggacaacaaccaaaacaggncccaatacaggaggtacacttaaaaagatcctgttangggtgggggttggggnagggnattcactttgaggcccnggggggttttcaaggg

SEQ ID NO: 306011 - DNA, 412 bp, Homo Sapiens
  misc_feature (69)..(77): n is a, c, g, or t
  misc_feature (208)..(208): n is a, c, g, or t
  misc_feature (321)..(321): n is a, c, g, or t
  misc_feature (344)..(344): n is a, c, g, or t
  misc_feature (372)..(372): n is a, c, g, or t
  misc_feature (389)..(389): n is a, c, g, or t
tgaaacaaggggcaaggatgggtttgtgtcaccaaaaacaggttccttgttgttatttaaggagttacnnnnnnnnnctatatttgcatacttagaggacctgtccatataaaaatttttgagtttttcaaagaccacactatttttaataacatcagtaaaattcagtcaaaattgtcccatcactctaaggacctgcccagcgganaaggctctggacgtgtccgggctgggccctggcacagtgaggaagcttcaagcttattcctccttaggctcttagttcaggcacccgggggaaacatctcaggggtacttccngggggtgggaacgtgggagggcnggggagcttcccccttcacaccttccgncttccccccgttcctgncccttcccgcgtgggttccgggg

SEQ ID NO: 306012 - DNA, 291 bp, Homo Sapiens
gatccgccagcaaaactgaaatgacattttaacactaccacctataaaataaaagcaggaaggtaaatctgactgaaatcaaatctagtaattattttaaaggtaatattccaaagccaaaacaaaactgtggggaatgggagaggtctttgtttctttctgatagatgatttaaaatgatctgctattagggacacttcatcccttaggatgacctatgggggtcccctggcgttacttaacaaacaggcagcaagcgatccagtatcttaactccgtgttcactcttct

SEQ ID NO: 306013 - DNA, 341 bp, Homo Sapiens
aagactactctttataaattagaaccatcaatttgccctacctttaaattacctgaaagctctcgtaagggtagtagcttttccatgacaagctttaacgctttccataaggccgtaatgccttacgttttagaaagtaaagcactctatcattagttactagggtcctttctccttgggtcttactcttaggttatcgagtagccaaaatgtatggaagggatgttcagtcaaaataggacaccattctccttggaaacctaaggggtgttggatctttaatcactttggaacctttcatttctctaaaaccctacttggggcatcacatattttaaaaa

SEQ ID NO: 306014 - DNA, 438 bp, Homo Sapiens
  misc_feature (293)..(293): n is a, c, g, or t
  misc_feature (363)..(363): n is a, c, g, or t
  misc_feature (378)..(378): n is a, c, g, or t
  misc_feature (404)..(404): n is a, c, g, or t
agcgtggtaaaagcagtgaagaagaaattggtagattagcgatataagttaaactgtgggctgcctggtttaccagagagaacaggaaacagaaatagctaagaagagccctcctggggtcagaatgaagcgcaaacactgatctcaaaaaactctacctgctaggtgtacactaggtctataactatacccgtaaaagagcccaaactgaattgattctctgaatagacaattgatgccccacgacattttgaaaatgagagcaatcaattcagcaattcagcaggagcttnaaacctggggtgttgatccagtggaaaggaggacagtggaagggaggagcccttgcccacccttcgttcntcttcaggggttgantgttattgccttgccccaaggcttgnattcctttgaggaagccaaccttcttgggccaca

SEQ ID NO: 306015 - DNA, 328 bp, Homo Sapiens
  misc_feature (312)..(312): n is a, c, g, or t
gaacaagagaaattttgtatctctgttttgtactctgaaaacacctagaaataatgatgaccagtgacaatgaagatctctagaatacagtgtgatactaaatgctgttcctaccaaaaggaactggaatcgctgggaaaaatggtcctgtcgtaaaaacatgcttggaataacacacggtgcccgaaaaaaactactaaggtaatgtgagaagaaaataggtgcccatctaaaagggtcccaaccagccaaagatgattcacaaaaacatatccatgactgcaacagactggatttcaaatactaaaaaancaaaagggaattttca

SEQ ID NO: 306016 - DNA, 401 bp, Homo Sapiens
  misc_feature (385)..(385): n is a, c, g, or t
aataggatagtaatggattttttagaacattggtgttcatgtgtgttaaaaccatacatgtgagcaacaaacctagagcatgctgtggggttctaggaaaattcaaatccacagtatacatggtatattatgtatgatttcgatagttttccatgggtccctttggaaagggagacacctagcctacaggttcttcctttaaaatcaggacctgcaaggcaagatgtcttttcatcgtaactgtttaataatcttgaagtaaatatgttaaggcatggaaacattaaaggatatggatagcttttttcaattagggtatttgtccctatttgttgcatagcagggcacccttaataaggtgcttttacatggtatttaactcctnctaattctcacatgca

SEQ ID NO: 306017 - DNA, 193 bp, Homo Sapiens
  misc_feature (168)..(168): n is a, c, g, or t
ccttcattaaaagtatcatttacaggtattgacattcacagggagtatactaactaaacctagactggagaaatgcataaattcacgctttgcaaccctcatcccacccccgctgcctcttggcctctcctgtgaacacatccttcccctcttccctctgcttcctantccatctttcactgctggttcttcc

SEQ ID NO: 306018 - DNA, 420 bp, Homo Sapiens
  misc_feature (118)..(118): n is a, c, g, or t
  misc_feature (120)..(121): n is a, c, g, or t
  misc_feature (270)..(270): n is a, c, g, or t
  misc_feature (284)..(284): n is a, c, g, or t
  misc_feature (291)..(291): n is a, c, g, or t
  misc_feature (319)..(319): n is a, c, g, or t
  misc_feature (334)..(334): n is a, c, g, or t
  misc_feature (340)..(340): n is a, c, g, or t
  misc_feature (352)..(352): n is a, c, g, or t
  misc_feature (386)..(386): n is a, c, g, or t
atgaaagtgttggactagggtaactcttccctgccaacattcaacatgtgtgactatccccagaaagtaactacgtaggaacaagaacatgagatgctcccagctggagccccaaggncnntttccaaagctaccaacagagcgtcctctgtgtttcagtaagggtaacttcctgaaaaatacaacaaagatgttcatgtgaaataaagggggtgatttatgtatggaaaggtgggggtgtgagccttgtgaataccatggggaagatgnggtccttccactcnggggatngggagccccgtgggtttgggcccccagntggggtaaccagggngtgctnttttaaggtttnaaggaccagcatgttcccattctggttccttttnggggggagtttttaaagcaagccccttttgcatt

SEQ ID NO: 306019 - DNA, 325 bp, Homo Sapiens
  misc_feature (81)..(89): n is a, c, g, or t
  misc_feature (109)..(215): n is a, c, g, or t
  misc_feature (272)..(272): n is a, c, g, or t
  misc_feature (309)..(309): n is a, c, g, or t
tgggtacatgttatgtgctccgtaagcatctttcaatttgaaaatttcataattgtaatttcactgcctttataaattgcnnnnnnnnnggaggcagggtctctgtcannnnnnnnnnnnnnnnnnnnnnnnnnnnnnnnnnnnnnnnnnnnnnnnnnnnnnnnnnnnnnnnnnnnnnnnnnnnnnnnnnnnnnnnnnnnnnnnnnnnnnnnnnngcatgagctactgcacctggggccattaaaattgttcatactttttaaaggggcctntttacaacaaagtatccatcagggatcattcccaggncttattttccccgatt

SEQ ID NO: 306020 - DNA, 389 bp, Homo Sapiens
  misc_feature (264)..(264): n is a, c, g, or t
  misc_feature (302)..(302): n is a, c, g, or t
  misc_feature (312)..(312): n is a, c, g, or t
  misc_feature (348)..(348): n is a, c, g, or t
  misc_feature (379)..(379): n is a, c, g, or t
atggcaggacagcctgaattagaggttatgtagtctgactttgcatcagcattactgacagaacatgtcaaagatacagattacttcctagaaattccaatttagtaggactgaggaggaatcagagaacttctacttttgggggttgtctggggcataatcccctgttaatacctgttctaacatccaataattccaagtgggctgggaaaattgttttgggaacttacaacaacttgtccattcttaaacaacatcccagtngggaaggcattcagtgatgtttccaggctagtgcctgncctttcagtnccatcactgaggggcctgtaggggtgctggagcttncagggcttgggccagtgggcccaggggtttntaggaaggtt

SEQ ID NO: 306021 - DNA, 314 bp, Homo Sapiens
  misc_feature (186)..(186): n is a, c, g, or t
  misc_feature (246)..(246): n is a, c, g, or t
  misc_feature (289)..(289): n is a, c, g, or t
tacagttttattaataattattatttttcgtataccggttgcactgattcatttttgctcttttattttttaggcagatggctggtttttgtaggattaagcagtgaggaaaaacagcaaactaaaaatgctacttcaaatatagcaacagtcactacataaggcttaaatcaatatattgcaagnaatttctatggaattttggaacaatacaatgtaggtgtatgtgggaaagatccttgcccnaataagggttcattcctacctccctcaaaggttacctggaggnccaggtcccaccctattttaattac

SEQ ID NO: 306022 - DNA, 108 bp, Homo Sapiens
agacagcttagccattaatatcattgttgttatttttgctagaaggaaaaataagtttccaggggatgtttgcaagatattgtcattcaatgtttaactcacagttcg

SEQ ID NO: 306023 - DNA, 273 bp, Homo Sapiens
  misc_feature (19)..(19): n is a, c, g, or t
  misc_feature (62)..(62): n is a, c, g, or t
  misc_feature (125)..(125): n is a, c, g, or t
  misc_feature (180)..(180): n is a, c, g, or t
  misc_feature (202)..(202): n is a, c, g, or t
  misc_feature (212)..(212): n is a, c, g, or t
  misc_feature (249)..(249): n is a, c, g, or t
taacctctgtgagactttntggctgtcccgtttccccaggattctaaacatcactgtgtctncttacatgcattcttccacacttcttggttgttgccttaggatatgttactttaggtagaatncctggggctgcgctgaagaatagaaacattttaaagattcacattcttgcttgtnttgctgttcgcctctttagggnaccatatttntcagggggtacaaaatttatacacctgattttaagtnccggggggtatcaggggtttcata

SEQ ID NO: 306024 - DNA, 161 bp, Homo Sapiens
  misc_feature (92)..(92): n is a, c, g, or t
tacttatgccactaatatccagttaaagtgtttcttttgcaaactaaaactgctgtttctgctactgtctaaaaaagataatctttctattnggattgattatgtgagagacatccataatacttttgaagtatctcaactttagaaatgggtggctggag

SEQ ID NO: 306025 - DNA, 275 bp, Homo Sapiens
  misc_feature (158)..(158): n is a, c, g, or t
  misc_feature (250)..(250): n is a, c, g, or t
gctcaggtgattgtcccacctcagtctccctaggagctgggactacaggcacacactaccacaacctgctaatttttgtatttttttagagacaggattttgccgtgttacccagggctggtctcaaactgagctcaagtgatccacccctgagcctnctaaagggattacaggcataagccgcttgtgcccagcctaaattatccttgtaaccttcccatatcaacttacataaaatttacacgatttntcaggtttccccataggaacttaag

SEQ ID NO: 306026 - DNA, 290 bp, Homo Sapiens
  misc_feature (193)..(193): n is a, c, g, or t
  misc_feature (256)..(256): n is a, c, g, or t
ctcctgtgtcagaaagtgaagctgaaatgagagaagtgatcgcctaggccagcagtcccaaacttttctgacaccagggaccggtcttgaggaagacaatttttccatagatgggggggtgatgaatgaaactgtcctacctcagatcatcaggtgttagaatctcataagctgcgggcaacccagatccctngcatgaacagttcacaattgtgttcccgcccctatgaggaatctaatgctccgcttgatctgnacagggagggcagagcacaggcgtttaatgctcg

SEQ ID NO: 306027 - DNA, 371 bp, Homo Sapiens
  misc_feature (177)..(177): n is a, c, g, or t
  misc_feature (181)..(218): n is a, c, g, or t
  misc_feature (248)..(248): n is a, c, g, or t
  misc_feature (300)..(300): n is a, c, g, or t
  misc_feature (327)..(327): n is a, c, g, or t
  misc_feature (333)..(333): n is a, c, g, or t
  misc_feature (361)..(361): n is a, c, g, or t
gacaaacctcatctatttcactgctttgtccacatcgacaatgacccactactcggaacagttccctactccccaccgccctctatggtgcgtctcccccgaccccttggtttgcatggccccccgtgtgccagtctggtccaagctcacctgggtcaccatcaccactctcagcancctnnnnnnnnnnnnnnnnnnnnnnnnnnnnnnnnnnnnnntaatgatcctacaagtcctgttagtcttanaggacttagtgagggttgtgttcttggaaaaccttccgtgggggtggccttnatggccacatgggggtggaaatgggtnaacttntaggagggatggagttgggaagggggcntgctggtggt

SEQ ID NO: 306028 - DNA, 408 bp, Homo Sapiens
  misc_feature (96)..(96): n is a, c, g, or t
  misc_feature (190)..(190): n is a, c, g, or t
  misc_feature (330)..(330): n is a, c, g, or t
  misc_feature (360)..(360): n is a, c, g, or t
  misc_feature (366)..(366): n is a, c, g, or t
cttctctctagctactgaggggaaaagtcaggatgaagcgggtccctcggcctccagaaggtgttttattacagtcgcaaacaggtagagcggcancaccccagtgatgactccctgctccttagattgtagggacgctggcacctcactcatgctcctaagtggccattttgcgccctggctgggcagnttaggcagacaaaatgagcccccaaaagtttaaaggcctccaccaaaggagtatttcttttcttgaggtgtcattgtatttccatccacggaactttcagtttcccccgggtgctctgggatctgacatgggagtagggntgttaacatcttaattcccttcttttcccntttggnaaaggtggcatgttttttttcttcgggagttcctagggggat

SEQ ID NO: 306029 - DNA, 115 bp, Homo Sapiens
  misc_feature (65)..(65): n is a, c, g, or t
  misc_feature (82)..(82): n is a, c, g, or t
ttgcttgcaggaaagttcccaacagaggcagtgcactctgggagccgcaggggcagggaccaccngggggaccttcaggaantgtaggagcttacccagttttggcaacaccagc

SEQ ID NO: 306030 - DNA, 321 bp, Homo Sapiens
  misc_feature (99)..(270): n is a, c, g, or t
  misc_feature (284)..(284): n is a, c, g, or t
  misc_feature (289)..(289): n is a, c, g, or t
attcggcacaggaggttggagaagtataagacctatggccaggaactcatcacatctgtgctgccctttccctgaagagtcagtagggtattgtagcannnnnnnnnnnnnnnnnnnnnnnnnnnnnnnnnnnnnnnnnnnnnnnnnnnnnnnnnnnnnnnnnnnnnnnnnnnnnnnnnnnnnnnnnnnnnnnnnnnnnnnnnnnnnnnnnnnnnnnnnnnnnnnnnnnnnnnnnnnnnnnnnnnnnnnnnnnnnnnnnnnnnnnnnnnngtggctgttagttntcagnttttcagggagggttgagggcagggagattcg

SEQ ID NO: 306031 - DNA, 302 bp, Homo Sapiens
  misc_feature (163)..(174): n is a, c, g, or t
cttcataccctgaaggcattcttacaccaaacatgagcttcccaaggcccatcccacttgcctcgtcatccatcctgcaaaacaactttgccctggcttactgccccctccaagctctccctctttgatcgtgttccagctgccaggggagttcttcctcacnnnnnnnnnnnngatgggaacataggagaaataggcaagagtaagaataaggagccagaatccaggtgggctcatcagtaattatgtaaatgcagggccagtcacaccttttttagggtttattttccccctttacagga

SEQ ID NO: 306032 - DNA, 362 bp, Homo Sapiens
  misc_feature (249)..(249): n is a, c, g, or t
  misc_feature (281)..(281): n is a, c, g, or t
  misc_feature (290)..(290): n is a, c, g, or t
  misc_feature (311)..(311): n is a, c, g, or t
attcaggttcccgtgtgagaagggatactgtgattcattcttctgaagagctggtggagagcccccacccccatcccatcagtagcccctggggactgaagcaaatgggcaagtcggtctatccccaagccacaacccctgcgtaatgatgatggagaccttcaagcggccaccccttgggcactgcagcctttgaataacaagggaaaagcaacagctgtgaggaataaattctttgcatgggtaaanttaggggcctcgaactcaggagttcgaagcantgtattttntcatcattatttcctttccantaggggtttgttgattgatcttttgcccaggaaagtgtttgttttcttcgg

SEQ ID NO: 306033 - DNA, 384 bp, Homo Sapiens
  misc_feature (337)..(337): n is a, c, g, or t
  misc_feature (358)..(358): n is a, c, g, or t
ggcacgagcggcacgaggcttatggaaacaaaaactagtaatcccatcactcaagaaataactactgtcaacattttaaacatttttgtgctttgtctttccttcatgtatacatacacaattttcttttagtatgtttggaattgaactagtaattacttttctgtttacttttttacattcaactacatcataaggcagtgtctcatggatactaaatatttggaatattactttaatgactacataatattggaaaatatatagggtgattaggaagtattttctctgcccggacgcgggggacttcacaccctataatctcagcctccccaangttctgggggttacaggggcngaggccacccgccccgggcctggagg

SEQ ID NO: 306034 - DNA, 281 bp, Homo Sapiens
  misc_feature (106)..(165): n is a, c, g, or t
  misc_feature (177)..(177): n is a, c, g, or t
  misc_feature (191)..(191): n is a, c, g, or t
  misc_feature (220)..(220): n is a, c, g, or t
  misc_feature (225)..(225): n is a, c, g, or t
agaactgaagcaaatgagctctgtaattctatgaaaataaacgcacaggataaaaaaagagaacttgtttcaacaaggataattctctgtctttgggcctagttgnnnnnnnnnnnnnnnnnnnnnnnnnnnnnnnnnnnnnnnnnnnnnnnnnnnnnnnnnnnncgattcgcgcantgttagggtgagcnggggcaagcgagcatttaacggctgtggntctgncttcctgttcagatcagcgggaattttaggattctcatagggggggcggggaacac

SEQ ID NO: 306035 - DNA, 172 bp, Homo Sapiens
aagaaagttcagcatgactataaaagattaagtagagtttgttcatgcttttccatcttacttttctgattaaagcaggcattttaatatactgattggaaaaatctatttatgtatatatctccttccagtgcattactgatgaagttttcaaaattatctttttggggag

SEQ ID NO: 306036 - DNA, 383 bp, Homo Sapiens
  misc_feature (255)..(255): n is a, c, g, or t
  misc_feature (350)..(350): n is a, c, g, or t
  misc_feature (355)..(355): n is a, c, g, or t
  misc_feature (368)..(368): n is a, c, g, or t
acaataggtgattcagttaggaaattaatgttagagatcggttttccttgtggaaatcagtggtattcaaatgcctgaattggctacccggttttagagctgctctccatgtatgagcaggacataggattcactctctggaatgcttctgtaggcaggactttgaaatgaccctgtcctcagcctgggaggatgcggtattctgattgtctgggtgctgtgtcaactggggcctgcctctgggatagtgttgtngctgccccacgagaaccctatatgccagggtgagcttgaagcacctcagagacagagcactgaagctccattgacacagggctatttcagctatncattnccccctgtttttnccagcacctttgtct

SEQ ID NO: 306037 - DNA, 377 bp, Homo Sapiens
  misc_feature (48)..(125): n is a, c, g, or t
  misc_feature (148)..(216): n is a, c, g, or t
  misc_feature (358)..(358): n is a, c, g, or t
ccatgctggtgaggcgcctggactccagtcagataacccagcatcaannnnnnnnnnnnnnnnnnnnnnnnnnnnnnnnnnnnnnnnnnnnnnnnnnnnnnnnnnnnnnnnnnnnnnnnnnnnnnctaaaggtgatagtgaacctaannnnnnnnnnnnnnnnnnnnnnnnnnnnnnnnnnnnnnnnnnnnnnnnnnnnnnnnnnnnnnnnnnnnnattaaagaattgggagcaatggtcttgcaaccttttccacaacccccccagccctttaattcaggaaaacctgcctaaaaatgaaggcccaaagtgtaaggcacaataaaaacattaaaagtgggagcccttgaatagagtngggtagggagcctttggcc

SEQ ID NO: 306038 - DNA, 342 bp, Homo Sapiens
ggaacacatgatgcgattactttccccaatccataaatccactactgcagcccacatctggatagatacagtgattcaaagtagaaaatgataccagttgagtcccttctcagtatttttcaagccatcgttcctgcattaaacaggtacgcccaattacaaataacaacagttaccatctacctatccccttctgtggggccagtatgagtgctagccacttaacatctttcatgtcatttaatccctaggggcaactctgtaaggaaacatattcatttacctccattttaataggtgggggaaagttaagggacttcaaagagggatgttaagggctgg

SEQ ID NO: 306039 - DNA, 411 bp, Homo Sapiens
  misc_feature (341)..(341): n is a, c, g, or t
  misc_feature (351)..(351): n is a, c, g, or t
  misc_feature (366)..(366): n is a, c, g, or t
  misc_feature (388)..(388): n is a, c, g, or t
  misc_feature (393)..(393): n is a, c, g, or t
accctgtgctccacagcagtaggttctcaagagatattgcttgaataacaaaaatataaattaataaaatccctcccagcaattatgcaggtatgctagtagctcctagcagttgctctaaactaacagcagatggtgctgttgtaccaacaatggctctctctaactgacaggtttaataaaatttgttgagttccaaagctgcctcaccttcctttcctccatgctcagcagggaacacggcattccctgaggagatgggcctcttttttccccttaaccatctgggtgggcattgcccacaccctgctgagggaaggcgagcttgcgttccggggcantcagggcaantctggcctcttgccntagtggcaggccttcatccatnaaacntttcatggcagccttttc

SEQ ID NO: 306040 - DNA, 388 bp, Homo Sapiens
  misc_feature (272)..(272): n is a, c, g, or t
  misc_feature (338)..(338): n is a, c, g, or t
  misc_feature (357)..(357): n is a, c, g, or t
  misc_feature (367)..(367): n is a, c, g, or t
ctctgcttggttgtaccaacttctcattttccctggctccttatccacctcttgggattcagagttggctgaaagtggcaggcagtgctgctttgggtggcagcttgattttagacagccagttcacatagtgcttttgttcaggacctctcgggatttctagacagacagcaagagagttgggctaacacctgtcatgaagtgtctaaggaatgagtgcacaagcattcaggcatgtggagggcagaagacccttgaccatacctgccttnctacagtaaacagcctgtttgttttctgccaggtagcatttgcaggtaggttctttttattcaggnaaattctttattagggctngcagggtganctttgaggtgtttatttaggg

SEQ ID NO: 306041 - DNA, 144 bp, Homo Sapiens
  misc_feature (33)..(33): n is a, c, g, or t
  misc_feature (65)..(65): n is a, c, g, or t
caattttaatgaaagctgctcatgaaattaggnttactgggtcacagttttcagatgaggaaccngggacaggtgaagggacagaattggaacccagttctgtcaccatagatgccccacctgttctacactggcctgtcaaga

SEQ ID NO: 306042 - DNA, 188 bp, Homo Sapiens
ataaccagcgacaactagagttatcctggggagatgcgctgctgctgagaccctgtgtttaaaaccatgtcattagcagcacctgcagccatacctaacacatctctgaggttcagaaggttctaggtgaaccatccaattagccctgggaaggttttgcagggagacccatgccaccacctctgggt

SEQ ID NO: 306043 - DNA, 432 bp, Homo Sapiens
  misc_feature (341)..(341): n is a, c, g, or t
  misc_feature (375)..(375): n is a, c, g, or t
  misc_feature (396)..(396): n is a, c, g, or t
tcttttttgctgagcatatagtgctaaagttgaataagtgaaatatgtagttttccagcaaattaacagcttgttgaaaatactttctgtaaaaaatagtctctccctttgcaacaaattatctaagtgcttctacaactctaaaaatatgatccgtcttaaatccacttccctttgcaacttgccagccttaactggccaaggggtcacaaaagcgccacttcaatacacagaggcactctcctgctgcctgtgattaggctatttgcaggatctggtctttccctaccatgttgtggaggtccagggggctggtatcataggatctctctggtgacttnggtacaatctggtcggttggaatggaataacggntgggatgggggtggggcaggntggatggatttacaggcttggctaggggttccgggg

SEQ ID NO: 306044 - DNA, 259 bp, Homo Sapiens
tagggagttaatggaattttaggagtcacacataaaagtcttcatgtgtaagaactgcactttgactccatccattcacttattcaacagatatataccaacagcctaatgtgtgacagggatcatgctgcaccttggaaataaaatagtgagcaaaacacagtcctgccctccaggcactcatagttttgggggcagagacccttacaaccacgatacaacctgatgatctctttccaaagtcacagagccaaattcc

SEQ ID NO: 306045 - DNA, 400 bp, Homo Sapiens
  misc_feature (388)..(388): n is a, c, g, or t
ttcttcactcataatagctttatttaacactagactataagactattatcaatctccctctaagatacatacttaaaattatattttatagtgaaatgtataaagttgttctcaatacttccaacatttaccacataatttttactcttggtttctgacacttcagtcacaatattgcatcatttcagcataacagctttcagtgcctaatccatccagtgggggctgcatttgggacattgaattgtttgttgactaatatttgccaacactaactgtggcaccgggttttgttctaggatgcttgggaatatggccaattaaacaacgtaaataggattttcttaacactctggaaaggcttatatttctaggtggaggtaggganacaggactccgg

SEQ ID NO: 306046 - DNA, 319 bp, Homo Sapiens
  misc_feature (107)..(107): n is a, c, g, or t
  misc_feature (171)..(171): n is a, c, g, or t
  misc_feature (227)..(227): n is a, c, g, or t
  misc_feature (248)..(248): n is a, c, g, or t
tgggatcaagtgatcctcccacctcagcctcccaggtatctggaaccacagctgcatgccactacgcccagctaattttttatgaattttttgtagagatgagggtntcgccatgtgttcccagggctcatcttgaattcctggggctcaagcaatcctcccaccacagantcccaaagtgctggggattatagggcatgagccaccacggcccagccaagacgatntttaaatgtgggcttgggggnagaaaatttccaatgggctgtgttgaagggatgaaattgaaagagggaaatcatggggaaggcaagaggga

SEQ ID NO: 306047 - DNA, 329 bp, Homo Sapiens
  misc_feature (307)..(307): n is a, c, g, or t
taaacaaagtgttccatcagtttatgtgtaaagcaagaaatgaggctgtggaccactagggctccatctccagaagtaccataaagcaggcattctgcgtaggataactctgcttacagagccagctgacctcccgttttgtcattgtgtgatgccctcccattctggtaaatcaaaccctgaccgtttaaaactgtggggaactggggtgggaccttgcgcttaggaagggatatgggtcttatgctaggtgcctctcattacagagtttgctatggaattgggtctctgctaggcctctgggggntcacttgagggatgtgtttatt

SEQ ID NO: 306048 - DNA, 276 bp, Homo Sapiens
  misc_feature (252)..(252): n is a, c, g, or t
aaatatttagaagtaaatggtcatgatgttcacaatttacccttaaagcattcagtgaaaatactaataattaaatatgtattcggctgaactacactaaatcattaatattttaccagttttgacctacaaaaataaaaatttcatatggcataatctaaaatacaaaaaagagtgataagcaaacacaataaaatgttaacagttgggcaaatgtggggtgaaaggatatgtaggaacttcatcctactnttcgtataacttttctggaaggta

SEQ ID NO: 306049 - DNA, 436 bp, Homo Sapiens
  misc_feature (60)..(60): n is a, c, g, or t
  misc_feature (386)..(386): n is a, c, g, or t
  misc_feature (426)..(426): n is a, c, g, or t
gcatactcacaaaccaattagcacatacactcccattctgagcatataaaagccccaggntcagccacactttgggctacccacttttaggtggtgggaagactacccaacttcaggtaagggtgctgtccaactcaggcttccttctctgctgagagctgttttgttactgagtaaaactctttgcctcactcaaccgctagctgtcagcacaaccttattcttggacatggggaaaagaactcaggacccaccaaacggcaagtgcaaacaaagctgtaaccctgtaggcacacccctcctgcttgccaaacaatggggagaaggggacctctggggcaccacacacctccattttgttggggctgtgggatgttgaggacttnaaaggaactttttaggcattgcttgttaacaccccctttnggggctttta

SEQ ID NO: 306050 - DNA, 418 bp, Homo Sapiens
  misc_feature (203)..(203): n is a, c, g, or t
  misc_feature (307)..(307): n is a, c, g, or t
  misc_feature (358)..(358): n is a, c, g, or t
tccacctttcttacatgttcttttttagtcataggtacttggcttactcaagggaggtgtagcgtaagataaagataatggagggtgttccctgtagaataggtacaaatgctgcaggctttatcttgggcagagcaagtagggttttggtcctgagtaagtgagtgaggttaggtggagctgcctgtcttccagccgtgcgnatacaactgactcagtccgtgttctcaacagtttttgaaaagcccatttttctatcccacttactcccacctggcagttctttaagaacgtagttttccagggntgttcagggcaacttccccacttacttccattttcctgtttgtgggtcttncatttgaggagacggccttaaacagggattccggggggaagttgcagggttttagtccgt

SEQ ID NO: 306051 - DNA, 354 bp, Homo Sapiens
  misc_feature (199)..(199): n is a, c, g, or t
  misc_feature (249)..(249): n is a, c, g, or t
  misc_feature (332)..(332): n is a, c, g, or t
  misc_feature (337)..(337): n is a, c, g, or t
acaggtagaaagaatatgtatacatctttagtcctgtctggctctagtttcacccactttcagagctgctggaagtggacagtgtccctccttgtatctaagatacttggttccccttgatattctaattttagggccatggtggggcaggtgggattggcccccttggtctgagccagctttcagaatgacgtctctncaactgaatttatatggcaatggtattattttcctggtttcattcagttnctaagtaccacattttaactcttccatacttcttattcctaatttgcagcacagcacagtggggttaggagtgtggggatgtnaagtngacacaggcctggggct

SEQ ID NO: 306052 - DNA, 141 bp, Homo Sapiens
gcaaaaggtaagactattaatttttataaatgccttttaaaacgtctagttgttaacaacttggacagaacatcgtgggttccttcgcagatttccttgtgccacatctcttttccataataccacttataaagaattgtc

SEQ ID NO: 306053 - DNA, 417 bp, Homo Sapiens
cggtgtaatgaaagggtggttttaaatcaccaatcaggtattgccttttctaacccatgaatcaagatctaaaattgcaggactcatcctggaaggttccaggtcagtgtaatccaagactattagtgcaacacagaatttcagcttccggagataattccttttgctatgcactattctgatttcatttcacatgtggttgactttattgcttaattcttcaattcgaaaggagcttctgatgaaagctcttggctctattgggattgttgaacagctcactggggagttagagctatcggggttccttcttggcagcagataaacccctgtcttcttccggggcaggagctttggaatgggactgaaggcggcaccttcttattcattgtaaaataaacctctccaaaggttcct

SEQ ID NO: 306054 - DNA, 119 bp, Homo Sapiens
gaatgtaagctaattaaatggcttattaaaggagattttcagatatttttgaaaatctatcttgatagtacttataagagataaatataaaaacttaaagatattggccaaaggagatt

SEQ ID NO: 306055 - DNA, 414 bp, Homo Sapiens
  misc_feature (330)..(330): n is a, c, g, or t
  misc_feature (340)..(340): n is a, c, g, or t
  misc_feature (349)..(349): n is a, c, g, or t
  misc_feature (392)..(392): n is a, c, g, or t
tcctttgaaaggagaaagtctttgtcctctacttaggcagctgggctagaagtgccttttgacttctaatgttaactaccctccaaagcctcctgggtcaagaaggctctcccaaactccacccctgttcttcctggtcagagaaccagtcagtcattctagtcttctagtccttaaactgatctgatgacttgggaacataggatttcactgcaagtctgggctttttagtctgggaaatacatttgaggtctgttttcgcacagctgggatcacctgtttccgggttttattacacaattcaggaagggctaggaaggagggagtttnggggggcttnggcacctgnaaaattttaggacccgcattctttatttaaggtaaagggaagngggtaggggagggccccaggcc

SEQ ID NO: 306056 - DNA, 246 bp, Homo Sapiens
  misc_feature (175)..(175): n is a, c, g, or t
  misc_feature (182)..(182): n is a, c, g, or t
  misc_feature (215)..(215): n is a, c, g, or t
  misc_feature (232)..(232): n is a, c, g, or t
tagctggaatcagatcagcgcaatttgccaacaaaaagtaaaaatccactaccaacattcacactctgagtgcccactacagcaatgcagtgtagaggggataaagcaaaatacagagacgaatgaggttaaaactgctgtttggagccagatgacttaatggagaaaacaaaantaaacantacaagatacaaggttccaaaaggcataaaagngctttagggtcattacngggtacccgggggt

SEQ ID NO: 306057 - DNA, 214 bp, Homo Sapiens
aaaagccaggttcctttccagatcattttccaccacccgccttggtctgagactggcctttgtgagggaaactccattcctcaaatactttgctctcatcggaagccgaggacagacactccgtgaagatttgggaaagcttttctgaaaccttacactcaccccttcctctcttgctaaaccaacacctagttccatccctgggtgccctcgc

SEQ ID NO: 306058 - DNA, 184 bp, Homo Sapiens
  misc_feature (20)..(20): n is a, c, g, or t
  misc_feature (41)..(41): n is a, c, g, or t
  misc_feature (63)..(63): n is a, c, g, or t
  misc_feature (69)..(69): n is a, c, g, or t
  misc_feature (89)..(89): n is a, c, g, or t
  misc_feature (93)..(93): n is a, c, g, or t
  misc_feature (101)..(101): n is a, c, g, or t
  misc_feature (146)..(146): n is a, c, g, or t
cgagctcttatcagtctgtnagctccctggcggcacctacntgtagactcgccttcatatccnccagtntgcctagcatatagtgtgtncatnttgaaggnagaggcattccctagaaaaggtccaacccagcctcaaccaacatncctgacttcctgaggcacagaaccagcagcccctgagg

SEQ ID NO: 306059 - DNA, 396 bp, Homo Sapiens
  misc_feature (386)..(386): n is a, c, g, or t
actgtttgggcgtctctacctcaagtcacacatccaaaacggcactcgcccacacacagctcttccccctgtatttcccacttctgttaataggatcataaccagctctgtcaactaatgtctagtgtcagtgcagtgagagacaatgcagaactaagcaggatgaggagcaagcaacctccaggggcaggggaatgactgcaagagcacccacacctgattcacaccatttgtacagcacagaaatcaaggtcctcttcaaattacttttaaggcccacttctttctttatttcaatgggacccttgaggggtaaaatttagttcacaattggatttggggggagttaacatttgggaccaccttaaaggtcttttttcctctgngtttaggggg

SEQ ID NO: 306060 - DNA, 407 bp, Homo Sapiens
  misc_feature (162)..(162): n is a, c, g, or t
  misc_feature (247)..(247): n is a, c, g, or t
  misc_feature (325)..(325): n is a, c, g, or t
  misc_feature (330)..(330): n is a, c, g, or t
  misc_feature (333)..(343): n is a, c, g, or t
  misc_feature (387)..(387): n is a, c, g, or t
ttggcgccagtactcaggccagaagccccttgtgccctgctctcaggtaggcctggaaaagggcaacagtgcctctctgcagcatgaagcccccctgagcaaacagggcctagcaactcctgcccaggtagcggaatgtggcccaagcagaagggggaattngggaggtagcggggatcagcccctgtgctggggacccctagctctttgacacttcgggagcctgcatccccctaagccaagactntgcgcaggcagcacgtgcttaagccagacgagggacagcatgagagttcccctactttttcccccagggaattagatnggggncannnnnnnnnnncctaagggttttcctccctatttggattcaacggttgaaaattntcaaaagaaagttccttgtt

SEQ ID NO: 306061 - DNA, 343 bp, Homo Sapiens
  misc_feature (264)..(264): n is a, c, g, or t
  misc_feature (329)..(329): n is a, c, g, or t
ttgggctcctactatgtgctgcgtgctccatgctcagcctctcagtcctcattcctcgtatatccacctagatttgaggatgagtggcctctcccatcagccacaatcacatgcagtttctcctctatcctcagctcagggagcatacggacgttgcgcagtgaatgcagctggctgggggaaggctcagggaaccgcacccagggaagcccacctacagatcccaccttcaaaccacggacatgcttgcagccttccccagtnggccagagcagctttaacaaaggcatcttttgttttccttttcttgcaaccccaggaaaataggntgtgtttgggtctt

SEQ ID NO: 306062 - DNA, 340 bp, Homo Sapiens
  misc_feature (273)..(273): n is a, c, g, or t
  misc_feature (318)..(318): n is a, c, g, or t
gcgtaacacccagaatcttttccttgaccattctgataggagcctagaaccttctgtagttttcagtgtttctttggtgaggcaaattcttggaatatctttggcacgggggtgtaaaatttccactcgctatatttaagcctacagctgggagcaatttcttattgatgtacctaaaactagttaaatccccactctccttagcagtccctcttgaggagttatttaaggatttagggtaatatattacaaattgtgagtgcaaatctctgnccactctctgaggattgctgcacttaggggatcactaggccctgncccttccccgtcttaatcctcc

SEQ ID NO: 306063 - DNA, 317 bp, Homo Sapiens
  misc_feature (136)..(157): n is a, c, g, or t
  misc_feature (164)..(267): n is a, c, g, or t
gcagaagatgttggaagatataagtactagagaaattttaaggaaaggaatgtggaacataattgttgggaagcataattttttaaagctctgtgactttttgttctgcaaaatatagtaaatatctgctatcaannnnnnnnnnnnnnnnnnnnnnttttttnnnnnnnnnnnnnnnnnnnnnnnnnnnnnnnnnnnnnnnnnnnnnnnnnnnnnnnnnnnnnnnnnnnnnnnnnnnnnnnnnnnnnnnnnnnnnnnnnnnnnnnnacaaacaaaccaaaactccctagtggggtttttatcctggtaaccgttct

SEQ ID NO: 306064 - DNA, 191 bp, Homo Sapiens
  misc_feature (163)..(163): n is a, c, g, or t
  misc_feature (176)..(176): n is a, c, g, or t
taccatgtagaaacctgtgtcccgggtcatctgtaagatcatgattcgaaggatgggtaaatcaattcagcaggaaattgctcatctttctgccacaaatatctctcctagacaatggatactggcttcccctgatcttgtcactctaaatctgcttcagagnttttgattggagnacagaagcccaggtt

SEQ ID NO: 306065 - DNA, 408 bp, Homo Sapiens
  misc_feature (294)..(294): n is a, c, g, or t
  misc_feature (330)..(330): n is a, c, g, or t
  misc_feature (347)..(347): n is a, c, g, or t
  misc_feature (358)..(358): n is a, c, g, or t
  misc_feature (374)..(374): n is a, c, g, or t
  misc_feature (379)..(379): n is a, c, g, or t
  misc_feature (390)..(390): n is a, c, g, or t
aatagctttatcatgaggttgctccctcaaaggtgcttctctgaatagcctgtttcacatattagttgcattgccctgcatttgacacttaactcgttgtaccttttgtcatcaatgaaatgggatacaattttcttaacagcctccttttaaatataaggagactgaggcccaagacagttgaggaactggtccgggctcctacagcaaattgtaagggcagggatttaaaccaaggtaatgtgggtctcaggaattcctgtctttaacagttcttgctggaggcttaccccntctggggcattttctttcacggtggccggggtcccngggggagggctttgggncccttttaatncctggaattatttggnaaatnttccaaaaggntcccaaaagggccctgga

SEQ ID NO: 306066 - DNA, 240 bp, Homo Sapiens
  misc_feature (86)..(86): n is a, c, g, or t
  misc_feature (94)..(94): n is a, c, g, or t
  misc_feature (104)..(104): n is a, c, g, or t
  misc_feature (138)..(138): n is a, c, g, or t
  misc_feature (151)..(151): n is a, c, g, or t
  misc_feature (190)..(190): n is a, c, g, or t
  misc_feature (210)..(210): n is a, c, g, or t
taagttaaatcaagacaccattgttcacaaagtcgagaggtaacagccatgctcataatttcaactgaaaagtcttactcaaaatngttaggtngtaagataanttatctcaagtaagatgtccagaggtaaaggggnattacaccagggntttccctttggcttttctgagatcctcttggctctgcantcctgtttattggcttcatnctcaggctgtggagatgacctcaaaattct

SEQ ID NO: 306067 - DNA, 469 bp, Homo Sapiens
  misc_feature (28)..(28): n is a, c, g, or t
  misc_feature (288)..(288): n is a, c, g, or t
  misc_feature (331)..(331): n is a, c, g, or t
  misc_feature (431)..(431): n is a, c, g, or t
  misc_feature (448)..(448): n is a, c, g, or t
gccagccacgggagctgggcagtgcagngagtagccactggaatggaaaccatggtgaccaggactaaagtcaccattttacccagggtggtgtgtcccacatggcaaagcaagcattgtgtcctgtacagaagactgtaaactctgtcctgccctgtgattctggtgccttctccaatcccagcctcagactctgggagacccttggccccctcccctcttcattggccaaggctgctcaaagccctggggacaccttcacgtttattattcaacagaggcagttgntaggagggaagcagccttccccgccctccaggagggggtgttntgggtggccccgagccctgtttgttttgttgttacctttgttcttcagttagttgacccaggaggggggcagggcaggcttgggggttgttgttcttttnggggggcaacgttactnttttgggggttcccaggtttt

SEQ ID NO: 306068 - DNA, 391 bp, Homo Sapiens
  misc_feature (348)..(348): n is a, c, g, or t
  misc_feature (358)..(358): n is a, c, g, or t
  misc_feature (370)..(370): n is a, c, g, or t
ggcacgagagagattgctagtaatctaggaatgggcaacctagatggctcacaagcgccaggaagaggctctgctaggctagtcatgtgtagttccttctttcagtctcaacaacccgatctagtcagtgcaacataggccatcttgacgcttaatatttttcagatagttttcttatttaccagggaaaacaaattgtcatatttgttcatgtttgtgttctttgatttatcatcatttaaaatatgatattcacttgggataaaaggaatcagctacaaatacatttttctttacctttctggaaaccaagttgggttgctaggatatggatgaggacctgttggntcccctttangttattttgtanattgggggcccttttttacat

SEQ ID NO: 306069 - DNA, 301 bp, Homo Sapiens
  misc_feature (276)..(276): n is a, c, g, or t
gtgggagaacagtgcagagtcagtgttgggaagagaccatggttactacactattactacactatgccaggtctgaaagatggtcttcctgccagtgcagaatggattccatccaaagacagaaagagttgcctacacaagacaacagcaaaactgaaatttccatgaaccataccatacaactagtatcacagtgttcttaatctccagtgaagactggaggaatgaagggcaccaatagcttaactgtttaaatattttttcacaggtcatttngcatttaaagttccccagggtttcc

SEQ ID NO: 306070 - DNA, 296 bp, Homo Sapiens
  misc_feature (221)..(221): n is a, c, g, or t
ttcaataaatagtattgaatacctattctgtactatacaaaacactggtgataaaacaatgagcaaaacaggccattcttggattctgagaccattcctcctgccacacacaactccccgcaagaacacttagctatcagtgggaaaaatccagtgtctttctcttgctgggaccgtcatgtccatatcagtcatatacaatatcacaggtaaccctgggngggaggggaaagggggatggggaaccaaaatgcaaaggacctgggtgctaagcgccccatccttatttcatggca

SEQ ID NO: 306071 - DNA, 400 bp, Homo Sapiens
  misc_feature (277)..(277): n is a, c, g, or t
  misc_feature (324)..(324): n is a, c, g, or t
  misc_feature (352)..(352): n is a, c, g, or t
  misc_feature (377)..(377): n is a, c, g, or t
aattgtaatgaactcttgttgcgttcacttctttgcataactcgttattgcctgtacaaacaaattaagcaggaagaggaagaacctccacaatgacattagcctttcctggcctgttttcagtagttggtactttaggggcaattaaattctttggtcgagtaagtcaggcaaagctgaatcctcactggagttgctgaatctgaaagagattcctctactccttagagctcatgatataatgattgggatatttgcactaggggaagggaacctngggttttcacctcccaagtttgaccctggaacttagtgttgcagctntgggatgggggttctttaatttcttctngggtccttttggaattcttgcaccntgatggatgtttccgcccgcccg

SEQ ID NO: 306072 - DNA, 381 bp, Homo Sapiens
  misc_feature (331)..(331): n is a, c, g, or t
  misc_feature (369)..(369): n is a, c, g, or t
taaacgtctacttttctcctaatgttgtgtctcctttgctggggaaaacttttataattgctgcctaactcctgttgtttcactctgtctgccctctctcctaccctgcttttacccccagcctgggagtccacttgggtggaaatgcagcatataatgagcccaaagttaatcatctgcaggtttgccctgataagtcacagtatgtttgctgcactccttccaaggagtcaacaggcaggctttgggggatgtgctgaggagtgggcttatgggcattctggaggcgctgggcccaggatggggagggcagtgtgttggggggagtctnatctggaacgccaccatcttggaattgcctctgtttgnccctgaaggcac

SEQ ID NO: 306073 - DNA, 338 bp, Homo Sapiens
  misc_feature (136)..(210): n is a, c, g, or t
  misc_feature (261)..(261): n is a, c, g, or t
  misc_feature (287)..(287): n is a, c, g, or t
  misc_feature (322)..(322): n is a, c, g, or t
caactggtcacctaaggttgctgagttattatttattactctgaaaattgataagagggaaagaatcaaacatttcttcttcctgtcctatacaggccatgattgagggtaattcagcagttgatgaagtagtgtnnnnnnnnnnnnnnnnnnnnnnnnnnnnnnnnnnnnnnnnnnnnnnnnnnnnnnnnnnnnnnnnnnnnnnnnnnngcctcttatggaaatagtgggtctaggacctgtcgttttttaaccgggggntgatgccctccccctcccccgagggnccaggatttctaggggaccgttatggggttgtccncacttggttggggggg

SEQ ID NO: 306074 - DNA, 211 bp, Homo Sapiens
  misc_feature (60)..(60): n is a, c, g, or t
tggtcagatcatgccagccaaacaaatctgtcaggctttgaaacatagaaccgttagtanagatactgagataaaggataaagtaagatcagcctaaatgtttcagtctagttaagttgatttgtatattacttagaaatttcattttcagggaaatagttttcagatttaaataactgtaaagagctgagttattctttgacttggattt

SEQ ID NO: 306075 - DNA, 260 bp, Homo Sapiens
tgagagtcttgaataatacatcacatgaaatcactttcccaaagtgagtgggatattctaaagagaaaaatatttcttaccttgtatttaaatccagatgtgggttttcccctttctcagccttattggttgttttagctatcaagcaaagatgatttctttactaagtgaggtagaggcagggaaagtacagcagagacagagacaaacagttccagtgtccagtgaggaggcaggacttccctttcttcaccagggtt

SEQ ID NO: 306076 - DNA, 439 bp, Homo Sapiens
  misc_feature (213)..(254): n is a, c, g, or t
  misc_feature (383)..(383): n is a, c, g, or t
  misc_feature (394)..(394): n is a, c, g, or t
  misc_feature (402)..(402): n is a, c, g, or t
  misc_feature (424)..(424): n is a, c, g, or t
gtctaaaatagagaaagtgctccttaaacattgtttctcaaatcttccttttttgcctccagagatgtgttgatgacccatgcccacaggacatatatcgccctttgacctctaatgttgccctaattgccacttcctctgtctcctccagaaaacacagatgtagactcagacttccatctggactaataggaggagacaggctgtgaagannnnnnnnnnnnnnnnnnnnnnnnnnnnnnnnnnnnnnnnnntggtggtggtgggacaggaaggtggtgcggatgtttaaaaatgttggggaccacgcattcaggacagaatgggaagtgtctggggctttgggcattccacccacccactctaggggtccagactagtcntaaggaccctncggggttnaaggaaactcttcaagggaagncttaggtaattaggt

SEQ ID NO: 306077 - DNA, 348 bp, Homo Sapiens
  misc_feature (44)..(44): n is a, c, g, or t
  misc_feature (75)..(75): n is a, c, g, or t
gaatgggatagctagaattctcaagagaataaagataaaggaangggacagaaatatcagtaaaattgcacaganttaggaagccaatgatcacacaaacatttgggaggctggaacaagaagagagaaagtcggccagacttaggtgagcactaaagaggaccagaggacacacaatgtgctttcagaaacagaggccctgcaattgaaggcaggcacttgagctagctatagctatgttctgggttgaccacggattcccaatgacttggtttttcccggggaaatagtcttagccagggttgggggactttttatggggcttttatattttgatattcctcttgg

SEQ ID NO: 306078 - DNA, 253 bp, Homo Sapiens
  misc_feature (60)..(60): n is a, c, g, or t
  misc_feature (64)..(64): n is a, c, g, or t
  misc_feature (108)..(108): n is a, c, g, or t
  misc_feature (117)..(117): n is a, c, g, or t
  misc_feature (131)..(131): n is a, c, g, or t
  misc_feature (144)..(144): n is a, c, g, or t
  misc_feature (156)..(156): n is a, c, g, or t
  misc_feature (165)..(165): n is a, c, g, or t
  misc_feature (180)..(180): n is a, c, g, or t
  misc_feature (196)..(196): n is a, c, g, or t
  misc_feature (209)..(209): n is a, c, g, or t
cagacttcacaatctttatttaatctccagtatgtagggcacatttgtctaaacagagtntggnagggtacaaggtttcaaatagggcacattagtctaaacagagtntgggagggnacgtggtttcaagnagggcacattagnctaaacagagtntgggagggnacaaggtttcaaatntaaaagcataaatgantaactttcacctntttccacaacccttttttcatccttcctttttgccatcaagctg

SEQ ID NO: 306079 - DNA, 420 bp, Homo Sapiens
  misc_feature (374)..(374): n is a, c, g, or t
gtgtcaccgtcagcgtggagtgcaatgatgcaatcacagctaacagcagctttgacctccctgggctcatgcaatcctccctcctcagttccccaggtagttcagactacaggcaggtactactacactcggctgaattttaagtttttaatcttgtagagatggggtcttactatgttgtccaggcaggtctcaaattcctggcctcaagcgatcctcctgcgttgacctcccaatgggctaggatcacaggcatgagccacattaccagggcctaatgatgcagctttgttgcttatgcagctctttaaaaaagtgactcagggaaataaccatttaggtaaccatttaggataaccatgcttagggtgggnataatataccaagcaaatctaatcaggtaaccatggtattatgcca

SEQ ID NO: 306080 - DNA, 333 bp, Homo Sapiens
gggactaaagagatgggaggggttccacctaagctctagtttttgtatgtaagttgaagcccaagaaaaagggagaaatgctgaacaataggacacagagaacaaagggcaaaggaaacaaatgaaccatccactggggaggaaataggaagcaatgtggaatagagttcagaagaagtcaggttcatgccacagaaacacacccagggattcaaatcccatgaagttttgcaaagtcccaacctctgtttttgaggaagggtcccaaagcatggtcccaaatccttgccacaggaaccacctgggaggtgctttagttaaaattaaaggcag

SEQ ID NO: 306081 - DNA, 272 bp, Homo Sapiens
gcaggtgagcttgcactctaaggctgaagacagttctgggtcagacacttggagtatcatttataatctgaaagttctgcttttcatacctaattccctagcattctgctttttaaatgatcatgggatgtttgataaatgaatgcatgaatgccatttcttttaggtaaagactggtttactcttctaattccattttgcctaaactagccttgagttgtttgtgttccccaagtgtttactcccaggcaagatgggagggcagcccacgg

SEQ ID NO: 306082 - DNA, 350 bp, Homo Sapiens
  misc_feature (275)..(275): n is a, c, g, or t
  misc_feature (298)..(298): n is a, c, g, or t
tctcggttgagggcaagtgtgtcactggcaatgacagatactacctgctgagccccctccccctgacctcagcttcctgcctgtgccccacaaggagctgccagaggagtgctcccatgccagcttcccctgcacccacaggcacaggttctgtcgcttgtgccaggagctggtggatgtctttgtggagcacagttgaggagcagccctgtgaggctgaggctgcagcagctgcactctgctgcgggcacgggcaccctgggttgttctggggntggatcgttgaagagagaagctntggacagttgaagaagagttcgtttttggccacaattcattagagccctttt

SEQ ID NO: 306083 - DNA, 108 bp, Homo Sapiens
  misc_feature (59)..(59): n is a, c, g, or t
  misc_feature (66)..(66): n is a, c, g, or t
caggggagtcccagacaaggtggggcaaattggttgaccctagtcattagtaaggttanaagggantttcacgtgaagagatcagggaatgcttcgtggcccgcgtta

SEQ ID NO: 306084 - DNA, 285 bp, Homo Sapiens
  misc_feature (48)..(48): n is a, c, g, or t
  misc_feature (262)..(262): n is a, c, g, or t
tgagggtataactgaacgagaagaggaataaacaccaccctgtgattnatggatctttatagctctcctttgataaagaagggaaatatcgtacttacattagcatgttatagttgctgttgttatacagaagaatattaaacaatattcatatattgtttatgaatgcattgaattcataaacaatggtatggatattgactagccaaagaggtggataaatgtagatacaatgatacggtgatttggtattcagtgtccnttctgctctcctagtgtgccttc

SEQ ID NO: 306085 - DNA, 222 bp, Homo Sapiens
  misc_feature (16)..(16): n is a, c, g, or t
atataatagtttattnaaagtccgtaatgaccttagccctccacatcattaaatgcgacaatatattatttactaaagttattaaccacctcctttgaatttgtacatatcagggacataagtgcttatgccaaaaagaatatagaaaatgcctgcaatctcattaacccatttccccctttaccatcgcagtctaacttccttcagaaagttccttaaagg

SEQ ID NO: 306086 - DNA, 120 bp, Homo Sapiens
  misc_feature (21)..(21): n is a, c, g, or t
  misc_feature (31)..(31): n is a, c, g, or t
  misc_feature (48)..(48): n is a, c, g, or t
  misc_feature (101)..(101): n is a, c, g, or t
ttttttgactgtacaaaccangttttattangggactgccccaaggtncacctctggttcatgctcttgtcacacctgtttctcaagatcaagcccaaggntcaaaggaagttactaagc

SEQ ID NO: 306087 - DNA, 428 bp, Homo Sapiens
  misc_feature (308)..(308): n is a, c, g, or t
  misc_feature (344)..(344): n is a, c, g, or t
  misc_feature (368)..(368): n is a, c, g, or t
  misc_feature (415)..(415): n is a, c, g, or t
ttaaattgaaagcccaggccagagagtcccacagtttcctactcagacggcatcagcgcgtaaccgtgttgagtcaagcgtctcgtttgttcaagtctggacctcacacagcgtggtttttagggagtacacagctttttcagactcctgaagacagagtatgctagaagccccagggtgtacccttccgctgtctgtgggaagatagtgtggacggaaaagggctcttgttgacccacagctgatagggtgttagggacagcccagggatgaggagctttctaggaatgttctggcgggtgacagtncatttaatgtggaaacttcttcttaaaacacgggtncactctggggtttttctttcccantaggagtttttttgagcttattttcccaaagcttcagagccaacagnggcagatggacct

SEQ ID NO: 306088 - DNA, 375 bp, Homo Sapiens
  misc_feature (306)..(306): n is a, c, g, or t
  misc_feature (320)..(320): n is a, c, g, or t
  misc_feature (337)..(337): n is a, c, g, or t
  misc_feature (358)..(358): n is a, c, g, or t
tgatggcagaataggaaaaacaccaggctacattgaaatgtttaaaaagacaatgtctttttttgtgataagaggcacaaaccaactgtaattgtaccagagcttcctttagatttgaggtcacaggatgccccttagaattgaagcatctaagactctttagttgggcattactgacattacacaggctcagagatttccatgtatacatgaggaacggtgttgaaggtaaacacccatcttggacacatctgaggcaggccagtggatttacatccacattttcttttcactgttttctttccnggagggggggtttnttccggggtcccctggnaaatattcaggggaacagggntttagggatttttggag

SEQ ID NO: 306089 - DNA, 378 bp, Homo Sapiens
  misc_feature (264)..(264): n is a, c, g, or t
  misc_feature (300)..(329): n is a, c, g, or t
  misc_feature (366)..(366): n is a, c, g, or t
acagctactaccagggagatggggggaggggtggcatccatgattcaagactgtctttcctatcctcttcagtgctgctttcagtgatgaagttaaaaccaggtactgtgagtgctcacttgatttttggttcttatgaaggtgattttttgtgtagttagttgttaaattggtgtctttgaaggagacaattggtgtagccttctattccaccatcttgctctaccccctacccattattctttttgaagttcaacttgtccnatgtttgggccaatggggagcccctttgttgattcnnnnnnnnnnnnnnnnnnnnnnnnnnnnnngaggacccaagtcttcgttctgcccaacccaggactngggagttgcagt

SEQ ID NO: 306090 - DNA, 154 bp, Homo Sapiens
  misc_feature (74)..(74): n is a, c, g, or t
  misc_feature (134)..(134): n is a, c, g, or t
ggtaggcctctggaactgggacccccgaggtgttagccgttcttcttatgggtcgaggcttgcagagatggaantaaactcccagtctccccgttagtgcttcccagggcttattaggggaaggagggaaattncccgccttaattaaattttt

SEQ ID NO: 306091 - DNA, 241 bp, Homo Sapiens
  misc_feature (215)..(215): n is a, c, g, or t
ggaaagaaagagtgattgaagagattaaataaatggtatgacagtgggtaggcaacaaatataagtggtaagcagatcattttacgtggtcatagtgttagaacaatcttcaggaatacatcaaaatgttaaaactggtcaaaaactgcattgatccctttgacaatgggggctatatgttacttatcttaatactcttcacaacttgtacacancagatagtgggattgggtattttaac

SEQ ID NO: 306092 - DNA, 199 bp, Homo Sapiens
  misc_feature (112)..(112): n is a, c, g, or t
  misc_feature (161)..(161): n is a, c, g, or t
  misc_feature (173)..(173): n is a, c, g, or t
ataagcactgcacccagctgggaaacaactagctaataaggacaagatatatcaatggaaagaatctgatacaaatgcaagatgaagccattgtttctgctattaaggcagnggaaaaaatatgcaaatatggggaaagcaagcattgcttttttccgganaaaaatctttanggtaaaccttggggatttaggtgtgg

SEQ ID NO: 306093 - DNA, 328 bp, Homo Sapiens
  misc_feature (244)..(244): n is a, c, g, or t
  misc_feature (308)..(308): n is a, c, g, or t
tggatgtggttttctgagggccctatcggtgtgagcccagcccatttgtcactaaggacagctgtggccccttttggcttctccaaaggtccatgcccctcctactctgtcctcctgtacaaagtctcagaaatgacttcggtcttcttccccgcctctgaggattgatgggagctgaggtgtggggacccatccccttcaggtacactgcctcatagtatttcttctccccgcttggctgagnctcctctcttcagatgggctaaagcaggcacaacccccacgttgccacacagtcccataaactnctatgggataacaggtcagt

SEQ ID NO: 306094 - DNA, 331 bp, Homo Sapiens
  misc_feature (78)..(227): n is a, c, g, or t
  misc_feature (232)..(232): n is a, c, g, or t
  misc_feature (235)..(283): n is a, c, g, or t
  misc_feature (290)..(290): n is a, c, g, or t
  misc_feature (298)..(298): n is a, c, g, or t
  misc_feature (311)..(311): n is a, c, g, or t
  misc_feature (320)..(320): n is a, c, g, or t
aggacagaaacactcatggcagaaaagaacagacaccagagaagggcaaagaaaacagaagcaatacaaacagtaccnnnnnnnnnnnnnnnnnnnnnnnnnnnnnnnnnnnnnnnnnnnnnnnnnnnnnnnnnnnnnnnnnnnnnnnnnnnnnnnnnnnnnnnnnnnnnnnnnnnnnnnnnnnnnnnnnnnnnnnnnnnnnnnnnnnnnnnnnnnnnnnnnnnnnnctttntgnnnnnnnnnnnnnnnnnnnnnnnnnnnnnnnnnnnnnnnnnnnnnnnnnggacttnggggtttnggggggttagggnttacctttnaccgggccctt

SEQ ID NO: 306095 - DNA, 245 bp, Homo Sapiens
attgcatatatagagcaagataatcctgaggatgggacccaagtctaaacatcaaattcatttatgtttcatatacacctcataacacatagcctgaaggtacttctatagaatattttttaatcattttgtgcaagaaacaaagttttgactaaattttgatggcaacccatcacataatgtcaggtgtgggaatttcccacttgtggaggtcatgtccctcaaaaagtttcccaactctaggg

SEQ ID NO: 306096 - DNA, 372 bp, Homo Sapiens
  misc_feature (18)..(18): n is a, c, g, or t
  misc_feature (21)..(21): n is a, c, g, or t
  misc_feature (83)..(83): n is a, c, g, or t
taatctcataacagtcanttngagcgcggcaggggaatatcctgtgggaaggtggagacaaggccactcctgcggccccaggntggttccagagctgagagaggcattttgggagattgaggctctaggactcgctctgtgcttgagaaacagggagctgctgcgtgcatttttggggccagacccttgcccctcccttccttgtctccctgtgcctgtgttcacacccggctgtcatgcttctcatccctgactgttggcacctactgtgtttaagtctttctcctgctgggcctcatccctgactgttgggcacctacttgtgtttaagtcttgccccctgcaagctggaacagacagtgctcgcggggt

SEQ ID NO: 306097 - DNA, 293 bp, Homo Sapiens
  misc_feature (60)..(60): n is a, c, g, or t
  misc_feature (64)..(64): n is a, c, g, or t
  misc_feature (67)..(68): n is a, c, g, or t
  misc_feature (74)..(74): n is a, c, g, or t
  misc_feature (77)..(78): n is a, c, g, or t
  misc_feature (82)..(82): n is a, c, g, or t
  misc_feature (85)..(85): n is a, c, g, or t
  misc_feature (196)..(196): n is a, c, g, or t
aggaacaccagaattaagaggaaggtagccatgcaaaactcaacactgtttgtcaacgtngggnctnnctcggncanntctnggngagcacatcaacttggtaaaaacacacacagaaaagaaaacactttcttccaactgtcagagcaaaaatcctttactcttccgtccagcaacctgaacaaaaacaagggantttgtggcttggtttcctttacaaccttatcttcactccaggggaccatcccctgtctctaaggcaacaggggcacactttggggactacccggggg

SEQ ID NO: 306098 - DNA, 175 bp, Homo Sapiens
  misc_feature (165)..(165): n is a, c, g, or t
ccttcgcaactgaaaagctgatggagctggattccctgtttgtaaaggcatgaattcctggtggctccaccccattcccccagcgtgcatgtggggccttagtgggctgcaggcatgtttaggcaagcccctgtgcaagttccctttatctgcacaaaacatctnatgtaaccat

SEQ ID NO: 306099 - DNA, 146 bp, Homo Sapiens
  misc_feature (127)..(127): n is a, c, g, or t
actggagtagattccatctcgagaaatcactttctttgcttgtccctaagaagcaactcctcatccattcaagtttctcatgagattgcagcgtttaagtcccatcttcagctccagcctgggcgancagagcgcgactccatctc

SEQ ID NO: 306100 - DNA, 121 bp, Homo Sapiens
  misc_feature (50)..(50): n is a, c, g, or t
  misc_feature (55)..(55): n is a, c, g, or t
  misc_feature (70)..(70): n is a, c, g, or t
  misc_feature (77)..(77): n is a, c, g, or t
  misc_feature (86)..(86): n is a, c, g, or t
  misc_feature (106)..(106): n is a, c, g, or t
ttttgagttacataggttttaacattatttttcccttaggaaacctggantgttntttttgcttttaaanttccacntggaaactngaaagtttattttaccttcntgtttaaagtacatt

SEQ ID NO: 306101 - DNA, 403 bp, Homo Sapiens
  misc_feature (243)..(243): n is a, c, g, or t
  misc_feature (248)..(248): n is a, c, g, or t
  misc_feature (289)..(289): n is a, c, g, or t
  misc_feature (298)..(298): n is a, c, g, or t
  misc_feature (311)..(311): n is a, c, g, or t
  misc_feature (322)..(322): n is a, c, g, or t
  misc_feature (327)..(327): n is a, c, g, or t
  misc_feature (346)..(346): n is a, c, g, or t
  misc_feature (356)..(356): n is a, c, g, or t
  misc_feature (376)..(376): n is a, c, g, or t
tccactattagaggctgttagcactcagacttcatcctgaacctggattagtgatcggttttgttttaagatcctaagagcacaaacaatgagacagaaacaggctccattcgctaatgcactgctcattgagggaatgtcagtgatgacatacatgtgggaaaatttgggggctaccagacctctccccagtctcatctcagtctcaggcccagaatgaggtgaaattgggagagagggccnggggngcagaggaaagggggtttcctgggggccatttaggggcccntgtcaactnaagggcaactttncccgccattgnttttncagggaagcctttagctcnaggccttttntttgggggggcccatttttnaaaagggtttccaaggtttccttggaa

SEQ ID NO: 306102 - DNA, 338 bp, Homo Sapiens
  misc_feature (81)..(174): n is a, c, g, or t
ttgaattgaattccttggtaggtagctataaacatagcagatacactaaggctttctctatgcaatataaaatgtctctcnnnnnnnnnnnnnnnnnnnnnnnnnnnnnnnnnnnnnnnnnnnnnnnnnnnnnnnnnnnnnnnnnnnnnnnnnnnnnnnnnnnnnnnnnnnnnncgaataaaataaacacaaaggcaaatggaagggaaatattaacaaaggggcaggaaatccaatggaaagtggaaaaacaaaggataggaggaaatttaaccaaaacttaggagctgggttcttttggaaaggtccgggtaaactggttaacctcttgggccggg

SEQ ID NO: 306103 - DNA, 322 bp, Homo Sapiens
gtgaagttactgtgcaaagcagcatgcatagaggaataggaggaatgtagaggcattctgcagtctaccacacaggcccttacattattctcattataatcatacttaaacaccaagccactaaatgaggtgacacccttgtgcttgtaacagttatctaactatgaagctaggctcgattaaaaatgaggaataccacaataagttaataaatttaaattaagggccattaatataatatgagtgatgttttgtttcgtttttgctggaaacttaaattgggctgtccaaaaatgggacatgtcccggagagggccaatcc

SEQ ID NO: 306104 - DNA, 446 bp, Homo Sapiens
  misc_feature (157)..(157): n is a, c, g, or t
  misc_feature (334)..(334): n is a, c, g, or t
  misc_feature (345)..(345): n is a, c, g, or t
  misc_feature (380)..(380): n is a, c, g, or t
  misc_feature (393)..(393): n is a, c, g, or t
  misc_feature (406)..(406): n is a, c, g, or t
  misc_feature (411)..(411): n is a, c, g, or t
  misc_feature (420)..(420): n is a, c, g, or t
tggcatactctaaaatttatatcttatgtgcacagtagaaagtaggttacataaaataagttcattcactactttaaccctaaagtattttgtccaccagtgagggtttattgtaagtcatccctcctctccgtaacagaatataaacatcggtggncaaggactttctctcttcatagctatgttcctaggatcctaggaagaggtacttaataatttaccttgtttttgggttctcacttccaaatatttcttaaggtaaactacactggacacgggcaattcttaaaagtgttcagagggatgggggtgcagtgggcttcacacctgttantccgggggcantttggggggagggcttgaggacaagagggatccanttggaggccccangaggggagttttngaggnttaggcccngaggcaacataggtggagggaccccc

SEQ ID NO: 306105 - DNA, 263 bp, Homo Sapiens
  misc_feature (68)..(105): n is a, c, g, or t
  misc_feature (170)..(170): n is a, c, g, or t
  misc_feature (203)..(203): n is a, c, g, or t
ttaaacagtcttctcgcctcaacctcctgagtagctggaactgaaggcacataccaccatgcctggcnnnnnnnnnnnnnnnnnnnnnnnnnnnnnnnnnnnnnnggaaagagatggggtctcactatgttgctcaggctaatctcaaactcctcttgggctcaagtgancctcttgtctcagcctcccaaaagtgccagggnttacaggtgtgagccacttgcacccatcctctgacacttttaggattacccgtgtcagtg

SEQ ID NO: 306106 - DNA, 386 bp, Homo Sapiens
  misc_feature (17)..(17): n is a, c, g, or t
  misc_feature (105)..(105): n is a, c, g, or t
  misc_feature (362)..(362): n is a, c, g, or t
  misc_feature (372)..(372): n is a, c, g, or t
tgaggagagataaaganagttgtctcctcactgtcagaccccagatgttacatgcagggagcctgctctctttaaggcagtcttggaaatggagcctggagggtnggttgggcagggctgggtcatcctggcataatcccacatctgtgtgcatcgtagcatggctggcaagggagtccagggagcagcttcctcgggcctttaatgcagctgatccagggagctccagcctcctgaaaaggggacaagagcctgactggggcacatctctgcccattacccccctttcctaggagcatggggccaggggcttttgggattaggggtttaacccagcagacgagaccatttagggatttttntccatgggtngcccttcagcattg

SEQ ID NO: 306107 - DNA, 399 bp, Homo Sapiens
  misc_feature (35)..(35): n is a, c, g, or t
  misc_feature (42)..(42): n is a, c, g, or t
  misc_feature (146)..(146): n is a, c, g, or t
  misc_feature (363)..(363): n is a, c, g, or t
  misc_feature (388)..(388): n is a, c, g, or t
gctgtgtatgcttttagtgcctgtcgtatctaaanatctaanggtcataaagatttgcccctctgttcttttctaagagttgtatggtttaagctcttatatctaggtctttgatctattttgagttaatatttgtgtatggtgtnaggaaggggagaacttcattcttttgcatgtagacatccaggtgtcccggcaccatattttgaagagactattctttccccattgaatggccttggtacacttgttgaaaatcacctgggccatagatgtatggggttgtcaacaaatataaggtgagtcaaaagtatatgctgggattgaattgatatgctgacaccaatagggccacagagcctntccttccaggggggccccccagctnggtaaggggta

SEQ ID NO: 306108 - DNA, 344 bp, Homo Sapiens
  misc_feature (330)..(330): n is a, c, g, or t
ggagaataaaagtaagcatttgttctctcctcagctgactttgaggtaaacaaaaatgcttttagaatcccagaatcaatcaaactataaaacataattacagtatataattcagtgtacaacatataattcaattgaagtaaaagaaaaccgaggattttcctatctgggaagtctgatttgctttataccaggaaggcgctctactcccgcggggctggaatgggccttaagggaggccctgtgggaggacccccatctttctacccacccgcttcccccggggcccagtgtttctttctttccccccaggggtcttcactccttggntggagcttttctgg

SEQ ID NO: 306109 - DNA, 302 bp, Homo Sapiens
  misc_feature (24)..(24): n is a, c, g, or t
  misc_feature (193)..(193): n is a, c, g, or t
  misc_feature (257)..(257): n is a, c, g, or t
  misc_feature (278)..(278): n is a, c, g, or t
aggcccggtgcatcatccctcatnagaggcaagcccagaagcgccacaatactagggtcccccttcaggagacagagacccccaggacacagagggcccccaagtcactcagcccccccaggacacgcagctcctgcaggacgcagagggtgcccaagacacacagtccccaggacagagaccccccaggganacagaggacccccaagacacgcagtcttccagggacacagaggtccccccagggacacacagtncccccagggacacagaggttnccccagggacacagcacttccagg

SEQ ID NO: 306110 - DNA, 406 bp, Homo Sapiens
taataaatattggaagaaacctgggaaacatgtcgagttgattctaagagtgttagatccaacagggtaggctatcacactccatttgtttaattcattgatatagatgcacttaccagagagtctggatttcatggtttagcttgagcagcaggaggtgactcaacatttgcctacatttgatgaggtggagatgtcagagcttccctgctatgatttgggggagagaatccaaagatgtaggggagacagggaatgtcacagtgggatttattcatgtgtgactttatacgtcttaccacccaaggcacccatttcctaaccatggaggaagggcccaggaagacacttctttttacttaaggacatttgaggaattaggattagttgaggggggagccttctt

SEQ ID NO: 306111 - DNA, 123 bp, Homo Sapiens
  misc_feature (60)..(60): n is a, c, g, or t
  misc_feature (108)..(108): n is a, c, g, or t
ccaatttttaaaaagaactttacatcacataaatgtctgcaaaagcaaagctgcaacaantttaacacatcttccatttgaagttccaaaaatcaaaattctctaagntgatcttcccggacc

SEQ ID NO: 306112 - DNA, 274 bp, Homo Sapiens
  misc_feature (239)..(239): n is a, c, g, or t
acaccaccagttatagcatttagggttaagtaggcgggaaatttaaggatgttaagaggctttgctttcaattacaaaagcccatctgaacgcagccttcatgggctgtggttgaggaaattattaagaactgaaagacatgacacttgtcttcattaaactgtactttggcatttattatcccagtcacatgtgttcaaatgagcttcaatgcttgtaagcaaagctgggtctcaagncagcaacaaggctaataaggtaaggctcaggccct

SEQ ID NO: 306113 - DNA, 306 bp, Homo Sapiens
  misc_feature (139)..(139): n is a, c, g, or t
  misc_feature (154)..(155): n is a, c, g, or t
  misc_feature (253)..(253): n is a, c, g, or t
  misc_feature (261)..(261): n is a, c, g, or t
  misc_feature (295)..(295): n is a, c, g, or t
tttcctcaatagaagaaatacaaaaaatgaagtttcattttaaacaaaaaggactggaggtgaagtggggagggagagagagcgatgaagagagaaaccatttttcttcaccatagctcccaagccaaacacccaaagngccaacgtccagggnntacaaagcaattactacatcctcgaatgcctgcctgctgcaatagacactgttgatgcctttgtataagtcatcaaacccctcccctatctgctgccngggcaagnctagtgactgacacctgtgactttctcccggggntttgcccttgg

SEQ ID NO: 306114 - DNA, 354 bp, Homo Sapiens
  misc_feature (289)..(289): n is a, c, g, or t
  misc_feature (297)..(297): n is a, c, g, or t
agagagagagaaacctaagatatctttgagatttgtcctatgtaactacatggatgatggtatattttcctgagataataaattttgaaggtagagtaggtgtgggggtgttgagttcaattgtgatgaatgataactgcaaggtgcatgagtgacttttcagctgctgtggagagtgtgctactgggcatagggccctggagcttagcagggatgtgggtatgtgtttatagatgaatttatagatgatagttacatgtttgcagatgaaactgcctaggcatagttngacaagangaaaaggcaaagggtagagccttgaggtacaccaacatttcatggagggcacactag

SEQ ID NO: 306115 - DNA, 146 bp, Homo Sapiens
aacagagcaccgcctcaggcacacagaggtaagcatgcatcgatcacaccaacgatgcaggaatgtcctgacacaccagggcagctgctgtgtgttcttcggggcttgtttacttgaacttgcagggagccttcaggagcctcatt

SEQ ID NO: 306116 - DNA, 311 bp, Homo Sapiens
  misc_feature (91)..(91): n is a, c, g, or t
  misc_feature (156)..(156): n is a, c, g, or t
  misc_feature (271)..(271): n is a, c, g, or t
gcttgcttagtgctagtttgagtccttcagtggcaggacagcctgtaaagtaccacaagtatgggagtgttataatggcagagtgaaacgnttagagcagggaggaagtgaattgtgccattagtaccttcatgcaaattataccatgtgattttngacagtgaatgatttttgcatcattcattcacagcccatcactctgttaaggtgagagtgtaattcttacttctcccatcaccacctgtaggctaggaaacagggaaaggggagnatgaggatgatcccggacaacattaaaaaggtgccatgtt

SEQ ID NO: 306117 - DNA, 284 bp, Homo Sapiens
  misc_feature (39)..(39): n is a, c, g, or t
  misc_feature (84)..(84): n is a, c, g, or t
  misc_feature (105)..(105): n is a, c, g, or t
  misc_feature (122)..(122): n is a, c, g, or t
  misc_feature (146)..(146): n is a, c, g, or t
  misc_feature (229)..(229): n is a, c, g, or t
  misc_feature (257)..(257): n is a, c, g, or t
  misc_feature (267)..(267): n is a, c, g, or t
ccctcagcatttcagttccactagcaggtaaactgtggntcacaacgtattgttctttctaaagaaagaaatatctagttgggnagaggaaggcactgtcttccnggcccttcttcgttcanatttttatgtcactgtcctaacgngggccgtgtgcaagagatctttgagaagttagaacgtttagctaagctcgcctttacatgtatacagacaaggggaagaggantgtaagcatatgtttactgagccgcagntactagggcnctttatacgggaatccc

SEQ ID NO: 306118 - DNA, 351 bp, Homo Sapiens
  misc_feature (81)..(81): n is a, c, g, or t
  misc_feature (174)..(174): n is a, c, g, or t
gccagaaaacctttatttccactgagacctctcatccaattctcttctttccgggaactttttcccttccctactccaggncgtaccctggccactcctttccttttggctggccaatgtctcctctgtaggctccagaaggctctcagggatgtaggcggcctcccgaggttngagttgcaatgggaacaaagacagctgtggtcccatagcaccctcatctggtgacatcctgctactgacagtcaaaagaagccttcccagatgaaattttagtcctctgcgcagcaatgctcttcttccagcaaaagagccatgtgcagtcgggtctgctccccatgggggcttttg

SEQ ID NO: 306119 - DNA, 174 bp, Homo Sapiens
  misc_feature (106)..(106): n is a, c, g, or t
  misc_feature (118)..(118): n is a, c, g, or t
  misc_feature (141)..(141): n is a, c, g, or t
tgagccaccatgcctagcctgtatgtcttttgagatttgtatgtctattcagatcttttgcccattttttttatcagattattagattttctttcctattgagttntttgagctcctnatatattctgggttattaacccnctgtcagatgggatagtttgcaaatattttctc

SEQ ID NO: 306120 - DNA, 254 bp, Homo Sapiens
  misc_feature (228)..(228): n is a, c, g, or t
agcaaatgtcccctccaatttcattagctatgatggagttatcagttcatttcagagcgaattactggggcgagggggtttaatatcctgatgggtttaattcagtgaggactccctcatgaggagctagaagcagttgaaaattgagggagggttctatcaggaaattaggaaactgtttggagaggcgacatgtgtgctggggaggtgacccatggatgtctaccntaatgttaaacaggtctgcatttcag

SEQ ID NO: 306121 - DNA, 122 bp, Homo Sapiens
  misc_feature (66)..(66): n is a, c, g, or t
  misc_feature (82)..(82): n is a, c, g, or t
  misc_feature (96)..(96): n is a, c, g, or t
actgcgcccagccgatgcatttctttaaggataggggaacatggacaatgtttaccctcccattgntccttgagggccactntacctttggtcctncctgccatatggtcctgctgccaatt

SEQ ID NO: 306122 - DNA, 428 bp, Homo Sapiens
  misc_feature (398)..(398): n is a, c, g, or t
  misc_feature (404)..(404): n is a, c, g, or t
gaagaatagggcttccgttgttgcatggcaaacatgagaattttgcatggcccttactggggagtttcctcctcatttgactgatgtgagtagagactcttagagccagccaccatcataatcatctactagaatcccaagatgctttccccagcagctaatagcgctgttgtctgtgggtagggggaaaacaccaccctaaccctgaagaatccatgacatagtgctattactttgatgtgaataagtctggaaaatagtctctttctactgtggtttgctctataaaatccttgcctctgaattttcctggaaaactatgctttattctgacttacggggttagacaattttagtaagtatgtttagtaaacaaatttttttagggggatcagggnaaaggnattgtggaacctggacatgggctt

SEQ ID NO: 306123 - DNA, 451 bp, Homo Sapiens
  misc_feature (307)..(307): n is a, c, g, or t
  misc_feature (384)..(384): n is a, c, g, or t
  misc_feature (427)..(427): n is a, c, g, or t
  misc_feature (440)..(440): n is a, c, g, or t
attttctctttcaaatggcttgtactcccctcagtcattgtgtgttgatctcgagttgaactctgaggggccatcttacttcatgtccttggaaaaaacttcactgtagctgccatataagagcaaaatgctaatctcccattgcatttagccagcatcaccacctcttgaaaacacctttggcttccccacctcctggattaggacaggagcaccttcagtgtgcctcttcagcactgctgagttaaccctcatatcactcttaactgcctctttggtagtttattgattgttcatttccccactnaaacttgggagctttcagagggcagatgctctcttatttccaggatcctactgtctaggcgtagtgcctgggcactnactcacactatttcatttaaccagtttctgttgaggcatccanggacacgtaggcngagggtaggtt

SEQ ID NO: 306124 - DNA, 208 bp, Homo Sapiens
  misc_feature (46)..(46): n is a, c, g, or t
  misc_feature (117)..(117): n is a, c, g, or t
  misc_feature (133)..(133): n is a, c, g, or t
  misc_feature (140)..(140): n is a, c, g, or t
  misc_feature (158)..(158): n is a, c, g, or t
aacacagtttactttttcattcacctactgaaaaacatcttggctncttccaagttctggcaattataaacttgccaaccatgctataaacaacaatgtgaaggccttttgggcagntatagttttcactccncttgggnaaataccaaggagctcanctgtatggtaagagtatgtttagtttttgtaaggcaactgccaaactgtc

SEQ ID NO: 306125 - DNA, 414 bp, Homo Sapiens
  misc_feature (167)..(194): n is a, c, g, or t
  misc_feature (346)..(346): n is a, c, g, or t
  misc_feature (366)..(366): n is a, c, g, or t
  misc_feature (371)..(371): n is a, c, g, or t
  misc_feature (401)..(401): n is a, c, g, or t
gtagggaaaaatgtagatgattccttagctttgtaataagcaaaactaaatactaattaggatttatattctaaagaatggagtgagaaaatagatgtaatagtactgtaatttttttctttaaaaattactactctaaatgaaaacatatgactttgaaccattannnnnnnnnnnnnnnnnnnnnnnnnnnnaaacggagtcttactctgtcgcccgggctgggagtacagtgggcatgatcttgggctccctgcagcctctgcctccccagtttcaagtgattctcctgcctcagcctccccgagtaactgggggattacaggggcgtcccacccaccatggntcggacttaattttttgtanttttngggagggaggacaggggtttcacccagttngggccaggggttg

SEQ ID NO: 306126 - DNA, 412 bp, Homo Sapiens
  misc_feature (331)..(331): n is a, c, g, or t
  misc_feature (358)..(358): n is a, c, g, or t
  misc_feature (399)..(399): n is a, c, g, or t
tccatttctagtataggatcctttgtactagatgatctttccaatatttccatccagtgccaataaattgttttgcttcaagtcactggccctttaaattgaataattagggtcacaagtattggagtagtttccatggaaagtaactttagctacttaaacagtaatctgtctgtgaggactgagttcacaagctgaaaagcattcgtatgcctctgggacttcaggaacaggcaacaatgctgtagttaggcaggcaatgggcatgatgggcttcaggggcaactggaatatggcaggttgggatctttcaagttcagggctatgtccnggggggggcaccctattattttacccnttactctttttccccaatttttggattggaaccactttaangtatggctaggac

SEQ ID NO: 306127 - DNA, 287 bp, Homo Sapiens
gaaaatttagtttatttcccattggataattgaataggtctgtttgcttttggtacttgctgatctttccagaagtatactattaggccctgagaatattaaggttacttatggtgagttggaaaacattgttggaattaaagcactttaaatggaaaccatcagtgtgcatccaatattctcccgcccgcaaccagggtacacagattaggaaataaaacgtagttaaatgttcatatttacttatttaacccgtgcttaaggggaaattattcacagttttccta

SEQ ID NO: 306128 - DNA, 435 bp, Homo Sapiens
  misc_feature (86)..(104): n is a, c, g, or t
  misc_feature (382)..(382): n is a, c, g, or t
  misc_feature (411)..(411): n is a, c, g, or t
  misc_feature (420)..(420): n is a, c, g, or t
cgatcaaagaaatccaatgattaacagatttaggattcactattatagaataaaaatcttttaattataaatgcatatatatctannnnnnnnnnnnnnnnnnnttaaagaacttagattcaacttcccctccaccaccacttaaagtatgaggagctaggagcaatacagtgttgacagtccctatcctgggcagggggcagttggggaaaacactgggattaggaaaagatgaaagacaatgggagcttccctagggagactggatttttgaagggcttttgatcatcctccacccagtgttcaaagccagttcatggaatccttcaggaaccagggggtcctggggcaagttctgttgtgggttaccccgttcgggacntccctgttctgggtcacccgggggttccnagggggtgncctggtttttcaggg

SEQ ID NO: 306129 - DNA, 391 bp, Homo Sapiens
  misc_feature (252)..(252): n is a, c, g, or t
  misc_feature (349)..(349): n is a, c, g, or t
tcacgtatgttttaaatattcaaaagtttctgtcagaaaacagtattttggaattaaatttctagaatctttcataatattctctcctctctactgaacatagtactaggttggtaactggaggatcccagaaagtcatgctaatttttctaacaaaacaggccttgctgtctctaactctgatctgatatcctgctttgagcaaataaaagagccctggaatgtgaaggagacatgaggacagtagtcagncttctcaggtagggtaaggcatggaatgaaggcaggataacagaggacgaggggatacggaagggtcaggaaaggatttccaggacctttaaatgtngggtttaggattgctctggctttccctgggaaaggtttccct

SEQ ID NO: 306130 - DNA, 243 bp, Homo Sapiens
ttctaaaacaaatgaaagcaaaaaacttctcgcccctgaactccatccctggctgttacccttcattctctgttcttactctttcctaagcaagtaagatatgacatttattcatcagaggcattttatgggttaattcactgttcaattttctaaaatacccatttgggcttcttacctacagaggctataggcaccaggaattcactcgggtattatgtggtaagggatgactgcttccat

SEQ ID NO: 306131 - DNA, 361 bp, Homo Sapiens
  misc_feature (306)..(306): n is a, c, g, or t
gtggggggttttggcgtgttctatagctgagctacaagcaaaattagagttttttacttatatactactttgcatggaggtagtctcagggtcccagttacagcactgatttcttgaaaagagtttgatgttctggcccatgcttaatttaaatgagaggctaaaagcagattgtgtaacccaccaatgcccatttgacaggacttgcaccaatctgacctacactttcataagagctcctaaggcagagtgctgtactgtggggtcttctgccttaactccagggattggcagagatgagcttantgtttatttggagcaccgacaaaggggggaggtactctgaggttttggaattgcc

SEQ ID NO: 306132 - DNA, 332 bp, Homo Sapiens
  misc_feature (12)..(12): n is a, c, g, or t
  misc_feature (302)..(302): n is a, c, g, or t
cacgctgtctgnacatagcagggactccgactggagccctgagctgtgctgccatttgactctctggcctgatgaggtgcgacagagatgtcaattttctggaacattgcacagatcacatatttatgcaaatgcttttctgtatctacaatcaaaaatggtcatctcagagaaggaaatttactaagccaacagaaacctcaatttttacaagttaaatgtgggctctttccctctctggacaccaaaatagttttcaaaagctagggaagtcattaaggatgggcttgtctgtcattccntactttaggacagggtgtggggggtttgat

SEQ ID NO: 306133 - DNA, 142 bp, Homo Sapiens
aaaatgaagagtatttggtttagtaacacctaagatttttctgtgtagggagatatatcttgaaattaatcttgtagtttacttaatttcaggagattataaggatatggctgtattccccagacccacttagttttgctca

SEQ ID NO: 306134 - DNA, 343 bp, Homo Sapiens
  misc_feature (300)..(300): n is a, c, g, or t
tgaaacataaatgaattttgtgtttaggcttctgcctcatcctgaagatatctcattatgtacatgcagatattccaaaatctgaaaaaatccaaaattcaaaatgcttcttgtcccaagcatttcaaataatgatattcaacctgtatatacttaaaggaccacaggaaggcatcattaacaaaacaagttgagggccagggcgcagtggcttcacacatcaaaactttcagggatgcttaaggtggggagtaccactttgagggccagggagttttgagatccagcctggggttaacnttaaaggaggacccccttccccttaccaaaatgttaccaggaa

SEQ ID NO: 306135 - DNA, 376 bp, Homo Sapiens
  misc_feature (47)..(47): n is a, c, g, or t
  misc_feature (223)..(334): n is a, c, g, or t
  misc_feature (343)..(343): n is a, c, g, or t
  misc_feature (356)..(356): n is a, c, g, or t
  misc_feature (364)..(364): n is a, c, g, or t
aaagcttgccacctgctgtcagaccggcgcttgtgtggagccagggntgtaggtaccccggctgagtagcctctcagatgtccatggtcctggctgcacgccagcgtgggggcaggcaggcggacgctcaagaaaaacggaggcaccgatatgagtagtaattgagaacgagggttcatgatcctcatctgatttcaatccctgctcctccacccaaaatgtnnnnnnnnnnnnnnnnnnnnnnnnnnnnnnnnnnnnnnnnnnnnnnnnnnnnnnnnnnnnnnnnnnnnnnnnnnnnnnnnnnnnnnnnnnnnnnnnnnnnnnnnnnnnnnnntgaagtccntcagcgcataccngggggggnttttcctaaggt

SEQ ID NO: 306136 - DNA, 325 bp, Homo Sapiens
  misc_feature (42)..(42): n is a, c, g, or t
  misc_feature (262)..(262): n is a, c, g, or t
  misc_feature (271)..(271): n is a, c, g, or t
  misc_feature (290)..(290): n is a, c, g, or t
  misc_feature (298)..(298): n is a, c, g, or t
ttactgggacaaaggttacgtatttaagactgatggatattnccaattttcctccaaaagaaattctcctgatttacattaatgtaatgtaaatgagagtgtttgttccatcacaacctctcaatgtattagcagatttcttgattttgaagaaattttcagaacctgtgctgccacaagtgggcatccttttagaaaagactgttgcaatatgttgcttataaaggatgggataataaatagtaaacaggtgatacttagncctgaaggnaatgcaggtattaaggtgnaggtactnccctcacttttcaagttacattctcca

SEQ ID NO: 306137 - DNA, 400 bp, Homo Sapiens
  misc_feature (336)..(336): n is a, c, g, or t
  misc_feature (386)..(386): n is a, c, g, or t
ataacagtgctttctgtatatttggcctggcttgatcttccaagtcagtccctaaagtctctctgaagtactgtatgaacagcactttggccccgtgtcggaaagggaaagaaagtagatgagcagtgctaacctgaaaaatcatgagaacaagcaaaggaaactgagaggatcaaaacttggaaagtttctcaataacaatcatttgcctgtgtgatacagctcaccagtggtatgatggtttttccagtgggaaaaaatattttccgaatgtgggcatgtgtccatttgggggacagtgtgggacaagccaaaagctttttaaagatcaggatntttctgtttgtaggtatactgcctaacatacaaagcttagtttctttccngttgggggttgggc

SEQ ID NO: 306138 - DNA, 377 bp, Homo Sapiens
  misc_feature (84)..(243): n is a, c, g, or t
  misc_feature (254)..(254): n is a, c, g, or t
  misc_feature (360)..(360): n is a, c, g, or t
gattagaaatagctaatattttcactcgttttgcagaagagagaaaattccattgatgattcttcaataataagaatagtgtannnnnnnnnnnnnnnnnnnnnnnnnnnnnnnnnnnnnnnnnnnnnnnnnnnnnnnnnnnnnnnnnnnnnnnnnnnnnnnnnnnnnnnnnnnnnnnnnnnnnnnnnnnnnnnnnnnnnnnnnnnnnnnnnnnnnnnnnnnnnnnnnnnnnnnnnnnnnnnnccagccacttngggaggcttgagggtgaggataattctcccttgaggacaggggagggtccaaggcttgcaattgagcccttgatccacggccacagtattcccagtcttggggttnaccaagttgaggacccc

SEQ ID NO: 306139 - DNA, 378 bp, Homo Sapiens
  misc_feature (324)..(324): n is a, c, g, or t
  misc_feature (342)..(342): n is a, c, g, or t
  misc_feature (347)..(347): n is a, c, g, or t
gcattcaaggtcttgctttaacacaaaaccccaaaacttggcggtacaaaacaaccattttctgatggatcgggaatccatgtctgaagtctcagctaagaagactccaaggctgggttccaggctggaactgcctggaggcatctccccacacacacacactggtacttggctggaccaccagcaggttctacttccccgtgtttcttcgcagtttgtcagttggggctgatttggggtttgcttcacagagtattcagccaagatcccaagattcaagtatccaccgcggcccgggccccaatcatcttgttttttaaacantcgttttttgaggcaggntaggntatttcatttccagattttttcgtgttaccc

SEQ ID NO: 306140 - DNA, 434 bp, Homo Sapiens
  misc_feature (108)..(132): n is a, c, g, or t
  misc_feature (369)..(369): n is a, c, g, or t
  misc_feature (402)..(402): n is a, c, g, or t
  misc_feature (407)..(407): n is a, c, g, or t
  misc_feature (423)..(423): n is a, c, g, or t
ctgcaatgtaggaaccaccacccccatttcatagatgtgagatcaaaggttcagagaagctgcattgcaaaggcacacagctaggaagcggttcaaaagcaggttccnnnnnnnnnnnnnnnnnnnnnnnnnggctcaaacccatgttgtgtccccatttgtgactcggcctcttctgctgctacactgcctgggtatggtttgagatggggtttgggttcaagccaaggagctggggttgggaatgttagagcgaggggagggaaaatgggacccccaagaccactaccccagcctttgaagtttaaggccgtatagcctgctaggagtccttgagccccttctgggcttggggacatcctctccctnggggggcagctggatcacatgtttttcttctgncagcnttccccagagggagtnttcccggcaga

SEQ ID NO: 306141 - DNA, 401 bp, Homo Sapiens
  misc_feature (340)..(340): n is a, c, g, or t
  misc_feature (359)..(359): n is a, c, g, or t
  misc_feature (367)..(367): n is a, c, g, or t
  misc_feature (375)..(375): n is a, c, g, or t
gggagcagtcagatccctgtggagcatggaagtgtagcgtaacaccacagagaggggagcaaggcatcctacctctccaatactgtctaccctgccatgcttgtcctggagccaaggggacttcttatggggagatggtaagcaggagatccttggcagttccccatcaccaccacaaacactgggcagcaattcctacaagagggtcctccagtcttcaaaggccacaaatcttgtgtaggacagttgttcacacatgttacacagctgcatttgccccagaggaagggaacctctgggggttaggcccccacccctgttgggccttaaggttgccatnggcacagttgccattcctngaaaattngggaaccntttgttggggaacgtttttccttgcc

SEQ ID NO: 306142 - DNA, 157 bp, Homo Sapiens
tacaggaaaggaggcaagggggagacctgttctattatgttttttcacaacggcatctactttaggcagtgcttatggatttctgggtattccttttggggggggaaaattttaaaaggcccaaaaacagggacccaggaaggcacttttcaggagt

SEQ ID NO: 306143 - DNA, 411 bp, Homo Sapiens
  misc_feature (302)..(302): n is a, c, g, or t
  misc_feature (314)..(314): n is a, c, g, or t
  misc_feature (357)..(357): n is a, c, g, or t
  misc_feature (382)..(382): n is a, c, g, or t
  misc_feature (391)..(391): n is a, c, g, or t
gcctgtttgggagggagcagggagttagcaaggactccatagttgtttaagcctcagtccaggcagacactcgtgtccctgagtctcaggactgtggccttcccactgctcctgcacccccacctaacccttcagagtgtttttttctgttcccttcccctctcttcattgactttaaccaacgccctaaggttggcagggttcattgtcttcccccacccccattgagtcttttgtttcatagagggagaagggtccagggttggggttgctggtccctcccctagcagctgctgttaccntgtcatagggtntacagcagggagggtcagtctgttcagggatttttcactgggncttttatgttggggcattttgggtnaaggttccntgggggggaaaagcccagtt

SEQ ID NO: 306144 - DNA, 294 bp, Homo Sapiens
  misc_feature (246)..(246): n is a, c, g, or t
  misc_feature (264)..(264): n is a, c, g, or t
  misc_feature (272)..(272): n is a, c, g, or t
gagagctagcaccatagctcaataccctgtctggtttctatggcacaaactaccttcaaaaacaaaatgaaccatattaaatgaagcccagggaaagtcaagctcaggagtgctgccatagtctgtactccgagtcaggagacctgggacttttatgttgcattgaccctgcagtcttggggctggggctcaagcccaccaaggaaggagtgtaatttaccagccactgcaggagtacagccggtngggattggagacagatgncccacctngagttgcccaggcgaaacctgg

SEQ ID NO: 306145 - DNA, 224 bp, Homo Sapiens
ttctgtgaggagcatttattgatttcctttcatcccagaagtggtgttggcttgggggttctcccaaggtctgttagcaaagcatttggaacaagaaagcaccaagacacccctaagtgtctgaagtgcacacatgggagagcttccagagggagtttcagagtgagctgaaggagaaaagtatcctaagctcctgagggtgtggataaaaggcccaaactatt

SEQ ID NO: 306146 - DNA, 304 bp, Homo Sapiens
  misc_feature (66)..(66): n is a, c, g, or t
  misc_feature (129)..(129): n is a, c, g, or t
  misc_feature (145)..(146): n is a, c, g, or t
ttgcagatggcaccttctcactgtctttatatggcctttcctctgtgcacttgtatccctggggtntcttccccttcttataaggacatcaatcctattggctttagggccccacccttatgacctcanttaaccttagttaccnntttaaaggccctgtttcgaaatatagccatggtaccacataacagcttttcagtcaataatgggactgcatatatgttgggggggtgccatacggattataatgggagctaaaaattccctatcacctaggggaccatcatagggccatcataagggg

SEQ ID NO: 306147 - DNA, 343 bp, Homo Sapiens
  misc_feature (320)..(320): n is a, c, g, or t
ggggggcttgctccaagagtactgttccaggaagacctgccccattgtgtaagtactcattcaaacctctgctcgcataatgcttgctaacatgcctttggcaaattaggtcacatagctaacccaaagtcatgtgggtggccatcaacactgggatgtgtgtggcttgttggaggtcactgaagtgaaacctaccgtagttacacagtaagtcagtcaaattcttggtttattggacagctgacagctgtttaagaaggaccctatgttaaaggacatggatacaatctaataacattaacaatagctaatggtttttnacccttcaacttccttggatcaa

SEQ ID NO: 306148 - DNA, 412 bp, Homo Sapiens
  misc_feature (322)..(322): n is a, c, g, or t
  misc_feature (331)..(331): n is a, c, g, or t
  misc_feature (352)..(352): n is a, c, g, or t
  misc_feature (357)..(357): n is a, c, g, or t
  misc_feature (372)..(372): n is a, c, g, or t
  misc_feature (377)..(377): n is a, c, g, or t
  misc_feature (389)..(389): n is a, c, g, or t
  misc_feature (396)..(396): n is a, c, g, or t
ggtctctggggtgggggcaagactgtcagagagtagagccccaggatgagcagtactcctgaaaatatgcctggaccaatactggcagcctcccctgacttccaatagaggctgctgatgacagggctccatgtgaaggggcaggcagtaatgctccccttcccagaggcaaaggctggttggcaaatcctacccttcttggtcagtcatattctttctgggtcttagattctagggagataggcttctgggaaacacaatttgtgggatctacatgaagcatgggtcctggaattattttaggagccagtgtggccagggntgtggggantatccttgggtttcatatggntcgantggttccagaaccantgaantgtgttgacacnttttggntcagtgttcaagattt

SEQ ID NO: 306149 - DNA, 397 bp, Homo Sapiens
  misc_feature (321)..(321): n is a, c, g, or t
  misc_feature (365)..(365): n is a, c, g, or t
ttttaatgattgcataatgttccatggcatatatatacaccacattttccttatcccgtctatcattgatggacatttaggttggttccacatctttgccattgtgaatagtgctatgatgaacatacatgtgcacattctttatgatagaacaatttatattcctttgggtaaatacccaataatggggattactagggtctaatgggtaattctgttttacggttcttcgaggaaatcacccaaactgctttccacaataggttggaacctaatttaccattcccaccagccggggtggtaaggtggttccccttttcntcccaccaatcttgcccaggtatcctggttaccttttgggggcnttttttaataatagggcccattctggactggg

SEQ ID NO: 306150 - DNA, 312 bp, Homo Sapiens
  misc_feature (292)..(292): n is a, c, g, or t
ttggtattatatccactttattgcattcaaacactgggcccttcaaaatgacacttccaaggctcgacactgtgcagaacagaccatgaaaaccaaggcattggcagggagatgaggcatttaacactgcagccacaactccccgcactgctataagaaggagatggatagtcactcctagctatggtgaatggggatacaggaagcaaatgagccataactcagtgatccagcgtctgtgggaaagggcacagaggaagcctgacagctccagagagcattctcttgctanggagctctgtgcaagggagc

SEQ ID NO: 306151 - DNA, 442 bp, Homo Sapiens
  misc_feature (419)..(419): n is a, c, g, or t
  misc_feature (428)..(428): n is a, c, g, or t
ttttatgaggtatgactgtccacacacgcagcaagagtttcgttcttaaccttgtaccttgctgctggatgagtctgtttattcattacgttctcccaaggcaaaggaaagaaccagcacccaggaatgacaaatgttttcttaaggtgttgaaaggacagagtttaaagcaaagaagaagactgtggacttcctgtgtgaagagaaagtcaccagggctggcacagagccatggggggcctggggcaagaggggcttgcaagctctttcttggggagagacaccccgcatcccttcttgaggaggggcattgccccagcagggagagatacctcgcttttgtcccttctttcttttcatctgctttttgagggcacttgggacccaaacttcctctttccattggggcccgggacatnccgtttttnaccaggggacactt

SEQ ID NO: 306152 - DNA, 465 bp, Homo Sapiens
  misc_feature (401)..(401): n is a, c, g, or t
  misc_feature (407)..(407): n is a, c, g, or t
  misc_feature (416)..(416): n is a, c, g, or t
  misc_feature (426)..(426): n is a, c, g, or t
  misc_feature (435)..(435): n is a, c, g, or t
  misc_feature (445)..(445): n is a, c, g, or t
tgaggtagcagggcattcttaagaaatgttctctaaactttagatatctcccatgttccacagaatcaaatatatatttcttggttggaaattttaaatgttcttaactatctgcctaccatccacctcaattaatattcttgagaccactttaacaaatcagctcttcagtgaatgttcctcacattgtctgttggttcataagtcagctgaaatccgtttaaagtcctttccggcccacaagtgtagggttttatcatcctctgggcagttaaggtcacatttgtcttggtaatggtttccttctcttggcatttattatacccaattagggctaagggggaccattgagggcaaagggacccatacatcttcttgggccccccaattttatggggggnaaaaanggattaccnggaggggttncttctctancccttagggngggggccaattttttggggg

SEQ ID NO: 306153 - DNA, 452 bp, Homo Sapiens
  misc_feature (372)..(372): n is a, c, g, or t
  misc_feature (405)..(405): n is a, c, g, or t
catgcccagccagcactgaaattctggatctctattattcacagccaaacttaatcctaactgatatacctgccatcccaaaatataccttaaaaataagtcaattttaaaagttctctacttctgtctttcgtcttaaggaggaaaacctgactaacaacatgaggtcataagttgggtaaggtgccatgctcgggtaactgtacccactccaaactgttagccatctaggggagcaaaggggaacaacagacaagggtgctggaaccctattttggggggccctgaaatggggggctgttgtttgcccattaggcctttgttttcacagccagtgaggataggttccccagcacttcagagagttgggangggaggggttaggttctatttttctgcctgctngggtggggtaaaattcaaacatttaggccaaaactgtgaggctgagt

SEQ ID NO: 306154 - DNA, 493 bp, Homo Sapiens
  misc_feature (379)..(379): n is a, c, g, or t
  misc_feature (404)..(404): n is a, c, g, or t
  misc_feature (443)..(443): n is a, c, g, or t
  misc_feature (455)..(455): n is a, c, g, or t
  misc_feature (466)..(466): n is a, c, g, or t
ttcttaaaatattaactacactgggaaagcaagaaagcacacctgccatttcctcactatgggctatcatttctccttgtatgtgttaacacagagaataaaggagaatcctgtatattttaacaaaaggtttagtggtcatagcagggtgaatgctttaaatagggctgagtatgcaattgttctattatcgagacaattgcctgattgagaacagctctctggaaaagctccaagtatgtgtccagattaccacagggtgcttggagtgattagaattgctcatgagcaaccaaatgctctggcttgtctccactaagcaattgaagtatatggggatcctgagagacatgacttaggttgaaagtattctcttccngttctaggctttctttgcctcactnggaaatattaaatgcacagcagacctctatacagggagncccaaatgcagncattagggttncaaggtgtccccagcccactccacatg

SEQ ID NO: 306155 - DNA, 204 bp, Homo Sapiens
  misc_feature (156)..(156): n is a, c, g, or t
tccttcagtttcaatgttatccttcaacattatcactatacatttgctcaatgatgagtcttcagggctagatatcaaatcttatactttcccacttaaatgagttataacaatcaaaacgtcaaggaaaattttatgtttggggaatgaactgtnacatccactaattccctttccagggaggaaaacattcccaaaggaagg

SEQ ID NO: 306156 - DNA, 272 bp, Homo Sapiens
ttaagcaatgattcggcttccctgggagataggaagtaacgaaggcaattccttttgtcaaatccttgacaaaactggcttccgaaatacaaaactaatatacttggatacagcctgatttgttaccaaggtgaataatgacagcacaggaaaaccacagtggttctggccaatctgacttacaggaaaattctgaaccacaggaacaacttaaagtgatgtgggtcttattaattgtagggcacatactgtggaggaaaaataaatgggtt

SEQ ID NO: 306157 - DNA, 427 bp, Homo Sapiens
  misc_feature (262)..(262): n is a, c, g, or t
  misc_feature (274)..(274): n is a, c, g, or t
  misc_feature (307)..(307): n is a, c, g, or t
  misc_feature (319)..(319): n is a, c, g, or t
  misc_feature (335)..(335): n is a, c, g, or t
  misc_feature (341)..(341): n is a, c, g, or t
  misc_feature (398)..(398): n is a, c, g, or t
gtatagtatacacaaaggcatagcttagattcagctgtccctggagttgtttgccattcattctcagcacagtttagagaaagcaggaaaaagggattcaaagctaatgttgagtataacagggaaaacaagaagtgagaatttaccattgctcattttgtaacctcatggggagaaaaacaaaagaggaaaactggctcatcccatgtcactgtcccattctttaaccctaaatctaggaaaatactagcttcagtttccntcttcccctccntatcttgatgtgttttctattataccaaactgnctctgctatgcntgaggccccagagggncagggnccccatgttccccatctcatggggcagcttttatgcttgggggggcttttgggcccncttgaatcttggggctataccggggaggg

SEQ ID NO: 306158 - DNA, 182 bp, Homo Sapiens
gtgtacgccactgggcccatgatgtaacttttgacaatgagttcccaacactaatttgattcctgtagaagaggaatttaacggcatgacaagttatttctacgtatgtaagtgaatgaatctattacacatctctcaatgaaatggggggttctgtaaagcacttaaagatcctttgggag

SEQ ID NO: 306159 - DNA, 401 bp, Homo Sapiens
aggtctgggggacatgtgcaggtgacataggtaaacttgttacataggtaaactcatattcacaggggtttgttgtacagattatttcatcacccaggaattaagtccagtacccaatagtgatcttttctgctcgtctccctcctcctacctccaccctcaagtagacctcagtgtctcttgttcccttctttgtgtccataagttctcatcatttagctcccacttacaagtgagaacatgcagtatttggttttctgttcctgttagtttgctgaggataatagcctccagctccatccacattcccgcaaaagacagggttctgttcgtttttgtggctgcatagtattccatggagcacacacaattttgatttcgtggccactaacagctatgca

SEQ ID NO: 306160 - DNA, 376 bp, Homo Sapiens
tcaaggagtccttacatgttggagaatttacagacaaaatgatgtgatggatattttctctaaaacgctgtggaaagagaaccacagtgggcagaaagggaccagcagtgccgcgaatcgctggcgcaggaagagggattcatcacactgcgtccacacacttgagatttccacagaattaattttcgaaaaggttcgaaggccaaggatgtatgcgagggagaaggcaggggcagccctcgagggctgtggcggtgcgggatggcaaccacccactgagacgcggggcagcctggggccggggtgtgggccccctgggcatgcggtcctggcaacgcactcaaaacccccatcatagtttctaccccgggaccaa

SEQ ID NO: 306161 - DNA, 457 bp, Homo Sapiens
gtacaaaattggaacgtgttcacatggctaaattttgtttaccccaatagataatctaaggaaagttgtggaccaaaatttgggtaaagcagtctctatgacagtttgttttaaaaaacctcttttacccgttgtttccttcagtttcaaatgagtttccaatgtttatatttcagttagaccataaataatgagtcttacctcagcaccaacagcttagtagcaacagattcaaagcaggcagaagagaggaagatagtattagaagactcaacttaactccatagttgcaggttaatcatttgagctctcaacttttcttactgtgcagaaaaccaacactgactgtcacatccaggcatccctgatgctttccttaagtccagccaggtgtccccggcaccatctcaggcagtctccccaaactgacaggactacacactggacagaaaaacat

SEQ ID NO: 306162 - DNA, 113 bp, Homo Sapiens
ctttattggacttgctacatatgaagcacgtgtctcaaggttccagggccgcaaaatatatgcgcccactggcgacagtgttggtcccatctggcaaaccttccatccatatc

SEQ ID NO: 306163 - DNA, 460 bp, Homo Sapiens
  misc_feature (416)..(416): n is a, c, g, or t
tttgatgcttttagaattaggtgttttatctttgagagcttgattattacattgaacatttgatatagtcttgagttagtcttatttgtgttgaatcttcttggtgtttcttgactttctggtatctgggtcttcatacgtttctctagctttgggaatttctctgttattatttatttgaataaagtttctacccccatccattctccatatcctctttaaggccaatagctcttaatttttcccatttgggctttttctagatcttgtaggcatgctttattctttctatttccatttttcttttctttctgtgcattttcatacagcccatcttacagctcagtaattatttcatcttttgattaactttgctgttggaagacaatgatgcatttttcagtttagttgaattntacagcttcagaatttctacttgttaaaattattttaatatctt

SEQ ID NO: 306164 - DNA, 416 bp, Homo Sapiens
attattaaaggaaagaatttagtgccaaatattacagacataagaagaaaatatactaacaataacattgtaccccaagttgtttcactctgttgaaagaaatgaaaccttgcacaggagcaaataaactttaccagagagataactgttcttgaaatatctttagcaactaacaggtgtaccctgggaattctagggtttgtggggttgcatggtggccattaaagcttttgctcttttgcgtatttcctctctcttcctgggcctccctgtctgtattataaaagaccaaggtagccactttcaggaggtcctctaatatactagctgatcccagggatcgtttctgcaacttcctcctgatatcaggagctgcctgagtaataaatttataccagccttccactatgcacacc

SEQ ID NO: 306165 - DNA, 474 bp, Homo Sapiens
ggttggaagtaaacaccagtgtatatctcataaaaccatttacccttactaaaagttaaacatatagtgagaatatgcacataaatcagagagttatcaaaactatttaggaaaaaaatgtttaatttattctagttgaatgaattgaacacactgacctaacacctgcactacgccatactgggggcacttctaaatgcatttgcaggtgtggaagctcactggctaccaaagcgcatgttcctaacggtgttctcatcatccttatgctacttgtccctccacccatgcacatatttcatatctatctggggcgactgcaaatagtaggtcttcaacaaacatgttaaattgaataatatttttgtaatagacctatgaaatcatttgacataaaatttacttaaagtaaaaattgacactcattttagttctgccatatgaagctactcagaaatagtttcttcgctcttt

SEQ ID NO: 306166 - DNA, 272 bp, Homo Sapiens
aggattgtaattttcaggattttagactgtacagatttagatcttatgggacttcaacatttgggattatgacgttcaggattgtgtcttcctgggctgtggcccaaacccgtgtggtccaacactatttcacacaagaggaaagcaaaccacgtgcatagatgcaatgaaggcttaaatgggcgtcacgtatagattatatcccaggaaaacatgattaagatgatacatggcgactttttttcccagtgaaaaagatccacattcttttt

SEQ ID NO: 306167 - DNA, 267 bp, Homo Sapiens
attatactttaagggttaggaagctttcaattttcaatacacatacaaccatatctggagaagagaaatagggagcagggtcagcttgccaataaaattgtgtaagaatttacacaattctgcaaagaatgagcggagactataggaggcctgctcacttactctatgtaccaaattcagatctgtgttttagaaaatgttctggattgcctgcagttggatattagttggagcttttgtaaacacacagagtatggttttcgggca

SEQ ID NO: 306168 - DNA, 340 bp, Homo Sapiens
gaaatggagtcttgttgaagggatgggggctctgaggagcatgcttgtctgcccatctgttgagaggacagtcaaacttccagtgcccatctgctggcaaactaggcaagggctcttcggcactcatgggtggggacatgcccccgtccagtggccttttttgccgcacttaaaacaaggcccaggaggtttgctgctatcaggtcttttgtgcccttgggtactatggctagactgacagatagccactgctggaagctggtatttagcacgatctctttgggctttatctaatttattttgctcgtccctgttattaaagactttgaaagccaggtta

SEQ ID NO: 306169 - DNA, 486 bp, Homo Sapiens
aagaagccatactgtcttttttatgaaaagctggggaggtggggcccggccatactcatgccttaaggcccctcactgagaagcgaaaactccatctggctttattatgaagaactatgaggtggggccagcccatactcatgttaaaaggccccatcaggattgcagtcctatatactggtcacattttgcggacgcagaagggccttggctgccttcattctctccacatgactgtaaccgtacagattgcgaccatggatcacgtacatgccgagaccattgccggaacatgagttacagccaaaggacttttacatacacaatgctccgtctaccttctcatgatgccaagggagctctgatcacgtggctaggctcctgactcacagccagctcccacagcctgcgtgctgccctgatgtggagcagacaagacctacgctgatataggcccatgcacagaggccagataacgcatgaggg

SEQ ID NO: 306170 - DNA, 385 bp, Homo Sapiens
aatattggtcctactttctgggttatatttttaagtatgcattttgaaatgtattatgaaatgttccatacacctaaaaggctctatataacatgcacgtaacgtgaagaataacacaggtatgaaggcccaaggacaaaggtgtactaacacccctgagggagcctcatatttggcagagactagtagtgcagactgcccagggtaatttgggtctggttttccactcatgagttttggcagggcttccagtaccccatgaagacatgaaaaggcatcattcttgaaggctaagatgaaacttgctctttaactcaggaacaaggctccccttttctggaactgaaagatacacaaagtttccttgtttccctaaagtggggct

SEQ ID NO: 306171 - DNA, 385 bp, Homo Sapiens
gggtggttggggtattgatttatttttccccagcacatcttaaaaatcacacatgggcatttgcttatagaacaatacagtctaagaaaaccagtaagaggagaatctgaacacacactgaaagcacggaatactgactatgtgttgagcccttgtggaaaacagtatggctcagtcggaattgacaaagctatgctggaatctctcaggaattttccttcccactgcatatccccttttagactataaatgtaaagagaagaattgtttgtatgcattagttacagcagtataaaggcttacatacaagtgcttactcacatgtagttcccaaaggattactacagtcctggcaggaatatgtactgccttggaggaagactca

SEQ ID NO: 306172 - DNA, 219 bp, Homo Sapiens
ttctgttattattattatagcactgcagtcacacaggggagaggacatgctgttgctccactccagggcagctcctccctggtgtgagctcctcagagcccacagcttgcttcgctgggtactggagaccgacggcaagaccagggggtagggacatcctcaaaacaacacgtcactcagcacagccactgtgtgggcatcggacagatgatcagactc

SEQ ID NO: 306173 - DNA, 456 bp, Homo Sapiens
ttttcccacatgttctccagaaaagtatgatcacctttcttagggagaaaaccaaagggcattgtttagaaaggtaccaaaaaagacctagctttgggtgatttctgtcagttcacctaaactctgatcttggtttctatccagttctcaatgaaagagacaactaaaccaaagaagtctgatcaacaataactttatcagaaaagaaaagtacacttactcaatatccacaatttgccacactctttcatatattaccttagttaatcctcaccatagccatgtgagatgaatattatttcataaatgatgatatttaagtcccttggatggcagagaccacatctggttcacgtctgcattctcagcaccaaggatggggcctaggacacagtaagggcctgccacatgcttaagaatgaatatatgactaaagaaaaagaaatgaaatttggg

SEQ ID NO: 306174 - DNA, 193 bp, Homo Sapiens
tcaaccttaagactatgaagggcgcgataatcccacctatgtcacacagggaggaacacaccatcactccgtggttcctcaccaaagtgaggcacagctcatcattcaccaggcatatcatgagtagttgcatgccgaatcccattcggacaacacacaccatgatgatgattaaccagtgcatgtcacgtga

SEQ ID NO: 306175 - DNA, 426 bp, Homo Sapiens
  misc_feature (148)..(265): n is a, c, g, or t
gagacagggtctccctctgtcacccagactggaatgcagtagcattcagtactgctcactgtaacctcgacctcccaggctcaagtgatcctcctgtctcagaccccgcaagtagctgggactacaggcacatgccacaatacacagnnnnnnnnnnnnnnnnnnnnnnnnnnnnnnnnnnnnnnnnnnnnnnnnnnnnnnnnnnnnnnnnnnnnnnnnnnnnnnnnnnnnnnnnnnnnnnnnnnnnnnnnnnnnnnnnnnnnnntgggcaacttgcctgggcccctctttctattttgattacttaaattggagagggatgttaggtgggagagacacagagaacaaagaagaaacaaatagaagattcagaaaggattgctgtgctacttaaggatttctctattctggctaaaccagtattgc

SEQ ID NO: 306176 - DNA, 478 bp, Homo Sapiens
  misc_feature (225)..(279): n is a, c, g, or t
cagcatcaggttcatttttgatgctttcatttttaaatgagtttacatgtactcatgattaattataaatttcactcaaaagaaggttaaaattcaaaagccaatagctgctttgcaagaaacattaacattcttcttatggaagacaaccttctggaatatccataaaactatgaaactataccaacagtaattgattctgggactgtttgggagaaaaaggtnnnnnnnnnnnnnnnnnnnnnnnnnnnnnnnnnnnnnnnnnnnnnnnnnnnnnnngacagagtcttgctctgttgcccagactggagtacagtggagcgttcacagctgactgtaaccttgaaatccagagctcaagtgatcctcttgcctcagcccccgagtagctggggctacagaagtgtgccaccatgcccagctaattatttttattttctgtagagacagcgtcttactacattgcccagctagtctc

SEQ ID NO: 306177 - DNA, 398 bp, Homo Sapiens
tcaaacaaattttcagtagaggaatccaaaggttttccaaagccacagcaaaacagaacagctcataatactatttctcaaaggtctgccacttcataggagattcctatacctcaaaaaactggagacatttagattcactatccttttgtgctgcccttggcctctgggttgaggaagcaagtaggaaatggatcaattaaacacagccaacatgactgggctcgtcagatattaagatggacggcagctagcttgcaagtcagcccttatcacaggtcttaagacttgcttatagctttccagggcactggctgcaatggcatgaatgtttcagtcatagctaaccagagttgaggaaatctaataatataggatgtacatgggtatttaggaca

SEQ ID NO: 306178 - DNA, 330 bp, Homo Sapiens
caatcagaagacagatggataaatagagaaaagaagtatagaccatggaaacaagttccaggttctaaggagctggttagagaaacacaggaaaaaattcctaggccaaggacatacagggagttgtgtagacagactctgggaactctgggagcacaggccagcaaaagaggttagaagggggaaaagattaaggaaggcagataagtaggctgaaagctggaggcagataagtgggctaaaagctggacccagaactccctaatgagagagaaggaaacaggcatcagatagaaggatgggtcagttaattttgctaaaatccagact

SEQ ID NO: 306179 - DNA, 432 bp, Homo Sapiens
tgaataaaatggtaaatcacaagaaaaaatctgatattgactcaaatctaatatttcaagatatagtctcggtcaattcatattcagctcaagttcctacacctccaacaagtcgagtactcaaaaatcctaatgccatttatgactactctaagacactgatacagcttggatttttaaagaaagcttaatttttctctattattctctgtttactgaggcaggagggacaactacagtttagaatatatttcttattgctgcagtgactaagaaattaaattactctgtaacaaataatagaggcataatgatatgcagcacaatctaattttaagcctccactttttcccttttgagctttctgtaactaaagagagtataagacttctctttaacaagcaggagccaggttatgatttgtgataggac

SEQ ID NO: 306180 - DNA, 179 bp, Homo Sapiens
ccccttgtcacattggaaagaggtcagtggctctggcagggtctccctgtccaaatttttattgtcaaattctagctgtgacaaacatgtggagatgcttcgtaacgctacacccaggaagcccaaaggtcagcagtgcctctggttaattttgcttggggaggaacaaaccccaaagc

SEQ ID NO: 306181 - DNA, 419 bp, Homo Sapiens
ttcaattacatctttgttttactcaaattccagcctccttcctgggcctggaggaacatcccctctccctacccgggttcagtcacaccctcatgtccaactgctataccccctgcatcccaccctccagctatagccgcttctctcctaatcccatacccagctgtcactccgttctttaccccctccccgcaatgcaaagctcctattcatctttatccagtcctttccaggaagctgggagctgcctagggtgggggtatgctgccaagttcagtgcccctggctcctttaagaatttcccactcctggtccagggatctcaatctgcaagtcctgctctatatttgaaacataaaccaagtcataacacagtaatccagcccttatcttgttgcagtcgtctgctgtagggtcag

SEQ ID NO: 306182 - DNA, 430 bp, Homo Sapiens
aaggaatcaggtgactgactggtgccctcttaggttaatatgcggatccagtgtgggtccccagattacacatctatcttaaccctaatattgaagacatctttcaccaaccgaatggctctaggcactgaccgcggaactatgttccacattatgcatgcaatttaaaccaacctggatgtcaagcaaggtctgtagcatggcacttgctgaacctccaacccttatagagtctttctgacaagaccctactggatcaaagctgtatacagtctcatttacttcttcatatagtccacccatgatgttggtaacatctgtttgaaaagaaccgacttgaatacatgaattgtagacaagcttgcataaattgcccccgtatacatgccttattttcgaatgcctaacatcttcaatttggtcaataatc

SEQ ID NO: 306183 - DNA, 452 bp, Homo Sapiens
aaagtgaatgtatgtatggcattgaagccaccatcacattgggccacaggaaatgtattcccagtcatgattattggggctcccctacgggatcctagtgcatcaaagaggccctcaaggtgctgatctatactggttagctctgcagccctttgtgtgcagcccacaaagtcccttcaagttcccatggctctgctgcttctgtgtcacaattagggcacaggcacctttgctggggcttggagttgcagggtccaaggttcagcctcttttggtgcccccatgtggtcatcacctttgaggttccgctacctcacagaagatctgccacccaacaggacatatgtctccattaatagaaagacctaatcattttgttcctcttttctagttttgaggaatatgctccttccttctcccttctggccctaaaggacatgcctcttctcttc

SEQ ID NO: 306184 - DNA, 299 bp, Homo Sapiens
gggcactgggggatacatgatgaaaccttcatacaaaagagatactaggtagctttggatgtaggaaaatacataataacatggtaagacaaacatgaaatagcggaatcagatttcaaagtagtatgtttgtagttttacatacataaaaggtgcacacaaagtgaaaattcgtccaaaacccagcaatttcccttgggagtggggtgggtaggagatatagatggattgcatgcagtttgtatttcccatttctcaatgtatttgctctagtgcccctgaaacttcccacttagctg

SEQ ID NO: 306185 - DNA, 546 bp, Homo Sapiens
  misc_feature (484)..(484): n is a, c, g, or t
  misc_feature (524)..(524): n is a, c, g, or t
  misc_feature (533)..(533): n is a, c, g, or t
ccagtcacatctaagaggcggattggacacagcttggatgccaggacctggtaggccccacacactgcctgctaggccctggactgtccagggctggagtgagggtagttcatgcaaggaagtgtcagaccacatggtaaccccacaatgcaacactgtggttagagactttatatagctgggagatggagggctgccccacagatgtatgaacaggtccaatcttccataaataaacctacagaagagagaaaattacactggaattcatccttagacgcagagtaccctagatgggagggggcatcctcactggtcagggggccaggatgggtgatgagggggcccatatatccacagcatggggcaggcaggggcaaggatggggtcaacagatgatgggcatttgcactaggacactgcattcacaagaccaactactgaagggatatgtgtctcaggctgttcattctggaataagcangggtgatctctatatcacattctgtggctgggtggctcanaggctactntgtggagagaatg

SEQ ID NO: 306186 - DNA, 130 bp, Homo Sapiens
gtgtttttggtgacttttccaaattttctaccacgagtgtgtattacttttgcaatcagaaaaaggttagtacactcttttaaattaataaaaaattcagttaacacttaagatgtcaaaaaagcaccca

SEQ ID NO: 306187 - DNA, 137 bp, Homo Sapiens
cctagacactcctgaaccactagatgtgattagcttcagggtagttgaacacagggggatgctggggagttgggccccagagaggcacagaagctctgcacctctcccaccgatccttgccaatgcatacttatctg

SEQ ID NO: 306188 - DNA, 432 bp, Homo Sapiens
gggacttgaaaagggggaacttgcaaaacagcactctattcttgcaaagtagccaactctgtactcctcactctacagatgaggatccaaagacagggagtttggaggcatacagagagtaattaagtaggctttctgcttgctttcctccctccttttgcacattggttttgtctccagaggagaagtgaatgtagacagagacctctccggattcccctaaacatctggaaaagcactgtggcatatgctgtgaaccactcccacaggctcaacttctgttggactcgccttggaatcaccatggtggtagttcagaaacaaggcagttaaaaccatactaagcagctaccaaatgcctggcctcacgcccatccaaccaactaggtaaaatcatgcgcctcacaagggttgactgaagtggttagttgg

SEQ ID NO: 306189 - DNA, 201 bp, Homo Sapiens
tcgattccatgggccatgtgagggaaacacacagctctccctgacaggcgggccttctcctggcctccctccctagaccctgaacagtgcagcagagcctggcaatgtgcaggaatccctttcccagagtgggactttaatttagaataatgtcactgaggagctccaacagaggagtccaggctgggcacaggcacccca

SEQ ID NO: 306190 - DNA, 203 bp, Homo Sapiens
aatttccagaacatctttattgttgtgctaaagtaattggtttacatttataactaaaatgacctttctcacatcactaagatgttccactccatcaacagccatgcgtatcacaattttaccacccaaaatctaatcccgtgtctttgtatctgacaagtcaaacagagcaaggaagtactactagtggactcaagtgatat

SEQ ID NO: 306191 - DNA, 319 bp, Homo Sapiens
cagagggagcagagggaggcatgttttaaacaaatggacaaacataaaaattatggtaaatgctatgaaggaaaaatcagggtaccatgtgaaaataaagagagggggaacctactttaaaataggtaataagcattccttttttgaaagtaacatttaagctaagatcaaaagaatgaatgagctagccaattgaagaccattccagatcacaggagcaaaaagggtggaaaattcagccagtggagctgggtcccagtgatctggggagagccacacaaaagggggttggtaagggaagcaggtgtcttttacttag

SEQ ID NO: 306192 - DNA, 472 bp, Homo Sapiens
ttgcaagtcaaacaggcagatatttttcagcatggtctgggactagtgttggttgccataaggatgacgacaaaggtaagagtttggctcaggtagagttcacaattagaaggaattcagtcacccacctcaaaaaatcacacaacagaagtgcaggtaaggctcttaagttaagagttaggaccacttaacccaatcatttaaaaatttacagtaggtaaactgaggccaagactagggaagccacttggccagctttatgtaagttctcagcacagttggtactagaacctggttttcctaattttaatccaaagttctttccaccacatcactaggctaatatcaagcttttactagggaccggaccatattcaaatcaacagaggagagaaaattttttggcaatttaaaacccaaggccctgcctagaaactcccatgtcttttctcctggggcatctacctatctt

SEQ ID NO: 306193 - DNA, 513 bp, Homo Sapiens
tcttattgaaaaatcaggggaatttgacttcagtggtgaaaataaaatacttcttaaggaaactttacttaagtttgtctttttccccaaggcttctgaactttacaaacccattttatgtaactccaaagaacaggctgacttcagtgtgaaacattctctgatctaaaatctgattttttcaccctgcatttgccattccccttccacctcctttctaatcttgtttgttcctccctaggaaaggaagcctttgtctgcctgaactttgcaattcttaaagaccttgtagttggtacttctgttgcaatatttctttggaagtcaaaatttttatgtaaattcaaccttgttttattttcaaagtctataaactgcctcaaaacaagaacaacttcatcttcagtaagaccctcccaatcccctttcattttaacatcaactgcatccacctgtgggtccccagctttccagggctctgtagcttctcccaggataaagacttctatggct

SEQ ID NO: 306194 - DNA, 452 bp, Homo Sapiens
cccctaaaaagctttcacacaccattctccagagctcaagttaacttttatgggcccccacacaaccccaatccgacacaaagggctccaaggaccctttcacctggtttccacagcgatctcccactttgacgagacctcaagagctgtaactttccacgccggttcctggaaggccttttcttcccggccaccacagtgaggggctggcacaggaaggggttaaagccctcatgtcaaaccacaaactcaggcactggcccagaagggacatgggaaccagagcagcccgtgataaaggccggattgtagcagcccactgaattggaaatgacttgtaggcctaatgaaacagaactttggcagtaacacagaatgaaaggaatgagacaataaaaggcaggaacaaagggtgcagagtcgtttcagcttagcaaaataagctcactttg

SEQ ID NO: 306195 - DNA, 129 bp, Homo Sapiens
cttaaatcttgtccgcatccggtgagggctggaagccaggttgaggaggtgtcctgtcctggggctcgttaaccacagattgtcctgcaggccaggcagctgctcattggatatggaacacattttggg

SEQ ID NO: 306196 - DNA, 408 bp, Homo Sapiens
  misc_feature (113)..(122): n is a, c, g, or t
ttcaaggcacttgaaatttaattggagggataaacccataaaaaggcaattatttgttctttggtgggacttttggaaaaccctctcttacacatgacataacaaagcaaccnnnnnnnnnncgtacgtccccaaagagggaaaggggagataagaattattgggaataaggaaactaatatgtaccgagctcaggagatgtgctaggccacactcagggcatacttgcttgcaatccttctttagggcagtgagatgttcccatgtagcacatgtggatgagttcacactcagaaatgccaggccattcacggtctcacagctagtgagcactgcactctagattctgcccggcttccacactttgcctgcaaagtgtgcccaggcatcgtgagttctggggcagga

SEQ ID NO: 306197 - DNA, 371 bp, Homo Sapiens
taggggcactcttctataaagatgctgttgttttttttctctgcaccctccccaacctctttttctttgaaatccctatggagttcgattctctttctattcaatggtaccatcttatctttttgatactcaaattttgccagatttcgccaatgagagcccctccaaattgcctcgtgtgtcctttgtcatgtacgaatcattccgaaccaattgcaaaagtacaggatttcctaattgttttactgatcaagatttatcctatccatggctccagcaaaggtatccttcaagccacacagggtctttgggagaaggctagatacctgaacaaaatcaggcttctcttttatgaaagttaaagggtaaga

SEQ ID NO: 306198 - DNA, 426 bp, Homo Sapiens
atagatgaagaaatagggatacataaaattcagtaacgttttaaaagtcacatcatgaaccaaccaagatttcaacctggaaattgaggcttcaccacaagtgaagactgggattttcttgttttcaattattgggagttttggatttccaggaatgtgcagttgtaaaaacccagcttcaggaagtgatgaaataagtgcagtggctctggagtaagctctgaagccccaggctcaggctctattgaaaaattacttttgctgaaatattcttgtttttaggaacttccatggaacttgagccttcgcacagcgtattttggcatcgaatttaaagctagtagaggtccggaagattcccaggattaaagtctttaaacagaaagcgtgaatcttgcctaagtaaaaggtaccatctctgggtgg

SEQ ID NO: 306199 - DNA, 257 bp, Homo Sapiens
  misc_feature (216)..(216): n is a, c, g, or t
ccatatatggcgagtttaaactgtctggggagagtaacacaacacaggggagggtttcaacgggggctttacctcacaaacggttgcaaaacaatttctctatagctgttgaggccgaggagctgtgggatcgcaggcgacgaaaatccctccgaatctcggagatggttggggcagtggcacctcacggtttcttccaaagcagagagagcggtntcctgcgagctttccacgagggcgtcagcagagagagcaca

SEQ ID NO: 306200 - DNA, 243 bp, Homo Sapiens
  misc_feature (90)..(168): n is a, c, g, or t
cttgcttctattctttgtttagtatctactacatataaagtgctctggaaggtagaaggagaagagcatatatagcatgaggataggggnnnnnnnnnnnnnnnnnnnnnnnnnnnnnnnnnnnnnnnnnnnnnnnnnnnnnnnnnnnnnnnnnnnnnnnnnnnnnnnggctacttattgcaaaagagcaaagagtatactagaggagcaaattacattcttttctggcaatctggagtaagt

SEQ ID NO: 306201 - DNA, 481 bp, Homo Sapiens
tgagacaacgtcttactacgttctccacactgacctccaactcctggcctcagacgatcctcctgccttgatctccccgagtcactgggattataggcgtgcgaccacactgggctcccctgattactgatgctgtaagcatgtgcttctttggtctgtctgataaataatccagtgctagatgctggcatttttccaagcactagagaaacagcagcaaaccagccacatgagatcctcaccctcagggaactgacagtctgatttaaacctaaatgctgtcataatccataaataccacctgttgtatgggactggtctaagaattaaatgcctgccctaatgtctggaacccagcaactgttcaacaaacgttagttccattccacagtccacgaaggaatggcagattttatgtttctagttccaggacggaaaaaactgcgtatttctatgtatatcaaattgcattcttcattcc

SEQ ID NO: 306202 - DNA, 317 bp, Homo Sapiens
agtcttatttgccctccagacacccagaaaggtttaagacatggaggcacaaggtgttgggatgttggtagtgaagtttgctgaaaacaaggagaatggttgaaagtggctaggtgcccagattttgtttcctgtctcacaaccctaagctaactgatttcttccctgttttcttctgacttttcactctgcaggataccaatgtcttaacctctagttgaattattaggtatgagaagctctggaacaggggcactggtcagagtgaagtatgagcagggaaaagggactgaagccaaagggattaagtccaagtt

SEQ ID NO: 306203 - DNA, 204 bp, Homo Sapiens
agcaggttaagaaccctagagacagtgtagtatgaagaagaaagtcaaggactaagccctggggagattccatctgtagaggcccttggagagaacagttattcaggtaggagaaaaaaaggggatgtgatgccccggaagtcaagtcaggacagtgcttcaaagggaagtgagggggtggggggtgttacaaagtccttcttc

SEQ ID NO: 306204 - DNA, 170 bp, Homo Sapiens
agtctaaatatagagtgtatgtctatctgctatgtttcccttaactactaatttgataattctaaggggaagagatgattcagtgggtctggtatgaactgttctctataatctgagcaaggctctgacctcatctttcctgaaggtggaaaaatggtctcataaatttc

SEQ ID NO: 306205 - DNA, 521 bp, Homo Sapiens
  misc_feature (442)..(442): n is a, c, g, or t
caaattttaaatttttattaaaaatcacagtttttaaaaatgtccagtgacacaatgtagctcttctgaaatgaatggaaaacacaacacactgctaaccagtggagggagctctctgcagggcggggagacctgacaatgcagctgtagcctctgcaagtgaaaatccaggccgacttgcagtcattggactgatgtcaagtgcaatcaccatacagcagctacaggcagggctggctgatagggagtatgggagaaggacacgctcagatgaaaacatgcatgcaacgattttcaccactgaacacactgttttctgtgatagaaactgtcggccctgctgggggacaagatattcacggcctcactagccagtgtgatgccacagggcagcctgccactgatgctcctttgttaccctgctaagaaggaccataggtanaaggcaccttaccttatggagtgagcccagacccccaggaaaagcttgggtagaacatccagtggcagctgggtgtgaa

SEQ ID NO: 306206 - DNA, 455 bp, Homo Sapiens
agcagagcttgtttattcccacaccttgaaggaacagtaggctttgttttttcatcaatgatgcacttttgtatcattcaggctgtgtctgcagtttcttttctctggtctcaagggaggagtcttaaacggcattagatcttctgcccagtccccgtgtacaggcctctttctggctctgttaggtctgattggagacccaggtgagttattttcaacccaaatttggatccgtttttgaaatgctgcctgttacagcattaccccaaactaatgcagtcactaaaagaaagttattgtcagttggcttgggctggctccgattcccttgttttcctgattccccaactgagccttcagcttcaacccagatctgaagataccaggttcagggaagtcagtgattggaaactgaagtggttacgtcccagaagtcctgatgccagttcctcagg

SEQ ID NO: 306207 - DNA, 354 bp, Homo Sapiens
cagtcaataaatttagactttgcacttctaactagcttgatacagctccagacaaagctaagagtctaggtaagcagtcaatctggttgtggattgtatcagaaaaatgactttagcaacttatttagagaggctatgctcaggttcccgcatccataaaaattggtataataacactcattccccttttattttgcagacatcataaaaatacataagataattaaaggaacccaaatatatgggaataaacatataaacctgaggtaggactgttattataatgatgataacaatgagcatattcaaattctgagtaattaatacaaactgtccaagaccatttttaaatat

SEQ ID NO: 306208 - DNA, 157 bp, Homo Sapiens
cattttttgaagccccacatgccccagggaaatgttttgtgaatggctttccatcaccccagcgtgtcacaattttgaacacacggtaggtttaattctgtttcttctacatgatcttgtgactgaaaaagtggtcataaactcacaaatagtttcc

SEQ ID NO: 306209 - DNA, 458 bp, Homo Sapiens
  misc_feature (440)..(440): n is a, c, g, or t
actcactgctaacaaacagctggatagagcccgaccaataccatccatgctcccccaagtgggtggcgctgttggcaggtgacgactggttgccaatgttggcgacacagcccagaagtgtgagtcctgcgttctcacggctgctgcactgccgcccgacctgccgctgccctgcgacattccctcccatgggtggttcctttcgcctgctgttggcaacggggatttctaggcagctgggattccttctgcatctaaattactttctctcaacaagactgattcttccccttcacagaagggttcatttgaatttgggctttggctggcacataccatgttcttctcaaattttatttcaataggaaggagtttattatatttatccactaataagtcttcgtgtgaagtatacaaatactatggatagaaaatatgtngaaacttcaaggtgaggg

SEQ ID NO: 306210 - DNA, 289 bp, Homo Sapiens
aacaaagatgaagattttggtaaagttctcacaaacatgcgtactttttacattaataaaacaagatgagactatacaaataagctttctaaacactgagtgcaagtttatcaataatagatctactttgacataataaatgcagattttaaagaaatctagtcagaattatagattttattctagtcacaattataattttttttacttatcgtgatcagaggtaattttaaagtaaagcttatcttaacaagcataataatcaacttctggtgtaagttcacatgtt

SEQ ID NO: 306211 - DNA, 327 bp, Homo Sapiens
ctccttgaatcttttggaaaacatttataagaatgatttttaacttcttttgtgttacctaaataatttcatcttactccaaagttatttttctactttgtaaaatttgttatttctctttttatgttgctagttctctttacatgctagtgatttctgactcttattaagaagagtggactgagctgacggagtagatgtttccacttttgtgtaagattgttttcgtaatagatctcttttttttcttactggaatttgttgctgcaatgggccaggcaatgactggtaactttgatgtaggatcagtggattgggagctcgctg

SEQ ID NO: 306212 - DNA, 217 bp, Homo Sapiens
  misc_feature (193)..(193): n is a, c, g, or t
cagaggtgatcttggttagtggcaagttatatttgcttttctgtcgatgtatcttatggttcctatacaagtttatagcataaacaagcgtggcatgggggaaggcggatttctccgaatatcccatcgttgaattttaaacctctttcctgggagggagtttgccgctaggcacttccacagcggggcaaanatgggtgcatacgtcctccattcc

SEQ ID NO: 306213 - DNA, 324 bp, Homo Sapiens
ctttatacacttcatatacacttacaaatatctttactgacatcattatgtaaataattgtttgtaatcactttcagacttgtccatgatatccttaattgttgcagtgctattttctggttgtgtctattcaccttcattggtgtgatttgtaatttaattgtgaggtcatcttctttggaaacagttttgcctctggacactgaccaaggaactgtgaaaatgtccccgggagttttctttccgttcctgatcaattatcatgtatgttcttcggtttgggattcctgtaccaagtagatggtacaaatttatgttatagcg

SEQ ID NO: 306214 - DNA, 104 bp, Homo Sapiens
ccgtttatataaacattaatttttaaataacttaacaatacacacatggagacaaatgtttagagaaaggtttggcaggagatgtgccatagtgatgaaggggt

SEQ ID NO: 306215 - DNA, 462 bp, Homo Sapiens
ggcaaagtatgagagaacctgtttacttgtgagacttaaacaaaaatacactagtattttacatacaataaacaaaaatactcagaggctctgggtgtggggcctgggctctgtattgggagcctcagagaggggttctgagccaggaactctcctgggcttcttcgccctccagccccgctctccccccaggatttgctgatgagcctgagatgacccagggcactgcagcatgggggctcccagggtcctagttggcaggtctcctgttcccctgaggagtcagtgcttgctccctgggtcatggctggaaaacagggcttttccatttcaatccaggcgccgccatctggtagagactggagcaaaggtcatgccagagttacaagcacgtaaatatggagaaagccttttccttgattagttgtgcaaaataaaactttggaaacatcagtgttagtg

SEQ ID NO: 306216 - DNA, 420 bp, Homo Sapiens
cccagttgaaaatataacaacaactattctaaatggaggagtaaataatgataaagcaagctagaaaaatcatttgtgtttttgtggcaaattcatcatgtcaggaaggaaaactactcatttgcatgtttgtaaacaacacatctgatcaggtgcaattttaaaaagtgatttgtggtagctaatttttgtgtaattataagtgacccaaccaacaaaaacaatggaccaaagaatgaccaaaaaccatgtgggccttcctggacttgcccagaaatcatccatcccacctgctctgatctggcagtctggcaggccttgcaggcatgatgtaagcaaactcggctctcgcagcaggagcatgattaatgtcactggttctccaacaatacaaacagcaacacttttaattacaaactg

SEQ ID NO: 306217 - DNA, 465 bp, Homo Sapiens
taattaaaggggaacttgaattgtcaaactgaatgtgtgcagtgagcttgtgaagtggtataaacccggcgtttgttgtcacataccaggaaaatttagaacatggacacacatgaggagtttaggagtggaggtttaataggtagaagagaaagggaaacagcttcctcaacaaaggaaggtgtctccaagcggaaaaagaccagctagtggcaaatgcccaagttttatagtccagtctgaggaggcagtgtctgatttagataggactcatagattggttcaatcaggcatgacatttacatagagaagaggagaagactggtcgccccatcttaatcttcttatgcaaatggactttccagttgattggagccatcttgtctgctccttaccatacacatgactggcagagaagggaagatggagctgccattttgaaaatgtctagtccttggttcctgc

SEQ ID NO: 306218 - DNA, 396 bp, Homo Sapiens
atcctgtgttaattagcttaggaaaagtgaaaaaaatttaaaattcagttatatgttcacactgcatttcaaaggggttaatagttactcatttttccgctttacagtttcttgttgtagaatgtaaacaataattatatcagtgctttagggtctttatgaggcctggatacattaatatggacataaacctagagaatttaataaaggcctggcactttaagtccttatctgcaagggaagaaaaaaagctggtttgtgaagattcttagtattccccatacattttctgtaaatcaagagcaatgaaaatataaagttaattttgatgggcacttgaaatgaattttttagaagccagatttgcaaatgttctattaaggcaatttgactgtc

SEQ ID NO: 306219 - DNA, 355 bp, Homo Sapiens
aaattttctccatcccttgatggtgagacaataaagcatgttggataggatcttctggctttgttcctttagccctgtgcacttctgtcagcaggtttatattggattgtgcagttcaatctataggctaataaatggcaattacaggtaatagccaattgcagtaaaagcagatgggtatgtacttgatctttgtttaccatcaagtgctctctgcttcagacaatgggctggatagaggtgtccattgtgccccgagtttcctgttcagtgcaggcccaggtgcggtcaggcacagctggctaaagctggaacacctggcttgcctatgatatcccaatgatgacaagggcgc

SEQ ID NO: 306220 - DNA, 119 bp, Homo Sapiens
tcatggtcctgaaaaaatgggatcgtgaagggtcattatgaatatgagcaaaaaaactgtgatgttcaccatgtgtcagtttactcggaatacagagaaggggagagacgaaatgtgga

SEQ ID NO: 306221 - DNA, 320 bp, Homo Sapiens
gaagaaatatcttacctttgctctttctcagatttgaaattcctttcatcatcactcagatttgatacctaacattttgtttaaagtggttcccagctggttagaacagatggaaaacacttttctgttctaggtcatactcctggtcctctcctctgctacctcgccagctcctgcttcctgacttgtcctttcagagccccactggcaattctttggctccgtccccatggccctgcctaaggagttgtcacatgccaggagagtcacagccttagggccagcactgccatgacagagtggtggagcaggcttccctt

SEQ ID NO: 306222 - DNA, 544 bp, Homo Sapiens
  misc_feature (376)..(376): n is a, c, g, or t
  misc_feature (452)..(452): n is a, c, g, or t
  misc_feature (474)..(474): n is a, c, g, or t
gttagaagttcagaggtcagaactgtgtagtataccaatttacacctcaatgaaagtttaatttctgagacaaaaatagagtagcacatatgatggctctacctgtgaaaatacagaggttagaatatgatctcaaaggccgcttttataatacctcctaattctgacacattgtaaataaatgaatattattaaatagaaaatagtctttttttaaaaagctgaaaggttgctgcttattgggtgggttaagtatatgaggagagaaatctagaaatacaggtattacaaccatttattataaaaccacatgacagccacacaggcacacgcattctctgggagcaagagtttacatgaaaagcggggtggggtngctagaagacataggctttggagtctgacaggcatgctgaaactccggctgcacttacagctgtgtagcctggaangtactacatcctcagagatccntctctcactctatatatatagtggacgcgcaccctttctgcagtactgtagtcataggcatgatgcagcc

SEQ ID NO: 306223 - DNA, 174 bp, Homo Sapiens
ctattatcataattttacagcaagatttactatgactattatagcaataagatggattttcaaaaataatggcttgtttaacctaacttagaacacagaaaaaagcattaaacaaatagtcaccagggctccaaaattacaaattaagggatctctcattcattgtgaaaatgt

SEQ ID NO: 306224 - DNA, 362 bp, Homo Sapiens
tgcaacctcaagcattgtgaaataataagagcattatacacaacaaattatttaattagtttaaacatgatctgaaggggaaatacagcagctaagagattatataacatgggggagggagaggtaagggaaagcttctccaaatatgagctgcttaagctaagatcttaagtgtacgaattagcttagaaaagtgaggttaaaagtattacacacatgctatgtgtaagttctgagatgggtatgtgttgcaatgttctaggaccagatggcaggtcctgccagtctcctctattgtgatgagaaggcaggagaagctaagtgccaaggctagtagttttagcagaggaggctgaggtggc

SEQ ID NO: 306225 - DNA, 383 bp, Homo Sapiens
gtattttaaaaattaactacagacaaatgtggcagttcctgacaagatgatgtattagtaggtactgttgtcttgctgtcctgatccaaccccagggatgtacagaaaacaacaataaacagtggcccagggatgtaaagggccaggcatcacggctgaaggatagagtgggggcatatattttttgaatgattcattttctctctgctactgctttaataaccttctttctacctctacgaagcagacaaagagctctgaagttcaggaaataatgaggtcatattttctgaggatttattttagaagaacttcagatctagcattttacaacagccctctactgtggtgatcatttgatgacccagtgttagcactgagta

SEQ ID NO: 306226 - DNA, 272 bp, Homo Sapiens
atgagcaatcatgcgcagcctgctccgtgtcttttcctggcctaatagctcatttctttttagtactgaataatattccattgtctggatataccgcaagtttatccattcacctgctgtaggacatcttggttttttccaagttttggcaattataaataaagctataaacatctatgtgccggttttggggtggacataagttttcagcttctttggataaattccaaggagcacagttgctggatcatagagtatgtttagttataaga

SEQ ID NO: 306227 - DNA, 386 bp, Homo Sapiens
actcctttccagtctatctactatttatttatttttcttgcctcactgaaggggctgttacatcttgtacattattgaataggaatgatgagagaggacatcttgccttccatgtaatcaatgttaggacgaaagcagtctgtctgtcccttaccattaagtatggtttgctataggtttttagtagatagtccttatcaggttaagaaagtttctttctcttcctagtttattgagagtttttatcatgaatggatgccaagttttatctaatgcattttctgtatctattgatgtgattatgtggctttttcttaagtctgttaatatgttgaatcacattgaatgtatttcaaatggtcagtcagccttgtattcctaatatg

SEQ ID NO: 306228 - DNA, 517 bp, Homo Sapiens
cattagcatcaggtctggttcttagactaagcaagtgtggagtcagctccaagaggggcctgagaagtatctgttcaagctccaaccccaggtaaaagtgtacttaaactatcttagatattaggatatttaagacttctagggaagagcataggtcatttttaaatgctaaaacacaagaagtacgaagaattctgacttgactagaaccaaccagtgtgaggcatattttaaagcagttactaaaataaagtttattgataaagacttgaggttaggatacaaaacccataatagttgctgggcatcattccatatcctaaagtgaaacatgggcacccacagggatcttgccatggctcatgaggggataggtcaccagtgggcaggatgcaaatgaagagggcaaggcgaagacctcaaacagtggaatctggaggggatgttctgaaagccacagtttgcagaggcttgacataacgagtaaggatgaaggaaacgggaatggagatggttt

SEQ ID NO: 306229 - DNA, 458 bp, Homo Sapiens
gcaaacctggctgcctcccaataaatagtgaagaatagccctggtagcagtgccttaagagattcttaaatgacaaagcccagcagaactttgaaaacgcaactccctttgtccataactacactctaaggatcctaggatctagaacacactagtgctctgattcacctctggttttgccagcgaggaaggggtgaggggaagtgtgtcggcaaagacccttgcagctggctcagcagcccacctgggattcaaacccagactcctgccttcccatggcatcctttgttcgtggctctactgctttcaagctactgtcagaaatggtagggtggacggagcgactaaactgattgtgctgggcgaactctttttggagggaagcacgtggtctggatcgtctggtccctggtggatataggatttgagtgtatggaatcaaacagccatctgggtgc

SEQ ID NO: 306230 - DNA, 289 bp, Homo Sapiens
ttttctagtttgttatgtaatataaaacatgtttattagactctaaaagacataaaaagaaaataatacatatgtatcagtgagagaggtgcaaattaggaagagaactaaggattattcttaattcctgccttcctttctaaatcccaatcctcaattgaactctttaattatatttcctgtttattttgttgaatggaaaaaatggaaaattatctaacatttgccatggaaatataggagaaattactctcagagatatgatgttatttaagtcattgacatattg

SEQ ID NO: 306231 - DNA, 152 bp, Homo Sapiens
ccctctggaccttctggtgtgtatttagagaaatctggatatgctggaggcactcccaagtagcataaataaagatggcttctgccactagaaaacatatgtgttgtgggtcaagtaagggaggtatcccaatagaataccacaaattacag

SEQ ID NO: 306232 - DNA, 447 bp, Homo Sapiens; identical to SEQ ID NO: 60889

SEQ ID NO: 306233 - DNA, 449 bp, Homo Sapiens
gaaggtttctcattttatttaattcactctagtcatctctcctttaaagcatgaaggagatggcattccagtagagaatgtgttatagctctttagttagtactatatagtttgatagagtgggttagcaccatggtttgacattttagccatgcgaagtttgattgtgaaggatggtgtcaagtctgcaaagaaaaatgtttctaaatcagtaaggcatattctcacattaaaatgggtaagtcacttaaaacagaaacaaaaagagaaagcacaatgtctataaaatattattttcatgtgtgaaaggacccagttctgtttctcattgggccctataagttttcataccttatccagcctaaatcgttggtggtaaaacagtgagaaacatccccacactcccgcaggaaacagtatttaaccactgatgcctctagaaaagacat

SEQ ID NO: 306234 - DNA, 534 bp, Homo Sapiens
ttgcaaatatttcggatttggtgggacagtatatttctttccaggtttttggaacgctgaagtcactgacacatggctatggagatatactgtagctgagtgcaaacatccctgattcctagtacagtcaaacctgcgttttaggccatggtgggtacagggagggatgagcctgacgtggaactgtcccgggggctgccgagaatggcacttttctgtctgcagagaccttgaagaggagatctgaacaaggtgtatcatcatttgtcttgagccctctcactccccacctctccccttaccctgtcccagggacaggctgattctacttcagatctctattcagcattgttccccttttgggaatagtaatggaacagcctagatcccggggcatcgtcctgccaaatttctagtctgagtctagccccacttaccattaggctcccattagcctgttaggccctcttatctaaagggcacatatgaagcaagacgcagtctggggagaactggctgcaaagccagacacct

SEQ ID NO: 306235 - DNA, 363 bp, Homo Sapiens
  misc_feature (255)..(269): n is a, c, g, or t
aacagcaggctggatggactgtcactggttttagaggttctcttctaggacagagaatgaatgagggccaggtgacgggtgagaaaggaaatgggaggagtcagaaatgataacccagagtgaggcattgctagtaaacttcacagcagaatgtttcattacgttaatacaaattccccttgaattacacttcaaatctcttgtctgaccttacaaaaattatgtttatgctgatatgctaataaattttatccnnnnnnnnnnnnnnnatatattatgctagaaatacatgtatttggtcagaagagaattttttacctgttaatagtgcaataaccttttaggttaaaacagacaaaaacc

SEQ ID NO: 306236 - DNA, 389 bp, Homo Sapiens
  misc_feature (167)..(175): n is a, c, g, or t
ggccaaatcattggcattcaaacacgaagaatgatttccttttcattttatttgtaggagacatgagctaacaatagttaatcaagtgggatttattcaaaaaattccatgctccatgcttacatatatcactggatcaatacaagaaaaagtttaaataaaggcannnnnnnnnaagtttctatcttcaaccacttctcccttggggggtctcaacttccccatagcttcacctttcacttaatgtaacttactcccaaattaatattttagcctttacctctgagctccaacacatttctacttgatccaaagagatctccatcacagagcttcaagttctacatatccaaaaccatcatccctccacatatatttcctaatttatc

SEQ ID NO: 306237 - DNA, 433 bp, Homo Sapiens
taaaggcaagtagaccgaaggcagctttggtgactccacttctttttaaagtcaccctcctctgccctctgactttaagtgacaggcagttccctcccctctctttcaattctgtaaaatggggataatccggacctcatgcccccagagccttgtaaggaccggctaatgagggcaggcgagtgggaaacgaatcgtctgaacaatgatcagtcattctttcgggcttgcaaagagggtaaaaaaggttgggtctttagcggggtccgtagaaggctttgaagacgaaaagtgctgtagaggtgctaagcagcagccaacggaccgggcccgctgccagggggtcagggctgggccgaggcggccgcggtctcaggctctggccaattttgcagccgcgggtaaagttcacgctgcccgctcccctcggtac

SEQ ID NO: 306238 - DNA, 269 bp, Homo Sapiens
ctttttttcctttggcccttgaaggaattcccgaaaactttaaggtcacagaaaccacccttatggcaagtgtggtaaaaaggcctgtccaggatggaactgcaaatgttaaaactatgtgccacaacccaagtgggagaatgtgaacacagccgagaggccaacaggttcttagctaggggtctgtgtatatcacgcctgggcctgtgcatattttataggcatacacattatgagaagagactcttgtgagctatataagtgctctc

SEQ ID NO: 306239 - DNA, 157 bp, Homo Sapiens
gtaccgtttaaggccgatagggttggtgggatcctaaaggaagaagggtggctttagagattcagttgatgtgtgataggtgaaagctgatcgctgtacttgcttgtaagcatggggaaggggttttgaagaggatagggattttatgatctacagg

SEQ ID NO: 306240 - DNA, 442 bp, Homo Sapiens
gtctatctggtccatttaatcagtcctggatatctgaaatatcaaaatgattctcagttggcccagacacctcacacatcatccagtgccctcacactttgaaggtgctcaatcagtgtttattcattggctgacccatgatatagaaattcacactactcagggttcctttccaaagtcttatacaagcaaaatgttgtggcaaaacattcacccaacattacaattcaaatattccagaaacctgtaagcatgctgtcttatgatctcattattgggtctcaatttaagtactgcttcctcaggggaaacttcatggactatccccagccacacctgcccccagcgccaggcctccagcctgattcacaacacttcacacaattgtcatcaggtctggctttcccaactgaccgtgtaccccaccaggcaggcagcatgg

SEQ ID NO: 306241 - DNA, 422 bp, Homo Sapiens
cgtcgttttgatagatgacgcatacaaagagtagtaaaacgcaaacagcacaaaagggaaaggaagtttccttcaaagggcggttcccctcccctagggcagtttcctgtgttcctttgcagagatactcagtatgtttacaagcgtgtgtgtttattcgtctcaggtagagaccagagaaatatagaaggggtcctcccaactgctccaggctgtgatcaagggtgaaattcgtgcgaagggatctgggtaggaaggggtccctgggcttcgaccgtcaccttaaagctccccgggaccggtcctttcagccggctctgggctccctcccctcctctcggggatttccgtctgtgatagggcacctccccgcttaaggcttttcgaggatcccttcaaggccaccggttagcgctgaaaga

SEQ ID NO: 306242 - DNA, 496 bp, Homo Sapiens
gcctttgttcgtagtctgatttccacttttacttaaaattttaatatcttctccccaggttctttatttatttttgctatatgcctgaatataagacctaattccatgtcaccaatatctcccttgagaagcactgatgttaagtagaataaaatgtaatcaacactcattgtttcctaccaggacaacagtagggtttaaaacaaaaccaacctcgttatgaattccaaacgcccttctaaataactctgggtgccatttcacaacctgacctgcatagttcctttaggctgctgtgggagttgtgactatcctgtgtccacgtttgcatgctaggttgcactaacccagtaaacacattctgtatcagcctgcagtttgtggaggtccgagcacaacgcatggaattccacctctctggggttcctgccaggtggagcaatccagaagtatagcttccacctgtaggggaggcgcctgcaaacctggcagctct

SEQ ID NO: 306243 - DNA, 353 bp, Homo Sapiens
gtgtgagtcaccatgtccagcctataatatttgaaatcaggttgtgtgatgcctccaacttagatcttcttgctcaagattgccttagtaatttggggtctttcatggtttcataggaattttaggattatttgttctatttctgtaagcaatgccactggaattttgataggaatggaattaattctgtagatcgctttgggtagtatggacattttgacaatattgattctactgggcagattctttaaatggcttggtatggacacagccttaactctttccagaacaggctgaactgcctgttcaactaggcaggattctcactttttactctctccactggcttcaga

SEQ ID NO: 306244 - DNA, 475 bp, Homo Sapiens
aatgttcatggtggtgaggggaattcttggtcaaaggccaaggaatactcccttctctttgccagaacttcaattaattagctttatttttataaggcagggagtaggagatgtagaacactatgaaacagtcatcactcaaaggggttcttttttcaacgatgttcctattgtttttagcaaaaattcttaaaattaagtaataatcccagaacgtttgcacaagttgtttttagcttactacttctgagttttttcctttttgtttcaaacgttaaaacagtgaagtcccttcccctcttataatccatacttgcaatatacccagctgggcagcaatgaaagaaaagaagctctagggacacagctgactgtggatacccaggggatgaggcaaccccactctctcttttatagcccagctgactgacagcaatgacatccaattacactttccttatttggtgctctgaga

SEQ ID NO: 306245 - DNA, 184 bp, Homo Sapiens
  misc_feature (12)..(12): n is a, c, g, or t
ttttctttttgnctgactggatgatttcaatagacctgtcttcaagttctgagattctttctcctacttggtcaagtctattattggagctttcaaatgtattctgtatttgcttcagtgcatttttttaattccaaaatttctgctttgttttttgtttttgatacaggatctctctctgtca

SEQ ID NO: 306246 - DNA, 493 bp, Homo Sapiens
cgtcagaggtgtttaatcatgtattgatttgcctgggctgccataacaaaataccacagagtaggtggctttcacaacagaattttacgttctcacagttctggaggctggaagtctaggatcaaggtgtcaagcagggttggtttctcctggggcctttctcttcggcctgcagacggccatcatcttgccgtgtcctcccatgaggcctttcctctgtgcgtgcacaaccgtggtgcctccatgcatccaaattttctcttcttacaagaataccaggcagattggattagggcccatcctaatgacctcataatcatttatttgtctctcttaagaccccatatccacatgtagtgacattttgaggtactgggggttaggtcttcaacatatgaactttaggggaacaaaattaagcctgcagcaaacaaaaatgacaatatctgtcctttgaggtatagcacctgttaagtgaacgtcttatgacaga

SEQ ID NO: 306247 - DNA, 304 bp, Homo Sapiens
  misc_feature (201)..(210): n is a, c, g, or t
taaagcatagaagggtaatcaagaacaatgtttagctattcagcctgaggataaacctgaatggtgaggggccttaaaatagttttctttgtagcattcataaatgatttttaaaaatttaatgtgaaaataatttaactgaaacaatatagaatgagcagtttttatggatttatggtctgacaaactgtcaaacattcnnnnnnnnnncccaacttttattttagattgaaggtaaggggtaggtatgcacgtttgttacatgggtaaattgtctgtcctggggctttggtgtatagataat

SEQ ID NO: 306248 - DNA, 492 bp, Homo Sapiens
agccatcccaggtagcccaaactgaaccaaatcgtttttatggggctctgttagaactgaagagaaattattgattgtatctgtttacatgatttcatatgttgcacagacattgatctcaaatatttttaatttctatattctgcatccctatagcagatccaggcaggtccttcttaataatgttgagtattttcctttgttaaaaactagtattcagcctaaagaccatttatgataactgtcaagtgtgataaaagtacatagactaaagaataattcataaaacactaagacccaatgcgctggcaggcaacactcaggaatttactaaatgagatctcctaacatttccaatatttactggagacactggtgctagggcaatggtgacagctttcttgatgtctcataatgagggtcaaatgcttatgctatgatggatggtgtgacttatgatgggaactcataaaaatagactggaaacacaca

SEQ ID NO: 306249 - DNA, 288 bp, Homo Sapiens
tggccttgttttatctctacaggtgcacatcccctttgaaatactctaataagatagtgctggctgggctctcagagtccatagggacaacttattcattttacagatggcgaaactgatgcccacagagggcgaaggatttctacactgcctcatctaatgagcaatgcaaatccagtgacatgtactggcacacactcctggtcactacacactagaacatttacatcctcatcatatatgcagcgcccatctgccttctagactctggtggatggatgaagactg

SEQ ID NO: 306250 - DNA, 130 bp, Homo Sapiens
agttgggaaggaggggtccttcccttcccatgaaaatcctttatttgccccaactgaggggtgggtgtggggtgttaaaaaagaactgaaaaaagaggggacactagacagggggtccattaagggggct

SEQ ID NO: 306251 - DNA, 313 bp, Homo Sapiens
tactaactatacacgcaatttttgacattttaaaaacacctaaagaagatacatcatcgcaatccaagtatcttattgtatcaggcaaacagaaaccactccagttattccaagctaaggaatgtaatacagaaaactggctacacaggtgacagaagtactaagagtctcaaccaagatagtaaagccattcagagattgcaggaagccactaatgcccacagggctgcagagatgcgggcaggaggtgtctttactagatcatagaagtcagggccatctggtgagaactgggaccatggcaggggctgcc

SEQ ID NO: 306252 - DNA, 375 bp, Homo Sapiens
cccatacaagatggtttattttatcctacacacagaaaattgcttatgagtatcacattaccgctcttggttatcagttaacaaaggctgctaatgaacagcatcgttatcaagttgggtaagagacgccctgggagtccaggcaaatcatgacaacacagcactttgttctgaaatatagctcatttttcatcacacacaaggagggtagcccagtccgagagatttcctggaaagtggaaaggcaaagaatattccgtgatgtgatcccagaaatacagggttaatattacaagggagagaaatgctcacggggccttagtctgatggcaattgtagaatgtcatggctttcctcagcctccaccagtcatgt

SEQ ID NO: 306253 - DNA, 482 bp, Homo Sapiens
  misc_feature (44)..(271): n is a, c, g, or t
  misc_feature (284)..(335): n is a, c, g, or t
ttgcaatgaaactggagactcaggccagagcgattacagtaatnnnnnnnnnnnnnnnnnnnnnnnnnnnnnnnnnnnnnnnnnnnnnnnnnnnnnnnnnnnnnnnnnnnnnnnnnnnnnnnnnnnnnnnnnnnnnnnnnnnnnnnnnnnnnnnnnnnnnnnnnnnnnnnnnnnnnnnnnnnnnnnnnnnnnnnnnnnnnnnnnnnnnnnnnnnnnnnnnnnnnnnnnnnnnnnnnnnnnnnnnnnnnnnnnnnnnnnnnnnnnnnnnnnnagtgagaccctgnnnnnnnnnnnnnnnnnnnnnnnnnnnnnnnnnnnnnnnnnnnnnnnnnnnnggatactcagagttttgtgtgcatctccggatttttaaattttttaagtttggacaattaaatcaaacttttaaaaacaacatattggcaaaaacaaaagagatctatgggtcagattccaaccacaggatactaatttataaactc

SEQ ID NO: 306254 - DNA, 482 bp, Homo Sapiens
  misc_feature (460)..(460): n is a, c, g, or t
ctggtctgactagattatttcaaaacacctgtcttcaagttcagaaatttttctcttctacttaatctcatccttcctgaagctctcagttgtatttgttacttttaccattgaattcttcagttctgggatttctgtttgcttctttttatgatatctatctctttgttgatttttcatttagatcacgagttgtttttctgatttctttgcattatttatctgtgttctcctgtatctcattagttaatttattttcattattttgaattatttttcaggcattttatagatttttgtgtgtgtttactcattattggaaaatcattgtgttccttttgaggtctcatgtttcactgctttttcatgtttcttgtgtccttatgttgatatataagcacttgctgtaacagttgcatctttcaattttaaggattggatttcacagggaaaaactttntcctacagatttatctatagtg

SEQ ID NO: 306255 - DNA, 327 bp, Homo Sapiens
catttatcttaggaactgtttaagtatgttaaaattcaccagtcggggtcaactgcataggttactacttaaccatgctctactttaatcagagtggtctccacagaccaatacctacttttttcaggtgtagcaaaaaggtggtcacacaaacaagacaagtcgggaccatttacccacttggctgaatggaaaggtctgaatacgagataaaccagacgatggagcccctaaccaccacattgatttagagccgcttgtccaaaatgcaagcagtttggaaaaataaacacagcaggcaatgcctgttccccttcagctatccag

SEQ ID NO: 306256 - DNA, 365 bp, Homo Sapiens
tcccagcacaaattgttggaagatctttggcttcctggaaaacttattattttaattgtcatctctaaccccatgcaggtagtagaaacatggcaagcacaatgaaagtaacaggagaatgtacagaggggtctgtcctttctacttctatagactcctcaactgaactccctctgagaaacaatgcagggaggttggctgtggcatgagcagcacagttctactgcggtttgcctgaatgaagagtctcctgatttctcatctccataccaggcagaggtgaatctagtgattgtgaaaatcaagagtggaactgaaggggattcctctgcctgccacccctagaaatcctcaatactgacagc

SEQ ID NO: 306257 - DNA, 325 bp, Homo Sapiens
  misc_feature (151)..(160): n is a, c, g, or t
taactttatctccaattttaatctcaatgcctcttattttatttacaaataattttcataaatgttagagatacaaagtaaatgaagaagactagacaaattttttctgactttccaagagtttgccatttatcttgaaagacataaagannnnnnnnnnaatttaaaaattagttcaccatttaaaacaatgaacaatctagtggtatacaaaatggaaggagaagaaagaaggctataggcttgaaaaatcatctgctgtgcaaattttcagattaaattgatggaaaaattatccaagtttgaagaatctattcattgtggc

SEQ ID NO: 306258 - DNA, 104 bp, Homo Sapiens
ttccacaagttttttaatagcatgggaaaatattcagaatgtaactaacactaagtggaaaaagatgcaggttaccaaactctgtagattcaatgatatgaaag

SEQ ID NO: 306259 - DNA, 198 bp, Homo Sapiens
aatcaaagtacataaaataaaggtggacacaactgtaagtgatcaccaaccaggggatgtttgggatttttagatgcattaaaagagagtatagagaatatccacctgcaagtaagattgtattcttttgcaaccctgcgattttcaaatggcaccccaacacagtctttggtcaggataagggatcctgcaggccta

SEQ ID NO: 306260 - DNA, 416 bp, Homo Sapiens
cctgtaagctgcattgttgaaatggtttgacatgcaaaccatccctccctccccgaccagtgtacagacttccaggtctccaccctagcgtgttctaaaaatcagtgtatcatcaggctgattcaccacttgaagaggtggggcaccggttggggtacatgctgcataagctcagcaggtacttctgcctcctctgccaggtcacaagaagacaaaccagtctttgtcctcacagctgagggggaacatgccaaacgggttgccccaaaaaacatattcgtggtgcgtccctgagttgaataaagcatcccagtcaatccacctaaaaatgctgagggaaaaataaataaatcggctgcaccgtgttgggtagacagacttacatgagggggatactgagaacagaggaagagaga

SEQ ID NO: 306261 - DNA, 178 bp, Homo Sapiens
acaaggctccgttggtaaaagtggctatgaacagcctcccatcggacactgaggctactgaacttccttggagaacggacccattgttggcataaaaagtagtcaccgctggcttctctcctagaatattctcgatgcggagagactctggggagggagagatcttcgggtcattcac

SEQ ID NO: 306262 - DNA, 343 bp, Homo Sapiens
cactacactttctgataccttgcttggtctgcaattcttcagcagaagcctagcatatcattctccttatacaaagatcattgacctcaagatacttctggttggattgtccaactcttttgccatagattattgaaatctactaaagcacagtcctgcagaagcacatccaagtgttgcaagtcaaatgtgtcctaacccttctgtgggacctcccaatccttgtgtcacaggtgttcaagagggccatcaccctcactgggattcccttctaccgttgttgatgcctgcagtttgagggattttatagtgaaataagcatcacagtgacagtagtggcagc

SEQ ID NO: 306263 - DNA, 118 bp, Homo Sapiens
ccctcattaaggacggccagttctcaccaatcccctcttcctcctagtaggtcacccagaacacgttggacttctcaagggggcacaatatctccatcgtggcgccaatttgctccaa

SEQ ID NO: 306264 - DNA, 163 bp, Homo Sapiens
ctgggggcaaatcatctcctaattcttcctcagcaaaatcatccccatcggtcctttttttgggggcagtttttgggcgttctatttgagggccaagtggggccacaaagggggcaaccatttctttgttaccgccaccttcaaaagggtcatttgtcccagg

SEQ ID NO: 306265 - DNA, 343 bp, Homo Sapiens
aaagaattatttttctcagggtgccccttgtccagtgtgcagacaggagccacccaactcccacagcttctatctaccctccaaccttgccatcctctgctgccttctgctgagaactaggctgctgatttaggttggcaccagtagcggtatcagaaatgtaagagccagaacatattaactaagaacctccatttcccaaaaggaagctggtctgcattgtcctggatctgagatggagattagcattaacctgggatttcaatatcgcctacctccaagccccacttctactgcagcctaggttcaggcaacaccctagaagacaacttgcaaatgagca

SEQ ID NO: 306266 - DNA, 366 bp, Homo Sapiens
agcttgccactccgtgcctttaaaatggggcatttagccactttacattttttatatgtgtggatttgatcttgtcattgtgttgttagccggttgttatgccagcttatttgtgtgattgctttatagtgtcattagtctgtgtacttaagtctgtttttgtattggttggtaacagtctttcctttccatatttagtgcttctttcaagatctcttataaagtgggtctggtgataccagaccccctcagcatttgcttatctgaaaagaatcttatttctcctttactaaggaagcttggtttggctggatatgaaattcttggttgaagtttttttctttaagaatgttgaatataggcctc

SEQ ID NO: 306267 - DNA, 451 bp, Homo Sapiens
ttaattggatgattttggacaagtctgtgcatttattcatatcttattccatgtcaggggactcagtacaaaggtgaaaaagacaaagttgctgttctcaaggagtatactttagacacataagctagcaataaacaaacaggatgattttagctcatgacagggctacacagacagtaacagtgatgagatagagtgatggggaagaggtgcttaaaatggggttgtcaggaaaggcctctgctaaccaccagatctcatgggctcatcttgagatttaacccagcaaacctcttctgagccagttggcaccactgatctccctcccctcctttaaactgttgccttccttgatttctgtgacaagatactggtgtcactatctccttgtctcctcctacttccagctccctctttcagccttctatgcaggcacatcttcttttgacca

SEQ ID NO: 306268 - DNA, 439 bp, Homo Sapiens
tggtttttgattctgaccgatgctcatagtggttgacagtgatagtgacatagtgacaggtgtggtttaccccagttgacaggtgagcatctgatctccctggtagcaaagccatcactgtttgcaaaggaaacatatgaacctgacacctgttttacattcttgccttgattactctccattgaaaacaccccagtgttttgagaagggaagaatagcaacaggggctctttcagtgagcagaattatttgtgtttaacaagtcttttctggagagcaatctctgacttgtgttcgctgttcttttccctctcagaaatttaataacattgtgactaagtgtgggtgtattattctgtgcagagcacttaaagcacgggcctaagaaatgtatgtccaggattaaaatggaattcttctagaatcattttataattct

SEQ ID NO: 306269 - DNA, 510 bp, Homo Sapiens
tttttttgctccaattctgaataaaacacatatgtcacagaatttcctctgatatcctactaagtctccttttgcttctttgcttctcaacatttacccaggatggtctgaactgtaccccaaaggctgacttgtccactcctgtttcttcactatccttccgatgccccatacccatttatggttttggctagcatttatagctcttaaagcaaactaaatattgcctgagaaggactccgtatgtctatatttgagtccttgtggatgaactgtaacctagcttaataggtagacaagattgaaagcctaacttaggagtatgcgcctgtaacagtagctgcgtcttgggcaaatcccagcagccatccttcaaccactcatggactgctgagtgttctaactgtgttcaaataagacaattgcaaatctgtaaccaatccagccactgtgtacctcacttccgatttgtcgcttcccttcatttgtctataaatttgttatgaccac

SEQ ID NO: 306270 - DNA, 681 bp, Homo Sapiens
ttgtctttgagttttattaggaaggttagcccggcgtggcgtgagacgttagaccgcaaggtctgggctcgttaaatcaaataccccggttggcacctatggagagggcagatcctcctcagaagagctggtctgaggaagaacccctttgcccactacgcttctataagttagggtcatttggctctgggaacgctggggcccggacgggcaaaacccgtggcatccccggtgtcccaccttaggggctggcacctgggcctgcacgacccggggaactggcctgaaccgaggtgctccagattcaagccggcatgcacattggggaccaagctgcaagtccacatgtcaggtgaacggaccgccgagacaggagttcaacctgatctctcagccaggctggccaggatgccaatgagatttgacagccccagcagataggcggactcgcggatgccactgttccagggtcgtcggtggtccacgatctggccatcgttgaaggacttggtcttgccgaagttatgagctcaacgccggctctaggaaatgaaacgtcacaaagaggatcgaacttgccattacctaatgccttctggagaactcggagacctcaaggtgttcccgatatgcctgaagcggttaaattccgcccttacactgcttcacatccttgcacaa

SEQ ID NO: 306271 - DNA, 414 bp, Homo Sapiens
accccctcaacctattcctgcgttatgggaatcatgttccgacagacacactggtacaaccacagaaaaggggagaagttctgatcccgtcagcgaagggcgagggggtgcgaagggaaggaaaagagacctcacaggccccggcccacgaaccaactccagcaattcagtagttaagttcggccccgctgggggttccggagcgcggcgccccgccttcgccggctctccattggcctacgcgaatgcctgcgctagcgctctatttgctcctgcggatgcccatcatgtcaagcccccccaccacccgagcccgcagctccaaactgcgccacagagtttacggaggaaagggcctggaggcagcaagctgccgtaatttgggtatgacgaaggcgtcaggcgcagcgccct

SEQ ID NO: 306272 - DNA, 483 bp, Homo Sapiens
tttctttttttgtagagacgagatctcattatgttgcccaggctgctctggaaccctggcctcaagtaattctcccacctcagtctcccaaagcactgccattagaggtgtgagccactgcacccggccatttgtgcaaattttattattttttatttaatgttttgtagtagagaacatgcactgagtagtttccgtacattaaaatttatttttcattgttaactaatatggccaatttctgtacatcttgtaagtacttgaaaagatgcacacactgatgtagaatctctctacacacactcaaatatacacataataaacactattcactctgcatttcctgctctatatatatttgttcaatttttaatccactgtatcaagatatgaaagtgttaatttcaaatgactgattagcatgtttctgtccatttcctcttgtatcttttaagtactttttaactgtactataaattgaca

SEQ ID NO: 306273 - DNA, 232 bp, Homo Sapiens
ccgtcatactggcaccaattttaagcccatgaggcgaaaaggtaaaaggcggtaaaaacattgccttcagctagcctgacatgctgtagacataaggaacctgggctaaattcgacatgtccaagcgagcaaactaaaagacaccaaacccgtccaagctgaagccataccctatggtaacctactgctggatctgagagcccacagaccaaaccaatggcaagatgttact

SEQ ID NO: 306274 - DNA, 343 bp, Homo Sapiens
acgcccaccctccagaaagtcgaatgcgctggacggagggactgtccgttccttccggcgagggacgggtgagtccactgggggagtggaatcactaccggtgatcctgtcgagagctcacgacgcacaaacggccagagatgctcaagctggcgccaggagaactaccagcctacaggcgcgtgagttgtggggatcttgaaggggtggaggcacagactatacgaggagaaacacgatcagactggatgtggaggcttggccccaaccgcatgaacagatttggacttgtcgagaaatgagtgctgctgctcgctcacagctgtctgaaggctgatggtgg

SEQ ID NO: 306275 - DNA, 338 bp, Homo Sapiens
cttcatctattccatcagccaatccagttggcaaccttcaaaacagactgagaaactaaccacctctcaccacttcccctgctaccacccagggacaacagcaattgtcactgagctggtctcccatcctccctagcatcagttcccctgagatcgccatgccatgaagacttttagaagctgattatggtaccctgggaaaggatcatgcttgcgtagtctagaggggtggcagtaatggtgatgcagaggtagaagataaagtaggggagtttcagagatgaaacagatgccttcagtgatattctaacagtaacacgttcccactgctgttaaca

SEQ ID NO: 306276 - DNA, 221 bp, Homo Sapiens
ttaaactgaaccctttaatgtggaatgcaggtaaatattaatatgtatgatagagtgtgggattcagcctttaaaatgcaaagctccctaaggtcttcaaatgtgccatccccaaaagttctacacatccctggggaaagaaagggtccccaaattgatgtgagattacacttctaccatgtggggaatgggggaggaaaacagaaattcaggtcagatat

SEQ ID NO: 306277 - DNA, 431 bp, Homo Sapiens
taacaattacttttacccagggaaaaatccctgtcccacagctatgggttgtcagttcccatctatccagccactgtgatgggctctctgtggagtggatgatgaggctctgtgcagaacccgaagtgactggtgagtctaatgaaggcccagagctcagcaaggtccctgtccagggctgaggggtgggggagtgagacccgctctgctcttaagcgctcacagcagccaagaaaccaaccagcatgcatgtgatcagtcctgtgtgcaaatggctctgaggacacacatgagatgagggacactctgtgacagcgcagctgtgcaactactctgttcaattctgagccacaaggatgatgactgtaacaaaatggtaagaaagaaatgtggcttcaatcttaagacataaaagattactcttaacattc

SEQ ID NO: 306278 - DNA, 304 bp, Homo Sapiens
cgtggagaagtaatgaatgactggttctctttgcccaatcatagctaggcggccttggaccaatctcaggaccatactctagtgagcgtcgatacagaacaccacactgtactgccgaacctgtaatggctagagaataaacaatgaccctaacagcttacaaagttaccgtggaggttcacaaggatgacaatgacatgtacttatacactgacgaggtggcctacttgtcttgcggtagactagcgttgaatctaggggggacattctgagctccttgtgtctaataggaaccagacttctg

SEQ ID NO: 306279 - DNA, 349 bp, Homo Sapiens
gtgctcaccactgaacccagctttgacttcgtttaatataaagtcaaattttcttttaatatgtaatcttgaaaggaagatgaggtcatgccaacattataccactctaaacagtagagaatataggggcacattttcaaattatctaaggaactcacatcattagtccaaaaatattctgatcatagaagcctctaaaaaaacacaaaagcacaaagacaatacacagtcacccaatttcttctatcccagctttccagatccagcacataccctaaaaggggctgtaagcctctcaggagcagagaccagcttcgattccattttccacaccccgagcccagcataa

SEQ ID NO: 306280 - DNA, 417 bp, Homo Sapiens
  misc_feature (96)..(119): n is a, c, g, or t
agctcagtgagccatgattctccccagcttgtggattcctcccaccccaactgcatcccaccttacttcttgccggaactatcagtctcctccctnnnnnnnnnnnnnnnnnnnnnnnntacaggcccctactctgatcccagggtatttagttttcctctaccctgagcagagggcaggcaggacctttccatttaagcttctgttgaccctaaggattgggcagccaggagtgggagtgaagtggactctctctcctcctccaggacccaccgggaaggaggacccgcttatcctctggcctggtctcagcagcctgatcctggcaggtcacagggcttctggattagctggttttacaccccaggggcatcagaaattacctggcacctcacacatgtagacataaggagcctt

SEQ ID NO: 306281 - DNA, 376 bp, Homo Sapiens
  misc_feature (255)..(292): n is a, c, g, or t
  misc_feature (304)..(334): n is a, c, g, or t
gttaattgacctgagaagcaggaacaagtcttcaaggatcttggcacatttgtctgggttattttctgcatgctttatgattttcctaaatgaggaagaaatagaggccaggcacccctataaatgcatcctatttagtttggcattagagggtttgtctggtgtggagacaatgtcagtcctgctaagcagaggtggaaataaggatcccaaaggtcatccatcacaggacttcttgcccttttttccctccannnnnnnnnnnnnnnnnnnnnnnnnnnnnnnnnnnnnnagatggagtctnnnnnnnnnnnnnnnnnnnnnnnnnnnnnnntacttaaattcctcaattttcaggaagactgggggaaaatca

SEQ ID NO: 306282 - DNA, 286 bp, Homo Sapiens
gactttgtcagattgggctaattcaaaagccttgtcttcaaactctgaaatttctttcttctacttattcaattctattgctgagactttccaccgcattttgcatgtttctaagtgtgtcccttgattttcagaagttgtgattatttatttatgctattttcctggaaatttttccattcatatcctgtatcactttttttgttttgctaagttggacttcacctttctctcgtgccttcttgattggcgtaataatgaccttgtgaattctttttctggcaat

SEQ ID NO: 306283 - DNA, 127 bp, Homo Sapiens
cttcatgtgttccatattcagcaatttctctttggtcaagaacaagaaccatattagcattcttactgttgtaaagacgatggtcaataactaacaccgttcttacattcaatagtagacctagagc

SEQ ID NO: 306284 - DNA, 256 bp, Homo Sapiens
gctcctggctggagacctgcttcgagtgggcgtcctgcaggttcttcttaaaagctgcggcgttctttcagagctcggaagcatgtgtgataaagggactatcaatgatgggctctcctacaacgctctggatggagagcagaaagagcctggcataatacacggcacaacacttttgcttcaagatgcacacacatatggaacacatggagagcacgttgccgtgatagcagaggcgcaggcactttactgtggg

SEQ ID NO: 306285 - DNA, 218 bp, Homo Sapiens
  misc_feature (100)..(164): n is a, c, g, or t
tttaaagggacagactctcactatgttgcccggtatggagtgcagtggctgttcacagatgtgatcactgcacactagcctggaatttctgggctcaagnnnnnnnnnnnnnnnnnnnnnnnnnnnnnnnnnnnnnnnnnnnnnnnnnnnnnnnnnnnnnnnnnaaatacactttttgaaggcaaaaacagtcataaacatacaaatatcagaatgct

SEQ ID NO: 306286 - DNA, 435 bp, Homo Sapiens
  misc_feature (351)..(351): n is a, c, g, or t
aatttattttctaagtcttctataaatttcagtacttatcttgcttgttctcttagcagaataacaatgttaactacttttcttttctagaaacaccctctctcttactttcacttctggcttccctctgtactacattcattttatgatactgtccaatctacacccctctcttctgaaaacttcccccacttggacccagcagtgtggccctggagacatgctcatcccctgtgatcctgctcccttgaccacagctacttggatcaggaatgaacacttggcactagggaagcaaaaccattggctgtgctgagccagtcagattcttttttctaaaagtagctgcanataaagtcagaaagagagtctctactgtgtgcttgaatttataaaaataaaactatgagtgaggcagacatgtgcgtatgaaaa

SEQ ID NO: 306287 - DNA, 449 bp, Homo Sapiens
  misc_feature (90)..(151): n is a, c, g, or t
atgagccaccgcatcccacccaaagtatcttaattctgtgttttcatcttccctagaacctaggctctttgaggaccagaaatgaatctnnnnnnnnnnnnnnnnnnnnnnnnnnnnnnnnnnnnnnnnnnnnnnnnnnnnnnnnnnnnnnaccaattgaatgaggtcatgactgtaatgaggaatttatcatttgaattatgcataattataaaaatgctatttaatttataacagttctagacatgcataacatgtcaacatcacagtgaaacctgtctaacagatgtaggtcaaggaccgaactaggttgtccattattctcactatactctaagtgctgggacacaagataacccagtcctaaaaggagaaatcaacattttaagcagctctacaaagaagtagaaaaattgaagacatcagacaaaagtttcaagagcagtctt

SEQ ID NO: 306288 - DNA, 406 bp, Homo Sapiens
ttaaaaaaataagtgatatttaacaattgtcagaagagaacaaatcacttctggtactaaatgtgaaagaagaaagcttttcaagggagtaaatacagtatcccccccttatctgtggtttcgctttttgcagtttcagttactcatggtcaacaatgatctgaaaataataaatataaaattccagaaataaataattcataagtttttaattgcacatcatcttgagtagtgtgatgaaatctctcattgttttctccatcccacccaggacatgaatcatccctttgtccagcatatccacagaacccactcattagtcagctattaatattagccatctcggttatcagactgactgttgtgttatcacagtgcttatgttcaagtaacccttattttacct

SEQ ID NO: 306289 - DNA, 274 bp, Homo Sapiens
cagcgtatattcaaatactgttcttcccttatcagattggcagtgttgagagacaatccttcatggggtttttatacgtattgtgacagcttctgttctcaatgtcttttgtgctgcaaacattctggaaggacagagggtagattcctctcctgaccaagacaattagaacaacatggtcctccaggtcaaaggttaggtaggctttaagaagctccttataagactgggggtttcctaatttcagcgttctttagctctgacacaagcccac

SEQ ID NO: 306290 - DNA, 132 bp, Homo Sapiens
ctcggccttgggcaacccccgggttttcatggacctgtaaatccactcgatgaaggccttgaccttggcattcatcccgaacttccccctacgggtacagccctctgtccaattgacgatgcctgcaacgaa

SEQ ID NO: 306291 - DNA, 123 bp, Homo Sapiens
tgagccactggcacttggcttggtaccatttctatgaactttccaatagttaacatcatctttaaaacgcccactcccaaccaccacaccaggcaaagttcaagtgttcataaatcagagcag

SEQ ID NO: 306292 - DNA, 177 bp, Homo Sapiens
aactgtgggtgtgtggcattaaaaatacagttgacttttgaataacacaggtgttacaggcaccaacccatcacacaatcaaaaacctgcatataatttttgaccccccccaccaaaaaacttagggagttggtggtcttgctgcataaggaagaaaattcatgtatacatggaccc

SEQ ID NO: 306293 - DNA, 297 bp, Homo Sapiens
gcgcccggccgaagatattcttaaggccttatttttgtaaagtgcccacatcttgtgctacttgaaaggaatggtagtaacgccttccattttctctccctttcccctctgccaccatcccagcaccttcgaaggtgacctccagaaatcagttcctttgatagctccgagatggcatgtgccgctcagttctgtaaccagagcctctgcagctggcaggctggtggcctcacttccgcttagtgctcatcttttctcaccttccagaatgaaactctagagttggcctggtatggc

SEQ ID NO: 306294 - DNA, 435 bp, Homo Sapiens
ctttgaggtctatttagtgctacgtttttcccatttttgtgttttgttggtgaatttgctgcttaaaatggccccgagagtagccaaaatgctgtccagtgttcctaagtgcaagaaggctgtgatgtgccttatagagaaaatatgactgttagatgggctttgtttaggtgtaatttagagtgctgttggccatcagttcaatgttaatgaatcaacaatatatattaaataaggcatctttaaacagaaacacacataaaacaagggcatatattgataggctgataaaaatgttgtgaccagagaccatttcccttagcaaatgggcacctcctaggtgccaaacactgaggctacagtaagaacaaagcaagtcctctcctctccccaaggtttcagtgcagtgtgttttaagaggcaggggagagaatt

SEQ ID NO: 306295 - DNA, 367 bp, Homo Sapiens
gagactgcatagggctggcgtggagtggcttctggggtggccctcaggtctgacatcctacacccaggccagaggcctctctagaccccggaagaggatggtccctcagcacaggaccctttacagagcaggacccagaggctgcaatggagtctgcacacagctccagccacagcctgcccgtctgtcttttgtccccatacagaaccccctccacccaacagcaagacagtggacaaggctggggcagtttgtctgcaaagaggcaggcacgggaggtctattctaggtagcaggcacaaggtgatgtagaaccaggcacctcggcacccaaagctggaatccatgtaggcagtgccagcaaggc

SEQ ID NO: 306296 - DNA, 107 bp, Homo Sapiens
ttcccagtgctgtaggccatctggaaggctgtgatccactatgggcactccttgatgatggctggttgggagaaattccgcctacatttgctgcgatgatctcaaaa

SEQ ID NO: 306297 - DNA, 252 bp, Homo Sapiens
tctggagcccagcgtggggcccttctctagggtgaaggtacgctaagaacgtgagcattgaggacagccgatgagagattcccgagtacgtccacagtcagccttgcggttagcttgtgtgctgggaggaatccaggataacaatggggcaaactgaaagtaaatatgcttcttatctcagcttcattaaaattctcttaagaagagggggagttaaagcttctacagaaaatctagttacgctatttcaaa

SEQ ID NO: 306298 - DNA, 422 bp, Homo Sapiens
agactgctgtgcaagtacattacaaatgtcaagtccctcttccttcctcccggccacatttcacatgccatggccttcagcgcctggcgtctatagtcagtctttcctcactgtcgggaggttcaggtagccgggctcctgttacgggcaccatggggacagaagggacgtttggtggtttggctgaatgtgctgattgtgactgacttttccatgtgacatacaggcagcagccagcacttcctccagggagcggcaggcagccctggcacctggggttctctggcttcctagcacagcagaacggtgggcaggatggaggaggtggttttccagccaagcatctcaccaccacttagccctgttcaggacttctgtacggaggcattcatgacacagttgttctctctcaattttcccca

SEQ ID NO: 306299 - DNA, 349 bp, Homo Sapiens
aaccgcgcccggccaaatccattatcatcacttaatgtttaaaggctacgttcagtttcctataggtgatattgttaggatctactagcaaatgatttggtaacctgacatctttgtattcatgtccaaaaaaattcttttataagaacaaaaatggtactcttagcctcattcactggagtattactgaaaagcatgatattcttactctattttgggtacattatgacagagaggttattattaccaactgtcagtagaactgaggcttcttgagtaaaggggattgaggtaaacctttggaagctggtgaatacatttcaagacacaacatggcacctgtgtctag

SEQ ID NO: 306300 - DNA, 289 bp, Homo Sapiens
tgccaaattcaatgtttaaaataggggaacgatcctctttccttcaagagattttgatgtcagaaagcactgactcacgcaaaggtccacattttcagattcactggcaagctggttggtgaggacaagcttttgactgaatcaaagctcagtggttttaaagtggagttgggcagagcctaggctttttgtgagggtgcttaggtgtcactatgaaggccagacgagggagagggtgagtgtgagttgagtgagtgagaccggagcttcagccaaaacagctatactt

SEQ ID NO: 306301 - DNA, 274 bp, Homo Sapiens
tagagtttcacagataacatttattgaccacattcataacagaaactcacccacattcacatgaactttgctacaaccaagaatcacctgatgagaaatcatttgggttgaatcctgggtgtggattctgttctgagaagacagcgactgtcacagacgcctcctgattggtggactctcaaagatcttgatcgtgacacatttttgtggctgttcttgacagtagctgaagattccaacttcaaaccccaaaacactggcgaatggccatgat

SEQ ID NO: 306302 - DNA, 470 bp, Homo Sapiens
ctggtggagctgtcacatcccttcagcccgtctctgatctcggccatacctgtggcagctgatcatacacgagatcagatgatgactgcaggctgaccacctgtcatttcaagagcatgccgcacgttcctatgctttctgcccagaacttctctaatcccacaggagacagcttggcctgagctcaaaaacagtccagaagtgcggggaattaatgccccctggggtgacgctcaaccaacgggagccgaggggcagttaatattaatatatgctccagtccctgacccctctgctgacagttctctgtgctgctcccagtggcatcaagctggcctcccccacaccagggatcttgacaactgacctctttggttttccctccttccttgttgcatcgcccactccctcgcctccactccctcatcatgtctcacataaactgccttcacacaagtcctcatttgggc

SEQ ID NO: 306303 - DNA, 426 bp, Homo Sapiens
taagaaatacacaagcattgttttaagagtcaggctgaggcccataatcagctgtgtaatctcaggccagcctccctggggctcactttccatgaaaacagtcatccaaatggtctcttctctttacagccttctttggtgtcagaccagcctctgagatctcctggaatccagtcagtcctgggctggactgggatgcctttaaaaggcaccccaaggaaagccacagaaccctatgagagagcctctggctacaggtggagaaaaccaccgcagatacagtctccaccgatttcccccttgagctgtattcttaaatgccttctaagtctcagggctttttctcctcaggtttgtcacagaaagctcttaaagccagctcccttatgtgtgggaataataaagaaaacatgcttgacaaccctc

SEQ ID NO: 306304 - DNA, 271 bp, Homo Sapiens
tttttttattattttctcttattttctccttttcccctgttcctcagcttcctatttagccctttagaaatgcaaatacaacgctttacctccccctcaccagacattccctacagggcaagttcatctaactgtgctccaagagggatctctcctcaagagttgacagtagatttgcagaccaaagtataccccatggaactctcactctgggacagggaggagggggaacagtggggtggggggataaccttggaactcatacccacca

SEQ ID NO: 306305 - DNA, 431 bp, Homo Sapiens
cccctgcaggacctctcggcctctctaatgtgctaatatgcattgtgaaattccatttcctttatttatttggccatggagatcgaggccatggtgtcctttttcacaaggtaatgtgtggaatcagtgagccttagagaaagactttttaggaagcacttattccgctcctccaccaaaatgtatatttggggacagttctgtggacttgaagcttcatgttgtcaaagaagtagtttgaatgcaatagcactacctccagagccctccacagatcgtcttggcaaaaatggcaagtgcagatgcaagcttctgttctgaaaggaacacagaatgaatgaggctttcaaagccccttccttcccaaagttacccacagtttaattgagaaatttcactcctctcttcttcttccctcttggtcgtgctga

SEQ ID NO: 306306 - DNA, 213 bp, Homo Sapiens
tccagaaatgattttaatccatataaagttacagatttcttcatggttattttctgtagcgctctgcattgcctaaaaccactggtcccaaagagccacgtgtcctggtttttctgaaccttgtgtggaatccttccacactgaatttgggccaaccctgtgatttgctgtcaccaacagaatccagtagaagtgatgctgggctagactgaa

SEQ ID NO: 306307 - DNA, 130 bp, Homo Sapiens
tgcccatgctcaacttgttggagatgttgcggggcccctactggatcctctgtgcaggccatagccttccagctgtttctagaacccacgccttactgcggtcaaacattctgaatgtgcttttgaggga

SEQ ID NO: 306308 - DNA, 420 bp, Homo Sapiens
agagaaaatgggccatttttattccaggggacaagctgcacaaaggaatgttcttctatttattttaaacaaatgactgcgtgtactgaatctgactgtgtgaaataatctcagaatggcagcaccactggcatggcgatggtgcaggtgggtgcagttccctgtggtctctattgcttgaagagagaaagaaagttccctattattatatttaaggcagttttcagagcactggcattcttgtttgctctgttttggggatattctatttgccaatcagttcacactcatcaaccatccacttcctgtctttcacttcttcaggtgaaatatcaccactctagtgagcaccaacatggtcagagtgcaaataactgtgatggatacttcgaagtgaataagaagggaagcctgattatt

SEQ ID NO: 306309 - DNA, 429 bp, Homo Sapiens
  misc_feature (322)..(331): n is a, c, g, or t
gggagaaaggcatgattattactcttttgctcaatgaggtgagtaacatgctcaggatgagtagggcagaatgggacctgaaaccagggatcctgacttatcttgtacttcttgctaagtaccttagaacttttggagcacctgcagcctgcctggtggcccagacatcacatggtgcacgtgcaagtcagagagcagttggaaactgacaataggcacgtgaccacactctgttccttcaggagacttggcaggaaggagcactctgggaggagtctttgtttggctcccatgcgtgaaaacaaaacttctgcctttgcannnnnnnnnncagtctgagttacagacttgggtaagactttcagagcttccttaggagggaaggatggcctggtggcatttaggttcaactcctttctgacagggctc

SEQ ID NO: 306310 - DNA, 449 bp, Homo Sapiens
ttttttttaacatacaggtgaaaaaggcagaagtaaggccagtccagctgggttggctgacgtcatctctgagggctctgccaggtggattaggtgaagagaggttttatgggcctctaagcaccggccagtagtggggaatgccacatgcaatgggtgagtggggatctggggggggtcaggaccttgcttttcttccaatctctccttcttagccagaactttgcgagagcccctttgatttctcttccctctattcccctcctttccccaaatgtgctaaggtcccaattcccagacccctcccaggactcaagaattgggatagtcaagcaacaaacacaccaagacaggcttcccttgtacagtaaaaagggtcatttttattttgtttccttttggcttaaaggagtgatggactttttatcacgtctcattagggcagcatt

SEQ ID NO: 306311 - DNA, 404 bp, Homo Sapiens
gtgtgaaacggtcagtgttctgggggtgcgggcgctcagattgtggtttcccaagccaccgatggctccctgaggcttttccccatttaagttaaagctcaggctgatggaagtggagggatctccagtcatgagtgaggggtgcaggctggaggtgacgggaagcgggaaacatggagaattgaattgcctagaaaacctagaggactaagaagagtcacctgcacacagagctctcatgtacggtgtctgagcgatgaatgctctgagagacttgcagagcttgtgacagtggacgtcactgtctctcccttcccaaggaatccctggcccctcgtgggggtccaggaggggcagtattcatggagtcttcactgaaagtagctcctctgaagctgcccttg

SEQ ID NO: 306312 - DNA, 440 bp, Homo Sapiens
ctaagttatgataatctgaaaatgacagaatttacacagttggagtatatttcctgagatcccaccacataaagaaaagatcacaatataaggcatgaagagtgggaactcacagacccggcgtattcaccagtgtgctccctgacctggagaacacaactgcagttgccaggctggccctgtgaagcccacaaatcaggacacgccacttaatggcaccaccagcaacatagccttcccttggagactcaataatatctgaacccttcacggcgtggagctgctgatgttcctaactacaaattcaggctccacagaaaacatggcttctctttattttagattatcttattttataaaaagcaagaatatataaaagatatagagaaaaaaggcagacagaagccactgcccagtgagaacgtgctggaatataaaaa

SEQ ID NO: 306313 - DNA, 261 bp, Homo Sapiens
cagcctccaacccatcctttcttctctgtcctcactgtatctaacctgcattctctgtacctcttactaccctccaggagtctttggttgcagcttctagtaacgataattattcagtatgagtaggtcaagaatctttctctggaagcacctctgcctcagtgactgaaaaagaattctgttgggagttaacacagaccaagccagtttttggtaacagaattaacatgttgaaggtacgtttagagccctgagcttttt

SEQ ID NO: 306314 - DNA, 154 bp, Homo Sapiens
tgagaattatatccagcactacatggacacagacatggaccagataccgcataatgccaggcaaaacctgacggctgcgacgattgcagtaaggactaacctgcagaaccacacggccgaacagacgccgcacctaactgatctgtaagcccaa

SEQ ID NO: 306315 - DNA, 208 bp, Homo Sapiens
ataaaaaagaaacataaacataaaatgttaatcaatgcggcacttctatgaatttagtgagagccccttctctctcattctccccctctcactcccctttatccaacccttttctattttttcacactggtttatcatcatcctattcttagtaacctggagaattttccgaaaaatattttcacaagtctagctatgttggaaaata

SEQ ID NO: 306316 - DNA, 254 bp, Homo Sapiens
  misc_feature (232)..(232): n is a, c, g, or t
gttttgaggtgtccaagaaaatcccggtgttcaggaaatgctcggtcaaatttacattgcttaagccgtgaatgcacaccgccaagtccttgggcatggcttcacttttcaccggtttcacgcacacctttttcaacatttgggcaaacctgatgaagtcttgggttccattcagatttccccggtgcttcaagccacgtgttcagggcaaaattgctgccaatggggttgngcttggggggccggccttttgg

SEQ ID NO: 306317 - DNA, 397 bp, Homo Sapiens
gagttcacgcagttctccaaggcagagtatatcttttacatctttgtgtctccaggcctagcacagtgactggtacaaaacagatgcccaataaacacagaataaactaagtctggcatcaggttacctttccagcaccgtatccataagcctgcatttatcagctcatataatctcttctgctacagctgctgcgatggcaacggaggaggtgacccttcgcccagttcactatcattttctgctcagtgcttggtatccaaacccacctctcttctcaggaaccttatacgccgcactttgtctacctcagcgtctccaaatttcttttgactctcaaaccccctccatagaaacacatggaatttattaaatcatctcattattatatataata

SEQ ID NO: 306318 - DNA, 705 bp, Homo Sapiens
tttttttcttgggcaaatacctagaagtgggatggtaagtgtatgtttagctttttttccttgcatgtaagataatgtgtcagaacaaggtttgaaagaggcacttctcacacatgagcatgaaaacccaatgtgatatgatacataggtttttgtctacagttcttgtttcctaactcccacagcccttgttatagttttttgtctacagttcttgtttcctaactcccacagcccttgttatagttttttgttataatgttgggtgtgttaggccccaagggcaggtatcgggaaacacaatctctctcctgtcctcctttcacctgccacaaggcaggactctaatctttccccaccttccaacttggagtcttaagacccttccctgcgagggtcccaccctataccctgggggaaggaatgctgatgtcataaaacttccataaaacccaagaggacagggttcagagagcttccagataactgaacactggaggttcctggtgcccagggagggcatggaagctgcacgaccttcccctgtacctcgccctacccacatctcttcatctgtatcccatgtaatattctttataataaaccagtaaatataaacaagtgtttccctaagttctgtgaactgctccagaaattaactgaacccaaagagggggtcatgtgaaccccagcttgaaccggtca

SEQ ID NO: 306319 - DNA, 142 bp, Homo Sapiens
gggattaggcctgccggtatgcctatctgccaggctttctgccaggcaaacgcccgcatggcgatattgccatatgacgtgagggattgaaatctcactacgctcaataacgcagcctgtattccactgaagagcgtgcctg

SEQ ID NO: 306320 - DNA, 195 bp, Homo Sapiens
gcctggcccctccctggagaatgtaagcaaatcttcagggaataaagggcacggtctctagctctgttaccctggaatatctcaggaagaggcagctccaaatctctttgcagggagtcactatctttatctttccaagactgtctgttatgcaaatatctgtgaatcaaactgtcaatgccttttgctcagaag

SEQ ID NO: 306321 - DNA, 202 bp, Homo Sapiens
catactgcttggaaaacttggacttagggctagagcggggtgcacggtacccactcttgctctcattcccatgaccggaacatgagagcatggcaccttccaggatgactagggtagaccctgcccatgcaatgaacatggcttggccaaactcatgcttaatgttggtagggatcataagggtctgaaagtctgctacaat

SEQ ID NO: 306322 - DNA, 295 bp, Homo Sapiens
gagccaccctgcccaccaaagtcattcctctaaattaaacaagtttgaacatagagatttgggaattttaagagcatcatagctggattaatgcttgataactccttatagtacattataatacacaagaaaattacttacttttttttctaacacatctctagaccacaagtataatagagacgctacaaactttattctagcttgattcacttggaaaaatacaagtgcataaaagagttctaagacaaatggactactattactacagctagcagctattagtattattgat

SEQ ID NO: 306323 - DNA, 313 bp, Homo Sapiens
aataggaatcttgagcatccacaccttcccatgttcaacagccacaaagggaacatttttaatattgcagattataaattcatggtgagaatcatggcatataagaagccatgatgtagagaatgtagagaaggctctggtacataggaaagaaatatttctctgagatccttgactattataagaattttaaaacgtagttacaacaaactcatttaagaggaaaagcacaagtagagaattaaagtttggcaagtactaaaggcatggcattctagcaggcagagtggacacaacccttactccaaggcat

SEQ ID NO: 306324 - DNA, 466 bp, Homo Sapiens
gccctttgaagtttctgtgaccaaatctgttcctgaatcaccagaccacagatatgtgagtgtaattccaatgtatcaggcacaaatagttaaaatgaatatattccctgagcatttgaagcaacaactctgtttctgcataacaaacagttaccgttttactcaaattggctctgaatgttgacaccagcaacacagagtcacgaacacccctaccagccccaaacccttcataatggcaggtcctataagccctggccccggtacccttgactgtccacaggctgccataagtcacttttctttctcctgaaagctagcagaaatttggtcaaatggtgcaaacgtgtgtgggatgaaagtaagggaaacagaagactcttctcatggggctgcttgctttaatactactcagcactatcaccatataccactgatatcaaacaatgtgagggcgtaagtgcaa

SEQ ID NO: 306325 - DNA, 126 bp, Homo Sapiens
gtgcagaatgaacgactgaggcgacaggcatatggtggccacacccaggagggtggactggcacggtggaggacaaaagtctctgaataaaggcactattactctcagcagaggggcgacgggagt

SEQ ID NO: 306326 - DNA, 106 bp, Homo Sapiens
aaaaatatatttttaccaaaacttcggataaaagaaaaaactaaaccatgccaacaatcatagaagaaatagttatcaaacaatcattccctcccattctccaccc

SEQ ID NO: 306327 - DNA, 227 bp, Homo Sapiens
acaaatgaaaacactttttattgtgggcagtcataattgtatgctatccatcaaacaataaaacctttatagctgagacacattcagcctgaagatgaagtgatatattgacttcttgatcaaatgccagaacttacagatgaatatgaaacagacatcaataattacagcttgcactgtagctgttggttcctaaggctttaaattcaatgaacaagtaaaaacct

SEQ ID NO: 306328 - DNA, 433 bp, Homo Sapiens
gtactttctctaattttctataatgaatgcacaggttaatttacaattgggggaaagcttccattaaataatactcattttttaaaacgtaggtaagattttaaaaatagaatccaggcatggtaatgcaatggttaaacagaatagaaaaccctctaattcccaaatgaagaattcccaaaataagtcattttctgattatccaagaactgcattccattctgcaaagtcccaactgaggcttctaaatggctatttacatgaagcaagaatgtcatcattacagaacaatctgctgtcgtgtgtcttaatagctctcctctctgtctacaagaaatggcaccaagctagagaaggactgaggaagcttccgggcatcccttagatcctaggtgtcatttcattagcttaattttttaaaagacatgaagtc

SEQ ID NO: 306329 - DNA, 427 bp, Homo Sapiens
aaggttagcaaattgtctttattcagaagaataaagttacgtgaaactgggactggacatgaggctgccctcctccttgcacctccagctgtgccaaatgacacagaaatgacactgtgtgtggcacaatcaactggcaaaaaaaggcaagtcacaggccatgtgatggctctggctaatgcaggtagacatccagggtgcccagggacgtcaggcccactgagaagtgggatgaagccctgagacggagaggccaccactgagacacctgtctggccatccagttgcccactggtcgtgagactcttgggctgcagccctgatgcctagagactttggtaccggcttttagcctcactggacttccaaccccagaagtttctgtcccgcccacttcgtgcactggtgcggggctgccggccagtcc

SEQ ID NO: 306330 - DNA, 200 bp, Homo Sapiens
ggaagcaaaagcaaatgaaaattctcaaaaattgacttatctgagccatttgaatgggggcttgtaaaactacatataaccttagtaactactggtacttttaaaatccttctcttacatagttcttcattttgcaagagaagccaagtaaccttaaatttttatattttttgtgtgtgttttatagagatggtgtctta

SEQ ID NO: 306331 - DNA, 430 bp, Homo Sapiens
agctgtgggaaagcttaatgatcaattttagagcagcataaaaagagcataaacaatagttgtttggaaccacacatattacaacggaaccacagcatttcaatgaacaagcgttctggcatgtgataaaaactctccctaaaattatgaaatgtagctctccatgcttcccaatggttgatataatacccacagatatttgagattttagaggaatactttaacagaaagtagactttataaggcatgatcctgagtcatttcttattgaatgtctgagtcattgcaggaactaccttaaagaaacctgaactatgtcataatatgccgcttggaaaatgggcgcttacggcgctgtattaatggccacagttgtattgctgtctttcataccaactaaatgttgtatggctccagacatctcaacagc

SEQ ID NO: 306332 - DNA, 440 bp, Homo Sapiens
acatctaattagagacaaatccttcattcagtctcccttcatgatgtcttttattccctctgctgacatcttttgtagagaaatccaggacagagtataaagagaaaaccagtacttaatgtgtctttgaaattctcaacgtggcaagctgccgcatttgtatttcttaattatcacttctcagttcagaaattttgcatagcttgttgtcatttttctgggcatccaagatcctctacagaatgattacaattttacttttaaactttttaatgcctcatcattgataggataggatacttctatctctaaccagaagatttgacttattggtgctgatgcaaaaatcctgtgttctgtatcttttcagaatggaatggccccacttccatcttcttcatttctacttacccatccaaaggatgtccattcttttatca

SEQ ID NO: 306333 - DNA, 598 bp, Homo Sapiens
tttttactattgcttattactatgaaagtagcattcaaaaataaaaatcaagaaaaagtagcctccacttaggtgatgctcatcatttttagtccaagtctatttcttgctgatatattcggttccctgtattacgactaatagctctaagtgctattaaaattgtagtgcatgtctctcctcagtccttaaataccactcttccctatttctaaccaaccaaccaacttatgtattagtaaagcagcaagtagactagaccatataaaatatgatagacacatataagaaccagttgtcattctgatatcaatcctttggtagaggagaactaggtttataattcatacataggattaggtagcatatccatttagctgtaaatatttcccattcctatatgaaattgaaaatattcacaatggattaccctcaagactaataatgtcttttgcacattgcagcttctgagtgaaataattcaagacaagactcttttgtttaaattgctagtttacaaagaaaaaaaccctctcatataagactaagtgacataataagtattctatcaagatatgtgcaaatactgtgtatgcat

SEQ ID NO: 306334 - DNA, 435 bp, Homo Sapiens
tgttcctcagcccttggtctcatccccccgccccctctctgcaccacctgtttctgcgggtgggtggctttgcatgcagcatgggtgttaacgggtaggtgggaagagggcggctgtctgggcggggtccacatgcaggcactatccgtattgagctccagaaagtcgacccactgtctaagccccggtttacacaactatgacgtgggcacacggggccacaattcctacccccgagtaactgtgaggagcaaagcaggtaaaagatgaactcaggtctcactgtgggtgtgcaccagggctgccgtggggctgggctgacccctccccaggaggctgtcagctctgggcccggctagtgggtgtcaaactgcattctgactttgtatcaaaccagtgaatagtgcttaaaaagtctgaaatagcaccgcaatc

SEQ ID NO: 306335 - DNA, 297 bp, Homo Sapiens
tccttggaaacggtctctagttctggtaagagtagatttcccagagatggaaagcaacctaaagtaacaaatactggaaattttgaaatttttctttttgtggtcagtaatcccaaaaattttcttcccactggggagccactcataactcctgattattcatttagccactggaatgtagcagatttggaaattatgtgtctttaccatgccaaggtttgtcaatgacagtagtttgtatttaccaatgcctttagaaatgggcaaggtttatttttctttcacatttttattagg

SEQ ID NO: 306336 - DNA, 128 bp, Homo Sapiens
gggtttttcacattttaccacagagggattggaaaaacaaatttattattagtaaaaaggaaaactggaaaacggctaattcaaatcctactgggccaaaaacattttacaaaaaccctttaaaaact

SEQ ID NO: 306337 - DNA, 297 bp, Homo Sapiens
  misc_feature (204)..(204): n is a, c, g, or t
  misc_feature (241)..(241): n is a, c, g, or t
catgagaccactaggggtagggtaggtatattcggttcctagggctgcagtagcaggttaccactaactttgcagcttaaagcagcagaaatttattttcttgtggttctcaaggccagaaatccaaaaccaaggtttcagctgggcaggttccatctggaggctctaagggaggatccgtcccatgcctctccccgagctccntgtagtggctgtctacctctggcactccttggcttgnggcatcataactccagtctctacctctgccttcacacggacctcatctgtgtctct

SEQ ID NO: 306338 - DNA, 442 bp, Homo Sapiens
catttcattattccagggatcacaagagattctacgatttttaaaagagaatttatggagtttctaatagactgctaacctgactctggaagacataagaagtagaaatgactgattgctccattcctgcaactgctctaacccaataagtgcctaagatgtgcttatgacattgtttactgggagcctgtgatggggagggtgcttctttgtttacggagggagggttcccacctgaggcctggggaggctccagaggagccttggtggtcagaaaaggtaaaaccactctctgccaagccaatgaggaaggccctaggggctcactgctttcgacccagacctttggtcttggctcagtttaggaaccagcatttgagaagagcacatccatttttaggaaattaggcaggttataagctgcggcaaaggaaaccagacc

SEQ ID NO: 306339 - DNA, 426 bp, Homo Sapiens
aagtgctctttctagaggcattcacggcaatcaagccttacagcctacctatttcttagccgtaatttggaatcatctgtcttctagcccataccttcaactgccaggtctgtaaggccctcaaggtgccgccacctatgcagtcaggctcctccatgccatgccttgcagtggcactccactcagcaaaatgatgttggggccatctacacagcaggggtggagtccatggagaaggggaagggctctgaggtgtgattacgaataaacacagtccacggggctgagcatgggagaatgggggtattccagacacaggaaatggccagagcacagtcaggcacaagaatgccgggtgaaatgggtgcagtcgtccagccggccagggcggcgaaaggtaagggtgcaggagtggctgggtgcagt

SEQ ID NO: 306340 - DNA, 182 bp, Homo Sapiens
  misc_feature (79)..(79): n is a, c, g, or t
tataaactatcaacaaaccccgtgggtagggggtaacatgcacttcctccgctgggtggggccaacccagtctccttgncccatcgggacccaggctcctctggcctttgggagggcccttctccagggggcgcccccctccgctcccaaggcttaggtatccacaccagggcctctacggg

SEQ ID NO: 306341 - DNA, 263 bp, Homo Sapiens
  misc_feature (231)..(231): n is a, c, g, or t
gtatgtgactcagtgcctggcctttccttttactttctttttatctcctctcatatccctttacacaaggcagcacagcagagtgagaagaacaatgcttttgagaccagaatggctgctgggacagtacacgaaacctgacttactaatgtatgatactttgtatgacatctgaatatatgaaactctttgaacctctctttttactaaataaaggtaattaatacctgngggaagttgtaaacataataataaagatacac

SEQ ID NO: 306342 - DNA, 475 bp, Homo Sapiens
aaccccaggttcacaggaaggcatcttctgttcagctgttccttattcaagcttccatactgtcatctatacaacaaatcagaccaggatatgaaagacagagggcacctcctctaggctgccattgccttaagacatttattttgagaggtaaccatgcttgagacatgcttatgttaagactactacatgaattttatttaaaatgcaatccctgattgtagaagacagttttgtgaccagtgaactccgtggatcagcctttgatggacaaagagaaaagacttggcttcaccttaacgactggtctgtaagatggaagtttaagttctaaggcaactggactaaaggccagcttaagaaacaaagcaaaccccttacactggtgtttctgttccactgatgactttctccatggtccggagctgatggacagctatattcacacacactcttcacaaccattctgaaagta

SEQ ID NO: 306343 - DNA, 467 bp, Homo Sapiens
aaccaacataggacataagcaatacgctgaaagggacaagtaagtgcatcaaaaaagcagaacagacgacgagcatgggggtgggctccagcctctgaagaagcgcggaggaagcaagtgtggcagggctgggtggcgctgtcctgcggatgctgattcagaagaagctgacccacagccaagtgtggctgaggtggagctgagaacaggaggtcccctgaggatgactgcagccccatcttttagggtaggtctctcaacacactcacaattcccatccatgtcactgctctgggaggaagtttgacacacacctagcaaacagatcttggaaaaaatgaatccctaaatgtgagaaggtctctactgacaaaggcaaacagaggggcgtagggtcccagaaagccaaggtcaatgcctaaggctctgaatgcaaatactcagcatccaccagcccaaactcagaa

SEQ ID NO: 306344 - DNA, 436 bp, Homo Sapiens
ctttccaacacaatgtagaacagatttaacttttatatgcttccaaatgatctgaatgtcagaaaatgctttcccttgtgtccacagttataggccagtcttctcctgttcataagagaaccaaacatccagccttaccttttggcagcagatttgtggttttgcaacaggctaacatgcagaaatgttgaaatgaaaaagtctttggaataagtgagggtcaggagacttgctcctacttatatccattcactcatgtaataaatatttcttttctatgtgtcctgggcccttttggaagtgccaggcattcaagattgaacaatcctgtttaggtccctgtcctgtctttaccctttatttattttctgttcttttccaccctgctctgtacccaaggagccgatctcaatgggatgcattgcctggatttcct

SEQ ID NO: 306345 - DNA, 378 bp, Homo Sapiens
ccattatgaccttcatactttattactagttcttctcacaccaaatgaattaatatataacttacagacccaaagcagtataacaattttccaattaccaggaagtgtttggcttttttgcagatgcagtggctaaattacactgtctaacctgtgacaatgacaaaatatttccatgtatgtcagctgttggccagactatgcttttttaaatgttctaggatgatatatttgtaaattcagtagatccatctttctatcatttatccaagactgatgaagctttttgtttttgcacaggtctctgtgtatcaaataatgtctttaaaacaattctcacattaatcccacccccaaaaaagcaatttattttcaatg

SEQ ID NO: 306346 - DNA, 429 bp, Homo Sapiens
aaaccaaactgttaaataatatttattggagagcaggataaatgaaagttttcagttttctactttctatgtttaaaataagcatgaactatctttataaacatgaaaacatgaaacataaaaatcaatgaagacatttttatgatcatgatgtttatgaatgtaaaaatcataacccagtgatagctgatggtgttgtttataaggtataaactttgtcattctcacttcctctgctagctggtcaataggagcatggaagcatccatcatccctgccacatgttctagaagactcctgtgagaaacagagtaatagcacctcctcattagccactagtttggcaattgcagaatgaggaacatagagctgggcatttcttggtttggagggaaccaggtgattctcagtagaagtgtctcttccctg

SEQ ID NO: 306347 - DNA, 366 bp, Homo Sapiens
ttttttaatgctagtatataaactggttccaataactacaagagttaaaggtgataaacaatacagttatcttcagagtgttatcataaaagaaactaatattaacagaaaatgaaaatggcacagattataaaaaggcacagtgttttgccacatctagagttccacgttgctgtcacaggctatggattagtgacatctgctatggattagttaacagttgtcactgttaaagagactagctatgggatgactttaggagagtcagtgcttccgactgtttcctctacagtgaaatagccataatatgtgtcctattatccacttcacagtgatgctgctataaaacaaaatagaggctgggca

SEQ ID NO: 306348 - DNA, 451 bp, Homo Sapiens
tttttacaggagaaccattgacaaactttatggcaaagtgacggactgaacagaccgatggttcacccatatttcattagggaaggaaagggggcacaccggacaatgacggcaaaccacacaatctagacgtactttcccggtaaacaagctggaaagcccatagctcacagacgaacagagcaaagcttgtggcggcaaagaggtggccattgggcatgagtcctgaacacattagaaatgtacacgagctcatccaggacatataggactcttggtgaaggggacctacttgaccatgccggatctgccccaagcccttgatgaatcaagggagggacgtttgtacagaaccttatatggatagacattagacgctggaatagggacgcagtggaggcatatccccttgagacatggggactcgcagattcgagaatcagggagctct

SEQ ID NO: 306349 - DNA, 425 bp, Homo Sapiens
  misc_feature (70)..(109): n is a, c, g, or t
cagtctcaaaagatggtgtgtgtgcgtattcataagtgaaattccaaggaagccaagcaaaggctaaaannnnnnnnnnnnnnnnnnnnnnnnnnnnnnnnnnnnnnnnagagaaaaaccatgatacagttttagaggttcacaaactccaactttcaaaaacgaatttccaaaaggataaaatattttcttcttaagagattatcaattatgtagatccaagaaactgccagagaagagaagtagggagaagacgcaagacttgttctgctctcagaaatattgctggtagaactgaaatgaacacacgaagccacggatctttgaaagaacttcttaaacttcattaattcatcagacaacacccagtaattcacttacagagtgtgacttgttcctgtaatcaattcaccacaaaaatttga

SEQ ID NO: 306350 - DNA, 427 bp, Homo Sapiens
aattcataggggccaccaaggcatgaggggatgaccgaccctggttaatccaaaccacaggacagacaaaagattaattccagtcgccagatgattaactctggtcattgggtcacaaccttgcctgtcagtaacttactcctaaactccttcaggaaaataaggaaacttgaacacgccacttttaaagtcaaactcagtgccattatgaaagaccctgtattctgtgcaaggtttcttggaggaatctgatttccagcttttgttcaattagtttcgtatcagtcaatccttgtttaaaaacatgtcataagtctctgtggtttgtgcacgcttcaattacctccgattattacatcaagattcacaaacgagataccagagtcactcctatttactgggaaatgctattgaagcaaactgaaat

SEQ ID NO: 306351 - DNA, 432 bp, Homo Sapiens
tactattcagctaaaacatgtattttaaaactatatatggaatctgaaagtaaactgaaaacatttttaaaataagacagtcatgtctaaatactgtgataatttttcttcccgataagatctataatgtctgtatgacccttactgaaggaacaaagttatcccaacatttttatataggaatctgagtttcatttaagtacagccgttatttctgtgaaacataaattgagtagtatcaggaaaggcagagatcaacaaatgcaaaccacaacagaaagaaagtgacgggtaaagaggagagataatgatgggaaggagaaagaacgtgccaaaaacttatctactaggataaagagaacaagatcaacagctaaatgctggagttaattccaaaactgaattcagcccaaggaaataaccatttggtga

SEQ ID NO: 306352 - DNA, 205 bp, Homo Sapiens
attaatacagaaatcattagtcttttctctgtcaaaccctgtgccaaccaccttccccaggctgtctggggagggataggaaaaggaacacactgtgcctgccagacgcgagagaactatggtaggagatgacggatactggacatgaaaagatgatgagatatgttaccatcacacatattagcccaatggccttcgagagggc

SEQ ID NO: 306353 - DNA, 301 bp, Homo Sapiens
gtgtgagccaccaaaaccagtcaattttttttcccaaggggtagggaaaggagtggggaagaactctcagaacagatgaatgtcatttaacttggagatgagtaaaaactgtgatgagagaagtttctgtttctatacctagaatgaatgaacatgtaaatacagcaacattttctaaacttccctttattccctttatttataaacggaaggcacacaaatgcgaaggtagctacaggattctaaggtagttgtttgaacatcagcagaatgtgtacgtgctaagaggatgtaattcatg

SEQ ID NO: 306354 - DNA, 372 bp, Homo Sapiens
aacaggtgacaaaaaattaaaactcattgctttcttttggactccacagatgagctattttaaaaacatatcagatataaagttcacaccgccatggtctcccctagatttctgcagagaccacactttgtctcctctactcttaacgttggtgtctgtcaactcaggcagggtagatggcggaacagcctgtcacttatcagaggccaggccggtgctgcctgccatgtgttctacagggccatgagctccagggtgagaaggaggtaacatcctaccagtacctccaaaggcacgagtaatgtctgagaaggcaggctggaagaagactgttttcttgatagggagagagaaaatgaaacactttacttt

SEQ ID NO: 306355 - DNA, 512 bp, Homo Sapiens
tttttttatctaaataatgattttatagtttctaatattttgggaaaagatactcttttgagacaaaatgatacaatcacttcaaataatggctgtgagcttctgcagaagacaggtaaataaaaaccaactgaaacagaaataatccccaacaaatgagctccagtacccctgggattggtccaggcatctgggtgaattgtgtagcaggtgggatttggcttcaaatgtcagtgatagatcctgctcacaagagagccccaaaccctccttccaatgatgctcattttcaaggaccactccaatctacccattccctttctaggttgagagttcttaaaatgtatagctagctgcagagaacccattaaatatttattggggtgaatgcgtttaaagctcttgctttgcttccttggaatccagtgtcccgaatttaaacaaccagttaacatctagaacaataaaaggttaaagatagaaggactatagaaattacttatgctgacagt

SEQ ID NO: 306356 - DNA, 383 bp, Homo Sapiens
tcctatctggtattctccagttctaaagtgcaactagaaataatccttctaaagttgcaccccttcctctgtttaaaatccctgaagaactctccatgtgatctgcaggaaaacgtcaattccttaagcagagaatataaaattttatatcatctggtccctacccgccatgtgggtctcatcctgcataattcccttacatatgttgagacacagccatattacatggcctgaatgtattagacatataaggttttattcagttatctgttacttatcctactttctgaaaatcattgagaatgaaattctacttcttctgactgagctcaaattttacccactcatttaagccttctttgatgtctaaagccaaagtaagg

SEQ ID NO: 306357 - DNA, 655 bp, Homo Sapiens
  misc_feature (42)..(115): n is a, c, g, or t
  misc_feature (459)..(459): n is a, c, g, or t
gagggtgccaccatgccatgctactataacatagacttacannnnnnnnnnnnnnnnnnnnnnnnnnnnnnnnnnnnnnnnnnnnnnnnnnnnnnnnnnnnnnnnnnnnnnnnnncagatcgaatagtgtataaacgagaaggctcagaagcaacctactgatgaactgttaatatacagctatgtatcatgtaaagtatgatcaatcattctccatatccacatcagagagaacagtagtcatatgtaaatttttgcccctcaacgaaagatgtctggtcagatggaagcatttcctgagacagcactgtcaagccctgttgtgggttaccgacggccgcaccatgggacgccccagcctggggcagtaaaacgtgcagcagcatcagcctgacccactccctggcggcttatgtacggtatggcgatttataaataagcctttctggtgctcctagnaactaaataccctaacaagtttgaatctaatttagtcttttccaaatttcatccctcctacagccagcataaaagggtattctttcaagtatccaaaagactaggtttaccactggtagcaggttaatggtcatcctaagtgacttcatttggattccgagaataataagggtaatggtggggttcttttagaacc

SEQ ID NO: 306358 - DNA, 462 bp, Homo Sapiens
aattcattattcaacttgaacttcttgctgtctttaatagcatggatgacaccaaactatagactaactggtatttagagtagagtatagtaagtcggtatttctctcaaggacgtcttagaatggattgacttaatcagagatttgttgggaagtgggaataagttttagttcagacactcttttggccatttaagattaagtttaggtcactttgagtcaacagtggccctggcttagagggtgtgtggctggcagacaccatcctagacactagaagggcatttgtgaagagttaggtcagttcatactaatatttaagcgtggcccatccagtgctccactgcaagcaggaagattgtgtcggaagaaattttgcagatcgaactaaaggttgtgggatatggaaccccatccccacactgcaaggagggaggtgaaagagtctgaagtgtaggctgt

SEQ ID NO: 306359 - DNA, 473 bp, Homo Sapiens
cactttgctgcagacccagaaaactttgtcaaacatgacctgtcccttccaggagatgagggaccatggcccaatcccacgttttagtgaaacccaagcagagcaatgcaatagggcagccccccttccactcagctgcacaggctccggttcagattgcctttcctggctggcaggatgctttggtgaaaggcagataatagggtgggacaggggatcacgggcgggagacacgtaggcactggggctggtgtctgcgaggcatgaggcctgcctgtcggctgtcctgagtggagagacaggaccgggcagtgggccgccataaagatggggctggatgcgacaagagccgcatggaacacaggaggtggtggccacacaaggcagagggcagctttggcagggggacggttgccaagcaggcttcctgtaggaggcaactcttgacagagccctcaagctggtggttacca

SEQ ID NO: 306360 - DNA, 467 bp, Homo Sapiens
ggaaaatcttagtatattgaatacagcccctcatcttgaggcctctggtgaggatataatgggacacttaacatgcctatacctgaggccctctcccgagagccaacacaggcatttgatttcgtgtctggcacaaactgtgagcccaccataatctctaaatagctggctccacaagtcaccctagggaaccccagggcttctctcttcctcccagtcctcactctcctcccatgattccatggagtaactatcaacaagcaggttagctggagggagtcaggaagaggaggaataagctgtttccactagcactgttggctaaaacaaccttccaacagctccctctgccaaaaaaataggggtgggtaagggagtcccttgagggaggcaggaacctaaatttctctcctaaagccaagtaaggggttgaccagggtagagctgcctcagacacagggcacagc

SEQ ID NO: 306361 - DNA, 425 bp, Homo Sapiens
gtgccaatacagacatgtttcttttataaaatggtattttaaaatattttatctaggcttatttatacattatgcattggaagagtcattcagtatccagccatcacgccagaaacagtaggtcaccgtcctaagtattataataaacattataataacttcatcatttcaaaggagctcaaaaatactcattctaatcagaattatatcagatatctattgctgcctagcaagctacaccaaaatacagtgggttaaaactaaagctatgcactctttcacaggattctgtggtttggctgagtggcccatctgcaggctcatccaggctcacctgagaaacttcattcatttggggggtctactagtgcaacctaaccctgggtaccccaatttgcagtgtttcttgggccacatattattgg

SEQ ID NO: 306362 - DNA, 437 bp, Homo Sapiens
ttttctgttgtttttaaaaacatctttaatatcagggaaagaggtacaatgcaatcagtagaaaggtcaccagaaaagaggaaggaggaacaacgagctgtggggaaatgctgatgggacaaccagagggagaggggcctgcacggagagcaggcagaggagggtacaggggagaggtatacggtcattaccacgacaaagggatggaaacagagagcacagaatttccagcaggcaggatgcatccacagcacccaggggagaacccagcagaggccgtgagaaaagcctgggcaccgcggaagcagcaggaaccattctgggtgagaccacacctgcccttcttcctcaatgtccatcttccactccacacagcttctctcagcctgggccaggtcctggggataggaaatcctctacaaacaacataaatatct

SEQ ID NO: 306363 - DNA, 222 bp, Homo Sapiens
ttttttgtggaaaggttttctgcattggcaggagatttttgttttcgattatgtccccaacatgcctgatgttccacccctcaagagcctcagccttgcccagggagggcatgggggtgagtggcctctgccacagagagtgctggccaagttggcccaggtgcgcagcaagggctgctgcccaaaggctccctcctggttggcatgggtcgggaccctgtt

SEQ ID NO: 306364 - DNA, 291 bp, Homo Sapiens
gaagtcaagcaaagaatgtaaaggcattaccaagctttgatgggatattgccattaatgacccagatacaaggtgctaggagaaatatcaggaggagaaaagggatatgataaatctggccatacagataagctgggtcatcaaccaagtccattcttctgctcctgtaaatggtgatgcacctttctttccaggatgggattcacattggcccttgatgtctggaatcactcatctgaactcaggccttgcatgatgaatacatggcccaccacaatgcccatgacgccc

SEQ ID NO: 306365 - DNA, 202 bp, Homo Sapiens
cttcattgcggaattccaaattgagacacgctgagatgtggattgagtccatggctagagaacatggattaaacggaaacaacgcaggcatcatgtgcttggcatttaatcgccatggctgacggccaatgcggtcttgaagttctgcctggattgcacatataacggccactggtacccgtactttagattcattcagggg

SEQ ID NO: 306366 - DNA, 411 bp, Homo Sapiens
ttttttggctttggattttgcctattgacatctgggattgctgggagaagttttatcgctggtctggtcccaagcagttggccagcctttcgaaaacatctgccactctctattttgaaactcaccttcctggaggtttgcttttcctacaaacttggtaacaatcacttgcaaccactggtctgaataatgtccagtaaagtcagctgcgtaaaacaagtggacacataaataaaacctgctctgagcctgtgggctggggtgtttttcttccagagcctgagctcagcaatgaagggatccatttcctccaagcttaattttgccaagccccacggaccctggcccaggccaggaagaaaaccaggggctgtgaggccagccagggtgaggctgggcaagcgtgcttct

SEQ ID NO: 306367 - DNA, 173 bp, Homo Sapiens
gctaactctgaatttccataattcaacaatggttgatttccaccttaagggatccctgctagaatgcatgaccacacaaacccaggccagaaacgtgcaggactgccgtgaacagtccaggaggctctagaaatgctgctgtggaacccgccctgactcgtgcaggaggggac

SEQ ID NO: 306368 - DNA, 425 bp, Homo Sapiens
ggctgttattgaacatttctcttccaaaagagaatcagaattctccaattccaattttaaaaccctattaagattttattaggattgtattaaacttatagactaatttgattgtctcacatgacaacagcagagaaactgcttttcctgaacgacgtgagtgccacatctgtgtggctttccattcagtttttcatgtgtgaattttggttacttgcttttgacaggcaatctcagagagccctcgctctgtctgaattgtccacaaggggtccccaatatccaaagtatggatggtgcttatagtgagctcccctctcagtctttgcataggcactgttatttcaaaatggcaagcaggctcagattattaaggttcaattaacttgcattatttgcatgtagaaatgcagtagtgatcctaa

SEQ ID NO: 306369 - DNA, 433 bp, Homo Sapiens
aggtaggctcatggtatttgctaatttaaccttcatgaactagtccttcatgactcagaatgctcgtgacatggatgtccttttgaaggaggctgacttgtaaatatttccctctggaagcttggtgctccagaatgtcacttagctggtaagtgaacctggccaactgcagctgctatatcaacaagggggctttattgttttccactgaccttgagtctgcatgttcttgagtattcacatgtttggggattctgaaaggtctccagttatcttctggtctcttgaagtcaatcacccattcaggacccttcactgcccaatctcccgctccgaagccccagcagggttccttctcatgtctttgctggagcttcctgctgcctctgctcctaacacaacctagtcaggcatactccctatgggaccctct

SEQ ID NO: 306370 - DNA, 257 bp, Homo Sapiens
gctttaacacaccattgatgtgtgctattacacttttacagtggaagataacaaagacaatattaaatttaaagacggaggaaaaactctgttttaagccacttggccctctcttaggtataatgccctggtttctgggacactttcccaattccctggacgaagaccactaactctggattaaggatataggaggccctggatgacaaccacatatgggacatttgggatgccataatgggaaaacggtatccctg

SEQ ID NO: 306371 - DNA, 519 bp, Homo Sapiens
ttgctatttaatgttcatcacttaacgttttgtgtgtaagtttcaggagggcccaagaaatgattacacaggaggcaaggaggggaggtgataggagggttgctgggggtatggagctcatggccccaatatcgggggcctaaagggttccatctaatctcatggggagtaaaaaggggccccataaccaaacacatgctaaaacatacttgcaagcccccaaaccccctcccctcctgctggggaggaaaataaatacacccatactatgtaccactacccaggtgcccatgtgaggggccattaagtgagtttactcccctcatctcaggttgaggacaaagaattggcttttactatcttgatcctatatccttcctcaggtctgggggagccctgctctgatgagcggtggattgtatctcacatactgtcttgggctttgacttctaaatagaggggagacacactctctcctacttcaggcaatacacaacatgactaggagggggtggaaag

SEQ ID NO: 306372 - DNA, 114 bp, Homo Sapiens
gccctgtgattaaactgcgttacgagctgcgtgacgccttggcccggatggggtttactgtgggtttctctgggggcccaccccatttcttcctcccctcttctgccttcacca

SEQ ID NO: 306373 - DNA, 401 bp, Homo Sapiens
gagactacatagggctcggcgtggtaaaatacaatctctctggctagaaaagtgtgaaccactctctagagggggtggcagactcccattaactcttctagttgcagaaaagctgaaccattttcaccaaagagcaatttattgtacttcaacaggattactcttcagttggataggctactgagaatttcattctatttttacagatttcataaggaactaatgaaacggagacaatctactcatgccaacacttctggagaggcttcacatgcttgcaaggagggtaacaaattgtgtgaaactctcctcttgcaggctcaattcatggacatttaatactagggcaaccctctgaaatgtgaatattttaaaagagagtctggaatatccagcgccat

SEQ ID NO: 306374 - DNA, 142 bp, Homo Sapiens
ctctagggatctcaacgactgtgggaggaaccagcttaaccttggcgtaatacccctgtgagacccatcgacgcttcaagtaagtcacagtatcggtcaccagcgccggagtgttctgcacaaggttacggactaattgggc

SEQ ID NO: 306375 - DNA, 421 bp, Homo Sapiens
ttttttaaaatgggaaggtttattaaggtttttcctcaagaggaacagccaatctcttgcttcttgagagaagcaattagtgggaaatgtatgtcacaccttgggcccagaaccacaggaggccgcttctcagcatgcccaacgaacatacatcatccccattcccatttaaagctcattaatgtctacaaaacagaatccacgttgccttcccagaaaacagaactaggaacccagtcaaagcctccagctgttctcaacaagaatatttaagcaagacagggcaataaatggactgcacattcaacaaacccatgatgaaactgcagtaaaatccaggatcaaagaaatgtctggactacattttcaagaataacttacagtttttacattttggggaacataaatactaaaagctggg

SEQ ID NO: 306376 - DNA, 448 bp, Homo Sapiens
ccagtttttaaatatataaaaatgtcactagaatgcttttttctctggacctctttgctttaaattggactcttctgggaagtccagtagttcaatcaagtcctaggtgatggtttctctgtgttttccatgccagcagccctgatggagagtgcagaggctccgagaatccactcttgcataaaacgttgtcctctcccgccccacgcttgacttgccgtctggcagctctttctcatctgggccatgtcccggtggagggatggggcagaagaggccagacagcaggctgtgcccttgctccctgctagcagacgcggccttggcctattctgagctcagcagttctgtttctcctggttgctggacgcgggccatggcattgctgtgcactctgttatctggaactctcggctcccttggctcacccgtctcccgccctgcggca

SEQ ID NO: 306377 - DNA, 448 bp, Homo Sapiens
ccctgccaggaataccctttgccatctcaatatggcttcaatgaagaatttcctaccaccattctacggcagttagctgctctcccgctgcatggtaaatattaactacaatatatcataaaattaagtatatgtttaagtatctgcttccctctccacattgtgagctcttccaggacaagttccctcttattcattgttctatcacactgcccagtgacctgacatactgcccctttctgggaagcgaagggtctgcccagtcctaagggtggtggctaatgcttaaggtgctttatacatctgaatccatcccagcttccacagctgcctggtccaggaatgttccttggtccaatgaccttctgtactgaacggtattgtacgcctgagtcagctctctccctgagagtttgaaagtaaaacacacaaatagtgttactgcagg

SEQ ID NO: 306378 - DNA, 458 bp, Homo Sapiens
  misc_feature (400)..(410): n is a, c, g, or t
ctggggacaagaaataaagaagtcagcatgttgaattcattatgtaggtaggtattgaaatcatcaaaaaaggaatataaattattttagagagaaatacagcaaggcaggtatcaaaatcttcaataaataaaggggaaaaacagggagcatggggatcactgtaaaaatgaggggaacatatgatataatttgatggcatgtgccccacagaggctcaatggtgtgtaagcagcaatgcaaatcaagaaggaatgctccctctccaggctggtggttgggaagacaagggcgataaagccagagtctgcagggggagcagtgtccttaggttttaatactgcagattcagatgaggtttcctcagataacttaaaatataataaggttatggagctcnnnnnnnnnnnagctttatataaactattttcttcattgagtattgaattttgattttc

SEQ ID NO: 306379 - DNA, 369 bp, Homo Sapiens
tgcataatatttattgtaaagggtgccattatagacacatgttcaacagacttatgacgctgtacattaaaacaggtggcaacatggccacaggcagcttagattatgaaatctacactattaactttccctacacatgtacatgagaactgaatggaggattatccaagttaaccgccctgcttcaaactatctgaaaaactactctctcatatttgattgcccatttcctaggcagtattccaacatgctgtttattatccgaggcaagtgctttgaccgagcaaaaatgcaccttcttgcatacactcttgatcagaagcgttccatgatatccaaatctgtcatgcgacatgttacctaaccata

SEQ ID NO: 306380 - DNA, 257 bp, Homo Sapiens
agaaagcacagaaatctatacctctaacgggaagggctatctttactagactttagatatagctcatttacaacttgatgaaaatacattgagatcaatgctgattggcaatccctaaaggatgaaactgggggaagacatggctaatttctgcagcttcattgggaaggcccccatcaaaaggatggctatttttgttaaaccgggcgtactacgttctcagaatggtggcctggcggctacattttctaacactt

SEQ ID NO: 306381 - DNA, 443 bp, Homo Sapiens
tagtatgtctgcaaaaaaaggcgggggagggggtgtctaaactactgattttccttaagcaagttttttctttaagtttacttcaacaacagcttcagcaagctttcaagtgagtaaagatgatacagagcatgctggtgccacagcgacctacgtatccaggaccggttccgagcccagtccaaatcgatcccggacaaccctgaagcaaatctggatgaaaagccctgcaaaagatccctggcatgtacaggcagcgccccaccctggagggaaaagacgacacccctgggacccgggttaattactgaccccaggacagacccagaggaggcgaaaagtcgggaactggagcccaagattgagtctggtgtccagctactaccccaggccggacacagaataccaaaatagggagcggcgaggtttggggcagcacacat

SEQ ID NO: 306382 - DNA, 426 bp, Homo Sapiens
tccttagccagctggtactgaggctttgtcagaagagggagctcgagagacagggcaagaggaagggtgttgcttcctgggccagcatgtggacttggtaggcatgggcagcccttgcagcttctccattgcctggtgggtcagcagcactctgtgggagcttcttccagcattcccctccctcttacatcacagttgtgctgcagtgtctccggtgagatacctctccatgaatgccttttcccaggactctagagggcagatttcccacaggttccaccagcacgacatcatagcaacttccgtgccattcagtgagccatgaaggaggcagaaacttgtcctaacaggaaaaggttcacattctggacacagatttttgttgcctgtaaagcttctgttatccacagcctcacaggatgcctt

SEQ ID NO: 306383 - DNA, 292 bp, Homo Sapiens
gcttcaaataaatctcttctaagcattttgtgctctaccatgttatcttactgtggctggttttacagatatctgaggttaggagaacacagctagcatattaagctccatgcttgcgtaaggcagcagacaggtaagactaagaggcactgcgcatggatactggctaacacctgctctccgtagtcagggctggtccacagaatgtgcagaattctgctttcaggagtctcctatccattcagcaaatgtctgtcgaaaggttgcattccccaaatgttggagcttcaga

SEQ ID NO: 306384 - DNA, 422 bp, Homo Sapiens
ggtgccaggatgtaggcagcgatataaagtcctaggagtcagaactccaagaggggaaggcagtgaggagagtggggagggttccagcagccgggcgtggccctccggccaaggcaggcaggcatggccatgctgagcgaccatgcaggagggacccgtgcagggatgcaggcagaacacagggcgtgcccaccaaaaggacaggagcacagcgggccaggagcagccgggagggcattcctgtgtgggggccttggggcagtgctgggtgagcccccagcaagggaagctgtgtcatgtggaagaagcgggtgtgccagagagctgtgatgtctcagaggcttaagagacctccagaggctgagggtcccagggcacagccacagcagggagagctagacagggccagaaagtggggacca

SEQ ID NO: 306385 - DNA, 364 bp, Homo Sapiens
ttgccggttttgtaacaaagaatgcagtcaccaaaaaagtaaggcagtttgggatgaagccatccaagaacttatcaaaggtatatctttgccagaaagtgaggatttctagttggaggagcaaatggagctatgtctgtctcctcttcactgatctatctgaatcatggtataggacttggttttgtaatcttgtgaacagcctcattttaagggggaacccacaatattcaggaagccaagaaatgtccctgttaatcatctatgagtctatcttgctggaatgtagttatagactatggaacatccttaaatctgatgagcaattaatcactggttaattttggattcacttattaaatgg

SEQ ID NO: 306386 - DNA, 429 bp, Homo Sapiens
tctttaagttttacaagaaaaaccatgtaaccaaggaaatttgttcattatgaagtactactttccacttcatttcatcacaaattgcaacttacttaacagaccaaaataactatggtactgtagtacatcaaatactccacacactgtgcttcaaactagggcactgggggtcactgcctgctgacagtggcctcccgcgaataaagacacacttacaatctgaacgctaaagggatgtttggatacatggaatttgaatatatatatttacaggaaggaaacaaatttaataactagtttaagtctccatttcaaataaaattccaaatacatttgtacaatgtttacaaagtaaaagcacaagaactgccaagatgatcattcaggtccaggcactgtgctcatactgggggaaatgtctacacc

SEQ ID NO: 306387 - DNA, 555 bp, Homo Sapiens
  misc_feature (100)..(122): n is a, c, g, or t
  misc_feature (360)..(360): n is a, c, g, or t
ggtaacaattttgttagctcaggacaattcaacaattaaccccccagctcggatatccccaaggccaaggtttaattccaagaactattatccaaactgnnnnnnnnnnnnnnnnnnnnnnngtgtgtaaaactggtgaaaatatgccagtttaaaatacaatttgtaattctcaaagaatgaggataattgttccccttctctcaacttaagttttggctggaaggaatagttagcacaagagaaaaacaacggctccaaatacacttggcagtggtaaggccaatgctcagctttccctggtgggtgagaacctggcttctgctacttgtgagaatttatagaagcttaaccacctgngacagatgatcattgttttataatagccctagggaaagttaagtccattcttttctccataactggcaacaaagatctagaaagagagtccatgatgagtgccttctggggggatttgtaaattcagaaatggcacaaaggctcacacattcagagctggcttgagggagaaagggagcatgaaacagaaaaagg

SEQ ID NO: 306388 - DNA, 367 bp, Homo Sapiens
ttgtatctatacctccatcatttttaggattgacggtaaccggagcatattttgcccaaataactctgtctccttgcagtacaaggtctaagtcgctgacatttactgcaatgacagtacctttggtaataacacccaaagatgtatacaagtgggaggagggactcttcttaacaccacgcattgttgaggacacggtggcttccagctcacgatgtgttacatggtcttgcttgaaacgcaagcgcgatggcctgataaatctctaatatttaggtggttatcttagtaacgcctctgcaaccgagtacactttagtaaccattctcttccgtgcgttcgtctttctgtctactgttcgaaacac

SEQ ID NO: 306389 - DNA, 133 bp, Homo Sapiens
atgagccagcaactaatctgcaactttaaccacttacaaccaaaaggattctcaataataatctcaaatccatttgcccaataacacgttactctcagtctagtggctaggaactgtttaatggtactaggga

SEQ ID NO: 306390 - DNA, 372 bp, Homo Sapiens
attattcttccagcaaatcatttttagaagactatcattattttagaacttgagtctagatattgtctatacttctttaaatataatttatgtactatttgacttaggcactattttactcaggacaatgaaagtcaaatatcccaactttgttcttgaaagatacttcactgtcataaagcaagaggagtgaaaattattcctcatttcagtcagatttcattaaaagaaaatatatgatataaaagagaaatgacttttccctatatacgatataatttcagcaaacaaatttgctggagaaaatataatctatgaagaattgttaagaaaagataatacatggttatctttattaggttgtaatgaggg

SEQ ID NO: 306391 - DNA, 115 bp, Homo Sapiens
ttttctctctttcccaggcacagtctcattgtgtctcccagggtcaagtccttagatacttgaactggatttaactccctccgacgttttgtgtcattgttccatagacccccgc

SEQ ID NO: 306392 - DNA, 326 bp, Homo Sapiens
aaaaagatcccaagccacatccaagaaaaagccacctttcatgttcttaaattcttggcatcacagtagacgttagttgttcaactgaaaagctcaggaagcctattcagctcccttcccacatgagctttggaggagtcttgccatgctgcagcctgccatgacccagctggcctttagatctgactggctggcaatcccagcactttccattgccaaccgatcactggcttattaaaggttctaaacccaggctaacataccagattgggtgaagcagtttcaattatgtgccatgtttgaatctaaaagctaagatgcttgga

SEQ ID NO: 306393 - DNA, 115 bp, Homo Sapiens
ggtcgagagggggggtttcagaaatctgtggcccacggcgggagattgtgagctgatttggatctttggcgatctttctcagcatgtcagggaggaggctggggggcggcgtgat

SEQ ID NO: 306394 - DNA, 479 bp, Homo Sapiens
ccttgtgtagcttttgcttggaaaaaaacatgaatgcaattgcagcttatctaatctccaatgtgacagtcacactggtggtctaatgcaaatgcctgcagtcatgtgcttgatacaaactcatgacgttttgtgcttgccaagggaggctggggcggtggggactgaaaatgggaaaagaacgtaaggaaaacacaaaatgtgctggaccacaactgtcactccagcaatgatggcattcaaagtggcacttgattattcctgagcacccagcactccctcaacacgctaaagataaagctgttactcaatctcacttaagccagaaacacagcccctcagagggcctaagtgacacgaggtgccactgcttcagactgctagaccctttggctggagtacaatgctgaacagtctataattggagaaaccacctggtgtagtgaatagagcactgactggattcttttgtagccttg

SEQ ID NO: 306395 - DNA, 248 bp, Homo Sapiens
aaatatcttatttactttttcaaaaaacttttatgttaggttcaggagtccatgtgcaggtttgttatataggtaaattgtgtgtcgtggcggtttggcgtacagattattttgtcacccagttaataagcacagtagccaacaggtagttttttagtttcactacaaaaacatttatgtaactgctgtaataaacacagagcctgcactaacctgttcttgtgttgctataaagaattatctgaggc

SEQ ID NO: 306396 - DNA, 118 bp, Homo Sapiens
  misc_feature (80)..(80): n is a, c, g, or t
  misc_feature (102)..(102): n is a, c, g, or t
tcaccaccaagtgatcccccacggtcttggcagtgtttcccgcggtccgctgggtgcgcggtctcttctcccttccgtgncctcggctgctcccggccagcngggccccggccggccc

SEQ ID NO: 306397 - DNA, 369 bp, Homo Sapiens
agatttcttcctttaatacataaatgattctgggtcctcggaatcagaatccccactttcttattactaggagcatttttactctgagatcaatacaaccagaatgtgtccaaccataactttacaacaacagaaaagatacatagcaaatgccttcaaatacctggaatctggccttgaaatcgacctggcatttaaatcgacatgtatatcccagttgggtcaaaacatagtcaaggtttcccccagagatactctgtttcattttccttttcaagtaaatttctatttttccccccaacctttacagcttaagcgttttatccagtttaaacgttagggatttaaattgctattttagtggaagag

SEQ ID NO: 306398 - DNA, 265 bp, Homo Sapiens
ccccccgacctgggggcctggccaaggcatgattaaaccgaggtgttctcgccagaggatcttcatgcaaaagcttcctggggggggttggcttagaggtcccctgggacggcccaaatacacccttggccgccaggggtctcgcagggaagccaggtgcacgttgagcccggcggagggcaggaaacactcgctgagttaactctcgctgcagggaatccacgccgaggaggggtcttcttgggtcaacattctgacactgcag

SEQ ID NO: 306399 - DNA, 498 bp, Homo Sapiens
  misc_feature (249)..(249): n is a, c, g, or t
  misc_feature (297)..(297): n is a, c, g, or t
  misc_feature (309)..(309): n is a, c, g, or t
  misc_feature (312)..(312): n is a, c, g, or t
  misc_feature (354)..(354): n is a, c, g, or t
  misc_feature (369)..(369): n is a, c, g, or t
  misc_feature (451)..(451): n is a, c, g, or t
tgcgtctgcattttttcttaaacgtgtcctatcttcagtactttgtggtataggtcttactggtgcagttggtttctttttcttcccatctcactgattcttgttgggtgcacgcacccgatgcagatgcttgccggacctggtccactatctttttcacacggaaaggcttgtgacttctccctttggtcacagcagaactaatggattctgcacagaatatcaccttcctctgctttattgctcatngaattcaggtatggtcccagacgaggtctctcctcctcgagccccctntgtacttctgcnttntgtaggaatggtatctcgttttccaaattcacctgactgtgntcctcctctcactcnttctccagcagctaactcatctggaggggactcgactgttagctccctcagagatgtagctgtggaccagttataggtgccnttaaccacatacagcgtggcatatgctcgcggctgtaaactaaatgc

SEQ ID NO: 306400 - DNA, 144 bp, Homo Sapiens
tcacagacttcggggacagaaggttctttccttcaggtattgggaattttgaacaacaagcattcattagaaagcatactaagtgtgtgatttattgtgacttccagtgacataacagagctcaaacagaacaatatttatttg

SEQ ID NO: 306401 - DNA, 387 bp, Homo Sapiens
atttgcaattagattttctttaagccggtaaaaatttggacagtccttttaaaaacgaaaatgcggagtcagtaagtagatcaataatagacgcctattcacagcaggacgtcaaatagaggtatcatttacccgtgtgttaatatcgcagaggtcaaatcacactcggactcacacacgattcgggtgtgtaagccgacacagcgggggccggtgagccgcagatggactcctcccatgggggggccagccccagtcaagtccttcctcaacaacaacggccagctcacacagttggggagctggctgctgaggaaattcccgaagggcatccccggctccatggcgatgcttgaagtagcgagccaggcgcccattcttgcaccc

SEQ ID NO: 306402 - DNA, 380 bp, Homo Sapiens
caattgtaattataaccagaaaactgactggatccactttagggaagacacaagatatgaaagaaaggataaagtctgaaagttagaagtaacacaactacagaaaatagattaatgtggattgttatagctgttcatacactgacatcctcaatatcaaaaccttattatactctttatagattccacatccaagtagaattctatttaatgtgctttctaacaatcagattcctgacaaatgtgttcataaagtaataaaagcagcaaaaccttaaatattttatactgacaaaatatttaaggtagtaaatgttagacaaaatacaaatgctctgaacactaatatcataaaaacatagtagacaaaatacaaatgc

SEQ ID NO: 306403 - DNA, 360 bp, Homo Sapiens
gagacagctctgttgcccaggcaaaacaaaacatataacacagagcaaactctagaaacattatctctgaaccttggccattagcatcttcttcctttgaatgttaaatgaccactaacaaacaaacagaggcagtgctacagtacgaatgtcgaatgtcaccgagttggaaccattgtaagatacctcatgatcaggtcagactggatgtttgtaattttagctcttaactcagagacatttctcgttgattcccagggctactgtgatgaagcaggcttaaaaggcttttagtgacactccaaaccaagctgacacctcaaacaactcatttcaccactaaagggcaaatgtatagat

SEQ ID NO: 306404 - DNA, 297 bp, Homo Sapiens
cattatctatattcataccaagaatcaaaaacagacagggtttcactccacgagcatttagtagactgatacttaaacccagacaaatgagaaataaggaagcctccacagcttccttcctgaatgacagaataatttgtgctaatggttgggtctcttcctctcccacaaaatgcttcacttggccatatctcaacctgaagaccattttctttggttgtgtgctggtggctccacgttaaatgtcttaagaggatatttttttaaagaataggaaggcactgttcaagtccccag

SEQ ID NO: 306405 - DNA, 408 bp, Homo Sapiens
ttaataggtgtccaaagtagatttactataaaacaaagctgatgctgcagtgcccttcattgcacgatccccttccagggcctgggtgagcaccgcagcatgtgtccatgtgagcatgtatttcttgagggggcctctaacactgtgcccatgtgctcatatgtaatacaatttgcaaaagtaagctactttaagagcaacggattcggatctttttccatgctcatgtcccgttcatcaatttctcctctgcagggtgagctgtggtgcccgcagccaaactgggttccagttaggggcagtagagttggggacataattaatttggatttaatggaataaatttatgtgacttccaggcgctcttcttactgttaaacgattgctaattatcctaatgtagggatg

SEQ ID NO: 306406 - DNA, 163 bp, Homo Sapiens
attttaaaaattatttccagctccaaatgttttatgaattttatgaagtatcacaaaaaaatttaaaaggttgaaatatttactctataaaacttcatctatttactcacattttgattaagctattatttgaaagtaacataccacattttttttctatact

SEQ ID NO: 306407 - DNA, 257 bp, Homo Sapiens
ataactatgaggctgggaggttcaatccgagacttgggattgcagagtcaagaaaggccaccaggacttactgaaaagtggaggtggaggtggcttaactctgcaggttcatcttaaagataagccaaggcaccctggaataggtgtaaggatgcaatcttgagggaaagtttgctgtgagaaagcaataactctgaggtgttggctggacacgggatcaggtatgactctacgctcgcattcaagatgggaagagg

SEQ ID NO: 306408 - DNA, 282 bp, Homo Sapiens
ggctggaactttgataacaccagagatcacgtgatgatcaaaggccctgcttggtctttgatgatatcagagacatcctaagacctggaaacagagctgcactgtgacttatgccccatgctctgcagtctcctaaacagctagtgtggtgagaacacctgggcatgagtctagacacaccaacccttcaagacagaacttagtggtgtaaaaccccttgcacgcagagccagttaatgtaaaaggaggtctgggtgattcagaggctgggagcgagccact

SEQ ID NO: 306409 - DNA, 276 bp, Homo Sapiens
gtgtgagctactgtgaccagcaaagatctctttaaacatgtgtatctgaaaagtaaaaatcaaggcaggctagatttttaagtctgtacaacaaccaggcaggcaatttgggaatgtaggtactcattatggtatacaatagtcaaccaaaacacttttaataccaccaggttctggtctggaaccagatatgtaatctagtcagggatattttttctcagagggaagtgagttgcagttgcagtcttcctttgataattatctacttctaggaca

SEQ ID NO: 306410 - DNA, 134 bp, Homo Sapiens
  misc_feature (45)..(45): n is a, c, g, or t
ttcccccatccattggagaagagactcgttatggacattctaagnagatggaacatgttaaccaacaccaattttgcttagaatcacttttcattgacttcagaaaaccttagtccttctttcagtaaattcaa

SEQ ID NO: 306411 - DNA, 221 bp, Homo Sapiens
tggggctgtcgctcccctccccacaggcgagtgtgagatctggctttgcgcgggttggtcttctgggtcccaagaggttctctggagtcgctttctccgtgggagtacggtgttctctcgtggccagccagtgagggaggggtcccagactcgggtcagggcttgggggcgtaggcaggtgtctttagcccgagggttgagaggcagaggtccctgttgca

SEQ ID NO: 306412 - DNA, 292 bp, Homo Sapiens
gagatttttttaaagaaagtagagatctacttctcaagccttaggtgataccaattgcatttgtcccctttcattaaaaaagctattgatcgcttttccccaagatctaactctttaattccagtaactgtggaatgagaaaacagacagatgaaggaaatacatacttgcaaaatgaagaaagactgagctttggggacctgtgtgtctcgttagcaaatcctccagagacttcctgcttgatcacgtgcattcatcttgggtggaaggtaaaggagagaagggaggctta

SEQ ID NO: 306413 - DNA, 148 bp, Homo Sapiens
acaaataaccaaaaaattttatattttcctaccttgaacacatttcttcaaagggttagcttgaaaaatacatgtctaagattacagaatattcaatagttacttttagggttttaacattattttagattttaccacagagtttacc

SEQ ID NO: 306414 - DNA, 458 bp, Homo Sapiens
gtagacagggtctcactattttgcccaagctgatttcaaactcctgggctcaagcaatcctctggccttgacctctcaaagtgttgggatcacaggcgtaaaccaccatgaacaacctttgccaatttttaatccttactgatatttgctctttatccagaccaatacagaggagttcctcagaaggatcggtataggtgaaaatggattagcagatgctcttcaaatcagttttaatggtcctatcggaattttgaaagtgagagtagaattttaataactggaaacatgacaattctttgatacctttggaggaatctgctaacaaagtcttaaaaaaattctagctaagtgcaagcaaccttttttccattggcaattaactcttatacatacctaaaataaaaatatattgagtcctagccatgttttagatagtgtgacatatcaaatatttg

SEQ ID NO: 306415 - DNA, 119 bp, Homo Sapiens
tttttcaccccgcctccggacagactccgaacgtccccctcgtgccctcccctcccaagttactaccaagcggtggggacacagcacagcatacatgaggggccctccctttcaccaaa

SEQ ID NO: 306416 - DNA, 460 bp, Homo Sapiens
gcaaaatatcagttgactgccaacctgaaccaaatgactttcaggcatcttgccagtagatgttttaaacaatattacaagttgtaataggtgagagaagtatcttgcagaggtttttctgaacaaggtctagacccataaaatgaaatgattcacatttgggttggctcttcccaggctcttcgagcatctaatttaggcaaggactgcatggtgcccagagttataaactatcacataatctttattatctgtacctttgagctttcattgatgccagggagctcattaattagctcattttccatggggctcttggcttccagatggaatcactccaagctcccagcagctttctggttggaaggctgaaattctttcaggaggggagacagactataatcagactggtttagaggccagattttggctgtcatcgactcagatgtgctatgtaaat

SEQ ID NO: 306417 - DNA, 169 bp, Homo Sapiens
tgaagatgccagctgcgagtgcttccgtcaccagattctatgattcctcctcctccatggctcgccttaacttatcgtcagatacagcgagtggtgcgaaggacccagaacgcatgcttccataatgctagttctcatttgatccatgaggctagctgctgtagatgtg

SEQ ID NO: 306418 - DNA, 415 bp, Homo Sapiens
aacaatgcaaaagaggagatgccaattaattatagaatgatcacatctaatgaactctgaaaccctcctgctgttggtgactttgatgaaaaatcaggatgctgggaaaagagtgaatagggacaccctagctaccttgtttaactgtgaatgctttcaaatgcatcctcagctcccagtgttgatcaaaactgtggagctacactcataaaacaatgcaaagtgtcaggaaagcgacaagtgtctgtgtcacaaacagctatgagtcactgccagggcccccttcagccatcctcagaattgtatgattctatgctgtggttggcactgtagggacaaacccgtctgtgcttgggacatcttgagatcttaaggtaacaagtgagtcattctttgtccctacctggggcctacg

SEQ ID NO: 306419 - DNA, 261 bp, Homo Sapiens
  misc_feature (101)..(110): n is a, c, g, or t
taaattgtctgttattaccctttgcctatttttgtactgggttttggtcttttaaatatttatttccaggtgatttttatatataaagagagccttgttcnnnnnnnnnngcaagcagagctatgaacatatacatactaaaagtatattggctcattatagtaacatggaatttgtattaaaagtgatgcgtatataaagaaaagccacaaatgtggacagtctgtcaaggttgtctgtgtcgtggtgggggtggtaagg

SEQ ID NO: 306420 - DNA, 327 bp, Homo Sapiens
cgcgcccggcaaagcctatattaaacccttttatgcacactcggcggtactgcagagagggcagggaggaagcagaggtgccctggcatcttcagctggaggtgagcagggcgctgagggtgggagaggcccggcgcctggggatgggaggcaggactgcaccttcacagggactcttccaccctaccccggaggtcagggcctctcgcccagctctggctctgaggtcctggagggagggagatgctgttgcgactcaaaagattgggggagggccacccccattcgagaagagtgaaaatcctgagcctgaagaagtggaaccgg

SEQ ID NO: 306421 - DNA, 462 bp, Homo Sapiens
ccatgtgtgcctagaagttactatattgcataatgcggctatgaagagttggttttaggctttgtcagggtgggcctatcttggttttgcctttattcctaggacataggctttagtcctggggagtaatcattactccttctgtagtctcagtagaaagctttaggtgttctccagagtcctctaacttggtgagaactaaaccctaagcaccatctgctcaacacaagacaacacctttttagccttccagccgttatttttccctcagctccttgaacctcacccagatgcacagtttaggaatcagagaagtttgtacacagatttgggagctccgcatctgagactccctcctttgcgagattccctccttcccaatctcctgctactgtggaagccccaaattctaacctctaactttttaactcagtagaacagccactttctgctgagctctac

SEQ ID NO: 306422 - DNA, 429 bp, Homo Sapiens
ctattacatagaaattttgtagaatctaataagataaactagaaacatgacatgttcagctgttttctctacgaataaacaaattggcgctaaaactggtcttgctatctagatttctagttatatctcagttatcttttccccacatgggatgtgaaagtaatgttatatgctttcttatgtacgtacttttgacttaggtcagtctccacactgcattaaaattactaatgagacaaattgcagttttccagaggttcatgtttccatttctccttccttggctttcctgcatttttagctccagtcaaaattctatttattatgtatcaacttttataaaatgcttggctttgaaaagtataattaaaagacaaagatctgaaattaatagtgggtttttagctatctatcatgcattaagaaatc

SEQ ID NO: 306423 - DNA, 560 bp, Homo Sapiens
gatttccaactaagactaaaatatacttttctacctttgttgcagtgctttctctttggagttaggaagggggcttgctcactctgcagtgggagatgaggatccagagttagagatctgtgttctagggttggccctgctgccaaccagcagagtgacccctgggcaattcacttcgcttccctggaagtggagatgagccagtgagacaagatgacctctcaggccccttccacttctaagtgtgtgagttggtgagtcactttcagtttagtcattaggaaaatgagatttaggagactggggaaggaagaaaaggcacacattcatgagccctggagtgggaggctgttgtggttaaaggaagaaggttccttgtcaggaaggaaggcacataaaaaatgaaggaagtttggaatctacaagcaggggaaattgcaggttgaaaagggtaagaacacaggagaaacattttaatgtttactaatatagtggcttatagttaaaaataaatgataaagaaaaggcatattaacttatcaaataatgattaagtgtgt

SEQ ID NO: 306424 - DNA, 724 bp, Homo Sapiens
  misc_feature (273)..(435): n is a, c, g, or t
  misc_feature (695)..(695): n is a, c, g, or t
attattactaaaaacatttttctactactttacaaatcctattctggaagtgggctctacctagcttagaagattgtcattcaggagtagtatccctgatggtcttgtttcgaattttgtgttgtctttccacctaagtcaaaagtgaggctgaaggggatcgaagactccatttttttctggcccccaatctcttccccagtaactgtgatatatctgatatttatagcatatgagtctttatccctttgtaggtctttacttcttaacttnnnnnnnnnnnnnnnnnnnnnnnnnnnnnnnnnnnnnnnnnnnnnnnnnnnnnnnnnnnnnnnnnnnnnnnnnnnnnnnnnnnnnnnnnnnnnnnnnnnnnnnnnnnnnnnnnnnnnnnnnnnnnnnnnnnnnnnnnnnnnnnnnnnnnnnnnnnnnnnnnnnaactctcctaaactcttgtataatgacatcggcatgaaaatgaactcacctgaaactgaccttcccaggacattaagtcactagttggctgcttatggcacttgccagtgtccagcagtttcctggctgctcctggaggttgccagacacccggttcccccattctcaatgttggaggcccacagtctctgcacttaggggaccagctgtaacctccccacctgaccagatgaaccgcggggaaacaaagcgagaagctnccacctacaggatgcaaggacccaagctg

SEQ ID NO: 306425 - DNA, 697 bp, Homo Sapiens
  misc_feature (374)..(387): n is a, c, g, or t
attcttggcacagatgttacatgtgacaagcccttctcttccgtagtcatctgcttcagtttaattagcagaatgttctttctgatctgtgtgctttgccctcctgcaaacccaggagaagcagtgttagagtcttgtgctcatttgctgacatgcttagatttggtaatgagatggaggactcttaatatgcacacctcgagtaactttattttgcagtcagaagatttttcacattagaaagtaattcttatgtatattcagaattaaaaaaaattcttgttgttacaacaacaaaaatcacttgcaaatgaagtgttttagtaagtaattttagtaagaatatggaaagcaaatttgagttgacctgttcnnnnnnnnnnnnnnctctgccctgggagtgattaatagccacaggccccagcacttttgagtcagggttgaggtgacctacctactctttcagcctaccctagtgcctacacctgccatatctcctctcttctgcaccagaaactgtggtcaattgtcagatcaaaaaccttttgtgactcccgtttacctaatgattgtaataattttaacatcataattatgacagcagcaaacatttctatacccctctgccattaatgctgaactctttagatagagtcacttatttgttcttcatagcagtcctatgaggtaggaattg

SEQ ID NO: 306426 - DNA, 151 bp, Homo Sapiens
  misc_feature (19)..(19): n is a, c, g, or t
  misc_feature (105)..(105): n is a, c, g, or t
attgcttccatgtccaggnggtctgtgcccagccaccagcattcctggtcccctaacatttgagtcacacatgtgctcagactgaccaggtccagccaggagtangagactggattttagggcctcttggtagcacctgggaggtgggctg

SEQ ID NO: 306427 - DNA, 438 bp, Homo Sapiens
  misc_feature (369)..(396): n is a, c, g, or t
gcttgatattctaagatttgatgctggaactttggtgtcaatgctcaaaatgcccaaagacaccactcaacctcagtgtctatgcacacccaagcttttgcagcaggacaggtagagcagagatgagtgtgctacaacatgctggtagagggtaccaccaattgtgcttggggatttcctattcctcatggaaaaatgtgtcttccttaatttttcccataagaaccaccctacttcatgccctgtctctctgtccaaacaccaggacagtcctctcaccagtctcaaccacccaatggattgacaaaggtgcaaatatgattcagtggagaaggcattctcttgtcaacaaattgtttagaaacaacnnnnnnnnnnnnnnnnnnnnnnnnnnnnatccccaaaggaaaaaaattcacctgaacctcaatactaact

SEQ ID NO: 306428 - DNA, 640 bp, Homo Sapiens
tcagtgtgggagcaatagtttacaacctccagccctaatctgagcactcttgaacctgtgcaatctgaaaggaacaggagacttgcaggaaaaatagtgcctggatttaacttaaaggaactaaaatgttggaatttttactcttgatatccttccagatcaactctctcaatgttcccatcctcaaaactatcatctggggtaactgaggcagtcagagatttactgactcaatgtcactcagttgattctgagttcactgctgattacatctgaccaaactgctttttctgaagtctactctgtttcatcatgctggtgatgattttgtgcagctctgggacaaactccacctggctgaggataaagcaaatctgcggtgacttagtcctcctgtcatttcccatcagttccccactctcctcctctgcccctccacagtctcccatgtaggctgacaccatatgacagccttaatggagtccaccgagtatttcaggttctctcctgggccacttgaaagtggatgtacccatgggatttgctttgacccaagagatgtgagtggaagtgaagtgtgtcacctcgaggcaagagttgggagccattgagactggccaccctctccttcatctcttag

SEQ ID NO: 306429 - DNA, 620 bp, Homo Sapiens
  misc_feature (65)..(172): n is a, c, g, or t
  misc_feature (335)..(360): n is a, c, g, or t
ttatattatctaattgaaaaaagccttcacttatattttcaagcattagttcttatccactttcnnnnnnnnnnnnnnnnnnnnnnnnnnnnnnnnnnnnnnnnnnnnnnnnnnnnnnnnnnnnnnnnnnnnnnnnnnnnnnnnnnnnnnnnnnnnnnnnnnnnnnnnnnnntttcatgactccgctgctttagaggttcacagacttccacttaaagaactgctggttaagaaatgcatccctacttgctcggactcccagggatatcacttttcacctgttcctatcatttagaaaaaaatgatttgaatcagctagatacatgatagaggannnnnnnnnnnnnnnnnnnnnnnnnncaatctaagcacaaaattatcttgttgtcctcaatagtttgcatggataagtaatgcagaataagcatcatacccaatattaataaatacttaacaagaagcccaagattttaccttgtttcctattttttccttcagccatcacattcaaaccttgcccaaaggtttctcacattctggcctccatcaccaccactactgctttggcctggccttttgtcaagctagaaattgccagaatttcctgacaacaggctctg

SEQ ID NO: 306430 - DNA, 726 bp, Homo Sapiens
  misc_feature (126)..(126): n is a, c, g, or t
  misc_feature (583)..(591): n is a, c, g, or t
tgcttctttgagtcatgcagcaggaaagtttgtttgaatcagcttagcagtgttgctccatagtgttacttgtcagccctaagttttttaatgttgagttactttcttttgttctggaaggcaaanccgtggctctcttggtgtctctttagcaaagaatatgttctttagtaatggggaaagatttgttttatattgaataataaaatgtgacatggataacaatatgctttcccagaaatacattggataaataatttccatagaaggtaaatacttaagaataattaataatgtgtttctaatttagtaataaaataatgtgttttctataagagaaaactcttgctcaaagacattgtgatttgcactaggctactagaccagcatattcagccagaaccagaaccttgttttcgtggctgtatttattatttgaaaatcacttagatgttcttcagaataataaaaattatttactaagcactggcaagcgcatgacatttattaatctaaaaattatggactctttcctcttagagtttcataatagcagttacaatacttaaattacttaaaaaannnnnnnnnctcacttcaaattttattattagtatgacaaacatgggctaggatcaaaaactttgtttattccttattatcagagaactctagatcttgaattcattgctaaggttatttgcaagtaaataatctgctggtggg

SEQ ID NO: 306431 - DNA, 318 bp, Homo Sapiens
  misc_feature (238)..(260): n is a, c, g, or t
ctaagagtagactatgaggccatatggaatgagatctttgcccagcagagatgacaggtactaactctaccaatcagattctccttattgcaagtttgaaatggagacacacaaagtcatgaaccagcagggagcctgagggagcaaaacccttgagtaaccaagaagcctctcgaatgaacaggagaccagttgagtggtacttacctccctccaaccacatttcatctggttcatnnnnnnnnnnnnnnnnnnnnnnnccagacaaataagaaggggctgggcagagggaagtagaagtaagttaattaagcggcc

SEQ ID NO: 306432 - DNA, 691 bp, Homo Sapiens
gacctaactactccaggatatctgagaggggcactcagaggaagaaaacatctcaactaaaacccagataaatagtaggaattagccagggccaccaggagcggggaacaaaagggatcatgagggtgtgggaagagtaagtgctataggcaaatgtctagaagatctgattggcatcttcaaggaattgaaaaaaggtcagtacagctaggggcatcccgggatctagagaaagcatgagagttgagggttcacagggccatgggaaggggtttaggaattgtcttcatagcagtcggaagccactaaagggattaagcagggaaacacatggttatatatgcccatgtctccctgcaccagcactatagccaagccactcaatctgcctagtcatcagcatatacaagtgaggcaagaggtactgggctctcatagccatggatgcaagctctagtacctggtctgttcaaagagacagaaaccaggtaagcaaacttaggaattccattccatcataaccacattctgaggagcttcgtgactttccagtgaaactggtgaaacaccagtcctgcccattcagaggaatcaacacaggaagtggcaagtggtccccttcactgctcttaaatccagtaggcccacttccaggtcattcaactgacactaaaaaatggactcgtggcta

SEQ ID NO: 306433 - DNA, 165 bp, Homo Sapiens
tgcccagcctcaattccctgtctttctgaccctgctccagtctcaggggaactcagctcttttccatcacgccatcctaaggacagggatagaatgccattttggggtctgtgggattctaacgggacaagggcactaggagtcagatcttttagaggaagaacc

SEQ ID NO: 306434 - DNA, 521 bp, Homo Sapiens
tgagccatcgcgcctggtgagaaagatgctcttaaccctatttcaccaataataaaacaaaaagtgttctttttgtttttgttttattgagatgtaattcacctaacataaaattcactattctaaagcgcacacttcagtggtttttagaaaattccctatgttgtgtaaccatcaccattactctcaaaacatttccatcaactgcgcccccccaccgaaaaaaaccatactattagcagttagtcccaatttcccccttctcccatcccttagcaactactaatctgtctatggatttgcttattctggatattttatatactgtaaattgaattattagcataatattttcaaagttcattcatattgtagcatgcatcagtacttcattccttttatggctgaataataatccattgtatggatgtattacattttgtttatcctttagttagctgatggacatttggattgttttcactttttggccattatgaataaagctgctatgaacattc

SEQ ID NO: 306435 - DNA, 448 bp, Homo Sapiens
tgtcctaaagattggcttgggaaaactgaggtacagaaaattaataattaatgttcacatgctgtcaggaatactcagatgcgagggggcatctgagtccattttttgggcacttttgctttctgggatgctctcgtgcctaatgacagccctgcagctgcctgcatcctttctggtgggggtcaggcctgatgcgatgagatctgatgtgttcagtgaccttctagttaaggtcctgggccggccttgtattgctggggcttttatgtgtgctgggattaacaccagtgactgctgttatcagcatagatggcgtttgttctcatttcaggaccgtatctgagtaattgcatccattgtgatgtgccaccaaagagaaaagtactttggttatactcgactatgtaaactaagtattttaagttaaggccaattccaatgcatttta

SEQ ID NO: 306436 - DNA, 351 bp, Homo Sapiens
  misc_feature (225)..(225): n is a, c, g, or t
agatgttttggagcatggtagatgggcatcactcctactgaggcttgcaggcaaagaggaagacagatattgacatttctcagcactggtacatgtgctgcaagtcacctattggtcagttgtaagagcaggtgcaggacagtgtatatacaagtcaacactgggagaggcacatgtaagagctgagggcttatagcaaggcttgggcaaagcaaggggtatggntgagccagaaagtctatgagaatgaaaaggccaggggtagaacctcaggcctcagatcttggttaaatcctaaaaactactcattgtgcttctgttgcagacaatgcataggagtgaatgagacag

SEQ ID NO: 306437 - DNA, 727 bp, Homo Sapiens
cttagacaagactatttctgagtacctgttataaaattctgaggttctttaagactttacaagtccataattgaatgaaatctttacgtttatccctgttttacatgctgaggtcaccagaataagtatggtcataatatttaccttttagtatattagcctttgacttactagccaagttggttggtggtgctattaagggtaaagtaacaggtaacccctgtgggccagttgggttcatggcccaaggttgctccactgcttagccatctcagaaataaatgcagggttgcaaggttaaccaagaatatttggaggaatgcagatccatcatcactgaaggaaaatcaatgccatatgtgaatgtatgccttaatgactagccacagttccctaaaggttctgtcatatagagttacttttatggacttaatataagtgtagtttctctgtgttgggtctaaaatcttgtagcattaatctagaatcctgaaacaatatttataaaattattactaatttatgttatttatgccaggaaacacataataaaatcaatcttgttgagatggagctactattagaagaaaattctttttactacgttcttctttataatacattgggagctgttacaataagcttactaatttgtctttttaaaatctaattcctttgagctttaacatatataaaatgaagaaaatgtctgtccttgagttttatt

SEQ ID NO: 306438 - DNA, 419 bp, Homo Sapiens
cagtcagtggagggtaactctttggggtaaataggaggaaatggaagctcaagaacttgaaatcacttgcccaaagtcccacaggtgctcagggatggaggcaggaactcaagtcaggcctgttatggcacagtggattgtttgatacttgccctgcactctgtccctaaatgcccatctacagaattctgaggttgcctttcctgatgctggccctgcaagggctgggctcacactgtgtctgatgcagcagggctgacttgggggcaattacttcacattaaggtagagaccaagagaaatacttgttttaatctggaaaaactcagatggcttgcctacagccgtttcttaccattactcattaaaccaagcccttacattttatctgagaccctgactctaaccctgtgccatgg

SEQ ID NO: 306439 - DNA, 326 bp, Homo Sapiens
ttttcacagaatggttaccagtcactcctagatccctttttcaagtttgaaactgagaaggcaaagctcgccagcctgtgaatgcagcctagcttctttcactttcatttttcactaaatgctttaccgtatccacacgaagctcatctgccacttctcggcccactcaggagcctcacgagagcttcatgcagtagatccctggcagcttggcatttcactttcagtgaactcagaacagctgagtgtaaactgcaaactctcctactttagtttccttaatttttttattgaggcctcagagtaattaaactgataacgtatgg

SEQ ID NO: 306440 - DNA, 112 bp, Homo Sapiens
atatgtgctgccggcgtacccaatcccacaccaccaccgtaatgttgtctctgtcactggccagccaggcgcagcgccgggtaaaatcgcgggtatttaaagaaaaagtgtg

SEQ ID NO: 306441 - DNA, 394 bp, Homo Sapiens
ccacttcagcatagtccctgcctgctgtacccttcctcatccccaagaccccgcccacagctacgtgactctccttagccagctcgggatagtacaaaaataaactcctattttgctcaggcaaaaaccagacatctctgcatttccagacaattaaaagcagactccagaggcacagctgtctccctccgctctgactcatgagagaggccccacagcatagccacgtgcaggaacgtgctcccaacctggaggtgggggtgggaaagggggtcaagggttgcccaggtgtcctctcctcccaaaggggcttctgcatctcccatcttttggggcctcattcagagctgcgctacatttctgcctccaggaatgtccctttcctgaagagtgg

SEQ ID NO: 306442 - DNA, 145 bp, Homo Sapiens
aacgtccatatgtgtgcttctcttatgctcccctcactgttctagcagtagtgtccttcagcgacgtgctgttcccaatccagtcgtcctgtccataagcttcataataatctttaacctccccaatttcaaaggcataatattc

SEQ ID NO: 306443 - DNA, 416 bp, Homo Sapiens
cagaagcggggaagagggcaaacagggcctaaggtagttccctccagcacttgcttaaggcagagccctcatgacttaatcacatccccaaaggcttccgcctcttaataccaccacagtggagattaagtttcaatgtgaattttgtaggggacacacgttcagactggtgctctgcctctgcccctcgcccccaaaaagtttatgtccttttcacatacaaatacattcattccattccagtagctccagaagtcttaacttgttctagcaccagctcaaaagtctaaagttgagtctcatctaaacatcatttcaatcagatacggtgagactcaaagatacgcttcatcctgtggcagatttctctctagctgtgaacctgtgaagtcaaacaagttacctgctttcaaaac

SEQ ID NO: 306444 - DNA, 283 bp, Homo Sapiens
aacagcaacattccaggttgatttggcagcgattattgtgaagagggtttcctgaagaggcccaggaagaggggtgatgcctgtcacccaccaggggtcatgaaaggctgtgtgtctggagctgaaggggacagaggggtgctgttacaaagtcctctctgaatgttaattccatgttccaaatttgttcacagaacacctgacagaaaaaccattcttacatttctatgatagcaggttgagattcacacgcgccttcacttcctgcccttcgttgcagtat

SEQ ID NO: 306445 - DNA, 798 bp, Homo Sapiens
aaagaagtcctggtttaaattgccaatatgatgggaaatgatttcccatacatgtgtttgcatctctctgctatgtatataatcaatttcatcatacatgactataaaatgataaaatacacatggatttttgaacaattttaggtcatgatgttttcttcttagtgttaaagaaactaaatttttcccatggaattgctattctcataatatttttatattgagtattcttcattcctactgttagacttcaatgcaaatattgacatcttaatataatagtatatgtaatatttgtttagttacttttggtcatttaatgattagggaatgaacatgctgagttgactgcagaaatcggtgaatcctaaatactagtttggcaaaggtgtatttcagacaggttgaagtattgacaaggcaaatagggcaaggagagaaatcttgcccaactgcggaagctagagggttatataaatggaagctatcctatgaaaagcaaatattaataacaactcaaagagtgagaatgttttgtttccacacagtcctctgaaggtttcagaaaaggaagccagcaaaactggctttgtggtaagacctagtaataaaaaataatgttttgctagaccctgaactaatagactcaggacctttaaatctgcatgttttaaagccttcagcttcttgtaaaaatatgatgaaccacttccttcagttgcctccaagatacccttggtttccttctgatttagaaacaaatgtcatataattggcataattggaaaatgtctgacc

SEQ ID NO: 306446 - DNA, 743 bp, Homo Sapiens
  misc_feature (207)..(252): n is a, c, g, or t
  misc_feature (409)..(618): n is a, c, g, or t
  misc_feature (669)..(669): n is a, c, g, or t
  misc_feature (685)..(685): n is a, c, g, or t
tttggagaactctagaagtgctataaatttgggctatacgtctaataataccaaatatcaagagtttctcccacccatatatttttattgtattttcaaggatgtcactgcttcgattatcctctccttccaggatcattaatctctcccaatctactggtttactcctgtgagtatccaacatggttaaaaagctcccactattgnnnnnnnnnnnnnnnnnnnnnnnnnnnnnnnnnnnnnnnnnnnnnncattccttgattcaataggcttcttcgaatctctttacaatttttctacctccactccagcaaatttgtttgaaagacttttgttcacacattttattacttccttggttttcattcactctaccaactacttcaatgcatcatctgtctccttcannnnnnnnnnnnnnnnnnnnnnnnnnnnnnnnnnnnnnnnnnnnnnnnnnnnnnnnnnnnnnnnnnnnnnnnnnnnnnnnnnnnnnnnnnnnnnnnnnnnnnnnnnnnnnnnnnnnnnnnnnnnnnnnnnnnnnnnnnnnnnnnnnnnnnnnnnnnnnnnnnnnnnnnnnnnnnnnnnnnnnnnnnnnnnnnnnnnnnnnnnnnnnnnnnttttttcgtatcatcaatattgcatatgctttccactatgttcttgaaagngtatattttaaagggntcgcgagcttgaaatggtatcttatttttttaatgcattaaatttaatataattttac

SEQ ID NO: 306447 - DNA, 465 bp, Homo Sapiens
caggtagaggctttggccctcctaaagccagtctcaagcagctctcacactggtttcctggtgatggcggtggggagatgcaggaggcaccagcagggctgagggcctccaccagtttctgagagccgttcagtcttggcctgtttcccgctgtgggtgctggagaatctttgtttaaatagaggcttcctggataaaaagatgtgaaagctcagggtacactaggcttgggatgggtgctgtgaccaaggggacaacttcctttgtgctcgctgatttaaatgctgagtttaggctccagggtctgggctgtgtcacctctccagtcacactctctgcctctcttgtcagcccttggccctgttatccttcttttctcattcccacacctttgcttgctgcctggccacaccctgtgccctcgcctattcacgtacacaacatgtgctgtgaatgtttgagcct

SEQ ID NO: 306448 - DNA, 454 bp, Homo Sapiens
  misc_feature (327)..(327): n is a, c, g, or t
  misc_feature (341)..(341): n is a, c, g, or t
acgtcaagacatttttcgttagaagctgaaatctcagccttaattcactccattgtatttccaaggagcttaaccctatataatattacctggtctctggagacctccttgaagggataccagatacccttaggataactaaagaatgggggaggtggggagagaatggagggggaatgggttccagtcctaattctatatttcctgtgactttttttatggaggcaggggaaaaggagagaagaaagaactctgctgaaaaggagagaagaaagaactctgctgttagctttattacagctttgattttaaaaccatttaagaagnagcattcatggtgncaccctgtgttgtctaggatggaattgcattgactcattcattccttaataccttattgagcttttttttattatgtgctcagtgagggaggaccatatataaaccctgccct

SEQ ID NO: 306449 - DNA, 719 bp, Homo Sapiens
  misc_feature (574)..(574): n is a, c, g, or t
ctttggttaaaatatgggtgtgtggccaaaagctttggatagatttattttgtacgaattttaaaaaacaaaatgttagcatctttgcttatggtagttttgaaagaaaaatatacatatttcctaagctgatattaaaagtggcatttatgtaataattatgggtgacttgtttcagtctttttaaaagacacataaaattgaaatgatagatgtaagatttataaatagtattatgcttactaatatagtaataagccctctttttctgtagtttatccctaatgaaatattttctcaaaattttccctattttaaaaaatttatttttgtgctacaatacaaggtgaaaattagttggtaattaatccagcaataacagttaacagtctcaaattcagttaccacacaaataagaaaggaatacaaaaagaaggaggggatgtacttaaatccaaatgtgagcatggatatcacccagaaagagagagaattcagcatttctcctagtttgtggtctttgaggcataactgataagtgggaaaacagttgttctaatcgcagtggcagtgntcaagggaggaaccattgctggaagtgaccaagtgtactattttcaggtggcaaactcaccaatagggatcatttcccttttctctagttgaattggtgttgctgctaccctgtgctgagcaggggtttggttttactgattgac

SEQ ID NO: 306450 - DNA, 382 bp, Homo Sapiens
gagactgcatagggctcggcgggggggttggggagacagggatgatttggcgatgaagctgtcctacctcagatcatcaggcgtcagattctcaggagaagtgcgcaaggtagatccctcgcatgcgcagttcacgataggtttggcgctcttatgagaatctaagtcacgtcagataagcggactcaggcggtagtactcgcttgcctgccagtcacctcctgctgtgtcgcaggtttcctaacagccaccgaccgctaaggttcgctgcctggggagttggggatcctgctttaaatggtttaaaggttaccttgtcataaggggtgaaagaggggtttgggaagtccctcgggtgaggccgatggtgcccgcatactgc

SEQ ID NO: 306451 - DNA, 202 bp, Homo Sapiens
gtgctttctcctccaaagctccaccagcgtcattcttcagaacttcctgttttgagttgtctgcaaaagtctgcacagctctcagcccattgacgatactctttgtttttccccagtagatctcgttccgcgtacatctggatttatcttccacgtcctctagcaggcggccggtgctcgctacgagcggggagcagtcacc

SEQ ID NO: 306452 - DNA, 238 bp, Homo Sapiens
atcagtcctgagcaatcagcgatcacaggcgcaagtcgctccactgctacttgtggcccctgctcacaaggttacatgagaaactcgcgcctcatcgatctgaatgctagactctgagcgtgtcactgacccttatgggaaatgaactcgccatcagagcatgcatgacggacatatgcctgctccaccaccgagcagctggatccggccgtccgctggcatgtgagacgtgaagcac

SEQ ID NO: 306453 - DNA, 415 bp, Homo Sapiens
gagtgaatttacgtgtttggttttatgcctggcttgttttctctgctcacccctggataattgatgtttgagactgtctttgcttcctgaggttaactcatctacctctggtatccactctgtgcaatgtaggcacaaattctgtggttcgcccttttactaatttggcccaaaaggtgagtttaggcagctgtttttgtcagttttctattgctatcccaaaaatgtagcggtgtaaacaactacattttagtaatatataactctgggttagcaatttattttgtggtcaactgtgtggttttctgctgtctgtgtcagggtcacttatgtaactgcaatgatatggtggatcaactgcacatggatggcctgagatacctcatgtctggaggctgcagctggctgtcaggtg

SEQ ID NO: 306454 - DNA, 142 bp, Homo Sapiens
atatccccaaacacaacatgtcccataaaaataataaatttgtagaattaacaaggaataaatcaaactgaacctatagtgaacagcttccgtacactgacagcagcaaagaagaaaaaatagctctcatacaatagagagc

SEQ ID NO: 306455 - DNA, 103 bp, Homo Sapiens
gtacctagtggcactgggttgtatccagccgctctgtgttctcgtcacggtcatggactcctcgattgtagtcgttggcctaaatggcctggaaaatatcctt

SEQ ID NO: 306456 - DNA, 195 bp, Homo Sapiens
agggcgaagaactaatctctcgatgcctgtcttccatgcaccgtgatgaactgcacacttggaataggaattatgactgttagtctctaagccagtacatagtcgtctagtgcaggcagattttgtttgtgagtgatgaagggtcactgcaaggccacagtcatcactgctgtaactctagtccctgtccgggcg

SEQ ID NO: 306457 - DNA, 411 bp, Homo Sapiens
agcaaaactagtctcttttttattgtgtaaacagataacaagataaaataactatataactcagaactttaaagtttctcatgtttatgctagacatattgtattttcagataatgcatgctttctaaattgtgttatgaaaaatccttaaaactattcaatcaaatcaggccaattatatatcttgttgacaattttcttccaacaataatgtgtatctaaaggacactaaatgtcttatcttggaaagaattcccctcttatttcatctagctaactcttactatcttttaggtctcaaatgttaacttcttccagaggccttccccaaatccagattatatgccctagttatatactcctgataccactttctacttccactaacaaagcatttaaatacactgtatt

SEQ ID NO: 306458 - DNA, 245 bp, Homo Sapiens
ccaggtgcctcggaacatcaaaagctgttgcgtgttggccaatgagagaggtaccttcctctctggcattaagggcgtcaatgcgggccagatactctgtgcctggagtgctgctagttagagtgatagaattcggagattggggcagcggatcttccccgagcctcgcagctgggttcacgatatgattgcgggtcctgtaaccagtgatggtagctcgaggagtagtccagtgtcgcagtaaa

SEQ ID NO: 306459 - DNA, 349 bp, Homo Sapiens
tttttttgccatagccacagtctctttcatgatttccttggttggctctgttgcaaatcccatgaagtcatgcacaacatctggacagagttttctgcagcaggaatttattgtttcgggtttgatagctctcacagttttttctgttacaacagtggcaccttcaatggtgaaatcctttcagattttcctgaccttctctctatcagggttctccttcacagcgttattatcctttccatagaacgccgtgtgtaatgagccttaaaggtccttttgagaccctgatctagaggctgatatgagatgtcttatttgagggcaaatagaccatttcagtcttcagcct

SEQ ID NO: 306460 - DNA, 110 bp, Homo Sapiens
gcgtattgatagagatatatctgtcttacccttggctttaatgagaatgtttccaaagtttcactattaagcatgatgctttctatttgaaaggtagcctttactgtaag

SEQ ID NO: 306461 - DNA, 256 bp, Homo Sapiens
atcgtacaaggctttctgcctgtgggaactgcaaacgcataaggaccagtggcagctgagctcaaaagcaatggagaaaagggggcaggttacaaaggcaccaagcctttttcctatcattcacatccaattcaactatagaggaaacagatgtctatactggaaccagtacacatgtataactgctgttactggtcatttattttaatatttccatctggatttttcagttaaagatgcacccgatatgtttcat

SEQ ID NO: 306462 - DNA, 134 bp, Homo Sapiens
  misc_feature (77)..(77): n is a, c, g, or t
ccagtatagagtattttaaaatatatcatgaaaccatcttattctctgctaagatgattttactaactctataattntgcttctagaaattactaaaatttcctcaattccatctgagcaatcaatactctaaa

SEQ ID NO: 306463 - DNA, 269 bp, Homo Sapiens
cagatatgcttcatcttttattgacttttttacttacacaactaattattaataccatctcctcagataaatggactttggttattttgatagctttcaggacctgaaacgtaaatcgattcacactgtaaatttgaaagatagataattcaacaattttaggccatctaccatgtatccaggttttggtgatgagggagataccaaatcaccatgagaaaacttctgtgtagacaaagtaactttctcatctgaaaaggctagactag

SEQ ID NO: 306464 - DNA, 402 bp, Homo Sapiens
  misc_feature (182)..(190): n is a, c, g, or t
attaaacaacaaagcaatagccctagcagacaacttcaactcgagttatattcgaattcaggacatcaaaaaagtcatcatgttgtaaataggaaattcctttacacgctgcctttgaattctaaggggctgacagatcaagggacgaaggccctggaaggctaaattagtgaacccgctannnnnnnnncctgtgaatgaagctctcttttgtatgtgcatttgcaagcaaagcaggtgcctgcttcacacaagtcgaactgcaactgggatcttggcttcttgtcaagtcagtagcatgcaagccagtttaagtcaaaagaggacacactcctcttacttgattccccttgccatctattttctccctcaatcttagccacttggagaagaatttaatac

SEQ ID NO: 306465 - DNA, 395 bp, Homo Sapiens
tagtttattctttattatcacacagaataacaagaattagagttaaattcacaatatttttaaagaaaacattatgtgaagatgattcatttcaaaccaccagccaatttaacataaaacacttgtcaagctgagtagactgttttcttatgtgaaccacaaaatattttctctgaaatctacacttagtttaaaaacagagatgggattttgcatattagcttgaaaataagtatatgatgatgatattaggtgcccactagcacctagtttttacagctttgcattgtcaccccatcactgccagggacccagccccaggcatacacagatgaaaggacagtttcaccttcttggcaaaaaccttcagaacaattgtcaacatactctcaaat

SEQ ID NO: 306466 - DNA, 456 bp, Homo Sapiens
  misc_feature (442)..(442): n is a, c, g, or t
tttgagacaaggtctcactctgttgcataggctggggtacagtagcacgatcacagttcactgaagcgtcgacctcctgggctcaagcaatcctcccagatcagccttgcaagtagctggcacatgccaacatgcccagataacttcttaatttctgatacagactgggtctcactatgatgcccatgctaagatttcttttttaaatgctagaaatggatgttgaagttaatatccctttcagtatttatggaaaggatcatatgttctttttttaatatggtagtattgaattaacagatttcctcattttgaaccatctttatacttccaatacgaccctctcttgtgcatagtccattattcaaagtgctcgcagacactatatgttaaaattttacactaaaatttaacattaatattcctacatataattctatangcttatgaaagctg

SEQ ID NO: 306467 - DNA, 386 bp, Homo Sapiens
aagttaagcaggatgagactagaaagacaatgctaaatcctgaggtaggactaattctggttcccctgcctacagcagggagcctactagagaacaaggtgctccatgctgcccaccttctttaaagattcacatggctgacctcctattgaggcttgctttactaatgaggtgatacggttgcagtaaccaattctgaaagaaatctacttggtatcacttttaaaaacatcaaatgagtgactcatgagatgaggcaaaggaaactagcttacaacaaccagctctgatgagatgctttctaacagatacagaggtaagatggtctgcaagttaggacccacattggcccgctcacaccagggcagatttgctttcaagaaaag

SEQ ID NO: 306468 - DNA, 297 bp, Homo Sapiens
ctctcctgtggccatcggcaaggagcaaggggaggggcacacagggacaccccaggcgacataaggaggaccccagcaactccactaccaggttggcctcactaccaaccaaggccgtaactagcactgcatccactaatcaggacaacaacactaggacggtacgcaccatacacacccccattacacagaccaggaaactcgactgagcacgcgcgaaacgatgaaaggaagtcggcaacttcagacacaggagaacactccactgactgagctacccggagaggtacaaataat

SEQ ID NO: 306469 - DNA, 150 bp, Homo Sapiens
ttttttcaggttgttttattttccttttccggagacttttgtacatactgttgtcctgagtaacagtatctctaagctgagttactctgatcggagctactgaaaggtacctgctttcagcaaattctggtttggttttattttttaatc

SEQ ID NO: 306470 - DNA, 358 bp, Homo Sapiens
aaaaagaaaatgcatttataggttcatttcttttacatttgctcagctgaagagaaacaacaatgatgcctcaccctacacttttattcatctccgcgagaatatggtagcccccccatcgccttgccactttctttcagtggccgtacaaagtcctccacggcttcaaagaggatctaacttttctgaaaggaaataagtagccttcatcacactcctgagttgggagcttcctggatcactgggcatactggatgcgcattgttccactgcctatcatcgaattgctgatcctggcccccactaaggacccctgccttcacagaatattctaagggtggtccataggagaagttat

SEQ ID NO: 306471 - DNA, 346 bp, Homo Sapiens
tgtatgcaaatgtggttctgcttttttttgcttctcgtgtactcataaactctttgattgcatgacttctaatgcctacacaggattctcggggcggggggagggtgggcacagcttttacactaactccttaatatttggctttatccaaacagacattctaattataatttttcatgattagaagtatcaggaatggttggctttaagtctaccaggtctagctatggggatattcatgtcctaggttgctggggtgagtttgcagtaggtatgtgcccgcagcttatgggtgtccccagcagcccactgagtctcccatcagcaggtagccacacactcctct

SEQ ID NO: 306472 - DNA, 384 bp, Homo Sapiens
ttggtggagaaatttcttctatttattaccagtaagctaactgctgacagtgatgaaaggcaggaaaacaccagacagggcatatcacgcaaaaagcacaaccatctgggatgagtggaggcagagagggaaacgagaaatccacagaacagtgagaaatccagaaggtgtcacagtgcaatcactgatgctcaaaaccggtgaacctgaatcctcaagagttcatttggttcatgttacttaaaaaggtaacaatacagtatgttttagtatacatgtagaacatgacttaaagtagttaaaattatggctgctgctgatttccaaatttttagagtcaagataaataaaccaactatccttttagtttccttccccctaact

SEQ ID NO: 306473 - DNA, 398 bp, Homo Sapiens
ttttgttagacgtaagaaactgcccactgacagaactttttcttgtttctaaatttaaccatttaagttgctaattcttctttccctctttgaggtgaacccagggcagcaagcaacagtgtgatcttctactcaccaaatccagaagtaagaccagggcagtccagtcaaggctgcccaacacctgccatttccatatggttcaccccactgctgaatttcccacatggctggaccagagacatgtatgggcactttggtttggacaaaccacacaccaaagcaaatgcatactgacatacatttaatttgagcatgttctgaatgttgtctgacaccatgaaatactgttcttccagggaggtcaaggaaacggctgtagcaaatgcaaggaaagg

SEQ ID NO: 306474 - DNA, 127 bp, Homo Sapiens
  misc_feature (79)..(79): n is a, c, g, or t
tgctgctatttccaaacgtcgcactggatggcttagagacagcagtgtgatgatgtgagccccgactaccataaccagncgcagaactcgcaccttcaaaaggtggtgccacttgagctctgacagg

SEQ ID NO: 306475 - DNA, 311 bp, Homo Sapiens
gggaacatttttcatttatttcgttgccaaagacatgtcttgctcccattctgtcataggcatttttaaggggaaaacagcccaaccctgaaagacttaaaaggcagataaggcttccctttttatctggccgagggaaattagcctgggtaagagttccaatgagctagcagagcttcggctctctccagaagtcaacaaccagttcagccaaactgaccaacattcctttctcccacctgaaaagtaaaccatcaaatctcacagatgaccggattgcagtgtcattattgaaaaagttgggcctgact

SEQ ID NO: 306476 - DNA, 464 bp, Homo Sapiens
ttttgagacagtctcattcaaccacagtagacctaatatctaacgactgagggcaaagaagggatgtgagatgagcagtcaaatgctttcaggccagagaacaaaatagatgacccaggcccctgcttattcgctctgccctttgcccctggagctttagctgctttgcttagaggacagtctctccctcactgaagatacctaattgcacattagcaataggaaggtttcactggacccaaccagactcattcataacaaatagcgacacattcctttgcaacaaggttctaggatttccaacttcttgccaaggcaattcttaaatagaggaaatggctttcttttcaaattcatcttaatcacaataagttaaaaggttaacaagaatttaaaaccctcagatatgacagctgcctatattatttgtctaagaggaagaaagcttaaagtcaagataactg

SEQ ID NO: 306477 - DNA, 485 bp, Homo Sapiens
tcctagaagttttatagtattgtgttgtatttttaggtctatcattcaattcatgctaatttttctgaaaggtgtaaatctgtgtctagatttatatttctgcatctggatgtcccagtgtttcaccactatttgttgaaaaaataatactttctccactgaattgccttttcttctttgtcaagatcagctgcctatttatatggaccactggtctctttcataaattcaaatagatttttctgtgttccattttgaacatattcactttgagatcaatttagacatcaaaatagtgttatcaggtagagttttgactaattcgtgaagcctggggagagatctcaactacagtgatgaatgcaagagtccttggtaggtaaatttttattttatttgtttagaagagaggtctccctatgctgcccaggctaacctcgaactcctgggctcgagccatcctcccacctcagcctctggagtag

SEQ ID NO: 306478 - DNA, 170 bp, Homo Sapiens
aaaattttaaactaacctaatctgaagaggaggggagactggtctattctctgggtgattaagacatggcattttttttcatgggagggccgtggctgcttggaagggagcacacagactaagacacaagtaggtgtgagattcaagctaccagaacacgcggtgcatcc

SEQ ID NO: 306479 - DNA, 383 bp, Homo Sapiens
  misc_feature (366)..(366): n is a, c, g, or t
taaattcatgtgatatattaagtcaggtctccggtctagacagatgcatgcaaaaatcattttgtccaggtaacctattttataggtgggcacctgaagcccacgagtaacattttgatgctattcttatattattcttctctggccatccaatctaaagtcacaatccagacacttctagcacatcaccatgttctaattgttggcattgcactgatcaccatttgacctatttggtggtctatttatttgattatttcccatgtttctccacttgaatgtcagcctcatagaaggctgggcattttctgtcttctttaccaccatatgtccaacaccgagaacattaccgagtgcacagtagangccgaagttaagtgtct

SEQ ID NO: 306480 - DNA, 429 bp, Homo Sapiens
gcctttgctgccccctgctgaatgctagtagatcagtcttactcaaaagttagcaacaaagatgaaaactttatcaacgtttaaatgtagaaaagaggtcctgctcaccttcacagcccacaaccataaatcacacaacctgtcttctttcattttcagaatctacccttttctgcataaagcacctgaggccaaagaacatatcattccacaacaattacactgtcttctctaaaatctgaccaatattaagaactttttcattattaatttagatattcatacaaagcacacatacatagcaatattatgttttgttcccctcaaatatggaataacctgtacaacctaataactcatcaagtaacagtttttaggagacccgatttatatcaattgcatttattataccaaattatatttaaaatg

SEQ ID NO: 306481 - DNA, 423 bp, Homo Sapiens
ttttgctattgaatcattgagtttcttatatattctgaataataatccattgtcagatgcatagtttgcaacaacccctccatattttactcttcactcggttgattgtttccttatctgtaaagaagttttttagtttgatattatcccatttgtctatttttggttttgtttctgtgcttttgcagtcttattcgaaaaatctttgcctactccaatttcatgaagcatttcccctatattttctactaatagtttcatagttttaagccttgtatttgtcttaatttatttagagttcatttttgtttatagtgaaaaataagtacctagtttcattcttcttcatgtgactatctagtttttccaccaccatttattgggactgttttttctcaatgtgcattcttgccacctttggca

SEQ ID NO: 306482 - DNA, 217 bp, Homo Sapiens
ctgggcatatctttgtcctttattgcccctgctgaaacaatgctcatccttcctgaaagcgtctcctgggggggcctcggccaaggctgactggaaaaggggctggggacccctaccaggctttgccccctgaggcctgggttttcccccggaatccttgaatttggaaatggcaaaaaggaggcaggccggttttttccccaatcctcctaggaaa

SEQ ID NO: 306483 - DNA, 195 bp, Homo Sapiens
aacattttcatctttatgcacttgaacatcagagttaccaaattatcccacatcatcttgcagaagtcacacacagcaagctaacaggcttctaaatagtaaccagagataatatagattacatacaagtcgaaattccaggccaggagacaaataacaactgttattaatgtgcacattgggaactgcatgtta

SEQ ID NO: 306484 - DNA, 298 bp, Homo Sapiens
  misc_feature (134)..(239): n is a, c, g, or t
  misc_feature (245)..(245): n is a, c, g, or t
ccttgagagttctagaaacttgcccgtggttagtaagccacagagatgggattcgaatttgggttgtacttcccagtatgacagtcatcctcaaagtggggtccaagaccagctgggatcttggtagatgtgcnnnnnnnnnnnnnnnnnnnnnnnnnnnnnnnnnnnnnnnnnnnnnnnnnnnnnnnnnnnnnnnnnnnnnnnnnnnnnnnnnnnnnnnnnnnnnnnnnnnnnnnnnntgtgcntgtgtatcgccatgttgcccttacagcaggagaaaagaagttcctttccttcc

SEQ ID NO: 306485 - DNA, 314 bp, Homo Sapiens
  misc_feature (209)..(209): n is a, c, g, or t
  misc_feature (258)..(258): n is a, c, g, or t
aagttggtgcagttatggtcccataggaactgctagacttgggcttttctctggcacagaccaatttatcaaacagcaaagccatggcttttggagccaactgaaactggaatcaaatttaccgacccctggcaaatggaacacccatgtgtcactttgagagcctagtgcactgtttctaaactgtccaaacccacgtgcttatgcangccttgtgttctctgctgggctaagagtggaacatccacctgcacatcncattgaagtggacctttcagcatttgggaacctccttcatattcccaaaaatgact

SEQ ID NO: 306486 - DNA, 261 bp, Homo Sapiens
ttttctttaaaagagacagggtcttgctctgtcaaccaggttagagtgcagtggcacaatcacaactcacagaagctttgaactcctgggttcaaatgatcctcccacttcagcctcaggagtagctgggactccagtcatgcgtcaccacacctggatcttgctagattgcccaggccagccttgaactcttggactcaagcgatcctcctgtctcttagattttcattactaaccttctggactatagtaactcccttg

SEQ ID NO: 306487 - DNA, 374 bp, Homo Sapiens
  misc_feature (288)..(288): n is a, c, g, or t
gcagtgtttgtgaagattttctaacctggtatcacacgggtaacttccttttgtttgcttatcttacatttcatctggaaaattatgtgataggccaagtaacacacagacctttctcctaaagagttaagtagagctatgtatcaacttaccaacacttgattctttggttctaacgttgagaacagactaagtaagtttggagaaaaatgagataagcacaaatgatgaaataggatcacatccctgagtaactttccaggagtagaaaagttctcaatttaatanagggtgagatgccaagttcaagtgtatatactatttttggaggtaggagtgtatcccatagaaagctcattttgagaagcataatg

SEQ ID NO: 306488 - DNA, 157 bp, Homo Sapiens
ccccttcttctaaagctagggatgggtagggtgcatatgtacttatcaagcttcataatttaacccattcggtcagtacaaaatatttgcagttaaatgctgaacagggaggatctaaatttattaccactggatctttggaaacaacggactccta

SEQ ID NO: 306489 - DNA, 752 bp, Homo Sapiens
  misc_feature (492)..(492): n is a, c, g, or t
  misc_feature (524)..(524): n is a, c, g, or t
  misc_feature (549)..(549): n is a, c, g, or t
  misc_feature (576)..(576): n is a, c, g, or t
  misc_feature (628)..(628): n is a, c, g, or t
  misc_feature (677)..(677): n is a, c, g, or t
  misc_feature (725)..(725): n is a, c, g, or t
tttgagactgcatagggtcggcgtggggacgcgaaaggacaggggaacaccggagaactcggtcatccgcttgggagccagggacatgctgagctggaaaacctagccttgggtcagaactgggctcccatcaatgcctggtacatggtaacagaaggtgctcaatagatgtctaccaagttgaatgaaagggcatctcactgtttgagcgtgctttaaaaagccttatggtgtgtcagatggaggacgcattgggagaggctgtggtggagaccctgtgttaacagcctgtcacaacgttgcaggcgatatccaagcccaaaagacatgcttctcctggtgtggtctggggggagtcattcagtgcatggtattccagtataaggcattgggcgtatgcctgcattttctctcactatttcatgttcacttctagttggagacataggtatatataaaatctgggtccttttccatttaaaagaaatggtnaccttggtgttagaaaattggtacatggacanttctcaatttattgaaccatcatantaccccctgggtggaaaggactggctntgggaagaagggaatggggcataatttcacgaaaattcctcaaagccctgantattttgattatggggggggagtttctaggccaggaaaaccttccctcncctttgacccccgccttggccagagggcacatttgcctggggacacangaattctacaaggcaaggccagaattg

SEQ ID NO: 306490 - DNA, 167 bp, Homo Sapiens
tttctcacttacttaggtccattttaataaagggtctaggagtttactacttgaaacggttcatggaacctatcatgtgcatcccataaattacaccgagagtgcagtttcataaatccaatggtctgcttatataaggtattgcaaaaattgttaagattgacttt

SEQ ID NO: 306491 - DNA, 300 bp, Homo Sapiens
ttttaatacaggaatagttttaataaattttttataagtaggtacaaagaattaataaccccttctcgcacctcactttgagcccactgccctgcatgccagctggggctccaacggggcacatcacagtctgcactgaggctatcaggttgaaatgaggctctgggctactctaggggaaaatgaggggaccttaaggatgaatacattcatttattcacatggcaaacttttacccaacacctgtcattaagtaaagtggtgggtcgttaggtcctgtctaaactccaccctataagc

SEQ ID NO: 306492 - DNA, 459 bp, Homo Sapiens
gcctgccccagaaatggctcttttaatagctgcataactcttctgcatcttgtattgattaaaaagtatataaataagaggtctagagtggtgtcctgggatgttccttttgaacccatcacaggcccagtgccccattctgtggctgtgatcccaggtgcctcccatgtcctgagagtcagtggctgtcatgaaaaaactctggggggctgggtaatggacagatctcttagcgggcctccatgagggataaacagagcatctctgcaagtcactcctggtgttttacctgagctgcctagagtcacttgctgtgggttaggttgtagaagacaaagatatgctggtttatctttagatatgcggattcatttgccatcaaatgcctgagtgtgatttctgtgccagcgcggtgctagtcaccaagaatataaaggcaagcaagcttgtgtctctagc

SEQ ID NO: 306493 - DNA, 355 bp, Homo Sapiens
  misc_feature (251)..(251): n is a, c, g, or t
  misc_feature (308)..(308): n is a, c, g, or t
cttttgggattttgtatttttttcctcttaaaagggctcttgaaactgtacaaacttcagaccccacaaaagctgaatctttcccctgaatcactgttaaaaggtgtgttgttagggaggttcatactcaaaatatgctccgaatgtactcaattaaatgctctgttctgaagggcccacctgtgccctttctctcattcctatcaaatatgtaacgaaaacatactaagtgcaaatgggtgtaggcaaancaggtacttaataaattcttgtattatggtgaagaagagagtattttcttatcgagnatggtaaagctgactatggcagccaacgtctttggcaacttccccac

SEQ ID NO: 306494 - DNA, 308 bp, Homo Sapiens
  misc_feature (261)..(261): n is a, c, g, or t
tttatctagcttttgtgtaaaacagggcctgatttttggaggtgagaaatagtctttactaaagcctaccaattattattgaaactttataatccagtcactctgggggtatctgtgtttcctagaggaaaaaggattatgtatacatagcactaaaatattttattaatctcaggacccatataagtctctgctatgagatgtagctaaaattgccccaaaggaagaaattaggaattacacattgatcaggtgatctgnattgtggccatttccccaatttcaacaatgccaagatgcagagcaca

SEQ ID NO: 306495 - DNA, 381 bp, Homo Sapiens
tatgataagggtttttattttgaagaaatttcaaatactcttaatctaaatcctctatgccttctatgttttacgatatccataatattcactatgatgatctgagatactgtagaattgcatttatcaagctacttgactatattcactataatttacttacttcagcaagacaatcaaacaaaagtttgctgcaaaaggtgatactggctgatgcatgaggtagtatctgagctcccttgacattgtaaggtcactgcaaccaagggttcattaccacattgtgaagagtcagcttcaatgtataagctgctgtccagagaaacctaaagaaactaaagaaagcagaccaatcattaattgtatgtgtcgtattagttt

SEQ ID NO: 306496 - DNA, 329 bp, Homo Sapiens
taagggtgaacaacctttatcccacgtatatggcaatatagatataataagcaaatgatataacaagcaaattgcagtggaaaggagtgaagggaaaagatatgtccatatatatttacaccaccagattatggaggaagcatcaccagactgggaagcaacagcctgggctccagagtgggccgccggtccgtgcacagacgaggagaggtctcatggagcttcagtgcggtctgggaccctagctcttttgtaatgaattgtttggcatgaggcccagtcacgagggcccttcgagactgggctcaagggacacaaaaaggtctact

SEQ ID NO: 306497 - DNA, 468 bp, Homo Sapiens
  misc_feature (421)..(421): n is a, c, g, or t
  misc_feature (437)..(437): n is a, c, g, or t
tttaccagttcaaatgggaatttgatgtacagaaatttatattctaacaacatttatttagttcactgtaacaaatcatttgctttggcagattaggcactcagcagaagcaccagccagctcagcctttggagggagaattccatgttgttggacccatacatatcctctgtccctgctgccaagagctctttgttcatcgcccgttgagcagacaccacagcagctgcatagagaggctggctgacagccacagagcatgtaattctgtccatctgattcagggtcttctctgcagtggatgccctttggtgggcattcaggtgagatgcagatatcttcagtctgcccattcggagggattcagccacatatctctttccaagaatttcttgtcaccaatcttccagtcctgttcttntaaggcccctgccatncagctaaaccatcagcgactgtccatgaatc

SEQ ID NO: 306498 - DNA, 118 bp, Homo Sapiens
gtagtagggactactaattaaacctttaatctatggccattcaataccaagaataggacatttaaaagctctttaaatggattaattagaagagaaactattttccagttcatatttg

SEQ ID NO: 306499 - DNA, 676 bp, Homo Sapiens
  misc_feature (124)..(140): n is a, c, g, or t
  misc_feature (359)..(359): n is a, c, g, or t
  misc_feature (374)..(374): n is a, c, g, or t
  misc_feature (406)..(406): n is a, c, g, or t
  misc_feature (454)..(454): n is a, c, g, or t
gaatatgcaatattacaaagcagacaaatcacattaataagagcacacttaaagtttgtaaagttggttttaaaaagaactgagtgtagaaaatctgttttcaaaagtttattgccaaaagcannnnnnnnnnnnnnnnnaaatcatgtgacaaaagaaatgctacaattggtttaagataagatcaattatgggcagcaatgaaattaccttttaatgataattagccccaaacttgattactgtcagcttgaattatctggtcataaggcatacaaagtactgtgttcatctgtctcaaacaagaatgaatggtgggcccgcccaggttagcagtcaaataagatggagggccaggngaggaaggggagcanatgaggcaaagaaggctgaccgtacagacctngagtgctttaagagaagcaaacatcataaaaatttgtatcaagcacanaactcacttttaaaaacagcctgctgattaaacttctcttaaaaatgatgaatctgtatttcttgtcaaaagaatgacgaggatctcaaccccagaaatattctgagcctctccagtgataaactgacccggtcaagctcaggagaatatgaaagcagaacaaggtgaatggagcctgctaagataacctgccctcttgacataatctccaaggggaaattg

SEQ ID NO: 306500 - DNA, 252 bp, Homo Sapiens
gtttaccacatacactttattcaacaaatttcatcagtcataatctttcctcctaaacatcactaatatatatatttaatattccaaagtgtggtaatcactcctgaaaagagtatcaagcaatgaatcagaacaaccaaggtgtccaatgactgacctgagtagacgaagtcccagttttccctacctatataaaagtcatatgataaaatcataaaataataagattcattaaaattaacctgtcccccc

SEQ ID NO: 306501 - DNA, 132 bp, Homo Sapiens
tgctatactgcgtggacgagtgctgcactatcagctggaacgagcttatgtatgtgatcgcatgatgagtagacaccgagccagtgcacgctgagacgcctaagtagagccccacgtgcacgccacatccgg

SEQ ID NO: 306502 - DNA, 374 bp, Homo Sapiens
  misc_feature (145)..(271): n is a, c, g, or t
aaagacagggtcttgctctgtcacccaggctggaggtggcacaatcatgactcactgtaaacttgaattcctgggctcaggcaatccttctgcctcagcctcccaagtggctggactacaggcaaatgccaccatgcctggctannnnnnnnnnnnnnnnnnnnnnnnnnnnnnnnnnnnnnnnnnnnnnnnnnnnnnnnnnnnnnnnnnnnnnnnnnnnnnnnnnnnnnnnnnnnnnnnnnnnnnnnnnnnnnnnnnnnnnnnnnnnnnnctccaatatcttcatattgttgccaacacattagcaaatacttccagcactgcagttattaaaattcagagatagtatgaatcaactagatcacttcttatta

SEQ ID NO: 306503 - DNA, 164 bp, Homo Sapiens
ggtccattcttgaatatcaagttgtgatggtcttttgaattttgtcttgcctgagaaactttcctttgccctactgaccctggcatgaaacaaaggtccttatttggttcacactatatccacaccaaacatctgtgagttcaacagatatgacagaaattatt

SEQ ID NO: 306504 - DNA, 358 bp, Homo Sapiens
  misc_feature (311)..(311): n is a, c, g, or t
ttttcactagacaaaaatctatttttaattgtataaaattatacatataaaatacatagaatgtactaagaagatgagtaaaatctttgacaccagaagtggacagatcaggaaacaatttttctcaagttatttgggatcttactggttggtatttgagaaaaataataaatccaggaggtacgagggcaattcttcccacaactcacaccccttaatccacatgtcccagagaaaggagaaacaggagtgttgatgagtgccagcttataaatgtcaaacagacacacctggtgtgtctaggctgtttntgcctttactccaaccgacgtgtttcatggaatacaacatggggctt

SEQ ID NO: 306505 - DNA, 279 bp, Homo Sapiens
aacagccacaatagtttatttacaattgaactctttataagatatttacaagacaaccaattttacacatcagaaatggtatcaaaagttatgaattacaacacagacaacaatatgaaatgggcataaaacaaagctgaagtagacagacaagcaattttttttaatttattaacactagcttaaactttgttaaagaaaaacaaacaactatgttttaggagaactgcagggccttcagttgaagattgaattcacagtgttgtatcccatgtaggg

SEQ ID NO: 306506 - DNA, 286 bp, Homo Sapiens
  misc_feature (201)..(201): n is a, c, g, or t
atgaaccaccaagcccagcagaaaatattttcaataagtagtaatttgacttatttttaaaagaatatgaatgttactatgttcttcccgatgagactgaatgtaaataaaaataaacacagtatccatgctatgttctctattactaatttttagaactcactttttcctttaagctgaaaggataaagttgatttgcanaatgacaaaagtacgcaaaccattaacacgtgaccaagctcagggactaaacaacacaggtgggcctaaaagtagcagctcttca

SEQ ID NO: 306507 - DNA, 337 bp, Homo Sapiens
attgatgcaagctttattgtacctaacagagggtagggacaggatctctaggactggccacagcttcgttcataggccagctggggttgcaagacaatggtctggacactactgtgtgtggcacgctgtgttccaagttccaccaaataacttaagaagccaaccacctgacttccacccttcctgatcaagggtggcacttggtcctctgactcttcacacaagacttggccatggcctgaagctctgtgatcttgaccctgtacatcatgtccttgacatagtcagtcacggcgtggacgaacgtgtaaccaggctctctcacatgttcctgtgc

SEQ ID NO: 306508 - DNA, 373 bp, Homo Sapiens
tctagataatgataattttttggtgtaagtcttagttttgttttctgattcttttcattttatggcatcaaaaacagaatgttaagagtatatgtgttgggggggcggttattgtctttcaatttttaaatgtcccaagagcacttttagaaagtgtgttatttctttacaggatacagattttagtgggagttactcagattttagatcttctcaacaggatacagtcctttgtcttgtcagtcagagcaccaatattagtagggaagagaatggaaacaaaaggagctgttatcagaagggatctatgggccagaagccctgttactggctcatgtcatacactagcactaagaatataaaagcacaggat

SEQ ID NO: 306509 - DNA, 395 bp, Homo Sapiens
  misc_feature (199)..(306): n is a, c, g, or t
agcacatttaaaatatccccaggcagaaccaggtgattttataaaaccagtctatttctccccaacctcaggggcaggtgggccaggagaaacactttcctggtggaaggcacaggatctgcccaacccaccggctctcagccctgtttgcagggaagctaagaaggacttctggaggcagtctgacgtagtggtgaannnnnnnnnnnnnnnnnnnnnnnnnnnnnnnnnnnnnnnnnnnnnnnnnnnnnnnnnnnnnnnnnnnnnnnnnnnnnnnnnnnnnnnnnnnnnnnnnnnnnnnnnnnntggtaatcgcatcatcttacttattagaaggtgtgttaatacgggacctagtgttataaactgcacctggtacacacctgatcagcgtg

SEQ ID NO: 306510 - DNA, 313 bp, Homo Sapiens
agctttggaatacattcactttattggtatcagactttactcttgtccgtgggactttgcatacattgagcaactaacccgcatttcagttacattcatgtcacactttggtcatgatttagctctttggtaccaggggcaagctttgcttggtcagtagcatagggtgttgctgtgtttattggatggattccatggcccagactgagtaatgtcggggcaaggaacaacaggacaagtgctctagaaattcttgtctgtggggctgacatgacatgtctctgctttccctattaaatgtttcctgggctga

SEQ ID NO: 306511 - DNA, 399 bp, Homo Sapiens
  misc_feature (336)..(336): n is a, c, g, or t
caaatcatcattaagctttctggcaagagctttttctaggcctcctgttacaaggcttagcagagcccatacgggtttcagggtttagaaatagagaaagggaacctcaaatttcctttatgttttgggctgtcaatagcatttaggaaaaacaactcctctcctttctgcttcgtatgttttccttattggtttatttacacagcgctgctccccgacagcaggcagtacatcgtttggtcattgctgcctttccccgccattagtgcaggctgctgagacgacaccccagctgcctcccccgagtggcctgcggcatcggcacatccctttccncaagtggtcccctctttgataatgttcaccaacactcatacatcattcccaatggtccaatga

SEQ ID NO: 306512 - DNA, 261 bp, Homo Sapiens
ataagccacctcatctggccacaagttattaaaatatgtagaaagcacttctgtaacattctaatgtcacttcatgatgacttggggaatccatagaaggatgctcaattcatggctataaaagctgagaaagtaaaagtctgcccagctattcatcaggattagataaaagagacagataaggccagctattaaaattaacaggaaacggtgcttttcctaaatacacactgcaactgaaaaatgtcataacaatctcct

SEQ ID NO: 306513 - DNA, 295 bp, Homo Sapiens
tagcaaaataaatgtcactatatcaagataaagaataacattaggtgtgaactagcataggtgattcatgggaaacgaaatggcaaattcgaaaggaattctgggaaccatcgtactaggttacattgcctttttgcctgtagagaacccatgaggagaggggttctcagccttcccagtggaacccttctcttagttgcactggcattgggggatctcattgctgggcctaggtccaggcagggcagctcctggggcccaagggcgggctcactcaccagctgtcttccagtgt

SEQ ID NO: 306514 - DNA, 318 bp, Homo Sapiens
tgagccaccatgtcccagccatcaatatttgattcaattaatcactctcttagaaatatttaatttactttgacctctgggacacctctttgtcctagattttccacaacctcattagccgtccttctcctctgttctatcatcctcttcttaaatgttggaatgccttgagcaaaatctggaaggtagaagggatagacgccattcttcctgcagcagtgacaagctctttcaggagtgaggttttgcagtagacagtttccttattaggtgtctggtaagtgtgggatggctatttcaccagcagcagttttctga

SEQ ID NO: 306515 - DNA, 534 bp, Homo Sapiens
  misc_feature (457)..(457): n is a, c, g, or t
  misc_feature (485)..(485): n is a, c, g, or t
  misc_feature (501)..(501): n is a, c, g, or t
  misc_feature (505)..(505): n is a, c, g, or t
ctagcgtctaatctttctatcctaccaccagtgacagagtggccatctccttcctccccagacattactacggctgctgagaagtgccttcttcagccctgttgaattacatcttctaacaagcagagcttccctctgacctctgcacataaggctattaatacggatgaaaaataaaatggtaggaggtggggaaaaggaaaggaataggaaagaaaggaagccccaaagcccacaagctggataaccagcctcttggaaagctgaaatgctgccttttttctcctcacttggggcaagtccaggtgtggcaagaacttacccagaacaggccttaaagcactctagcaccaccaagttcagctgcagcagggggtctgagctctacaatgcctctcccatcccacaaactccagcttctcctgggcccaaacttcctacctgagcaaacagatcntccagtgagctggcatcagaggaggggntgcatctggaaatctntttntctcgtagcccattttctgcttctttgga

SEQ ID NO: 306516 - DNA, 397 bp, Homo Sapiens
gctttccaccacctcacacaggttcagtcagcattttaaatttaggaagctgacgtagattcagggctactacaagatacaatgctctttcatgtatatgagcacactaatacacccttttattttttagtgaataaaaggaaattgcttacttcctgttatggtttacactgaaatcagcttcaataggtattaaagtaatataccacgagtttgaacaatgaagatacaaacactgaagttaggctgatattcctacgtttaatataattgatgtatattaaacatgaaattctaatatacattagcccataatgctactttccacatgcattatcatttccacctgggaatctcagagatgttgtaattactcatacatagtcccataaaaatg

SEQ ID NO: 306517 - DNA, 430 bp, Homo Sapiens
ccacattcctggtatctttaaacattaaacgccaatgaatgccttttctgacccatggatgtgaaaggatccatctgtgtataaactggagggggatgtcacgacatatacttgcgttcatgttgtgccggccccattcaacctaaacctggcacttatatgatctttgtgaagagccccttaccagcctatgataaccactgtaacacctgcactgagaggactaaccttattggcatgaggcttaagagaaggcccacctgtatgccgagatctcaagaaaattaacacaacagatactctatgctgtgtatatacctctttcacatgtgtatggactgaaaactactgatcctgttaacataagacaagtatatgccccatgcctgtggaaggccgtaatgcaatacatatgagctcagtgactcca

SEQ ID NO: 306518 - DNA, 439 bp, Homo Sapiens
ctatatggccaggttataaattttccaaatttttattctctgcttcccttttaaatataacttggaattttaagtcatttctttgctcctgtatctgacttaggttgctggaagcagccaggctatgtcttaaatgctttcctgcttagaaatttcttctgccagataccctaagtctaaacttccacaaatccctagggtgtgacaaaatacagccaaattctttgctaaggcataataagggtgatctttgctctagtttccaataagttcctcatttgcatcttgagacctcctcagcctggacttcactgtccatatcaccatcagaattttcgtcacaatcatttaaccagtctctacgaagttccaaactccctcatcctcttgttcttcttcggagccctccaaatttttccaacctctgcctgttatgcag

SEQ ID NO: 306519 - DNA, 119 bp, Homo Sapiens
gtttaagactagccaagtgcagtggttgagaagtggagcacaaggagaacaaggagtttggtctgtaactggcagtgaacaatcaagataacttactatctctgtattaccctaaaaag

SEQ ID NO: 306520 - DNA, 438 bp, Homo Sapiens
ttaacttggcgaatcttcaaactttagctactttcttaataaaatacaacaaaatttttggcattccagccacggaaaaacagatctctacctctgaggtggcagtaatccaagcagttactaggatctacgaaacatgaggcataattagaatgttggggaaaaaatctacagaaatatctatatcttcgtcatgaacctgactgttgagtttatgaaaaagtggaaaaggaacctcactcgttccttccctggtaccttcacagcgtctcccgtcccagtctgcctagttgaatctagggacacttaaaggtaaatcctagcctcttggctgtctttccgtctcccaggattctgctaggccgcacagttggcaagcttaaaactccaaagattccgcactctccgtctttcaacagtcatgtcacagagacacga

SEQ ID NO: 306521 - DNA, 323 bp, Homo Sapiens
aaggaggggccttggcttttttaataaccatttccctttaccggggttaacataaattaataataatttccttaagtggaaccaaaccataaccaaaaaaatttttccttcccaccttattaaagccaaattttcatgaagggccccatcctacctgggtttaaccaaaaacgggcacccttaaccctttgcccacaagaaccaggcaaaccgggggtttttaacccggcttctggttggcaccagccaaccttgttggcaccaggaacggaaggttccaggttgaccagtcctgggttctgacttctgccgggcgcagtgac

SEQ ID NO: 306522 - DNA, 432 bp, Homo Sapiens
  misc_feature (138)..(244): n is a, c, g, or t
tttggagacagtgtttcactttttcacacaggcagtggtacaatcatggctcactgcagccttgacctggcagggttcagatgatcctcccaccccagcctttcaagtagctgggacgataggaatgcgtcaccacannnnnnnnnnnnnnnnnnnnnnnnnnnnnnnnnnnnnnnnnnnnnnnnnnnnnnnnnnnnnnnnnnnnnnnnnnnnnnnnnnnnnnnnnnnnnnnnnnnnnnnnnnngtgtgagccacagtcccctacctagaatttttaaataatgaaataacccagctttcagcccgcatagcttaggaaagtatatcagagttatcacttggcttctcacatgttaaagctccattttattgatttatgcattaaaacagatttctccttcatggcttggtagtgaaatgaataactaggcc

SEQ ID NO: 306523 - DNA, 452 bp, Homo Sapiens
taagatataacacccaaaggtcctgtctgcagagacctttgcagataacacacgtccttatgcctacaaaggttcgttgaaggaaaagcttgtgaatcactttccacacaagggggtgtaaggcaggctaataatttggccttctggcaaaatgacatcatataagtatctgcatactctctatctagaggcaaggcagggcactggtggggagggcagaaagaagccctctggtgtcagggccctgctgatacaccccttaaagcttggcacttagacagcctgcctctccaagctctactgacccccacagtacaggcttcgttgactaaggaaggatgccatggctacaaatgacaaatgacgaatggaataaaagcagcagatgcccccatccccaccctattatggcctttgtttataatctctggcttccactgaatatcacatat

SEQ ID NO: 306524 - DNA, 329 bp, Homo Sapiens
cctctactcctggtctctctccctagcctcgcgtccacatttctgatagttccttgccatccgcatgtggaaaccccacagcactagcttcgtcccaggcatgatcatcccggtccttcgatcatgctctttctaccctctatccactcagccaccagtgtttgcaggttcacactccctgtcctgtggctgcaacaggggcccttctcaccatctccctggactactgaaacagcccagtcaaggctcttcctgaagccagtctctgccttccaacaacctgtggtcatctgcaccaggcatttcctgaggggaagatgtggatctgc

SEQ ID NO: 306525 - DNA, 394 bp, Homo Sapiens
tttgctttgaaattattcattcaggaatacggaacacaataacatgaacagagataatgctaggacgatggggaagaggttgtgggaagaagatagggaactggtgttctcagtttctattttctgagccaaaaagtgtcgggaaactaaaagagacagtctctggggctgcagttaaccaaagtgagggggcatctgagatttagttgttgttggaagacaatgggaatgagagcaagaaggagcctcttaaacacaaacacgtcctgtgttcaccagaattaggactctctcttccctttagtggaggtggctgtatgcaccagactggaatcttcaacactaattgctgagaaggaccaagcttagacctgtggacctgccatgaccacct

SEQ ID NO: 306526 - DNA, 178 bp, Homo Sapiens
atcctctgctctccagttcggatgtcgagacatctgactcttcatcattgtaagatattgcagccatgtgccatatgtgcatgatgttatgctcagacactgagcaaatgaccctatgctcatttgcgtatcagctattatctgaaatcttagcatcgtgttctccatgcatatacat

SEQ ID NO: 306527 - DNA, 439 bp, Homo Sapiens
ctttttgatcattactagtggggcaaatgaagcaaggtagggtggggtgatggaaggggagaattgcataaaatcagtgttaggatgatctgccccagaaggcatgtattcctcttagacgctcagctgtggcataaaacattccatgtggactttgaattagaatgagcgtgggggcggggacaaagatcaacctgaaagccaaacggagtcattgaccgatggtgttaagcttgagaaagtttgcagatggccagctctcctactgacatcccacagaaagccaggcttgatctattgtggttaggtggagtttctcctgccagggaaaatacagttgctaggagaatgggctttggatgttataactctgaagaagtttcatgactcttgctactagaggtaaccatattgcctccttgagaaactggtgacactg

SEQ ID NO: 306528 - DNA, 277 bp, Homo Sapiens
agccttaaacaaagaattttaaactctcgctactcaacatgtggcatggggccagcagcacaggcaccggctagggctggtgggagatgcaccacccaggaccgtggggcacaggcaccggacggggatgtacatgctcactgaagtctcacaaagcccctgtgaagtagtttttattgccatctctccgttttacaggtgaggcagttgaggcttggccagttgaggtgccccaggtcccaccacaggaagggtggagccaggcctcacacccata

SEQ ID NO: 306529 - DNA, 439 bp, Homo Sapiens
ggcattgttctccatctatgttgatcactattatcttttttagagcaaaatcaaatttctctgtcaacatacataacatacaagatcaattgtatctttattattgtttgttgctataaatttattcataccaggaaaaatgtcatatttaaaattctcaaaatagttttggcacaggtcaaatctcattttgttaagtccctgaactcttttaattgatttatttttttcatcagcctcttccccagtcaccctagccccctcgctccagaatgctttgctgcccgccctgatgccacagccacttttactcctactcatgttaattctagataaacatttaatgttacagcctttctagccaattgtgctctgcagaaaccatgcagcttttctgcatgaagacttagcatccctaccccaaagaggactccataca

SEQ ID NO: 306530 - DNA, 437 bp, Homo Sapiens
ctttatataaattattcatcagaaaattaaaagggaaaaaaggctaggggtaacaacaaaaatacccttttagatgaatataaaataatccttagagaaccatcgtctccttatccttggcaagcatcccctcagggagagctgctgttctctttccacccctctgatgtcagccccagttcctgggagcccagatccacagcgttgtcagcctaagagagaggttctctagaagaatagatgttagcttgagaacagaacattacaaggagagtacacacgccatagtaaaccatatgcctattcagggaggtcaaggaagacaaaggtctttaaaggaaaagcgagcaggatcacagtggttttgagataattctccttggctacaaacatcaataacaaaggtcattccagtctgaggttggacaggcaattgc

SEQ ID NO: 306531 - DNA, 202 bp, Homo Sapiens
gaatcccatcataatactgagactaaaggagaaaactaactttatagtctaaatgtgagttatctgtccttgactgggcgtaggatagtgaactagggatgtattttcccattttttgaatatagttaaaacatgtaaaatgatttattgtcatggtattttactagtgacataggggaatgaatttaaatattgtttctag

SEQ ID NO: 306532 - DNA, 466 bp, Homo Sapiens
aacttttatcataagttcagggggtattagtgcagatttgttatgtaggtaaacttgtgtcatatgggtttgttgtacagattatttcatcacccaggtattaagccttctacccattagttactttttctgatcctctctctcctctcgccctccaccctccaaaagcccccagatgaacatttttatagaagtaacgggaaatacagtgggaatccttgagttgtattttctagggtcagtcttaagctccacaggatgaggggaggatatttcttgcacccacagcccactcccaccacaccctgggcccctcatgattaacattcagcaagatcacatcctaggaatgcagcaatcagtgtctaaaagaaaacgtggctgggagatgtgctgctctacctttatgctataaaatctgtacatttaacatggtcagaaatgaattctcactcacattttactg

SEQ ID NO: 306533 - DNA, 420 bp, Homo Sapiens
caagtgaagtcagaatttaggagttacatatgagatatgatccaaaaatatttgagccaacactaaaaaggcaaaatctgaggctgctaatcaaggcaccaggcaggtctcctttaatctgcaacattcaataaccttggtaagacttgcaactgatcccaactccaagtacttatcatctcttccacaaccagagtccaagacaatagcatttccaacctggttggctaaatggcttcctggcttcctagaacctctattcccttacaatccattatctatagagcagccagagggcagctttaaaatgcccatcagatcacattacttccctgacaacccttcaactggcttcctactctggcccacaaactatatgcagtcaggtgcccggtggtctcccctgcctctttgtgtccc

SEQ ID NO: 306534 - DNA, 410 bp, Homo Sapiens
ttaatatatttaccgagttttattaaaaacaaatatatcattaagtgagactgtagtcttaaaaacacacaaaggcctaatctctatcaggatgcaggcatgtaaactgttctagaatagtatttataatcacactttcttaggttgggagaactgttttcaaaactcctgctagttaatgacctaactttcccccacaaagtttttggctctcagcctgagactatcttaaggatataagcagaggcctgaaaaccctatggccatggagatttggctgcagaaagccaaagccaaaggaggcatagacctgttccctgggacacaaacatgttccaaagtcaaatcaatgttgtgagcaatataacatgtatgacggcaaccatagtcaatatttcaatagttgtgca

SEQ ID NO: 306535 - DNA, 158 bp, Homo Sapiens
tttcatcaagttaaatcaaatctattttttcatactagacccagagggtatgtaaaatttaatttgggctccctgaaatttaaagaaaaatccaatgggtatgcaatgacacttcgaggggaaaatatcacacaaactaggatatttttctttgtgac

SEQ ID NO: 306536 - DNA, 361 bp, Homo Sapiens
tttttttgggaagttggatttcgctttattcaggttctacttcctctgttttaggaacatgccatcttccagcaaacaattatgtgccaggtttgtagaagtctggagaggaaacacatgcactgtgccagctctcgggggcccttctcatgggagttgtgaacatccaaacacgaagctggaggacaaagtgtagggtacacagatctgagcatgtacctggggcgcaaaggaggaaccaccagctcagtgcacagggaggccagggagggcttctagcagaggtcacaaccaagctgaacctgctccatcagaggcactgttgagtgcaggcccagaggccccactggttttatgccag

SEQ ID NO: 306537 - DNA, 413 bp, Homo Sapiens
ttaatttagacttcctacgtgtaactaaaatctctaaaacaaggtggcttattttacatatctgaagaaagtgaggcatgcaattttcccttcctcatagtccgacctaagagtgtgtggcaaactttgtagaattctaagtttccttcaagaacttttcatcttatttccatccacaaattaaaagggatggaattactcaatgtagccatagctaggaatacagtttagtgaagaacaggaagggagagagacagaaggactcctacagtttttctttacaatctaaatatgttaaatgcatgatggaagcaatggagccaggtcaaaatggcacttgctgtgttgtgaaaaatcctgactatgagaatcttctgtagtagaaaggcaggtcattctatcacaccaactgg

SEQ ID NO: 306538 - DNA, 330 bp, Homo Sapiens
gtagagacagggactcactatgttgtccagcctgttctcacactcttgggctcaagtgaacctcccagctcaggcttccaaagttctgggatcacaggtgtgagccacctcgccaggccaataaaacattaccactgaccttacagaaataaatatggtaagatatactactaacaaatgtatgctaacaaattagataacccaggtaaaatgaacatttcctagaaaagcataaaccaccaaaactgactcaagaagaaacagaaaatctgaagacctgtaccaagtaaaaagaatgacttgtaatcaagaacttcccacaaaggaaag

SEQ ID NO: 306539 - DNA, 304 bp, Homo Sapiens
  misc_feature (112)..(150): n is a, c, g, or t
tttaagcaattgttcaaataaaaaaatggtagagctcttgctatatttctagatgaaaactgcattgacttaacaaaataaaaataaatgttcctgtctgagttttggagannnnnnnnnnnnnnnnnnnnnnnnnnnnnnnnnnnnnnnatcttattctcttagctttggaatgctgatgccctgctcaccctggccaagcaagaggttgcgccacaggtccacatgtggatcccagaggaagtcagaatgcatgtaggcaggtgccaggaaattcaaaggcagatcgatgtacaaaggcctt

SEQ ID NO: 306540 - DNA, 380 bp, Homo Sapiens
tgcttggcgggcatgcatatgcagataaacaaatttgttccccatattttgtgtggtctgctagggaaaggagcctactgatataatctacctggcctctcctgcaatgtgcacccttccagaaagccactttcctgggcagatagaaaaaatatatccttccgtcaatgttttcaatcgaaatctgttttgagtgatggatccttgagttgccaatctctgtaagctcctgttggacaatatcttccactgctcacaaaacaggggactgatgctgaggtagctactgtttataactgaaggtgattagctttttgtcacggcacaaaacgcacccaggtgacatagcctgctgtgtccctttgagttacacctaggac

SEQ ID NO: 306541 - DNA, 379 bp, Homo Sapiens
aaaagtgatgattttcttcaggatgaaatccccctgataaacatgaagattgaatttccaggctaacccataaaagcccatccctctgatctgaatttgagtatgaataatggcccagaacagagttcccatcaaagaggccagcaaaagctttcactgttggggagagccttatgcagaattaccgagtaaaaattgtctctcttcggcaaccccaagactccgtaaatgccatttcatcttcttctcgaagggaaccgctcactaaaccactgataaaagggcaagtacctctgctacagatccactagcttaaaagtgagagctagggagaggagagttccagagaggacagcaataagatatgttgaatgggcag

SEQ ID NO: 306542 - DNA, 466 bp, Homo Sapiens
  misc_feature (350)..(350): n is a, c, g, or t
ttttatttaaccatgtgtaatgtaacccgtaagaatggaaccaggttcgtctgaatccattgtgtcattaatgtccctttgagaatcaattccattacactggccttcacacattccacaggacatttcctatgtcggagttttctaaactatgaaattgttattcattactctgtgagttttggagaatcaagacatggaagagacatcccatcagtctgtgcatacctatgcatcgtgacattaaattgtcaccgggtatgtacccaaaccattaaatgggaccttgcctcagagatcataaaggctacacccttttgtaagtaaagcaaggaaggtctgggaaggtntgaagtgacttaaaacccatccaagtcactagtggcaaaatcaggaccgaaatccggcaccataaaggccggctccatgcttgcttccgcatcactgctgtctcatagcacaattc

SEQ ID NO: 306543 - DNA, 112 bp, Homo Sapiens
ggagtgatacactctcctgggctgagtcctgtgcgatcatgaatcagtatctatccatgcattgcctgctgtcgtggcagcctgcgcatagctgccatacctctggcctcag

SEQ ID NO: 306544 - DNA, 341 bp, Homo Sapiens
tctttggtcagaaataacaagagctacaattttaatagaatgaacggaggaaattaaatgttacatttcaaagcaaaacactaaggaatgctttacatttcttacgtttttgcaattagagaaatatagtgggagctgttcacaaaaagagaaacatgtacgctcttagaaatgacaagaacttaaagtcatgctgaaaaggggctttcgggcccttccccctggcagggccatcctcagccacaccctcgccaagggtctgaccacggctctcaaaaggcaactgggactcctggttaagggattccagaacatcaagcagtcctagtatgaaactcacc

SEQ ID NO: 306545 - DNA, 453 bp, Homo Sapiens
tttttatatgaaaagaggttttattggctcatggttctgcagactgtgcaggaagcacagtgccagcatctgcttctggggaggcctcaggaagcttttactcatggcagaagacgaagaaagagcaggtgcttcacatggcaaaagcaggagcgagggagagtagggggactgtcacacacttttaaatgaccacatcttgtgagaactcattattgccaagcagcaccaaggtgtgaaagctgcatccccatgacccaaatgcctcccaccagacccccacctccagcatcgggtattacaattcaacatgagatttgggtggggacaaatatacaaactatatcagtgtgaagctttatttctgagttctctattctgttccattggtctgtgtgtctgttttgtatcagaccatgatggtttgttactgtgacttactgtagttgaagt

SEQ ID NO: 306546 - DNA, 409 bp, Homo Sapiens
gaaataagaaaatattttactttcccgttccactaacagggcaagttaacattgctatctaagacgatcacagaggccaggcgagaaggggacaaccttgcacctgagccctgggtgatgacgcacacagagttcatggtgacaagtccgtctgtctgtgaattcgttcagatctgacagcgtcaggcgtgtcatggacaggacagccccaaccccgtgagaatcatttcctcttgggccttggggaaacaatcctttcaagaagcagcttcttgaagcttggaaaacatctaatcagtgcggcagtatggcagcaagacttcttgaacagggggcccccagagctttctgacaatacattccggagatgcacctgagaacccctttgaaagacagcacaatttgacat

SEQ ID NO: 306547 - DNA, 390 bp, Homo Sapiens
caatacctggtcatgttatttatgtcactagtccaatggattgttcattatcctcttcacaggaatcccattttattttggaaatgtttgtgtgaaaaacatggaaacttgtggaaaccccctcttgatctcccctggacaggattcaaacaccgattgagggaagggctgagtgactggctttagaggatgctggtgtgtgcgcactgggaagctgggaaaattgtcctcaggaagtagcatcacctcaccttgtatgagaggagggggtccgaacacccatccactctgtatgatacggaagggacaggataccttacctgggcctcgcctaccttaagtgcgcatgctgtggcacaggcccactgcatcagtgaccttcgtttatgg

SEQ ID NO: 306548 - DNA, 479 bp, Homo Sapiens
ttattggaaaccaagcgaactttgatgctaaagatgcaggctccataagaagatttgcttgaatacagtttcggggatttatactcactgccaccatgccaaggcctagctgggatggcctgtgtgggccttggctctcatgcctgccatcttcaatgaggggataagggaaggagatatccttaggctcatgccttttatttttaaatatgcagagctgatttggtactatatgcatgagggtcccttgcacatgagggcttacatgtcctatggtgcgggtgccggcctgaaggagatccatctactgagcctttcttgctctacacccgtgggtttgttcctatggctgaccaccagataccagggaatgtgacagagatgacatagtctgccttttggttagaaagatgagcgcatacacaccacacaattgctgaaccagccggcacgcttcagggtctttgtgtgctgaccgg

SEQ ID NO: 306549 - DNA, 124 bp, Homo Sapiens
tcgcaatttggggaggagcacctttctttcttcttttagaagcactgcatccctctccatttaaatgaccgcatcttgcgctctgacgaccacctataacataaacacgagaactgtgactcgt

SEQ ID NO: 306550 - DNA, 398 bp, Homo Sapiens
tcaagactcgtggatcagagataatatttctctaattgtgcctttcatctgtattgtaattattcgaccttcagatttagggcagagtcaatatctcataaatcactgaattcctaatatttgtccagtgcctcaaacatagcagatactcaatatatctgtgctcagttgaattcaattctaaatgttctttcagtgaacactggaccctcaatggtttcccattaccgttagaataaagtccaaactctgccacaggcagccgggccctgcaggatccactggcctctttctgctcagctcctaccacagcagctctgtgcttttccttgaacctgccaagcctgtccccactggagagtctttgcattcattgttccttctgccaggaaagctct

SEQ ID NO: 306551 - DNA, 308 bp, Homo Sapiens
tgagccaccatgcccggccgtgttttcagtcctcttaaatgtatacctgggagtggaaatggtaggttatttggtaactctatgtttcactttgcgaggatctgtcaaaccatttcccaaaatgcctgtgccattttacattcccatagcattgtatgaaggttacaatttctctatatccttatcaacacttgttaatgtttgtcaacttattagtctcagcgatccagcttctggatttgttgatcatgtctgctgcatttttactttctacagtatcaactttgcccttattttaatatttctat

SEQ ID NO: 306552 - DNA, 317 bp, Homo Sapiens
  misc_feature (58)..(87): n is a, c, g, or t
caaagggggatatatgccaaagagcatacaactcaaaccggtagagtcaggatataannnnnnnnnnnnnnnnnnnnnnnnnnnnnncagattgaccgctgagaggtacaaacacatccaagtactggtaagatttctgttaccctcttggatagtagcttgtctggctgatttctccacccagggaagacaagcccaaggaccgggaagtgctgtggtagaagggtatgttattccgtgtaatccatgtaactcttcagcctgctctcagttagactggatgaaaagaggtgtgtcatcttcaagaagagaagagg

SEQ ID NO: 306553 - DNA, 464 bp, Homo Sapiens
cataaagacaatttgtagtactttcaagtgtgccaaaaactgggctaggaggtaaacaatataagatgattattatctctaaaatacaaaaaggatatgtaatgggcatgcaattggtcagtaaatacctagaagcttctcatgcatgcataataaattgcttcccttaagttaaacaatcctcttgtcgtatcaattataccattcacctaattaacagaatctttcctaaactgtgcaaaggcaaacttccctgaagaccttgcaaatgatcccagtgcccaattgctggaatggcactaataagatttgactctactgacaaattaaaattttaatcagggccacatgaaaatctcaagagcaggaaaagtaaagcaaattgagaggtttacattataggttttgagatacttttccatacaagcaacatagaacagagaaattaacaggccaaggaaatg

SEQ ID NO: 306554 - DNA, 430 bp, Homo Sapiens
tccataaaaagaaagccattctgaaaagtaaaaactgaaccaagggtatactggaaccagtgacccctggactaaagtctctttctatgtaggcgaggaagcctctctaacacccaataagagaaatgccaaaagactctcagccttgttttagatgccacatttcctcctgccaccaatatagacagcatctcctatatgcaaatgcctttcgtccctccgcttcaatactgatgttcatgtttggtggtggaggctggaggggtgacagggcacaggggcaggagggtacctggagatcgtctgtgaattttgagttaaatacataacatttgaggaaggtagttcttaagccagagatcagaatcaactagtatattccccaaagctactacatagctcattgagctaagagcactatgactttctt

SEQ ID NO: 306555 - DNA, 472 bp, Homo Sapiens
  misc_feature (220)..(271): n is a, c, g, or t
  misc_feature (291)..(300): n is a, c, g, or t
  misc_feature (302)..(399): n is a, c, g, or t
gagatggggcttgctctgtcacacatgctggagagcagtggcgtggtcatacttactacagtctcaaactgccaggctcgagcaatcctcccacctaagtctcgcgagtagctggcactgcaggtgcacaccataatgcccggctaattttttaaatttttatagagatggggggtctgacaatgttgcccaggttggtctcaaacttctgtgttcaagnnnnnnnnnnnnnnnnnnnnnnnnnnnnnnnnnnnnnnnnnnnnnnnnnnnntgtacccggccccaaataannnnnnnnnnannnnnnnnnnnnnnnnnnnnnnnnnnnnnnnnnnnnnnnnnnnnnnnnnnnnnnnnnnnnnnnnnnnnnnnnnnnnnnnnnnnnnnnnnnnnnnnnnngtgtgagccaccatgcccagccatggaatgagtttcaattaagtaatctggaagatccaaagggagaaacagc

SEQ ID NO: 306556 - DNA, 232 bp, Homo Sapiens
tacaaatttagtgactgtaattgcctggatttccctgtcccgaacttacatattggcaaagcccagtccccttccttatattgagacttccacccactaccttgtaccattttctacttaggactcatgatgatagccactatctacatgtgcaatcagcacctggtgggctctatatgggctctggcgacccatcttctcgtagatcttcaagaagacacataactgcaca

SEQ ID NO: 306557 - DNA, 349 bp, Homo Sapiens
gctttcagccttgaaacatactttgaaactctttgtttccctttcctaccaggtacttccatgaacaatgctcacttatctaattatgtgcttgcttacaaattccaggggccaattttgaaacaaatcaggcagagagagccagttgcagaatcctcccacctaaggggagttctgaacagttggctcaccactattaggcagaaatcaggatgaaaaaaccagaactccagacaggtgattactcaagacagccatgggaacaagatttgaaggcctatcccctcctgcaccactatcacatatttcccatatctttgccttcttaaaacccttcactcaggccggg

SEQ ID NO: 306558 - DNA, 469 bp, Homo Sapiens
agggcttatagactgatcatttgttttccacactcattgtgaagtctaacgagaaaatttcatcaacaaatttgaactcttgaagggaaagtctttgcagaattctaaggcgttttaattagcatgcagttaaatctcattaatttggattccacaaacacaaaatttgttataatttgctcagaaaccacaatccagttggagtttgtgatacgaagaaaggccttttaaagtaaattaatgagataaataaaactgctcaggaaatatttaactattgtgagtacagtattcagttttggaggtgaaaaacttgaaggccgttcaattgaagtgatttgctcatggaggcatccatagtaaagaaaattagcacttagcagtgtagcttctatcttcccatccagaactctctttatcctattgagtattactaataacatctctattagtcagatgtacatcttat

SEQ ID NO: 306559 - DNA, 363 bp, Homo Sapiens
  misc_feature (189)..(261): n is a, c, g, or t
agtgggtctgtgattcattcatccatccattttgtcaaccatttgttaggtcatttgtcaaccagccagccagcccagtggctggtcagctcacagcatattctggtccttgtactgcttccagcccagtaaactcaaccaaagagaaagagaacagaagaatgagaataaacatactccaactgcccnnnnnnnnnnnnnnnnnnnnnnnnnnnnnnnnnnnnnnnnnnnnnnnnnnnnnnnnnnnnnnnnnnnnnnnnngtgtcacacacaaagtgtcagtacatccaaaaccaaccgaaagtgtcagaagccatgataaggattatcctatgcaggggatcagggaaacggtaagtagtg

SEQ ID NO: 306560 - DNA, 391 bp, Homo Sapiens
ttttaaagaatctaattagctcaatttacagtatgatttcttggacccaggaacagttctatatctcccacgatacataaatgaagctaaaattaaactcaagccgctcgtgtttgtttcattgtaatgaagagcacgttgttttcaagtggacactccattcccagtctgctaactgagagcagcccacggagagctggctcaggacaaaggaatgaagcccacctggttctctgggcgactccctgtgacccctctcagtgctgctggaatgcaggggagatgctggattgttaattcaggtctgaagacatagaactgaaatactgtgggaccctgagtaggaacttgcctctcacgcatgtcctaaaaccaaagacattcagaattc

SEQ ID NO: 306561 - DNA, 177 bp, Homo Sapiens
aatctgacctaatctatacaacatagacccactatcttccactattaatggtcgatcgtacatacacaggaagggtctatactattgactcgccagacaactctctttgtgctatccatggattgggacctcacgtacgactcgctagttcctgactgtgagttacaatgactcttg

SEQ ID NO: 306562 - DNA, 170 bp, Homo Sapiens
aataatagcgaaaaggccattcaataaaatagttctgtgactttgaagttactttacctttcagggtcttcctgttaaaaataaaaagactagactaatattccctcactaaagttctcagtaattaacgggggaaaaataaaagcataaaggcttttctcattgtgact

SEQ ID NO: 306563 - DNA, 378 bp, Homo Sapiens
  misc_feature (102)..(102): n is a, c, g, or t
  misc_feature (113)..(113): n is a, c, g, or t
  misc_feature (135)..(136): n is a, c, g, or t
  misc_feature (218)..(218): n is a, c, g, or t
  misc_feature (341)..(341): n is a, c, g, or t
aaacagagaaagaatcatggtatgggaaatgactgctgaggccgggcttcacgggagcctctccagtgtgggaggtgacaggtctgcaggcttcttgctgcntggctcctggntcctctccaaggagtcacagannagaagggtggtggggtggagcagctagctgctgggaggggatctggagcaccatgctgccactgccggggctgagggcctgnagcagcagaggaaagtccaactaagagggcccataacgcaggcacctcggcacatctctctgtcctctgtgtgggcctgcagagcccaagcccggggaggtgtcatcacagggctcccaagtnaaaggaggattctcagtcttccctggtggacaggtgg

SEQ ID NO: 306564 - DNA, 238 bp, Homo Sapiens
gtataagaatcctaaggttcagagaagttacgtaaatatcctttggtcacacagctagtagggactaagctggaattcaaattggagcagtaggacacagagcctgtgctcctcaccatgccttgccaggccaagattcatgtgcttttcatggcatgaaatcagtgttgggggaattctgcccagcatctctggttagcagagtgaattgcttttatcatttgccaacatgtcacag

SEQ ID NO: 306565 - DNA, 310 bp, Homo Sapiens
aacattcaaatatccatctttttcaaagttcctttagaagatgaaattaagccaacaagcacctatgaagtataagggactgttctaggcactaaaagtatatataaagcttaacagtctctgcattcaaggaatttctaagcacacggtggacagcataaacagcccaataaatccatgtactgggcagcctggattgagccacgacagagttctggggagcagaagggaagacttcagggaacaggcactagaaggcggtagagatggatttttgatgagtggaagacaatggggaagctcattatgc

SEQ ID NO: 306566 - DNA, 139 bp, Homo Sapiens
aataaataaaattttgttgccattaataattcacatagtgcttaaaacattatagaacaagcactgataaaacttgcccatcaggaaaacagcaagtatgtaaaatgttacttttcttctcaaaagcataccactccag

SEQ ID NO: 306567 - DNA, 295 bp, Homo Sapiens
  misc_feature (51)..(51): n is a, c, g, or t
  misc_feature (129)..(189): n is a, c, g, or t
ccatgggggaggcccctgtaatgagggagccgtgggggtggggaggttgtnatctggggagcggacccccgcggccccgtggggcctcaccccgcccgggacctggaataaagggccccacacctccannnnnnnnnnnnnnnnnnnnnnnnnnnnnnnnnnnnnnnnnnnnnnnnnnnnnnnnnnnnnacgccctatttccccggaatcacagttcaaccaaacaagacctggcgcttcctgtgcctcccacccccctatccgaagctcagcccccggatctgaaatcgaggcc

SEQ ID NO: 306568 - DNA, 778 bp, Homo Sapiens
  misc_feature (375)..(449): n is a, c, g, or t
  misc_feature (712)..(712): n is a, c, g, or t
  misc_feature (764)..(764): n is a, c, g, or t
gaagggcgcagggaggacaaacaacatagttgtgcccaaggcattcactacaacatcattgctgcaggaggcaggtgttatcagacactgctgctgctgacctgaggacagtctctccaccgctgcacagccagtgaaactttaggcatctttggatttctgatataatctaaaaatgttccatattttctctttaaggggaaggtagtcatgggatatagcttttctcagcctacaaggtaggactgaaagataccatttcagtcacctgtaccttgaaccttacactccaacagaaccccctgtcccttcacctgggcagactgacaagctcatgcagacatccacgcatggacccttctccccacctaccgnnnnnnnnnnnnnnnnnnnnnnnnnnnnnnnnnnnnnnnnnnnnnnnnnnnnnnnnnnnnnnnnnnnnnnnnnnntctcatgttttatgccaggaaattgaataaaacaagaatttactctgaagaaataagagcaaggatagaatttagatagaaaaagaaaactaatttgtagtgaggtgtgttccttcttctccagcatgagtcaaaataatccagtaagtttcatatgggtaactcattttaaataaacttcaacgggccacaagcatgatttgtggactgtgcatgagctatttgtggcttttttaaggtacaaagtgagaggaacatgaagnttttcactcaaaaatgaccccctagccactgaatacattcaatttgctttangaagcactggaagt

SEQ ID NO: 306569 - DNA, 546 bp, Homo Sapiens
agttcatggccactcttcccagtatcagcaagcaatttggggtgatcgtttggaagcctcagaggaaagatgtcatcaggcttcctgtggctttgtccttcagcagtggggctcggcttgctttcacctgccttaggaagatttctggcttccgagctctgatatggggagaagataagggctggtatctttgagtctgcccctagctgggtatgtgcgtccggtgtgcgggccttggagtttttggtaatgactcacttgtgctctttctgggatctgtctccctcccacatgaccccgtggggtccctgaatgactgttttagagtacccatgtgggttccctgagtcacagcaggggatgtttaataaggaggttagcactgagcttggggacgtgctgtcacaccagcaggacgctgcaggaaggagcaggctacttcctttcttgacgtgcaaataactcgtataggctaatcaacaggcttataagttaaaagggctaccgctcggccccttggggattccatccccctcctctgtaact

SEQ ID NO: 306570 - DNA, 327 bp, Homo Sapiens
tcctagttcagttttatacacttgcacactgtcttgagtgttgtagctttagaataagtcttgaagcctgatattataaattctctaattttgttcttctgcgtcaagattgacttaatccttccagtgaatttttgaattcagtcattatgttttccagctccagaatttctgcttggttccttttcataattcctgtctctttgttggtattcttattttgttcatatattgttttcctgattttctttagtccttggttcattttttccttttgcttttgaacatactatggcagatattttaaagtctctgtctagtaattcc

SEQ ID NO: 306571 - DNA, 355 bp, Homo Sapiens
aaaggggtctccaaatctactcccttaactcctaggtgcatcactgtcaccaggggtgggagaatctaacagcttaactggcagctctgaaaccagatgagggccagtgatttcagtacgctctgatgcagtcccacacgggcaaggccgcaaggcgtggaaggaaagagaagcaaggtttctcagctccaagaacagagtccccatgccctcagagccctagcagagagacatgtgcaccccaaatcctagctgccggctttgactgcaaggctcacccagcaaaggccagtccagagggtaagggacacgggaaggatctgcaagttaatcatcaacaaacttgctcacttgt

SEQ ID NO: 306572 - DNA, 468 bp, Homo Sapiens
  misc_feature (422)..(422): n is a, c, g, or t
ttttaaaattaaatttctctttattcaattgcctctgagtagtgctgtgatttccaagtgccaggtagttaggtgtacaaatatacataccacagaaacatacagtttttaaaaaaattaagaaactggctgcatctgacgacatcaagaaaaaagataattctgattcaagggcttctccagaagatggggtttcattggcatgacgctcataggatgacctgtcatttttgtactattttttctagaaccatagagggatgacagtaactggcttcttagagcaattttgcctggtgtctggatcctgtgggaatttattagcctgctttgtggcccttggcaaccctggtaggacatctagagaagaattcaattctgctttttcccagaataattgttgactaactcggcaacaccanagtgtcacaggcatctttgtgtccccagagtcaatgatatgtggac

SEQ ID NO: 306573 - DNA, 379 bp, Homo Sapiens
  misc_feature (213)..(337): n is a, c, g, or t
ctcaaacttattttgctgtctgtggatctttatatcttcataagaattttgactgagtttgtgtagattccatagattacttggagaaaatctgacatcaaatatttttgaacatgtaatatcctgtcatttgcttaaatattcctttgtatccttaaagttcttaaaaatttttcataaaggtgatgtgccattagattgcttcttaagtannnnnnnnnnnnnnnnnnnnnnnnnnnnnnnnnnnnnnnnnnnnnnnnnnnnnnnnnnnnnnnnnnnnnnnnnnnnnnnnnnnnnnnnnnnnnnnnnnnnnnnnnnnnnnnnnnnnnnnnnnnnntgagaaaaacaaacggtttctctattcaaacagaacacttct

SEQ ID NO: 306574 - DNA, 428 bp, Homo Sapiens
  misc_feature (392)..(392): n is a, c, g, or t
ctgtaggaacagggtgtcattatgttgcccagactggtcttaaactcctgggctcaagcaacccccatgccttggctcccaaagtgcttgattacaggtgtgagctaccacacctggcctacagcagttgtttctaagctttactccttctgtgattagtctctactgttttttccacacacctaagggtttacaactggcagggcagattatcaaagctttcgtgctcttaaattggcctatgtcctctttctgggaaactaccaccacactgtttttaatataatgcattttcgggatttctctgtcatttaagagacacgtgggtatatagggagaatttctattatgggttgagctctggacaatacttggcacagaatagatactanaggaacactggctgatatagagcatataacttaacc

SEQ ID NO: 306575 - DNA, 467 bp, Homo Sapiens
  misc_feature (173)..(234): n is a, c, g, or t
  misc_feature (295)..(337): n is a, c, g, or t
cagacagggtctcgctctgtcacccagactagagtgcagtggtgcagatcttggctcactacagccttgaccttctgggctcaaaagatcctaccatctcagcctcctgagtagctgcgactacaggcatgtgcaccacgcccggctatggatttgtggggaggtaaggatannnnnnnnnnnnnnnnnnnnnnnnnnnnnnnnnnnnnnnnnnnnnnnnnnnnnnnnnnnnnngggcaagcatagtgtatttctaccttgcatctgtcgggccccttgctgacacacctgcccnnnnnnnnnnnnnnnnnnnnnnnnnnnnnnnnnnnnnnnnnnnttcaatgtctttgaagccaaaggaaaaatgagagacagggctttctactcgctgagcaggatattgctaccagtagaagctacccaagagatcagaaaagagggtacagaaatagccaggggttctgagc

SEQ ID NO: 306576 - DNA, 417 bp, Homo Sapiens
  misc_feature (181)..(266): n is a, c, g, or t
gagactgcataggggtgggtgtttaataactattagtggtgctgatgaggtcacaccgataagtctgatgcccatacactaaaagtgttattcagaaggaagctggggacacatttctacagtcggaagcagaaccagctgggcccaaatatactctatagatcaaaacaaatcccagatnnnnnnnnnnnnnnnnnnnnnnnnnnnnnnnnnnnnnnnnnnnnnnnnnnnnnnnnnnnnnnnnnnnnnnnnnnnnnnnnnnnnnnctttcagcatggaagagagcttagcccagtacctggtacacaagtgctcaatgttagtggctatgatcatcatcactattattatttcttgttgttgacgataagaggagactgcgccagaagactctagaagttagtacgaggggggagg

SEQ ID NO: 306577 - DNA, 200 bp, Homo Sapiens
ccctaaattttgctgctgtctatagttcagctcagagatctcttttctctcccaccccaccccctatggttttcctattggaatttcatcagacttcatgattgcagattcatcctctgtgtaaataacttccaaatcgggatctcaactcctgacctctgttgcatgcaccacttctgcagtgtgggacaccagtggac

SEQ ID NO: 306578 - DNA, 434 bp, Homo Sapiens
cttttcggggcgggaggagaactagcttccgtgtctcacccagaggcgccttaatcttcaggaagcgttctcacagggcggagtttctgttacccaactttgtaggactaaaaagtgcctatcttattaggaaaactcttactacagtgtggtattaatgctttttctggaagcgttaatattctttacattaaaattgattttatttactgttttgtacgtaaaggcggcttgttacagtactgcgtttatgtaacagttttaaaaatagcttaaatacggttacgaattttgtaatgtgattttaggaaaatctgagtagtgaggtaagaattctgttttattgatgtaagaattctgctttattgattttattgatctgtgaatttaaatacattgactgggcacataaattcatacggaattggaaacaa

SEQ ID NO: 306579 - DNA, 271 bp, Homo Sapiens
gggaagtctaatattattgatgatttaattacttgagtcaatactctgaaacaaaactgaaaactggttgacaagattggaacatccccaggaagactgggagaagcaattgtgcctggacacacactcccattttcatttctggggacttctagaggaagtagttatcagggaagtcacaaattgaaaaactgcagctcaatctttgacaatatgcctacctacccatgtgccaggccaaagagcgtcccaggaatacttcagattgatg

SEQ ID NO: 306580 - DNA, 390 bp, Homo Sapiens
taggataaggccttaattttttttccaagggaaggtaaaaatccatccttaggactccaaaggacttaacaagcctggaatgaagaccctgggatttggggatcggaaaaaggggtacctggaaaattaccggaatggcccaaattccaaattccctggaacacaaggatccactctgagaatctatcccaggggttatatccccaaaggtgtcaggaataaaaggttctcaactctggcataaaaatgtgaacagtgtaccgggaagggaaaacttccaatttcccggggccggggcttaagggattcctgcggcccaaagttgaaaagactcttgcggctaatggcccaattgttccggggattaatcatcaaacccgggggttctcc

SEQ ID NO: 306581 - DNA, 462 bp, Homo Sapiens
ttattgtgtacttaactatagaataattttgaatacgaggccagcggtaagtatacatgcgatagttaactgatcctgtttgctgatgtcctttttatgttccacaggtgacttctattaatccagcatctactcctgtatcttgccttcctttatcttcatctaagattctgcttgaaagtttgggcttggtcagtttgccacagggcttagagatggtgacagtcttctggcattcggcattgtgcagggctcgcttcagacttccaatactggacatcagggctgagattcggtcaccttctcccctggcctggaactggtaatatgcatccgcgccaaattgattcttccagttgcaggggatcttacatctctgggtcttcatagtttgactgaactacgatccgatccgagtgccctcacgtgtgacacgaaccaagtctccactggtgggacaca

SEQ ID NO: 306582 - DNA, 320 bp, Homo Sapiens
  misc_feature (150)..(205): n is a, c, g, or t
aagatttttattagccatccttctgactttcaaagcaacagcaagtgattgctgataattgcattatgctaacattgaccataatgtaaatcatagcttgagaggttcgatcaaagactggcctcagagtcaccagttacaccaaatatnnnnnnnnnnnnnnnnnnnnnnnnnnnnnnnnnnnnnnnnnnnnnnnnnnnnnnnnccaaatatagccctgtcctcttcaagcagcaagtcggctggtctcaaattatcccgaaaagtaccacttcatcaagcatagtattatttaaagagctgatactatcactgcttta

SEQ ID NO: 306583 - DNA, 118 bp, Homo Sapiens
gataaggccttgctatgtagaccaagcaggtatccacatcatggactcaaagcgatactcccgccttagtctcacaaagtgatggggattacaggaataagacacggtgcctagccta

SEQ ID NO: 306584 - DNA, 440 bp, Homo Sapiens
agagtggagtccattttgataagttgtggaaaattgtcgtttcgtgttcaatagttatattaggaaattatcagcggcagtcttaagcatttcaagtatgcgggtagattcgtgtttgctaacacaaacgaggcgaatatttcgtgttcgaaaagctcgacttgttccaagcagggctctattattatatctctggctcactgtacaggacccgattgtgacggtgacatcttcgaactcttgttcagcgtcaacagtgggagctgatcagcgttactctgccggggagtcggttcagattgcagtaacaccttgagcctctacacttcagaacagagttgaagacatgtgagatggaattcttgatatgcctctacatcccctggagatgggccagcttactcttggtcaggaggagaaccagcacctggtctaagagt

SEQ ID NO: 306585 - DNA, 551 bp, Homo Sapiens
aagtcacttacaactggtgataaagatcattttttttagcccggtaaagcagacagctctgagtggcgatgatggctaactgggcatggtgttttaattgcgattggccagagatgtgtcctgaagcccaataagaggcacaaatcaagtgaatgagcagatcctgtatctatgagcttccagaagagaaaacagaaaccagtcttaccactgaatgtccccaaaactgaactcatgccattccattctctccaggcttcaaaccggccagaaccctggcgactcctccttaaaagtcctatcaggtgtacctccttagtgtttccttgaccccactcccatgattgctgccttggggcgggcaggtccatgggccactggctccaccagatctgctgctattagcctccttctatagacagcagacagagaggagctatgacatatttgttccctatttttcttggttgtgtccaactcatcttgaactgcctttcaccactggtagatatgattgtagaaggtctgggctggctgcagggataggttag

SEQ ID NO: 306586 - DNA, 543 bp, Homo Sapiens; identical to SEQ ID NO: 58735

SEQ ID NO: 306587 - DNA, 462 bp, Homo Sapiens
tttttttagtgttgatatctgccaccaggcaaaatgcacaacagcactgagagtgaaaactagccaggatcatggcaggtgagcgctgctttatcctcgctggctgcgctgtaataccacacatctcctcacttggattcatctcactgcactcccagtttgactacaacctccctgagggcaaacagcacttttctgagaagggaatctctacaggatattttattattggtctgaaactaaaataaacctgtttccaaagtggctccgagacgtgatgttttttccctccaatgatgagaggaaatgacctgcaggaaggtcagaagcctgggtcccaagcaaggccagcttggtggagattccatgtggccaagcctgcccctcgctcaggagactcactgttgctcaaggtttgccacagcttgaagtttctcatctttccattctgtggcccaccta

SEQ ID NO: 306588 - DNA, 238 bp, Homo Sapiens
  misc_feature (41)..(87): n is a, c, g, or t
gctacatatggaatgtttgtgaagttgactaaacagttttnnnnnnnnnnnnnnnnnnnnnnnnnnnnnnnnnnnnnnnnnnnnnnngaatcacagagtgactgcccctaaatagttatcttatgcagaaaacttaattagcttggcggtggactaagtttatgaagaccccagtcacacacacttggagtactgtatttggtggatctcaaaggcacccatggacatatcatatttt

SEQ ID NO: 306589 - DNA, 249 bp, Homo Sapiens
atatcaaactttatcactttatctcatacctaatcccatcccatcttgctcttcaatgctctttattaaggaaataccatttgctgttatttaaaaagacttggtctaaatggctattcttcacaggaatactaggagaaagaatgggtgttttgttatgtttttaaggttgatcagccacatagtaccttagagggtttaattcatacaggtataggaacaatttgtaggagataacacaaaacttgg

SEQ ID NO: 306590 - DNA, 362 bp, Homo Sapiens
ttcaaacagtaggtacatacacacagattaacagttcaaagatgctggtcatctccatgcacaccaagttcagagcagtctcctatgcaggggatggaggggactccgctggggtgggcccttgggacctttggctatgtgcctaatgctgctctacagcccagccacacgtgaatatctgcagtgcatggagttacctttagtacctgccagtctgctggtgtgaacggtgcctcactgtgagtaaatgtttcccatatccccggtgaggctgaacccctcaccacacattcactggccagtctggattcctcccctacatttttttgttcataccctttgcctatttcctactgtgctat

SEQ ID NO: 306591 - DNA, 506 bp, Homo Sapiens
accgcatttctccttgactttactaaaagttaaattaacgtgccacttgccccgggtgggtaaaagccgcaaggggtgccgggttaacccagggcttttcctgaattccaaggtaaaacgcgtaaacttgaaggcaagtttctaacaagaaggcccaggaatttggaacaatgcttgtcctgggttcaaaggttcctttgtccctcttgcaattgttcaggacttaagattcttcaggttgcttgcgaatggccttaagcaagcaaggccccaaggtttctgaattgtaattcctggccaaaaagggtagctcttgtgccttggggtaacttctttcttctcttgggaacttaactttggcaatttccccgggcctgttaagttgctggggctttgtggcttgtaagttaagttattcctggcccaaaaaagggaaggttttgaagggggttggaaacagaggaagttgcccacaagaactctgaattggcacgggttgcgaggct

SEQ ID NO: 306592 - DNA, 506 bp, Homo Sapiens
  misc_feature (105)..(118): n is a, c, g, or t
  misc_feature (239)..(239): n is a, c, g, or t
  misc_feature (430)..(430): n is a, c, g, or t
  misc_feature (483)..(483): n is a, c, g, or t
taaagttcctccatagaaatgtgtggcatgggaacagagcctaatactttctgaataagatattaacaggcttgtagtggatgctgggaatttagaaagctctgnnnnnnnnnnnnnnctaaagcctcccagtagaatgtcagactaataaatggactgcatatttccacagtgtttttatgacatgtttcacacactgtcttggtgcagatatgagaaagcccttgtccacagcccangttctgactcactcattaattttaccttgtattcaagttttcttggggtggatctagactaagaatgaatagaataagccgacctttaactacagtccttaaatgaggaaatctccaccctggggccagctgtgccaggaatccccgaccgagatgggaactccgctgtggtttataaggcaggggctgantttcaggggggagtgcacccatcctggactccccgctgttcccatcaatctantccaagccctggtaaccctggac

SEQ ID NO: 306593 - DNA, 437 bp, Homo Sapiens
  misc_feature (198)..(252): n is a, c, g, or t
  misc_feature (340)..(340): n is a, c, g, or t
  misc_feature (358)..(358): n is a, c, g, or t
  misc_feature (379)..(379): n is a, c, g, or t
  misc_feature (389)..(389): n is a, c, g, or t
  misc_feature (394)..(394): n is a, c, g, or t
caagggcaattagtgctcccacaagcattcaatcggagtgtttcttttattccataacttcagaaacacttggtatattcaactctaacatttttgccaatcttgtgggtatgaactggttttaatttttatcttgttactgatgaaacgtttcatatacttttcggactatatattttgttttcagtgaaacgcctnnnnnnnnnnnnnnnnnnnnnnnnnnnnnnnnnnnnnnnnnnnnnnnnnnnnnnncttgaaattctttataagtgtttatagtgttccaagtcttctgttactccttcaaagtcctggtggttgttttttcaacttcctttcngggaatgtggtgggaaanccatggggaagtggaactggnttccagaggnggaancctaaccgggaaaggggaaagggaattagggttgacaaacccc

SEQ ID NO: 306594 - DNA, 395 bp, Homo Sapiens
  misc_feature (227)..(227): n is a, c, g, or t
  misc_feature (295)..(295): n is a, c, g, or t
caggcactcaagttctggctcaaggcccaacatctccgtggggacctcagccatcccagggcattgtgaccccttcctctaagtccccggcacactcgctgattggtaccctctcattcgacaaagcatatgccattgtggcttacttgtcatttctttaggtcttgccttcccaagtagatcatgagccactataagaactagctcccatagtcccagcccctggnctcggtacatggcaatgcttagtgattggtgattgaggataatggtggtaaaaggatgtaccagacangtcatctcctgaagaagaatgcccgaacaacctgtccttgttttaatgtattttctctttctttcctgtccagttttatttcctctcatagtaactggct

SEQ ID NO: 306595 - DNA, 472 bp, Homo Sapiens
  misc_feature (398)..(398): n is a, c, g, or t
gagctagaggctcacgtgcccagagaggctcagcaggtaacatacatgagcaaagtggaaaggctgaaaatgaggtgaacaggagagctcctgttgccatcgaaaggaagcagtcaccactcagcctaagttgattgttgctaaaatttgctgattctttgaattttttttcaaaagatgctgaaaatctgaattattatacaaacttccctgttattaaattaatggaacaaatgcaagatattttaaagatacaatgtaggccagacaacagagcttcaggcaaggtctggacacagcttccagttttcaacttaaaaccccagcccttttatttggaataagtttcaaacttataaagatgtcccccaaaataagagaaatccaaggaatacctnatatactcccatatccagattccacttggttattaacctttatactcctggctttatccattttgaactcccgt

SEQ ID NO: 306596 - DNA, 484 bp, Homo Sapiens
  misc_feature (269)..(269): n is a, c, g, or t
gtattatagtgcttaataaatggctaatttagaaagacttgagattgaggactggccaacagggtcaaaatgcaaggcctgccgatcgtccaggatgtaccaggtgtctaccttcaaggatcatttggaggaaggaggtcatgatgaaagatgaagtgagtgacctccaagttggatgacctccatcaaacaagatgggcaaattcccaaatgctactggtcacaggtgcctgaggagaacaatctgctttcaaagtacaattaaatanggaaaatgctcagtgatctcaaggggtagacccaccccggtgccccatctgctcaagtttaaggcagagcaattaagacaagtgctggggaaaatgtttatctctaagtttaacagaaggttcctttttggaaatcccttttgcccgaactcaaaaagggggggcgttctccagacacagatgatcttcaacaaaccttttgttttaaggtttgg

SEQ ID NO: 306597 - DNA, 437 bp, Homo Sapiens
  misc_feature (146)..(147): n is a, c, g, or t
  misc_feature (150)..(150): n is a, c, g, or t
  misc_feature (398)..(398): n is a, c, g, or t
gtgatttcccataggtaagttctagtgggggaaaagaagtggcattacttagtagaagccttcaaaatttatcaagagttgaaagtagatgcctcggattgtgggtttctgagagagatgcgtctagttgtttataaccccattannctnagggggaagagccaagagcagggaagacttgggatgaatgttctcgaagcttaggtgccccatcctaatctttggatctgatgagaagctgcggcaatggaaagagaagggcagagcacaccggatgtgaggtgtgaagagtgaaaaagatgttattgggggccagaacccaaaacaatccagacttggcagctgatggtgatggtgtgctaatcacccctggctattaagctctagcatccagaatnctccagtgacatttcctgaagttgggggcctaagttttg

SEQ ID NO: 306598 - DNA, 425 bp, Homo Sapiens
  misc_feature (195)..(195): n is a, c, g, or t
  misc_feature (399)..(399): n is a, c, g, or t
cagtgagcttcaataccctgcgattaaaagtttgagttacccccaccgttgcacgtcctatccagtgggaaaaacccttttagagccacaatcaaagaacagctcaccagaaaagcccctgaaattatattcttgtgcctggtaatcactgttgtgatctgctttctaaaaacccgtgcccatctgcaaaagacngttcctgatatcaggaccatttatgctgccaaataacaacaaagaaactgaactcaagtgaaactattatctctccttaaagagaaagctacaattccgggtttgctgctttcttcttatgtcttcctctgcctcattaactccattgggtatgtcactaatttcaaagaagcaggaagaagttgatgggggtgggggttaacnaaataattcacacgcctgtctggttt

SEQ ID NO: 306599 - DNA, 433 bp, Homo Sapiens
  misc_feature (24)..(24): n is a, c, g, or t
taacctacacacatcctccattanaaaccatctctagattacttataagagcgaatacaatgcctacacatcgcttcattatgattcaacatagtacttggcttgctgcaaattcaagttttgctttttggaactttgtagaatttttttcttaatatttttgaaattatgcagaaaacagaggtttcttctccacaacacccttctggtttccggtgagcctaactgtggctgaagatataaatgttcacactgcaagcaaactctgagcaccatccaccatcccaaagagctctccacatcgcctctcctcaaaaccaagcagctgccaggtccctgtgtggagatcctaggagaggagcttggagcctctgtatagctcaacctgaaaactaaaatgcgggattaaaactacaaactgacttgattcttt

SEQ ID NO: 306600 - DNA, 491 bp, Homo Sapiens
  misc_feature (358)..(439): n is a, c, g, or t
tcggtacgaggactgagaagaaagagtaaaaacaaagaaaaaccccaacatcctgaatcaggtgcattagagttaatgaagaatgtaaggaccaataacttagcccagtccccactgaaagttcagagtggatgcattggaagatttctcctttcttacaggtcgtgtcctgcaactgaaaggccctgggagagagagccgtgaggcatggcagtgaggatggcagtgtggtggaaagggggagttttcaatcagacagccatgagctcaaatagctagttactatttactaactagctctgtgcacttgagcacttactctctttgacctttagtttcaccagctaagatgcctctnnnnnnnnnnnnnnnnnnnnnnnnnnnnnnnnnnnnnnnnnnnnnnnnnnnnnnnnnnnnnnnnnnnnnnnnnnnnnnnnnnattttcttctctttgaactgctgtcccaccctgggcagagctcccattagat

SEQ ID NO: 306601 - DNA, 485 bp, Homo Sapiens
  misc_feature (180)..(180): n is a, c, g, or t
  misc_feature (341)..(341): n is a, c, g, or t
  misc_feature (469)..(469): n is a, c, g, or t
acaaatacatttgaagacaggaataggtggttgggtgggtttagacttagcaggtaaatgtccttttctcaactggctctgtccatttgttaatccgtaaaggaaaattcctggtagttcccttttttctctctggttgaaatagggttttatggctacccttagctgcaaggacagctngggaaagacttgattaacatagatggattatgatctgttctctggggttagtagcaccgtgtttttctgttggtaaaatgtggggctgggattggaagactcttgggtgtttctgccttggatatcttatataagacttcaatcagcacctatgtctgatngatgcccttgtctgcctgagtcgcctgaacagatcagccctcatgtcagtttctcatggtttcattcagggaccaaccttagttccctgccctgttcctcccacatcaatccagtctgtctgtagggnccgtggattcctcctc

SEQ ID NO: 306602 - DNA, 488 bp, Homo Sapiens
  misc_feature (48)..(48): n is a, c, g, or t
tgattcggaggttacaaactaaaagtcctgtgtgtgaaccaaaggacngagggactttcagtaacagatgcattgcccctttacagtagtgctgaccctgtctgatccttccagcattcgtgcttccgagtgcgtcaagggctgcctgaagtcatggctacaggtttccgctagctcttaggtatgttgatttgaaaactggagtttcagatcgtcttctcgatttctgtgaagattttagtgaagccactgaagacgtaagagattgttgttctcttgtccaaatacaacctagactttgctcatttatctacatatttggcagacagtacacagttaatttgagcaaatttcatttagtccataagcttcttaccaatgaaaatgaaaacatcttacctgctaaatgttcacacctcgtacccgacactgtcacaaaggggtgtaatttgcttacctgtgataccagctttcataatgaaagtttt

SEQ ID NO: 306603 - DNA, 180 bp, Homo Sapiens
  misc_feature (42)..(42): n is a, c, g, or t
ttgcttatgaagtctagaaaccatggccatctgccagccggnggcaatcaccacaatggaattcacagtcactctgttaagactttataaatacagtgagggtccaggagccaggaccttcaggcgcatgaggcttgtctggtctggtctggccgactgagcaaggaaaccctgtccttt

SEQ ID NO: 306604 - DNA, 453 bp, Homo Sapiens
  misc_feature (120)..(120): n is a, c, g, or t
  misc_feature (443)..(443): n is a, c, g, or t
taaccagaaataagttgcatctttctgctggacaccactctttgccgagatatcaagtatatttgttttaagagctgaaatttcctataggatgttcaccattaggacagtacataaganggggaggaagtggatgggattttcattttcagccacatgacactttcccatcaggtacttgatctgaagaaatatattcctcagaacttaagaacttggatcctggagatgagagtcaaacctcctaatgtttataggcaccaaacaagcccagagtggtgaagaggcctgcgtggggtcacagttcttaggaacaaggccagtgcctgctgctcagggccctggtggctggtgtgtcctccgtgcgctgggttccctgggctctatgcttgcccctttgtaccaccgaacagggcactccccagagtgaggactggcatctngctctatttc

SEQ ID NO: 306605 - DNA, 283 bp, Homo Sapiens
tggtgaatagttttggagtcagacaaaatcaggtttaaatcctgctacggttactagctgtttgaatacagacaaaaaagtttcctaaatagtaccacaactgtagcatagagacaaaatcatattagagtgtgttaggagaagtaaattatataatcgtgtacaaaatggtgcataatatgccctgaataagtggttttttcttgttattgttgataagcttcaatgtgactgaaaattttttattttaccttactcagaaggcactttacatccttaacta

SEQ ID NO: 306606 - DNA, 434 bp, Homo Sapiens
caatgtctcacttggttccacatcactgccctgtgaggggggcaggagaatcagcatcagacctagtgaaagaaggacatccagggaagtaaagtggcctgtccaatgtcacacggattatcagtgagagagctaggactccaattgaacttttcttagtgcaagatatgaatttcgcccacaatatgactataaagctctctttctcaggagaggaatggtggagaaccacgtcttccttcctcgagtgcccttcctccctaacttacactggacgtggtcttatcagaactctctttcactggttcctgatcttccctggccttccacgtgcaggtatcatttaaggcagtggggctcaaagctcattaattgtcacaattcccctggtgaactttaatacctctcccaaaccctcttcacctctaataatg

SEQ ID NO: 306607 - DNA, 426 bp, Homo Sapiens
  misc_feature (380)..(380): n is a, c, g, or t
  misc_feature (403)..(403): n is a, c, g, or t
tgaaaacaaattttttaatttttgtgggtgcatggtgtatatatggggtacatgagaagttttgatacggtcatgcagtgtaaaataatcacatcatggagaatgggatattaatcacttcaagcatttatctttagtgttccagacaatccagttatattcttttagttacttaaaaatgtacaattgagttattgactatagtcaccctgttgtgctaccaaatactaagttcttactcattttgttttgtatccattaaccatccccaccctacccctttagcccctccactattcttcccagcctctggtaatcatcctttctactcctcccacggtctggtggaattccagttggctttggaattttttaagggncccacaaatggtggaattttttntcaccttacggattcctaataag

SEQ ID NO: 306608 - DNA, 437 bp, Homo Sapiens
  misc_feature (96)..(96): n is a, c, g, or t
acagttggcaggatgaggaacaacagtggctttgtgatcacagaactggaatttaaagaggctggaccttcagaactgatcttggtcagccggcgncctgcttacagatgagacactgaaaggcaaaaggcgatggtcttccctttccgtgtcagcattgtatacaggttccctatcgcacatacaagggttatggaatgtaagccaaaataagggtctggcctaggaggcagcagcctgaaggaaaggaaggccctgaagtcagttttcaaaggggctgacccttggcctattatgtttctgatacatctgtttaagcaaagcggctcctaagactacactaaggtttcttccatcccctagcaagctcacagttgacaattcccagttctctcagcaccagtgatgcctgccctttaagacacattgctgttgag

SEQ ID NO: 306609 - DNA, 203 bp, Homo Sapiens
gaacttctgtttttctattcacttcaagactgttcaactttatctcatggagcgtggatataatggctgttttaaaattccaatatgtttttcatactgcaattagcatttgttggttgttctttctcttgactattggccatatttccctgttactttgtatgttgagttaagtttggcctgtaacctggacattttgaata

SEQ ID NO: 306610 - DNA, 405 bp, Homo Sapiens
  misc_feature (40)..(40): n is a, c, g, or t
  misc_feature (43)..(43): n is a, c, g, or t
  misc_feature (45)..(45): n is a, c, g, or t
  misc_feature (48)..(48): n is a, c, g, or t
  misc_feature (232)..(242): n is a, c, g, or t
  misc_feature (251)..(251): n is a, c, g, or t
  misc_feature (365)..(365): n is a, c, g, or t
  misc_feature (372)..(372): n is a, c, g, or t
  misc_feature (383)..(383): n is a, c, g, or t
gggatggggagaggactctaaacagacagctccttagccnctnanagnccctgggaagagccacaggataggcaagggtcaagggaataatagcttttccttcttcctgagaagccttctagaattcccctaaagaactaggggacgcaatgtgaatcaaatagagaagccttcctgacttcaggatgttagggatacacattttttgagggcggagactctcattgttcannnnnnnnnnncctgtccangcaggttctcggtgtggtggttaaaatgacttccaagcttgggccccagacaatttctttggaagaatcttgctttaaaacctaaatttaaagctaaagccccataagaaagangcaaacngaaacttcaanagaaactcaaaaataagagcat

SEQ ID NO: 306611 - DNA, 409 bp, Homo Sapiens
  misc_feature (334)..(347): n is a, c, g, or t
tcaaaagaaagcacaaaagctaccctgtttgcagaatatttcactgacattgatttgtcattaattctaccagagctgacctcattcaggcttgatagaaacaggttcctatgtttagggcagatccctagcttctcgctcacagtgagtctgcatgtcctagattctggttattgctggagcatccattaaagtctaccaaactcaggacagaagaagatagcagtggatttgtaaaaatttttagtttataaattacagtcattggggaaacactagtaaggtcatgtgatcttttggaccaggattttctctcctggccttctcccctggnnnnnnnnnnnnnnatgtacagaagggctacccaggaagtgtcaacccatgttagattttcctgtagtcttccaga

SEQ ID NO: 306612 - DNA, 414 bp, Homo Sapiens
  misc_feature (382)..(382): n is a, c, g, or t
caacgattatgaccaagacttttccatgtcactttgtggtcccaaaagggtcaccagcaattccccaggcaactgtggtgagtttccctaaaacaagactaacctctgagccccaggtgatattcctgccctggtggacatctgttgctcctcttctgagagacgaacaaggcctacctgacaaggatgacagcgggatcctactgggggtcaaggttagaaatgagaagagctgtagcttgcttctcatcttctctgtctcggtcatttctgcaagttgccaccgtctcatcctctctacttccccgaagcaccctggaagatacgtgtacagagaagcactaagcctgctcagctgtgggcagtctgaagcctcaatttnccacagcaccatgcatgcacctgcctctccag

SEQ ID NO: 306613 - DNA, 429 bp, Homo Sapiens
  misc_feature (402)..(402): n is a, c, g, or t
taatataaagcaactctttcaggggaactgctctctccaatttatgcacagattatttgacagactggttgaaatatctcacaccacttttgcacattggaaatgcaaaacccaaagaattcatattttcaagactgttaacaccttctcaaatttctataattcattcaatttctgtagaaaaacatgagctttatttttcttactattaattatttatatagttcagtttcacagataggttctcaatatctaaaagcctgcaataatttcactgtcgaaaacattttcttaaagtttttatgcatttactagtgttgtcacaataaggccttgtatggctgtgaattgtccttgggcttttgatattcacaaccaggagaggatctcctttccttttcnggcatcccttttaatacctttccttcc

SEQ ID NO: 306614 - DNA, 510 bp, Homo Sapiens
  misc_feature (49)..(49): n is a, c, g, or t
  misc_feature (74)..(74): n is a, c, g, or t
  misc_feature (194)..(194): n is a, c, g, or t
  misc_feature (213)..(213): n is a, c, g, or t
  misc_feature (215)..(215): n is a, c, g, or t
  misc_feature (244)..(244): n is a, c, g, or t
  misc_feature (247)..(247): n is a, c, g, or t
  misc_feature (304)..(304): n is a, c, g, or t
  misc_feature (328)..(328): n is a, c, g, or t
  misc_feature (359)..(359): n is a, c, g, or t
  misc_feature (373)..(373): n is a, c, g, or t
  misc_feature (378)..(378): n is a, c, g, or t
  misc_feature (385)..(385): n is a, c, g, or t
  misc_feature (408)..(408): n is a, c, g, or t
  misc_feature (476)..(476): n is a, c, g, or t
gtagaggtagagatcttgctatgttgcccaggctagtcctgaactcctngggctcaagtgattctcccactttnacctctcaaagtgctcgggattataggcatgagcaccatgccaagccgagggaagctgtttcttacagctgggtttcttgcacatccagacttcacatcccgccttgtgcatacagactngggagtcccttgggtagcngnggacaggaatcgggattggctttggcatnganggagattaagcaacacctaaggggagttgctagtggaccaaggcccagaccacaatncaggggagagggagaaaaggggtnggaagattgacaggaactcgacatttttttnagcagttaactatnagagnaataaanactcggacaggaaagaaagaganaatacataagacaaggacaggttgttcggcatctcttcaggaggatgactgtctggtacatcctttancaccattatcctcaatcaccaatcactaagcatt

SEQ ID NO: 306615 - DNA, 406 bp, Homo Sapiens
  misc_feature (325)..(325): n is a, c, g, or t
  misc_feature (394)..(394): n is a, c, g, or t
gggagccccagggttcgaatgagctgaagaacaaatttgcattaacacctagcagccaaacaagtagctctgggtctagtatgcaagtccaattgttaccatctattctctgcactgaaggggggccattagctaaattcttaggcattgtttgtccactcgatgagaggctgccttctcaacatttcacttcatcacacatgaaaattgcctactaaaataaacagcttcctctgaaagctcagaaacaaacattattacctgactccagtttgcaatttggtgaaaactcttcagggctgctaaaggagacaaaaagaaaatngaaaggtgtgattccaggccctaaactttacagttggatgggagatccatatggtttggggcagattcnttttggaaacat

SEQ ID NO: 306616 - DNA, 495 bp, Homo Sapiens
  misc_feature (438)..(438): n is a, c, g, or t
ctgattcattctcattcttaatttagcaaaaatgctaaataataataaaattgatgccttacctgaaaaggtgagtcggcaacaccaacagattatttcttaggctgcatctttcgtattttctcccaataaataaaaagagatgcctctcaaattagcacttagcagaactaaaaacctatttattatctgctggataactggaacaaaaatagaaatgtgagttgcccaaagattgatgactttcccaggattccaacctaaacaaaggttgttgagatcatctgtgtctgagaacgccccccttttgagttcggcaaagagattccaaaagaaccttctgtaaacttagagataaacattttcccccagcactggtctaatggctctgcctaaactggagcagatggggcaccggggtggggtctaccccctgangattcctgagcatttcccaattaaatgggaccttggaagccgatggtccccccagga

SEQ ID NO: 306617 - DNA, 196 bp, Homo Sapiens
  misc_feature (122)..(122): n is a, c, g, or t
ccaacctggtattcttaatgcctggaagataatatctattcaccaaggcttttgtggtagcaatgtagccccaagattaggaaaatttactggaattttagagatgggatgcaatctttganactaaattaggctaattgtttgagggctgaaagggtaaagtggacccaaccattcctttaggatgattgactag

SEQ ID NO: 306618 - DNA, 142 bp, Homo Sapiens
tatttacaggcataattccactaccgatcagcacaggagttttgacctgctctgtttctgacctgggctggttcaccccttcttaggcaagctggtggtcctccactcccaggaggtcaccatattcgatgccgaactaatg

SEQ ID NO: 306619 - DNA, 185 bp, Homo Sapiens
cttgttcaggaaggtgggagagaaagtactgattgagtctatctctgatgagcttctggacagcccagtcttggccacatcgggtttccagacatttttgctgcctggctaactccccatggcatcagctaacttcaatcactccctccagccatcaccaggctggattcttggtttcctattac

SEQ ID NO: 306620 - DNA, 188 bp, Homo Sapiens
ctagctaaatgaagaaggcctgtgttttcagagtcaataaataaaagatacgatcttacaatcaaaaatgtaaaaagttcataatattaaaatacataaaaacagtagaaactggccccgcatagaaatagagcgagatgccagtcctcactctggggagtgccctcgttccggtggtacaaaggggg

SEQ ID NO: 306621 - DNA, 426 bp, Homo Sapiens
  misc_feature (414)..(414): n is a, c, g, or t
ggttttgtgtcaagtatactgttgattgttgagaggggactgcagtggaaacttggaattggatagttccattgatcgtgcgatggaaagcaccatctacatgatattttgatagatggatggctgaattcggaaaaacatctgaatgttatcaggtaacagcaaagacagaagattggcaacgctaagggcaataaagagcaattaaaggacaagccagtgcagagtaaaagaaggcaattaaattataagcaacacacgagagcacaggcaggttcctgaaagacagagatggtatatgcaaagggaggagactatgccatgttctgtatgtgcaagagcaatggggctacttgtatccatgtgccactgaggttcatggaaggaaaggggccaaatgcaaccagcgggtanacccaattcaac

SEQ ID NO: 306622 - DNA, 437 bp, Homo Sapiens
  misc_feature (404)..(404): n is a, c, g, or t
actcagacacaataaaatgtttaatatacggctaggattaggttaaggtgagagaggcgcctagagcacaaattttaaggaggcaagaccacgaccccgaccgtgagcgcctgcttaacatttgctccccaggcgcttcccactccccagccgggccccgtcctagttcaatcaatcaagaaaatcaagagtacgaaggccttgtgcggtctggacggtctttccacgtctcaggtgcagttaagccagtcacactccatccacctacccgccatgaaaaattatttgttcagcaggaattgccaagtcaaatacagccatataaagccccccttcgacgtgccaggtgtgcctccggagagcagccaccaaaaccaccagcagcccgtccgcgccgggaaatncgccctcgctgggcttacgggggccactcagac

SEQ ID NO: 306623 - DNA, 267 bp, Homo Sapiens
  misc_feature (216)..(216): n is a, c, g, or t
gtaattgagaaagtattatacagatatttaaacaaaggattcagcactacgtaataataatgtaccagttttgtttcagctctttcaagtttttaaaatttgtacctttggtttttctttgtattctggttccttgaggatgtgtagttttttagatctccattttccatgtctgtcatcttctctcagtatctttgcattctggtaaagcttctntaggtttaatcctctgtaagccacatcaagtaagttcctttttccttaatt

SEQ ID NO: 306624 - DNA, 453 bp, Homo Sapiens
  misc_feature (345)..(345): n is a, c, g, or t
  misc_feature (355)..(355): n is a, c, g, or t
  misc_feature (368)..(368): n is a, c, g, or t
  misc_feature (394)..(394): n is a, c, g, or t
  misc_feature (431)..(431): n is a, c, g, or t
  misc_feature (443)..(443): n is a, c, g, or t
gagcagccaggtgcttggtgctgtgaaggtctcctgccagagcagaaggcaagcaacctctctaacaaatctctttcctgggctacggctgtttgtttgtattaaaacgggaacatgataacagagctattagtagctccatgctcagctgtgcaaggtagggagttagagcactgaattcagtcacccggagaaagaagctgaggtctcctgatggcccctaggatgagggctgggctatctgtgaaataagcaatgggcttaaggtcgctgggtttgtaaagcaggccacgggagcctcttgggtcaggttaacctgagcttccccctcgatgaagcaacacnacttttggancatgtcctccaantgacggcagaacccgaattgcccgangccctcctgttggcttgggggaagcaatgccaatggnggaaaaacgcantttttgattt

SEQ ID NO: 306625 - DNA, 439 bp, Homo Sapiens
  misc_feature (168)..(168): n is a, c, g, or t
  misc_feature (308)..(308): n is a, c, g, or t
aaaaggtttatttgttatcatctacgttctctcccattgactttaagtatgtggccattatttttcagtcaaatacggttgtgaactaatttgaagaaccagtgttttttctttttattgttgtctggtgctatctgttctctcacctaagatgcataggctgtaaanttttctggagcctgtgaattgtttcagcacacctcatatttcactagttcctaaggggaaccaaaaataactcaccaagaccactatgcagaggctcctatagccatctacaagcaatttccttcccttctgcacgtaangtaagcaggaataaaggggttccccaagccccaagggaaggtcaagcatgaaggggtaatgctttgccaagaaagggctgtggcttactaatgagttctgctctttcctcaagcttcgcagcttactgatt

SEQ ID NO: 306626 - DNA, 430 bp, Homo Sapiens
  misc_feature (19)..(19): n is a, c, g, or t
  misc_feature (36)..(36): n is a, c, g, or t
  misc_feature (44)..(44): n is a, c, g, or t
  misc_feature (51)..(51): n is a, c, g, or t
  misc_feature (94)..(94): n is a, c, g, or t
  misc_feature (142)..(142): n is a, c, g, or t
  misc_feature (200)..(200): n is a, c, g, or t
  misc_feature (293)..(293): n is a, c, g, or t
gtgaatgctattatgacanaaggagcatgtagaganaagagganaactacnccaaagtggtaacattttgggtgcattcagatgagggataggngttcatgagttagagaatctgagaaaaggcattataatgttaggagcnttcttactttgattattcagaacttggttatactgtgcattctataattaaacaagcnccgtggttaattataccgtaagtgttggcattcgggccttatgtaggagatgtatctgattagattggtctgttagataataagcggtaggangtgtggataatggacaagaaatcaatcaagtatgtattttaacacatactacatgcatataatcagggggaaataaatgtaaaataaaatgtaaaatatatttaagttataatatctgccttcataaatcctaaggc

SEQ ID NO: 306627 - DNA, 427 bp, Homo Sapiens
  misc_feature (193)..(193): n is a, c, g, or t
  misc_feature (228)..(228): n is a, c, g, or t
  misc_feature (320)..(320): n is a, c, g, or t
  misc_feature (345)..(345): n is a, c, g, or t
acgtaaggtctgtagagagtccgggaacacagcagtgccccctcagaagagagtgggcagctactgacagctcccagcgttctccccgcagatcctaaaatagatggcacttaaaggccttggttgagggtgaggagggtgctggtttgtggtgggtaacacaggcgtcttccatgaaggacagcacacagtnctgctttgtagctgtggccagaacaggagcgcacnaccagcagagaccttggcttactcctcttggtcgctcttactgccgttaaattgtattctactgaaattcttgtgattctcagcaaacacangtgaatgtttcttttgtccaaaggnaaaccgtggagttatcgtagtggttaaaatactcattgggtcttacctgtaggaagggaagaaccaagccaaggactgtggc

SEQ ID NO: 306628 - DNA, 402 bp, Homo Sapiens
  misc_feature (205)..(353): n is a, c, g, or t
gcgaatccagaagtttcgggttggctttgaggtagccattctgttgtctgcacatctaacgtgcattcccatgcctgtttaaggtggacttttaataatctaaatggccccagtagaagacatttcagtaaattggggaatgcctatacaatgtaacagcatgtagccatgtcaaagtcccgttgaggaagaatacttagtgacnnnnnnnnnnnnnnnnnnnnnnnnnnnnnnnnnnnnnnnnnnnnnnnnnnnnnnnnnnnnnnnnnnnnnnnnnnnnnnnnnnnnnnnnnnnnnnnnnnnnnnnnnnnnnnnnnnnnnnnnnnnnnnnnnnnnnnnnnnnnnnnnnnnnnctttgttaagttcaggcagagttgggttgtttaaagagcctgggaccac

SEQ ID NO: 306629 - DNA, 189 bp, Homo Sapiens
actttctagcagctacactttctccaaaagggaacaagctactgtggagtggggggtagttcttcctcctctgcttagaggagaatttttggagagctctcagactttacataggtgattggactggctgacttctcaggtcttcccagtatttgaggtctgattctgggctacataccctactcctag

SEQ ID NO: 306630 - DNA, 385 bp, Homo Sapiens
  misc_feature (13)..(13): n is a, c, g, or t
  misc_feature (66)..(66): n is a, c, g, or t
  misc_feature (141)..(141): n is a, c, g, or t
ccctggccatagntccactctgtcagtcagccacacatttattgagtaccagttgtgtgcaaagcntcgttgggcatgaaaagcattaacccagtgaatgaggaggagcttgggttggggacggagccccagaattacatnggcagaccagaagggaatcagctcagtagaagacacgcatgggctcgtgggcgacgcagtgtgtgctgtgtcatctggggctgggaggaagtgtcctgggtcaggagttccaggagcccaggaggagtggacgggtcagtgcagagccagcccgcattcaggggagaaaacacggccaaggccaggcctttcacggggagcccagcgttgggttgcacatctgcactctccaggctagttttgg

SEQ ID NO: 306631 - DNA, 269 bp, Homo Sapiens
  misc_feature (200)..(200): n is a, c, g, or t
  misc_feature (230)..(230): n is a, c, g, or t
cagccccctgctcagatctttataagtggggccttcatgagagtctctgagttgatttttgtttcctgccagaccttgctaacctaccgaaccacgatgaccatcccttcaggagatggtctgtgaaaatgcttaaagggaatggtccaaatgggaggcagctttgggtatggccccaaaatgactctgctcctaagttngtaactttgaaactctggttggactaagtnaattcaaatgtagatcaggcacttgttccacatcaggta

SEQ ID NO: 306632 - DNA, 103 bp, Homo Sapiens
gctgggcgcggtactcacggccaatcttaaagagtattttaagggtgaaggaaattaggggagaccagtcaaaattgactgtaaaacttttccggactaaggt

SEQ ID NO: 306633 - DNA, 509 bp, Homo Sapiens
  misc_feature (309)..(309): n is a, c, g, or t
taaatatttggtttaagaatatttaaaagggctgtgttctcattgtggaagttgtagatacctaaatgccacttcataatgggcagataggaatgctttcttaaaatattttttctagagggataaaatctaagcaggtttcagaactttagaactcctgaataattttggcatgtgcttaaactcgcccttttgacctgcttttaacatacaagaacagtttaactcaaatccagtgcaccttcctgccagagaaagtgctttccttttggatgacttacttccaaagattgaatataatgttaaaantggtttataaaaataaactagccatgttttccgatcaaaaaattgacctaaatctcccctgcttacttaaaaagattccttctctctcttagtttgtggaataatgaactcatcccaatttttaattgctgaactgacaagagacaatccttaggttttgctagtttgttctccactctttttggtttagagaacactgg

SEQ ID NO: 306634 - DNA, 436 bp, Homo Sapiens
  misc_feature (86)..(171): n is a, c, g, or t
  misc_feature (188)..(188): n is a, c, g, or t
  misc_feature (272)..(272): n is a, c, g, or t
cccagaagtggattcagcacataaggacgttttccacatccatatgattacatccccaaccaggtcagcagcacccattctcctgnnnnnnnnnnnnnnnnnnnnnnnnnnnnnnnnnnnnnnnnnnnnnnnnnnnnnnnnnnnnnnnnnnnnnnnnnnnnnnnnnnnnnnaacaacaaaaaattttntgactagaagggaagctgctgccctgaagataaaagaccccaggcctgacaggatttatcacttgctgactaaagagcccttgnctcattgaataaacatcaacaatagacaggaattagtctctacatgctttgggtgagacccagtactgtcaggtgtgatctagcacagtcttagcagtggtggccatgggagtgcttgcatcacctctaccccaactattaagaatctcagcacagagagagag

SEQ ID NO: 306635 - DNA, 509 bp, Homo Sapiens
  misc_feature (119)..(134): n is a, c, g, or t
  misc_feature (317)..(317): n is a, c, g, or t
  misc_feature (467)..(467): n is a, c, g, or t
taacaataaagttttcttaataaataaaagtttataagcatagtaacaagtaacaaaatagagacaatctggaaagctgtcataatagcaaatttgtatattttcctatttcattctgnnnnnnnnnnnnnnnngtgcaagtaacactaggcatgtgaaggtaatgatgagtggaaaccatgtggggaggaggcacgagccatgcctcctccttccagtcaggatagtatcagtggaagcctaatgggaacctagcactcccacctgctacccagcagtaatgagtagcctctcccatttttgagtgtcaacaaganggccgagttgggaacctgaacttctatccccatatgggcagtaatgaggtagtatctccctttcttctggatggagcagtattaggaaaagccatataaaacaaaaaatttaaacaagatccagtctcttaattctcaaaatatccaganttcaattgaaaataacttataaagacaatctcaactagggtg

SEQ ID NO: 306636 - DNA, 509 bp, Homo Sapiens
  misc_feature (371)..(461): n is a, c, g, or t
ttttttccaaataaggatggccacatccacaggttctgggatgtttacatattttttgtggtgggagccaccattcaactcactacaaaggccttggaaatacatcctaagagcttaacttctaggcgtcatagcatgttaagtccacgtaccaggtgaacacatcacctcatttgtctgtctgaccaaggttcacgggaatgactcattcgaggcatttcaggacaactaaagggatagaggacctggccgggtgagtggcagaggtggggaacctgttgtaagtacacccctgctgtggggggtggaagggagagatggccaaggctggaatcatcatgtaattcccaccgggcttaaggagtctcagnnnnnnnnnnnnnnnnnnnnnnnnnnnnnnnnnnnnnnnnnnnnnnnnnnnnnnnnnnnnnnnnnnnnnnnnnnnnnnnnnnnnnnnnnnnggataatggcatctgccttaatagtgttgctgtgagaatgaaatgata

SEQ ID NO: 306637 - DNA, 487 bp, Homo Sapiens
ataacgttacttaatcacagtgcaatatatacccagttttgtactatctatgaacaaccagctagagtgacaagagtggtctgtttcactggaatgcgaagaggacatgtaatattctaaaccttgactttttcctgccaaaagttgctatgttgcatttttagccaaaaaggaatccagtgaacataatctgagtactttgcaattttcctgggttttcggtaactgaaagaccactgagcaagatcctaagagattgtaatgtctagcatggcagccagcagccccaatgtgtggttgtttaaatttagattaattacaagtgaaaaaaatttaaaaattttcgggtagcatcttctactcatgaatgtcttttacattttacttgagaaaatcaagctcctcttccgttggctttcttagttgcttgtgtgattattcaaagatgaaaaatgctggagttcagagttccctggtgcttgacacg

SEQ ID NO: 306638 - DNA, 508 bp, Homo Sapiens
atgttcacaagcctaatgaagacttctaaagacttctcccccagtcccactaccatgtcattgaatgtatggaactgtagtcaagataactgtatttgcatgaaaatacagttgggtagtttagatttggacttggtttctggtgagccttgattgaatctacaccctatctctgccttttgttgagccacttgacctagccaagtatcagttttgttttttagctgtaaaattgggataaatagagctatcactagtgtttattgaggcggtgcttagcccctgttcataaattcttgatatgggttggtgccaccaatctgacacatgggcacaaaggaggagggaccgggaaggctacacagctgccaacagactctatctggacccagctttagtcaagacctcgcttttgtccttcccagcctcagtagaagtccctgcagtgcgaacctcctcacccttgatgtctgattgagttcctcatcccctggccttgatgtctgag

SEQ ID NO: 306639 - DNA, 486 bp, Homo Sapiens
  misc_feature (254)..(254): n is a, c, g, or t
gaagggcatttgttttgttgggatagctacataacagtctgatactgagtcttatggtttatgctaagtggttcttcacaagtttccttggttttcctggctgataatgtttgcatagaggacagacaaaagggggctggaactgacttgttaaaaatagacgtaaaatgaattctgttttcagctgtcactgatgctcgcaactgcatgtgatgtcctgggccatgggtgaatcctttgaacttaatgcaganaatgtcttgtgagtagatatgtggagatgtgccgtatggaagtctttcagcctttctgttaagtggcaccttacctccatcattcattgtatgcggtgtcatagttctgagtccttcctaggttccctggggcagactggttagctgcctttgccctctgaaataaattactacttctccacctactttttgtcttccaaagctttctcaagatgtctaagtggatataatc

SEQ ID NO: 306640 - DNA, 128 bp, Homo Sapiens
aactttttactgacaagagagattctctggcacgaactgaaggtgccctctcttctgggtgatgtgtattaacattgtactgagtctggttagggtggctcttgacaggataatactttcttttttat

SEQ ID NO: 306641 - DNA, 471 bp, Homo Sapiens
  misc_feature (367)..(389): n is a, c, g, or t
tggcatatttgacctggggatatcaagaaagaattccccaaggaagtaaacctaaggtgagatctgaatgatctcatctgaaatcacatgaaataactagttgaaaagagtgggaaattgtactccaagcagtgactacatttgtaggggagaaagcattgtgtgccagttatcaagttatagtgtctcttggctccagatctactcttcttgccctactttgtgatactggagctggaccctgtaagcaattctcttttgccagctacgtagaatgttaacttttgatgtcagcagatggcaataaacgtgaccctgcaaggccataagaacaggagtatatctctctttggggttctggatctcnnnnnnnnnnnnnnnnnnnnnnncacaggaacccagcagccattcagaggagctccaacctacatcctcgtgccattccccacctcccgccactgtcagtggttg

SEQ ID NO: 306642 - DNA, 454 bp, Homo Sapiens
  misc_feature (30)..(30): n is a, c, g, or t
  misc_feature (55)..(55): n is a, c, g, or t
  misc_feature (112)..(385): n is a, c, g, or t
ttataagaactagatatgagtggaaaattnattgatattaatttcactaatagtnattcctcccacctgctctgagagcaagacatgaacagtgaaggagttctgggcatcnnnnnnnnnnnnnnnnnnnnnnnnnnnnnnnnnnnnnnnnnnnnnnnnnnnnnnnnnnnnnnnnnnnnnnnnnnnnnnnnnnnnnnnnnnnnnnnnnnnnnnnnnnnnnnnnnnnnnnnnnnnnnnnnnnnnnnnnnnnnnnnnnnnnnnnnnnnnnnnnnnnnnnnnnnnnnnnnnnnnnnnnnnnnnnnnnnnnnnnnnnnnnnnnnnnnnnnnnnnnnnnnnnnnnnnnnnnnnnnnnnnnnnnnnnnnnnnnnnnnnnnnnnnnnnnnnnttaatacttataatttctacaatcttaaatttttaaactaacaacttttaactatcctctactgtcttg

SEQ ID NO: 306643 - DNA, 455 bp, Homo Sapiens
  misc_feature (348)..(348): n is a, c, g, or t
aacagtgaccacagtttgaaactttaagagtatctttttcagcagcagagaagtgaagcttcaaaccactatctaataaaatagcaggattcttgttaagcattttccggttgtatagcagtaaaatgaaaaaacctattatttagagtttgcattacatgaatggaaaattcttggtcttttgattttttaacatttaaacttaattctaattagaaactggtgaactgggtgtagggggaaaactccaagtgtaaaaagacattattcttacagtgacatatgccggctgttaggtattattttcacagacagtaatttatacaaataactccagcttttattagngctttaaatattacagtataaatgaggtatcatttccaagattgaaaatggtttaggctgtctccaacgctttttatggaaacatgggtaatttgtccatctggata

SEQ ID NO: 306644 - DNA, 361 bp, Homo Sapiens
  misc_feature (20)..(20): n is a, c, g, or t
  misc_feature (22)..(22): n is a, c, g, or t
  misc_feature (56)..(58): n is a, c, g, or t
  misc_feature (61)..(61): n is a, c, g, or t
  misc_feature (83)..(83): n is a, c, g, or t
  misc_feature (109)..(109): n is a, c, g, or t
  misc_feature (115)..(115): n is a, c, g, or t
  misc_feature (118)..(118): n is a, c, g, or t
  misc_feature (120)..(120): n is a, c, g, or t
  misc_feature (122)..(122): n is a, c, g, or t
  misc_feature (149)..(149): n is a, c, g, or t
  misc_feature (159)..(159): n is a, c, g, or t
  misc_feature (163)..(163): n is a, c, g, or t
  misc_feature (169)..(169): n is a, c, g, or t
  misc_feature (178)..(178): n is a, c, g, or t
  misc_feature (181)..(182): n is a, c, g, or t
  misc_feature (197)..(197): n is a, c, g, or t
  misc_feature (261)..(261): n is a, c, g, or t
  misc_feature (272)..(272): n is a, c, g, or t
  misc_feature (279)..(279): n is a, c, g, or t
  misc_feature (290)..(290): n is a, c, g, or t
  misc_feature (294)..(294): n is a, c, g, or t
  misc_feature (319)..(319): n is a, c, g, or t
  misc_feature (332)..(332): n is a, c, g, or t
tggaaaataccctttaacgnantataaaggttcccggacaaagaattaagttagcnnntgngatgcgtaaagagtaaaggtanagataagattggggccaggtactagntgagcnttnanantgagggctggtatttaggagggcagtngtttggggtncgcnaggagnataagggtnaannatgggattaggcagntgagtttggaacctgagcgcaggtggaagtggcaaaggcgctgagtggtaggagtgcattgtgntatttgatccnaggtggnttaataggtgngaanagaggtgggtttgtgacagatagcntgtgggtgggagntgaaatggggtgggagcacttgtgaaaac

SEQ ID NO: 306645 - DNA, 627 bp, Homo Sapiens
  misc_feature (492)..(492): n is a, c, g, or t
  misc_feature (521)..(521): n is a, c, g, or t
  misc_feature (570)..(570): n is a, c, g, or t
  misc_feature (576)..(576): n is a, c, g, or t
  misc_feature (604)..(604): n is a, c, g, or t
gtgaaacaaagcgattatatatagacagcacatacaaaggatcttgtgactgcaaagccgtagacgcaggggggtggcgcgggctggaggcagctcggcataggttgaaagctcatgtggcacagccgagtgactttccctttcttcctagtgcttttctgtagatttgccttcggtcaacaagtatcaactgaatccacacaccaggcacggtgccaaacacgttcaattcattgtgccgtttaattctgacaactcaggggtgggggactgctgactggcccgaggacgtaacagcaggtgcctcggaggcagatcggaaacccaaggctggtgctatctgtcacagcagtcactacgcagggtcccggggtctgaaggtagggcacctgggcaagccgacaagtatcaagaacccaaccccgaggccagaggggcttgctccagattccagtggattcgactccagagctggccttgttcagcctccgnggactgctcttccttaacaggtgggatgnattatgggccattaggggatgacaaacaatgggttaagattccaaagtngtgaanctctaatttggattccaccgaagacccnagagacctctgtgtcaaccaggc

SEQ ID NO: 306646 - DNA, 538 bp, Homo Sapiens
  misc_feature (467)..(467): n is a, c, g, or t
  misc_feature (479)..(479): n is a, c, g, or t
  misc_feature (528)..(528): n is a, c, g, or t
ttgggtggggtgctgggggagggtactctggttatgtgcctaacccagatctgagaggttatgaaaggctgagtcaatgttggctgagcaggaagaggaagagaatggaaaaaaggaggaaagaatgttccaacaataatgcaaaggcctggagagaagagtaactaatcatggcccattggagaaatgtggatctaaagttcagaagagagacatgggctacagatagggatttggaagacataagcatagagacaaaaattgaagccacaaagacgagaacacccaagaagagtaagtgacgagaaggcctatgtgaagattctttgacctctaagagacagaaaacatgcctgaaaagcagcatgcagaaaggtaaaaagaaaaaccacaggagaatggtatcacagaagcattttaaaaagaaggaagtggtccacaaaggtaaagtaaggtaacactatggnatatccatccanatttggccgccagaattcagcgacatctggggtgaggaggtagaacctncatgtggtga

SEQ ID NO: 306647 - DNA, 388 bp, Homo Sapiens
  misc_feature (19)..(19): n is a, c, g, or t
  misc_feature (146)..(146): n is a, c, g, or t
  misc_feature (316)..(316): n is a, c, g, or t
aagaaggtgtccagcaganttccactgcccctgtaggctgcaggcagctgcttcagttgagagatacactgagctcctcaaagaattcctatttaaggtacaaagcagcgactggatgccctgctggattccactattgccacagntttgataactctaagttcatgctccttaggaaagtgcactttttacaccaatgttagacagttccctcagttgcctttactggacatcaaggagttcacatttttgacaatctttcacgtcctgaactgtccaaggggtggaggtagctccatacaggaagctgcctgcntgcgtgtggatcagtaatatcaagacttgcccaacagctcactggagacatcaaaaccaatgcatgggggat

SEQ ID NO: 306648 - DNA, 398 bp, Homo Sapiens
  misc_feature (214)..(277): n is a, c, g, or t
  misc_feature (303)..(303): n is a, c, g, or t
tcaggtgtgaagccagaaagacctgctgaagcacgtggctgcaactcgacgagagcgacccaggggaccctgagtcagttcacacacgagggctcgtgcgcaaggtccttgtcaaatgccacctacacctggggccaccctcattgaaatgtcactcccagcccctcaattcccacttgctagttgcctactctactgtatattctagtttctnnnnnnnnnnnnnnnnnnnnnnnnnnnnnnnnnnnnnnnnnnnnnnnnnnnnnnnnnnnnnnnngtctgccccacgtgccaagccctcangtgctaagcgaataatgggcaagtcatgtcagtgggaaactgcttggcaccgggcaggccctgccttgatgtgccatctgtcctttttattgttg

SEQ ID NO: 306649 - DNA, 361 bp, Homo Sapiens
  misc_feature (168)..(168): n is a, c, g, or t
  misc_feature (263)..(263): n is a, c, g, or t
ttgaagaaccagttggtggagctacccccttatacccagctggctgtctctttgagtcatcattggaagactgacatcccgtgtcccttgggaccggatggtttgtgctcttctagttttacaaatgcccccaccacattcttgggtgtatctgaggcccagtgtggntgcagttctccagacttgcaggaaccagtttgatttcccagggctgttgactttttcttgtacttgtatcattgcccctgactttgacggcttanggggaccaatggagcactgggggaaatcatatgccctcaagtcctcactaggggctgggccatccattaaacaaaggctgtccagatggtgttaatga

SEQ ID NO: 306650 - DNA, 410 bp, Homo Sapiens
  misc_feature (287)..(287): n is a, c, g, or t
  misc_feature (336)..(336): n is a, c, g, or t
ggtgagagaggtttgttgttcaggaggagaacgaagaaggtgtgaagaccagcctctgtggatactcatcttcatggcaacttcactgcccccaatacagaattatttgctttttataacacctcagcctcctttaccacagccacaaaaatgtcagactcacatttcaatcttagatcactacttcctggcttttcggccctttctcactctatacaccacactccacttacttttcaactttaccaagacttctacgtgcctgatccctgcacttctactctcanggacattcctggcgtcttttcctttctgtgcttaacctagaactctatnggataatatcccaaatatcatcaaaccggcattatccatggcctcatgctctctaccttctacttctgctgggg

SEQ ID NO: 306651 - DNA, 399 bp, Homo Sapiens
  misc_feature (20)..(21): n is a, c, g, or t
  misc_feature (80)..(80): n is a, c, g, or t
  misc_feature (329)..(329): n is a, c, g, or t
acacaacaaagccaggaaanngctgaccatggctcatctggtggcagtgcctgaagctagtttatctggtggcagagccntggagaggcaggggtttctcaccagaatctctagcactgccctgctcccttccttcctgaggcctgggtggtcagctatgtgcactccccagtgttcctcctacaaaccttttcttccttcatgagagttttctgttcctgataaccaaaaacctctgaaacaataattaacatgatttaaagacttagccatcaccacaaagtttaagacgttgaacgttggatctcccattgcctggggttatttanggacacgagatactgtaagttcacacacatcaccaaggttctgggacaagatgtgttacacagaagccca

SEQ ID NO: 306652 - DNA, 397 bp, Homo Sapiens
gtgactgaattcccacaaaatatgaagcattaatgcaacctgctttcctcatgtccatagttaatgtgtgaagaaggaatgtgcactcttttaaacccatttcatgccatcctggatttgggaaggatggccagtcatgtggggactttgtggcctcttcccttgtgcacctcgggttcaagccccagttctgcgcaattgcagccagagagtggaaagagccagcctgatgatgatggtgatgctaacgtgcttgctctgcggcaggcattgtgctcaagtggttctgcgtgttattttaatcgaaatcctcacaacaggcctgagccgtccggtatgttaataaccctgttttgtagattaaaaaattaaaacctgggtaataatgaaagctccc

SEQ ID NO: 306653 - DNA, 413 bp, Homo Sapiens
  misc_feature (168)..(168): n is a, c, g, or t
aaatgtgcttggtgaaatcagcaagaaaccaaccatataaaacagtgtgtgccgggctctgactgagaaactgaacaatggcaggcgcttcatctgggcagccatttttcttctctgcttctcttgagatacatagttaaagtagacacggcctcccacgcgagtgtnggtgggaccttgagacttaggaggattgcctgttttcagtgtccagggaatgactccatagatttgaattcttttccgtatgtggggatggttgctactacctcaccgccaagtcctcccccaagctgttaccacatgaagggaatacaaggtgctaggtaccctccttcctccgtttggccactaaagaggtcttagaaacatagcctgtaaatggtgtcttgtaactggcacactaaaaaagg

SEQ ID NO: 306654 - DNA, 246 bp, Homo Sapiens
  misc_feature (57)..(57): n is a, c, g, or t
  misc_feature (65)..(65): n is a, c, g, or t
  misc_feature (71)..(71): n is a, c, g, or t
  misc_feature (163)..(163): n is a, c, g, or t
  misc_feature (175)..(175): n is a, c, g, or t
  misc_feature (178)..(178): n is a, c, g, or t
ttagctttttgacatcttgcctttctccttaaatctgatcccttgtcactctttttntatttttntgtttnttcctctcctgactttcatctgaaaccctgaaccctacaggccatgggagatgacctgtttcccagttttggtcactttttgggccatattnataaccaaaacnctnatttaaccagttttcagaaaattctcagcttcttcatcaattgatgaagttatctgactgacttttta

SEQ ID NO: 306655 - DNA, 354 bp, Homo Sapiens
  misc_feature (36)..(36): n is a, c, g, or t
  misc_feature (267)..(267): n is a, c, g, or t
  misc_feature (340)..(340): n is a, c, g, or t
agtcatcagatctcatgagactcattcactatcatngagaacagcacagaaaagaccagtccccataattcagtcaccttccactggaattcaggatgagatttgggtggggacacagccaaaccgtatcagtatagaacatcgatagagggtatcagttattaagaaaatttatattcattatcaccaagggtccagtgttcctttcatgaatctaaatatcagcttggaaaggaacttttcaactatttctaatatttggttatnagtagaatatgaaatacaagcattaatgttccataaaactggttttttatacacatttatgggaattccatcnggcctccaatagtg

SEQ ID NO: 306656 - DNA, 276 bp, Homo Sapiens
ggcaacacagtaactaatatgaaaatgtcatcttaataaaacatctagaaatgctggataaattagtctgtcaaatgctgagctcacaaaagagtaaagctttcagcaaccctggaggaacctgtcaatacgagtaactaagatttttggcttttaatgcccttaaagtagacaaggcctcagaaaccttgtctgcatgaagcgcagagctcggtattgagggtttcaccattttttacacattctcagtgcaagaatggacaggggaggctggtt

SEQ ID NO: 306657 - DNA, 370 bp, Homo Sapiens
  misc_feature (347)..(347): n is a, c, g, or t
  misc_feature (359)..(359): n is a, c, g, or t
cactgttcaatctacagcatcttgaacatcgcctgacatatagtgggtactcaaaacatagttgtcaaatgaataagtgatacatgtagaaaagagaaagaagccgacttcgctgagaaaatgccacatgcctcatggatctgttattaaactgtgagctggcagaaaggataccaaagagctgagctctgcttacagcatggccaagtgatgcttaccttagggccaagtttggtttccctgctgcaggaccagtattttacctgagtaaaataggcaatcaccaaacccagggtaattgagtattaagggagtggcagagcatggttggtacttaaaagcccctngtctccatgtcnctccccaaatt

SEQ ID NO: 306658 - DNA, 487 bp, Homo Sapiens
  misc_feature (141)..(173): n is a, c, g, or t
  misc_feature (219)..(219): n is a, c, g, or t
  misc_feature (225)..(225): n is a, c, g, or t
ataaagcagtattgacatgactatatatacaggaaaacaaaaagcctagacatagaaatacataccttacaaagtttaacacaataacctaaaagtgatgttatagaagatttttattttcttctttatatttccagtgannnnnnnnnnnnnnnnnnnnnnnnnnnnnnnnncttaagagacagggtcttgctacattacctaggctggagtgcaganccacgngtacaatgatagcacagtagagccccaaacttctgggctaaagcaatcctcttgcctcaccctcctgagtagctgagactatggggcataccaccatgcccagctatgtattgttttgtaatcagaaaaacactaaagcgatttctatttggaaaaaagctataacctttcatctaatttaataatgtccacagactctcagatagattcagaactccttttctagtccatacatgtgggaacaaaatgctatgatgtttag

SEQ ID NO: 306659 - DNA, 484 bp, Homo Sapiens
  misc_feature (96)..(96): n is a, c, g, or t
  misc_feature (225)..(225): n is a, c, g, or t
ggaagggttccaaactcacaaacggagctaaagtgctataaacatatccaggactaagctttgggctccacaaatgtactccatgaaagccatggnacaggaagtgcactttttatcctgtgtgtgtgcataagcttgtactttaaaggagccttttattacacaaagtgtccatcaactgaacttaccttctaaatattaaaatggaaaccgagattgctacgnagtgagaggaaaaataaatcctgcttttagtgcgtataaatgtggctgctgcctaagtacagtccattggaagtcacctgttgactccttaatgccctcatagtcccacatgttcagccactgcatctagtagcattaggttcaaatgggtgactttcccacctctggagaaaaacccaccctgagtgcctagagctccaccatgagacaagtgcatgctgttggggcagctcctcccccgggtttctcacctgggttt

SEQ ID NO: 306660 - DNA, 350 bp, Homo Sapiens
  misc_feature (61)..(61): n is a, c, g, or t
  misc_feature (137)..(137): n is a, c, g, or t
  misc_feature (284)..(284): n is a, c, g, or t
taatatgcctcctgcttctagggtagcagtgcccacccccagcaccattgtagttcatttnccacacggcagccagagtggattttataaaactcaagaatctgatcatgatcatgtctcttctgataatgacctgntttataactattgtcctggaacactctcaaaaatgtaatagtatattgtcttctagtccctgtttgtcatatctgtgatagtgggggaaatgattctgtgttcctttgactaaaacgtttacttctacggacaggatttggggttgngtacacactgtcaaattccacggaacgtccttgcagggtgataagtgttgcaaaacaaatgcaaga

SEQ ID NO: 306661 - DNA, 405 bp, Homo Sapiens
  misc_feature (325)..(325): n is a, c, g, or t
  misc_feature (330)..(330): n is a, c, g, or t
  misc_feature (366)..(366): n is a, c, g, or t
  misc_feature (389)..(389): n is a, c, g, or t
taggctacttggctcatctgagtttttcaaagtgttgcgagtctccaaaaacttctcagtgtgtttactgaaaatttatgtgtcagtgggcctgagtggttgaaaacggtgttattcaaaggccgcctgtatttctaattcgtccctctttgtgattactgctcggctaaattcagacctacattattagattattggatttatttcctaacatcctttctgcctacaagtttacttccctaattcctcctgctcagttttctgaaggatgtcatatagtagcgacgtcctcctgcgtaattgcttaattgacctcatcctcctngtcanccccactacatccaagacccctaaactctggctttntctccaggaaaaagatgtggctntttcctaaactccggg

SEQ ID NO: 306662 - DNA, 303 bp, Homo Sapiens
  misc_feature (219)..(219): n is a, c, g, or t
cctgtatttttcttttatacttgaattcttcaaaattttctttcgtgtgttttgttgtatcactttttcttagcacaattacaaaacaaatgtaattatttcacatttttcactctcttatgggatgcatgtactggaattacttctggggacactattccttcctttgtattcctggtcctaaaaaccaggtcagggtgttcacaagttacagactgntttctatgcatcacagaatcttttgctgattttattcctaaatgatagaatacggaagttaaaaaccaggtgagaaaaccaggg

SEQ ID NO: 306663 - DNA, 445 bp, Homo Sapiens
  misc_feature (373)..(373): n is a, c, g, or t
ttgaagtataggcttgagcacttcagttctagaaataaacctagtaggtaaacagcttcctgcgattaaatggctagctctggagtggaagaagcttctggtattcagggaacaccttactggtacattctgcattcatcgtggtataattagggacacatcacaagctctccactttgacttttggagtggttatttattacttggtgttcaggaagagggaaggccagatgagaatggaccccctccccacacaacttgtctgtccaagccactgacacagtaactgttcctcaacctcactgctgattgagagtagagctagctaacaccaaaccctcgctcttcctctaggtcagatgctgggcttgtnggcaacagttccaacaacaagctgactactatatacaaatgattcatttccagccttctgctttcctttaaa

SEQ ID NO: 306664 - DNA, 422 bp, Homo Sapiens
  misc_feature (279)..(279): n is a, c, g, or t
taaaactatgataaaaatttcccttctctataatggctacataagaaagaaagtatactcatttgtagcaggcatacttgcacagcatttcatccacctctttgtaaagaccagagggctttgtcttctctccagtaggtctttagaacaaaataacaacttgggctctcattagaactggttaatgtgctgtataggccatcctaagtgttggtatcacagcatacccaatgtccaagttgccatacgtacgggcatgctacagcttcattgagaaantgcttacgtcagttgggtttttaagggctcttttacagcatctacaggcccctctacagaagtcccttgggttttattttagctgaggctcatttttccttctcactccaagactgacccattctttgacctcagataaaaca

SEQ ID NO: 306665 - DNA, 445 bp, Homo Sapiens
agcatttaggctatttcaggaatctaaataacatctcagtcaaactaacattccgagagagaaatgttttaatatatcttttcccagagtagcctttaggtctcggagtgggtgcaaacaggctgggtgatggtcgatatatttgaagattcatgggaatccagaagttttggcagaggtacatatgaatctcaaggaaaaattaaatataatttgatataatgcaaactgcacagtagaatttgaatgcaggacaaatcacaacagctgtttgtcatctcactgaaacagcacgtaacaggattgcttaaacaaattcccgttcctttctagaatgttcagagtatttaatatttgcataatgattaatctcctgctccagaggaaattcccaaaggaagagacaactcagaagcactttaaattgcaacaccacggcaccact

SEQ ID NO: 306666 - DNA, 417 bp, Homo Sapiens
  misc_feature (149)..(200): n is a, c, g, or t
  misc_feature (353)..(353): n is a, c, g, or t
tatagagatgggggtctcactacattgcccaagctggtctcaaactcgggctcaagcaactctctcgcctcagcctcccaaagtgcctcagcctcccaaaggcattagcaccatacgaggctgggagtttttgttacgggccagggtannnnnnnnnnnnnnnnnnnnnnnnnnnnnnnnnnnnnnnnnnnnnnnnnnnnatccaggcaaactcctactgaagcctaggggtacacttcaagtctgctgccctttctgcagccaaaagcttctcagaggcccccaaatcacagcaaataaacaactgaccctgtatgaaaaaatatatatatattcagaactttccttggatncgggtgggtggggataggtttgggtgggtttgtacggcaccaagaataagaatttagccttttg

SEQ ID NO: 306667 - DNA, 178 bp, Homo Sapiens
  misc_feature (66)..(66): n is a, c, g, or t
  misc_feature (73)..(73): n is a, c, g, or t
  misc_feature (103)..(103): n is a, c, g, or t
  misc_feature (105)..(107): n is a, c, g, or t
  misc_feature (111)..(111): n is a, c, g, or t
  misc_feature (114)..(115): n is a, c, g, or t
  misc_feature (122)..(122): n is a, c, g, or t
  misc_feature (130)..(130): n is a, c, g, or t
  misc_feature (135)..(135): n is a, c, g, or t
  misc_feature (146)..(146): n is a, c, g, or t
gaaagtgggcaaagtcagcctggtggatttagatggcagtgaacgagcaacgaagacaggcgctgnagggganaggctgaaggaagggagcaagattaacaantnnntcanaannttcggtntggttatnttagntattgcagatnagagtgctggcaaaaagaagaataaatttgtt

SEQ ID NO: 306668 - DNA, 288 bp, Homo Sapiens
aggtaaatctcactgatatggcttattttccccaatatttccaggataaggcagtaaaaggtaggcaaaggaatagtttatatctactatgccagtggagaatgagatacattcaattgcatgggtacattctatgcccattttctcgacgctgaagagatgaagtgtcaccgtttgttttctgggcacaagctattctagcatgggccgttggggaggcaggttgggcaggaaagttaagtgtgcacatggtctgcaggtgttttctattgagtatctgtcagggta

SEQ ID NO: 306669 - DNA, 450 bp, Homo Sapiens
  misc_feature (197)..(197): n is a, c, g, or t
  misc_feature (233)..(374): n is a, c, g, or t
  misc_feature (428)..(428): n is a, c, g, or t
gcctgctctaagccaagcacatattaagtgtgatacaatcatataaatatttctagacaaatgtctttaaggcagatgcttttgaaaatggaaggatctgtctccaaaatatcactttgatcctgtactatctggaacaaaaacatcactggagactactagttatcgttccctttgtacaggaagactaagcaganttgggatagtcgctgaaaccctggcaccagacttgnnnnnnnnnnnnnnnnnnnnnnnnnnnnnnnnnnnnnnnnnnnnnnnnnnnnnnnnnnnnnnnnnnnnnnnnnnnnnnnnnnnnnnnnnnnnnnnnnnnnnnnnnnnnnnnnnnnnnnnnnnnnnnnnnnnnnnnnnnnnnnatgcctagcacttaagcatcctggcgtgttagatcaacaaatcacacgaatatnttttgcattgccatttcagagg

SEQ ID NO: 306670 - DNA, 380 bp, Homo Sapiens
  misc_feature (114)..(114): n is a, c, g, or t
gtagtccttggcatagaaatggatgaaattgccccttgaatgcgggtacttgaaactattgcatttcgttctccggtcctgtgatgtgaatgctctgaaggttttatggttgtngaggtggggtgggggacaatcattaactcaccagcaccaagcatcaccagctcccaccctgtccctggtccaagacttgagtcagcaaaatggcgccacaggacactaaagaagccttaaaaccaagataatacggaccacctccacccaatcctgatgttcgcagggctgaaagttaacagagcacaagaccacctttaagttaagatgtgggctttcaagctttttaagggaaatgactccgaacaaatttttcatctatttca

SEQ ID NO: 306671 - DNA, 320 bp, Homo Sapiens
ttaatttcaatagtttttagggaacaggtggtattttgttacatggataagttccttagtggtgatctctgaaattttggcgtacccatcatcaaagcagtttacccaatgtatagtcttttatctctcaccccctcccaccttccccctgagcccccaaagtccactgtttcattcttgtgcctttgcatcatcatagcttagctcccacttacgagtgagaacatgcaatgttttggttttccattcctgagttacttcatttagaataatggtctccaactccatccaggttgctatgaatgccattattttaattc

SEQ ID NO: 306672 - DNA, 359 bp, Homo Sapiens
  misc_feature (133)..(134): n is a, c, g, or t
  misc_feature (207)..(207): n is a, c, g, or t
caaatgcttcaggtcctctgcgtgtaactgtgaccttggcagcaagcacaggaattggccattgaacatgtttcatgtacagcccctgaaatgctatgctagaggatatttacagagggttttaatcagagannagtatttgaaaaaattttgagaatccaataaggacagcatcagaaaacaagacgaggaactcatggaaacaangggataagaaacataattaaatggttttggagattaagttttacttttgctaatgttatgctttttgagaaggtaaactatttaaatcacagtgaatttgactttggtctttattgatttgtctcgtaaaggaaaaagtaaagattgctagt

SEQ ID NO: 306673 - DNA, 381 bp, Homo Sapiens
caggtggctcttaaaaacctctggtaccatccaatttaaaacaagtctgactgcttatgggtttgacttggttttcatccttaacagaactacagtatctcttacttcaaaaatgctaaaatatgtaatcgcaataaataatttaaatcaaacaacgggtcactaaaatttttactgggagttccattactgttgtgataatgctgggaaataaacttcaaagttttttgggaacagaattatcagcaggcaggaataagcaacgggacacatagggagagccccctgaggttggtattaatctctcatcatgcattctccccttccccacttctcaattgcacagccagcatcttcaggtgctgaattcacctcccttac

SEQ ID NO: 306674 - DNA, 428 bp, Homo Sapiens
ctattttgtatcacagtaataaagcaacttttagtgtttagcctgtgtaaatggcacctccctattcttttcttactgtcctttgcaaccctgaagttcagataagaagcaaaggacagtgccagctccatggccattgtcctcagtgcctggtgtcgtgctggtctaaaagcctcataagcccccttaaatgcctcctcctacattccctaagtgtttcactcagaggttggctatcctcttttctgtgtatccttcctaaccagtgatccctcaagtaatgcaaggttagcattggttaaagtgagatattattgtccaatccccaaagtgggtttttactaccatggcaggcagtgtagaaagcctttgatttcatggcagaatgcttggctagttatcttttgtgtcactttaaacgaattgat

SEQ ID NO: 306675 - DNA, 306 bp, Homo Sapiens
tgacacctgcacctggcctcagtgaagtttttccaaacctcctgattagaccaattccctgttatatttatttattcattcctctaacaaacatctatggagcacctaacgtgtgtcagatactgttcttgctactggagacagagcaatgacaacaatcaaagcttttgctctcacgttctagtgggagaagaaaatgatttttaataagcaagtgaataaatgtcaagtgatgacaaacgtcaggtagagtaagggatgggagtgctagtctagatacagtggccagggaaggcatctctgatg

SEQ ID NO: 306676 - DNA, 374 bp, Homo Sapiens
  misc_feature (226)..(226): n is a, c, g, or t
ggcacgagctggaagaattaatggggctgggctgtgaaggcttagggagttctcagccttgtgggctgagcctgatgatgtggaaagcttacaggagggcagtgtgagcccctgactgcatggggcaagctgtccggtaaaagtataatgccagctactcatggaatttaaaacttttctagtagccacattaaaacagaaaagaaaacaggtgaaatcgattttnataatagattttatttaacccagtatattcaaaacattatttcaacatataatcagcataaataacttttaatgagctatttggcattctttcttttggtactaagccttcaaaatcttgtgtgtattttataccacagcacagctga

SEQ ID NO: 306677 - DNA, 450 bp, Homo Sapiens
  misc_feature (48)..(60): n is a, c, g, or t
  misc_feature (284)..(284): n is a, c, g, or t
  misc_feature (349)..(349): n is a, c, g, or t
  misc_feature (428)..(428): n is a, c, g, or t
tgtgattcttggtatgtgatacatatgaaacttttaagaaacatcaannnnnnnnnnnnnaagtactgtagaacagcataatcttgtccatcagcctcagtaaacatcatctgagatgacagaaattaatgatgtcataggctgactaatgtggagcagcagaggacatttcaggattcttttgaacttcacatttacttataaatggctgcacaacattccccagcagaacctgctctgccagaatgggtggtaactgctagagggtgcagatagcctggcantttctctggcacacccctttttgggttgatgatagaagagctgcttaggtgttccatgaacacangttcccttgattggtgccctggatggattcgcctcccgccagttatgctcagtagccactctaggctgttcctgtattngaaagaatgatggtcccagagt

SEQ ID NO: 306678 - DNA, 399 bp, Homo Sapiens
  misc_feature (379)..(379): n is a, c, g, or t
ctgagactctttatgtaccaggtctttattttcttgatcattatgctctattagaaatccctggggtcagaaggtatcggggaaaagacagaatggaaaagaatgaagatgtggcagagggatgcaggatgcttggtggggagtcgggctgggggtgatggctaggggacattgtgctgaagcattggcctcttcggattgaacaccaaagagaatattatgtcatctgctacctcactctaaatctgatctggagagacaggccagaccacagagctcgaaggcattggatgtcctgccttgtcatttgttaggtgccaagctgtgagaaattaagcaagataaagttttggctttgacaacagcagtgagtaaccanagggatggggagtttggtgt

SEQ ID NO: 306679 - DNA, 428 bp, Homo Sapiens
  misc_feature (152)..(152): n is a, c, g, or t
catcctaattattcactaaacatgtttgtgcatgtgaaatattctgtaacatgaaaggcacaatacaaattaggtacagctattgtgatgccatactgagaacggggcaagccaataaattaagttcctctcggcacagggtaggaacttgngatgttttttattactccacatgatctgaatcttttttcctgcctggcttttgcattttacatcctacattggcatcaatttcacatcttgaaggtgccaatgattcctcaggcaaaccaccagggatttttcctaggatcaacattcatatggagcttagggctgcggctctctggctttgggcttcaggaattttggtttaccacaatacaatgcaaagcctggcattttcccagccaggtactacttaatgaccttgtgctgcttgctggtca

SEQ ID NO: 306680 - DNA, 377 bp, Homo Sapiens
  misc_feature (292)..(292): n is a, c, g, or t
  misc_feature (313)..(313): n is a, c, g, or t
  misc_feature (332)..(332): n is a, c, g, or t
gcaattccaagatatccattgtaattactctggatttaaatagaactggtctcgtagcacaagaattcctgatagcaagatacttttcataagataccttcaacccggttaattttttttctgtatctgataaggtaaagtttagttcaagagtacagaacacatttatttacttttttgtctttctgaaagtacaaaggaccacccttatcaatctgtctttcccagctacttggaactctacgtgacttttctctttgtgttttatagaaatacgtttgtttttatgatncatttttgaaattgtgatttngtagggtatgcagaggagnaaattcgggaaaatttttaaggtattctgaagaagacactttaac

SEQ ID NO: 306681 - DNA, 401 bp, Homo Sapiens
  misc_feature (196)..(219): n is a, c, g, or t
  misc_feature (312)..(313): n is a, c, g, or t
  misc_feature (315)..(315): n is a, c, g, or t
cattctgaaggttcaagatacaggcacaagaagcatcagggatgggaactgggtgtgtggggatggacatcattaacatgacaaacacagaaacagtttggttctttttccctcctaagcctttgtctgtgaaatggggttatggcaagaagtgtccagagtaactggtaaattcaagaagattaagaagacttcnnnnnnnnnnnnnnnnnnnnnnnngctaaaaagggatatcagacctagagtcttggtcttgggcagaagaggaagagaagcaatcgcgccttttccagcagacagggatcaaggttnntnggggaggggaaggcaggcaggcctcccagaggaaagaagaggtgaatacgagtgtgttcacaaaactactccccattcattacatt

SEQ ID NO: 306682 - DNA, 459 bp, Homo Sapiens
gatgaataaaggttgggattctattttctaagccctctcactgttcttctttctctctacaattaggatcctggatccaagaaggaatcaagtaacgagaaggcaatgagaggttgtcagatatagacaaggaggaaagggtgggtcaatgggcaggaagacctgggaaaatggagcccttttgggtgtctgtggacatacaaagtgcccaggaaaggaatggtagaagaaagacaaacacccctctcactacactggctctaataacctagcatcataagcccagaagggaccttagaggttcatctaagcaatggctcctcctccacctggcttcagtcaggaccacctctcagcttctagggagcacaacattgtgctttatcagtaccaatttctagagaaggtgatttgccaccaatccacaacctttccacaaacttcaagtaaattccagtg

SEQ ID NO: 306683 - DNA, 358 bp, Homo Sapiens
  misc_feature (42)..(42): n is a, c, g, or t
  misc_feature (60)..(60): n is a, c, g, or t
  misc_feature (252)..(252): n is a, c, g, or t
  misc_feature (313)..(313): n is a, c, g, or t
  misc_feature (328)..(328): n is a, c, g, or t
  misc_feature (336)..(336): n is a, c, g, or t
ttgacagcaaaatgttttaatctttcataatgaagactccantacctacatactgcttanggaatattttaggtggaatatttttaggtctacagggatcatttggatagtagatccaacgctggatccaactgtctgacgtaggaatcgctatatagtttccgaaagatccaccacttcaaggactcattatctattcaaggagcatcgtggtcccacaaatgcaatcagagtgtgcagtcctcaattgtnggatcttggaagaccaaagaaggcttcaacactgactggtttggcttggcacaacagtcangaaactgtcagcaantggccaancgggtttggcttcatttgatgg

SEQ ID NO: 306684 - DNA, 289 bp, Homo Sapiens
attttgttgaatgatgatttcaaatgctcataatactgcctctgagctgttactgttaaaggaaatagtctggtttccgccacacaacagagcatgctcacaagctaggagaacacagaagcatctcacaaactcatgggtttgctctcttaactgaacctatggttcacacaggtctactggtccagcctcctccaatcttaaagctgttctcacaaaacgttcctccccctcctaccttaacaacgctggaaaataccaggctatttgaagacaggagaaggctcat

SEQ ID NO: 306685 - DNA, 150 bp, Homo Sapiens
acctgtttgttaacaagtcaccaagggctggaaaaccagatactcttcagggttgacacaaaaaataggcacttaatttgctcctgagtgtgagccaccagggaaggcctcacccggagattagcaggtcagggccctcccgccgcccag

SEQ ID NO: 306686 - DNA, 311 bp, Homo Sapiens
  misc_feature (47)..(147): n is a, c, g, or t
  misc_feature (176)..(176): n is a, c, g, or t
  misc_feature (217)..(217): n is a, c, g, or t
  misc_feature (223)..(223): n is a, c, g, or t
  misc_feature (235)..(235): n is a, c, g, or t
  misc_feature (243)..(243): n is a, c, g, or t
  misc_feature (248)..(248): n is a, c, g, or t
  misc_feature (268)..(268): n is a, c, g, or t
  misc_feature (275)..(275): n is a, c, g, or t
aacccagctgcccatgctgaacacctgtgaggtacttcagcagagtnnnnnnnnnnnnnnnnnnnnnnnnnnnnnnnnnnnnnnnnnnnnnnnnnnnnnnnnnnnnnnnnnnnnnnnnnnnnnnnnnnnnnnnnnnnnnnnnnnnnntcacaacaccaagcaccagaggaaagcangtgtgacgggacgcaggaatcacatactaggaaaagtgganggacantgaagagaccanggaggaangggancatatatgaatgggaagatngcagganaggtatcctaatgagtcttcccacttcagggagcca

SEQ ID NO: 306687 - DNA, 420 bp, Homo Sapiens
catcttaatactgttaccggcttgtgggtgggtttagaggacctctcaatggcctggcctctccagggttttctggaattttaatcttttgaatgcactctgcaaatgagtaggccacaccctcagtagttcagctcagaggctgccaatgtataacaacttttcaaaatgaaatgcaagcattagacaaagcaggctgttgttctgaacttgatcagaatatctgaacatgtgtgctgactggttcaggtaacatagccccactttttctctagagaacatcctctggccttatcttccttcctgtgcttgtattggaactcatcacgtgactcagacctaaccaatcaaaacatagcctacctctgaccacagtgattggctaaagcctggtacatgtgacctgggtggggaccaatg

SEQ ID NO: 306688 - DNA, 377 bp, Homo Sapiens
  misc_feature (326)..(326): n is a, c, g, or t
accatgatgtttaatccaactgacttttcctctggccatgcaggcaaccgggtgcagacacagcggtatcctgtgtctggtcgcagaaacacctccatcacaacattttggcagaaggcactcaaaccagaccccaacacaactcggtgaccgccctcagaaacagctcaatctagtcttacaaagcacttttaataaatgacatctagatgtacttctcaaccatatcattacaaatcaaatgtgagttggggaagtgtaaaagtttacacttttgtttgaagcaaaaggactttcagagcattttccaattcatatatcttttnctaaaagggagtggagccttatgttctattcttagagcagaaattctagtt

SEQ ID NO: 306689 - DNA, 365 bp, Homo Sapiens
  misc_feature (251)..(251): n is a, c, g, or t
  misc_feature (257)..(257): n is a, c, g, or t
  misc_feature (282)..(282): n is a, c, g, or t
  misc_feature (337)..(337): n is a, c, g, or t
ttaactaattgtttaaaagtagcctcacaaattatatcaggctgtcctcgcattgctataaagaaatacccaaaactgagtaatttataaagaaagatttaattgtctcacagttctgcaggctttgcaggaagcatgatgctagcatctgcccagcttctgatgaagcctcagggagctttcagtcatgtcagaaggcaatatgggagcaggcatttcacatggcaaaagcaggagcaagcaacgttccngggttntggggaggggtgccacacacttttnaaatggaccagaactcatgagaactcagtatggcaaagaaaagcaccaagccatngagtcttggacccagacatctccccacc

SEQ ID NO: 306690 - DNA, 328 bp, Homo Sapiens
  misc_feature (131)..(131): n is a, c, g, or t
  misc_feature (149)..(149): n is a, c, g, or t
  misc_feature (298)..(298): n is a, c, g, or t
tcctatggcttcactctaaagtcttttgcatttgagactgaagactctttaacttcaaagtaaaaactgtagtaataattgagaatttttgcagcaatattactttatacttgtaaaactggtcatcttanaattttgtaaaatagtanaatttagcaaaattgatactagaaaatttatgaaaatatcttggctttctcttagtagtttttgtaggctcttaagagtgtatcattaagctttacgtaacagattcttttcaatcaagtactggaatcagttgtccaggtggagtaantacagaaaagctaaagggtctagaaaccca

SEQ ID NO: 306691 - DNA, 385 bp, Homo Sapiens
  misc_feature (358)..(358): n is a, c, g, or t
  misc_feature (367)..(367): n is a, c, g, or t
cagtttcaagatgattttactaagcaggcagcccttaatttacaaattctagattcatacatatcttaaacatacaaaatgatatgaggagaggtaagttcagggtctgagttcctggctgttgttggaactcgatttctgtgtagtgattcagaagatgtgagacaccctaatttacaagtacagaggtatcttcttttctgcaaacagcagtacaacaatagttcctcttacgcagctgtgaatgaacaggattattacaattaatgatatctcatttgattgggcgcctttagagaattaagacctttcacacctaatatacaactttgttgtggaaggcagatatttatattcncattttacngatgagagactacccgga

SEQ ID NO: 306692 - DNA, 107 bp, Homo Sapiens
  misc_feature (64)..(64): n is a, c, g, or t
  misc_feature (80)..(80): n is a, c, g, or t
  misc_feature (97)..(97): n is a, c, g, or t
gaaaattgattgttgatattttgatagtgttaagaaggaagatttgatgttgttgttattttgnagttgggatttaatgntgggttgagtggttgtnagaatggaat

SEQ ID NO: 306693 - DNA, 232 bp, Homo Sapiens
  misc_feature (45)..(45): n is a, c, g, or t
  misc_feature (74)..(74): n is a, c, g, or t
  misc_feature (76)..(76): n is a, c, g, or t
  misc_feature (85)..(85): n is a, c, g, or t
  misc_feature (98)..(98): n is a, c, g, or t
  misc_feature (109)..(109): n is a, c, g, or t
  misc_feature (121)..(121): n is a, c, g, or t
  misc_feature (140)..(140): n is a, c, g, or t
  misc_feature (163)..(163): n is a, c, g, or t
  misc_feature (168)..(168): n is a, c, g, or t
  misc_feature (173)..(173): n is a, c, g, or t
  misc_feature (184)..(186): n is a, c, g, or t
  misc_feature (189)..(189): n is a, c, g, or t
  misc_feature (194)..(194): n is a, c, g, or t
agccagggcgtcggtgagtggacagcagaatgccagcaccagttncgccagcacgcgtgacattgcaacacccngnacagggatncacaggttttttnggcagggttcnactccgaagtantcgggaatctggctttgtntatggcatctcctcaagctggangttgnatttnccatcagcagnnngcngtatncaacggagaacgtaaaatgctgtttcctgtgattcaaa

SEQ ID NO: 306694 - DNA, 449 bp, Homo Sapiens
  misc_feature (280)..(280): n is a, c, g, or t
  misc_feature (365)..(365): n is a, c, g, or t
  misc_feature (413)..(413): n is a, c, g, or t
aggcacatctcacatggcagcagacaagacgagagcttgagcagaaaaactcccccttataataatcctcagatcttgtgcgacttactgtaacgagaacagcacgggaaggacctgcccccatgatgcaattacctcccacctggtctgtctcacaacacatgggaattccagatgagatttgggtggggacacagccagaccatatcagaagggctctatctcagtcctgcccgtttgccctgaccttgtggccatggtggctgctcctggggaaagncgggtctgcattcctccatagcctgagaggggcttatcttccccctgcttcccagtgttgcagagggggaagacaggaggttggnagaaaggggaggctgagagcccgatgatgtttgcacccctggcctganccacgagaatttccttccctggcacacaaagttgca

SEQ ID NO: 306695 - DNA, 573 bp, Homo Sapiens
  misc_feature (128)..(128): n is a, c, g, or t
aatcatgcctgtgtaatgaagccttcataaaaacctaaaaaaggacggggtttggagagcttcctgtaagcgaacccgtgaaggttccaggaggatggcgcacccggaaagggcgtggaagctccgcncccattcccacagactttcccccatccatctcttcatctggtgttcatcgatagcctttgtaatgtccttaatagtaaaccggaaaacgtaagtgtcttgcctgggttctatgagctgctctagcaaattaatcaagcccaaggaaggggtcatgggaaccccgactttacagctggtcacgtcagaagcacaggtaaaactacctggggcttgtgattggcatctgaaatgcggccggccagtcttgtaggcctgggctcttaatctgggggatctgatgctgtctccaggtaggtagtgtcagaattgaattggaggacaccccagtggtgtctgctgcagaattgattgcttgctccggtgtgtggggagaaacccctacacatttggtcgcagaaatcttctgtgttgattgttgagtgagagtataggagaagctgagtt

SEQ ID NO: 306696 - DNA, 478 bp, Homo Sapiens
  misc_feature (281)..(281): n is a, c, g, or t
  misc_feature (339)..(339): n is a, c, g, or t
  misc_feature (343)..(343): n is a, c, g, or t
aactcccagtgacattgcgatatgtctggaatggaatctaatcccttctccctaagaggttagtgaattccttagtatggagcagctgagggaattgtctctgtccaagtccatctggatgcttctgactcatctgctgatcctcctctgcgtggatgtctggcccacaccctaaagctaatctgagtcccaaggggcattttcttgtccaaaagttgatatgctaatttcagagaagtgctagcctttctgtctaaaattgctcacagttcacacctcantgtcttgtcttctgctctgtttccttcctaatttggcattacacaggtctgtgcaaanccangactttaaggaagttccctctcctcccgtgtcctctgccaaatgcttcccgtctgtcattggcaaaggctctgtcttgccatgatgggagaggccaggagctgctccaaagctggtggaaagagagccgttccac

SEQ ID NO: 306697 - DNA, 476 bp, Homo Sapiens
  misc_feature (407)..(407): n is a, c, g, or t
  misc_feature (436)..(436): n is a, c, g, or t
cagcatcggtttacgaaccctgctgattgttcagctagcaccatggatcagggagtaatctagatgcataactcagagatactgctggtctggttccagacattgcaatagcaaatatcacaataaagcaagtcacactaattttttgatttcccagtgcacataaagttatatttacactatactgtagtctataaagtgtgcaataacatgtctttaaaaagtatatatcttaattttaaaatattttattgctaaaaaatactttgtaaaaatgcttatagtcatccgagctagatcttctggataaattgttgcagcttctccatcagcacttgctgcctcactttgcactttcaccttacggagatggcttagtttcctaaacttcatgaacccaacttctngctagctttcaacttttcttctgcagctncctcacctcacccagccttcatagaattgaagagacttgg

SEQ ID NO: 306698 - DNA, 456 bp, Homo Sapiens
aggacgagtgtatgtctcctcgtggttgtgtggccaggcttttgtttcccttgcagcacttaaaatgctgggcatgcgtgtctagatacctcaccagatgtgttcccacccaccctgctggttgctgccacactccactgtgacttttcagagctcttgggctgtttctgttgcccttctcctctactggatgaccacctgctgtgagattatccctgggatctctgattatagcccaaggacacctaagaagtttctagggaaatcagatagccacgtaacgtttttcaaacttgaattagatctcttttctgcccaatggtgactattctttggtgcacactgtaggaaaatcaggtccttcctgtgctaaacttaaactcgatagttgttgagtgactccttttactagtgatgattacaaatagagatccagagtcattttaatcatggtcc

SEQ ID NO: 306699 - DNA, 263 bp, Homo Sapiens
  misc_feature (64)..(64): n is a, c, g, or t
  misc_feature (89)..(89): n is a, c, g, or t
  misc_feature (190)..(190): n is a, c, g, or t
  misc_feature (195)..(195): n is a, c, g, or t
  misc_feature (214)..(214): n is a, c, g, or t
  misc_feature (225)..(225): n is a, c, g, or t
  misc_feature (239)..(239): n is a, c, g, or t
  misc_feature (249)..(249): n is a, c, g, or t
cacatctttcaaggatgggagcccacactctcctcagtgagcatcaaatttagtggggaccaantcactttccctcacctcctctgctngtgacaggacaaaatggtacacagtctgacaagttcacccgggtcccccaatggccagggaaggggcgcataattcaaacccaacactgcctcttctgtgnaaatngaacagtcgggagcccttngagctcctttngccaggaagggaanggcagttgancagtggaccaccgt

SEQ ID NO: 306700 - DNA, 379 bp, Homo Sapiens
gagaagggaagctactttttcattgctgaagtccttgggcagtgggtaagaagaaaaggtaggaaggatgatggtgaagaatgcacttctctaaataggaatgagaatggctgaggccatttccctccttctgggtatcctgccatgaaattgagtagacctagggctcagtggctggaccagaatcaggaggactgatcagatgagggcccttggtttgggccacattggtggggatgctacagaaggagacaagacctcagagctcatagggataatgtctccagacaagggcctcatccttcccaagttgcaagcatgctgccatctagaattctacaacaaaggcaggcacaaaaacagtgagagggctcaggca

SEQ ID NO: 306701 - DNA, 369 bp, Homo Sapiens
  misc_feature (71)..(279): n is a, c, g, or t
  misc_feature (291)..(291): n is a, c, g, or t
gctggttcagttttagtgaataggtaatgttcactcgaaaatatatcaatagatattaacaagcaaacaannnnnnnnnnnnnnnnnnnnnnnnnnnnnnnnnnnnnnnnnnnnnnnnnnnnnnnnnnnnnnnnnnnnnnnnnnnnnnnnnnnnnnnnnnnnnnnnnnnnnnnnnnnnnnnnnnnnnnnnnnnnnnnnnnnnnnnnnnnnnnnnnnnnnnnnnnnnnnnnnnnnnnnnnnnnnnnnnnnnnnnnnnnnnnnnnnnnnnnnnnnnnnnnngtagtagtagtngattgtttgggatacctgtaactttatctccattagaaatgtcagatattttaatatcatcagttagtttttgcaggt

SEQ ID NO: 306702 - DNA, 242 bp, Homo Sapiens
ccatgcactgagggctgtatggtagttacacctgggggtgaagctggtctgtccctgtgaggtggcaccaggtggcctcattttcaagccatccttcagaaacttcagagttgtcacctggcatttcctgtcagcctgaaagttattttaagaagaatgtattgtgaggccgggcatggtaggccaatcccagtgcttcgggaggcaacggtgggcaagatcactcgaggccaggagtgcga

SEQ ID NO: 306703 - DNA, 522 bp, Homo Sapiens
  misc_feature (333)..(333): n is a, c, g, or t
aaaatatcccccccaaatgtaattctaatgattatactaaagtctctcatttgatgaattaaaacgtacttaaccattttcttcctgtaaagtttttaggatgattttaccactgcaaatttgcaacctgagaagtaaaaatataactttgtgaggtcaaagacagactagaatgttcaccgtattcggaaaatcagtaagatcacagaaaggctcatcagctgcctgatgcttgagtagctcactcaagtgcttgtcgttgaatgcaaaatcttgtcttaagtggacaggtgtgtgaatccttccaccgctaatactctccttgcctgattnagtcaaggttgttactggtggtcccctgggaacagagtgtgcctccagtaaatccaaatataacaaaaggaaggaatgattttcagatagggatagacagctaagatggacaagacctttagaacatttccaattgagcagtgaatcggccttgtgggagccccaaaattgtccttaaggtgcagctgc

SEQ ID NO: 306704 - DNA, 609 bp, Homo Sapiens
  misc_feature (83)..(83): n is a, c, g, or t
  misc_feature (342)..(342): n is a, c, g, or t
  misc_feature (391)..(391): n is a, c, g, or t
  misc_feature (440)..(440): n is a, c, g, or t
  misc_feature (567)..(567): n is a, c, g, or t
  misc_feature (577)..(577): n is a, c, g, or t
  misc_feature (590)..(590): n is a, c, g, or t
gacaagagctatggctagggcttcttagctccctctccttctaggccagggggagctgcacagggtggcagtcacggagtaantcctgccaccagccagctgtgtggcacaggtatcttgggccactagggtgaacatagtatggatggctctgtcggaatccatcacacctggggaaaaacatcccaaagggcaggtcccatgatcgtggtgcgaataaggtgtttaattttcctttcctttttagacatctgctcccaagtacacttttatgaaaagcacagccacctctatgagtgatttccactgtctagtcggcatatgaagcgactgtgctcaaanggagtaggtagtcgtaagataaaggctatttaaaataaaaatttcgggngcatcagggcaaagagaatattgcatttggttaagaaggaggtggtcancttttgaagagtccattaaaaagggaacagactgctgggtgactttttgcaggaagtaggagagttagaaaagggacttgcagcatacctgaggccagctattgtccttccactatcagttgccctnaaggatcagncccctggttagcngaagaggcgtcaggtcaca

SEQ ID NO: 306705 - DNA, 408 bp, Homo Sapiens
  misc_feature (123)..(124): n is a, c, g, or t
  misc_feature (375)..(375): n is a, c, g, or t
  misc_feature (387)..(387): n is a, c, g, or t
aaacattcagctctaaagaaataatcacaaagcacctcggcctagatttttgcaaggcagtccttgccggagatcgggcattcgtgcacattcacccggagaccgtgctgtccacttccaganngggaggaagggcagcgctcagaagcacgcccagactgtctccagccctgctgccccctgctgaggccatctcgcctgctcagcccccaagttcccccacagtccatgtccctgggttatgaatgtcacctggtgtctgtcagatccccaccccattgttcttgtcaatgaagcacggagtggggtggacctgccatcctgcgaatcctttacagcctgcaagcgctgcctgccaactcttcacaaccattngcacccactaanaatccatttcccctggagctc

SEQ ID NO: 306706 - DNA, 377 bp, Homo Sapiens
  misc_feature (37)..(37): n is a, c, g, or t
  misc_feature (64)..(64): n is a, c, g, or t
  misc_feature (177)..(225): n is a, c, g, or t
  misc_feature (243)..(243): n is a, c, g, or t
  misc_feature (363)..(363): n is a, c, g, or t
aaaaccaaaacaagctggttgtggttcagcatcatgntttaggaatcaagctgtcagttgtgantcctactgaactgtgggttttccactgtaaagctccactgtgtccattaggaatcaggctgccagttgtgagtcctactgaactgtgggttttccactgtaaagctccactgnnnnnnnnnnnnnnnnnnnnnnnnnnnnnnnnnnnnnnnnnnnnnnnnnagctaaaatgtaatagangtttaaaattgggttccttggttgcactggccatagttcaggcactccacaagcccgcctgtgggcagttagttccagtggctgggtgcagaaggacgattctctgctccccgcggaaantctgaccaggcctc

SEQ ID NO: 306707 - DNA, 262 bp, Homo Sapiens
  misc_feature (95)..(95): n is a, c, g, or t
  misc_feature (112)..(112): n is a, c, g, or t
  misc_feature (177)..(191): n is a, c, g, or t
  misc_feature (205)..(205): n is a, c, g, or t
  misc_feature (211)..(211): n is a, c, g, or t
  misc_feature (232)..(232): n is a, c, g, or t
ctaacccttggcttgcttctcatccctctccagacttctgtattcttttagagaggggttactaccactggactcattgctctagtaagcaggtnaccacactactgcagantattgaggaaaggtctcttctggacccttgaacatcacctctaatacctgaagttcacactggcnnnnnnnnnnnnnnnctagttgtagtccnaaactncagtgtttgatttttttatgngcataccaggcttcccagcaggccaggtga

SEQ ID NO: 306708 - DNA, 406 bp, Homo Sapiens
atttcattagggtggttcagccggctgtcactatcctgacagtaggcaggaatgcaaaatccactttttaaaatagcctcattggtagaggaatattggcctcacctaacacccatttgggcctatcctggctggaaatgcactggcccacatctttatttgcatcctccaggattacaggacagtctcatttttcaggtggcatcatcacggctcataaattgaacaacacttccattagattgcgctaggcatcatcttcaaaactctaacatctggatgtttccaaatagcctgctatgtagatgattgatggctttcattcttgggttggattctgatataggccataagctgttgggattggaattggtggtcctgatgtgccagtatgtgatcaactgat

SEQ ID NO: 306709 - DNA, 609 bp, Homo Sapiens
  misc_feature (70)..(70): n is a, c, g, or t
  misc_feature (433)..(433): n is a, c, g, or t
  misc_feature (557)..(557): n is a, c, g, or t
aaaagagttccctaagtaagctcctactgggtgtcctccactcacatggagacagggccctgcttttagnacttactcttccagtgtctattgtataatatgttcaggaaggatcccagattcaaagatttatagaattagagttaaaagggatagatatcttgtttgaccctgaaaaaattaaggaatatgcttgagatattcaatggcagaggctggaatagattttcccaaatctcctgatgtgaagttctgtgtttgtcaaacatgactgtgtaaaaagattaatttaaacttaatgacatgttgtattcatagaagttctttgggtttctgtggaaacctcctcttgctagcttaagcagaaatgggggatttattggaaggaagctgagatattgcaccaaactgcacaaaattgaatgaagagctnactaagcaaggctgcactgagaaggaaccagggtggtctgggctgtggtagcggccagcaagcttgcagatctcccagcgctgatgctggctcgactcagacaggtctccactctctgctggcnggctctgggctcagacaggacacttgtgtgggctggttccctcccacaaggc

SEQ ID NO: 306710 - DNA, 280 bp, Homo Sapiens
  misc_feature (242)..(242): n is a, c, g, or t
  misc_feature (265)..(265): n is a, c, g, or t
cccattctcgctgctgaagtccacctcccctgggtaccacctccgtgaaggtggagaaatctcaccaccacttttgcacagcccatcatgggacccatcaggacccgatcagaatccccgtgtagttggctggcccagtggtggggtttgccaaagaactgtgggcatacactgagcctgaatccctcagcctcagtgactcatttgggacaatgaggacacttgcccccttaccccgcaangccattagtaaggattaacccgngacaaccccgaacac

SEQ ID NO: 306711 - DNA, 571 bp, Homo Sapiens
  misc_feature (464)..(464): n is a, c, g, or t
  misc_feature (513)..(513): n is a, c, g, or t
  misc_feature (529)..(529): n is a, c, g, or t
agtgaatacctatgagtttccacctttaggcaaacggaaagcattattcaagggggctacaattttttttatttaaactacccttctttcgatatcagaaaagatacataatgatatttggtatttagcttgcaatcatgtgtccacatcatcagaatcaaagcaattaattataagagccaacttaattcaattataaattcttattacctaagtaagtctcaagaaatagagtgatcgtgccagcactgtgctcggtttcatgcccaaatgcaaacctgccatctgctagggcacatgacaaggttctcaaagaaaagtgaccacacaggccatgtaacacgttcattagacacaggcacaccgctcttgggggggaaggatgctgtagccccatggcgaacggcagcagagccgccccacgccggggatttcagcgcagaagggaacctggttcctttgcntccacttgatcagcaggggacagtgctcctttgggaacaaccatctggnttccaaaccttaaatngggccccaaattggacatgcttaaagttcacagtacccggga

SEQ ID NO: 306712 - DNA, 294 bp, Homo Sapiens
  misc_feature (20)..(20): n is a, c, g, or t
  misc_feature (144)..(144): n is a, c, g, or t
gatttcaacctaagatcaangtgacttatacgaacaatcccttttccctgttattcgaataagataattcttcattttgagatattactctgacttattttaacattgtgagcagtttttctcagatggagccctgccatgagnataatcttgtaggcaattcttattgcctgaacaatcaccattttttataaacaagaagatgagccaagagagaagaaagtcatacaagtgtatttcttgcactggatttctaagtagcttgccccacgtgccaccataacacggaccatt

SEQ ID NO: 306713 - DNA, 382 bp, Homo Sapiens
  misc_feature (291)..(291): n is a, c, g, or t
  misc_feature (304)..(304): n is a, c, g, or t
  misc_feature (337)..(337): n is a, c, g, or t
  misc_feature (358)..(358): n is a, c, g, or t
  misc_feature (368)..(368): n is a, c, g, or t
taaagagaaactctgtaaagttaaaggactgcagaaatacatgggcatttatgagatgacatgcactcgtttgttgcagaccacctacgatgcttgctggtcacctacaagagtaatcccagctagcgctgaccccatgtgagaatcttcagataacttacttagtcctcaccacaaccctgtcacataactgggatcatccccattttacacatcagagaaattaggggaaagcctggaggactcactaatacattgcagcttccggggcggactgttgaagtcccttgnccgcattgtattngactccaaaggggggccacttcagagcctgttngccttgagacaacttctggtnctcggcgggntgtaacagcaggta

SEQ ID NO: 306714 - DNA, 397 bp, Homo Sapiens
  misc_feature (206)..(206): n is a, c, g, or t
  misc_feature (225)..(225): n is a, c, g, or t
gaaatatgatactactgctgtcttttaggctaatttcaattcacagacagtccctggcttatgagggttcaacttccgatatttcaactttacaacgatgagaaagtgatatgtgttcagtagaaaccctacttcaaattttcgaattttgattttttcccgagctagcaatacgccaggtgatcctctctcacgatgctgcgcanggcagcaacgccgacgctncccagtcagccacaccatcctagtcagccacacgatcagccacagatcagggtaaacaaccaatacgctacagggtactgtgctgccagatgattttgcgcaactgttggctaatttaagtcttctaagcatgtttaaggcaagagaggctaagctacttaagctattaagg

SEQ ID NO: 306715 - DNA, 277 bp, Homo Sapiens
  misc_feature (76)..(76): n is a, c, g, or t
  misc_feature (200)..(200): n is a, c, g, or t
  misc_feature (213)..(213): n is a, c, g, or t
gaagaagtattgtgagtgagaaccaaattccttactagtcctaccacctgagcttcaaggattgtggatatccagnggggaggagaactgatggggactggggcgagaaggtcagatctgaagaaactccaggggcatgagcagacccagcatccatggacaacgcagtatccactcacatgagcctgtgcaccaccggnattccggggctgnactggttgtcttgtcctttggcatccagtgaggacttcctaaggaagggcctgttggcaatttt

SEQ ID NO: 306716 - DNA, 380 bp, Homo Sapiens
  misc_feature (14)..(14): n is a, c, g, or t
  misc_feature (36)..(36): n is a, c, g, or t
  misc_feature (281)..(281): n is a, c, g, or t
  misc_feature (319)..(319): n is a, c, g, or t
  misc_feature (356)..(356): n is a, c, g, or t
  misc_feature (368)..(368): n is a, c, g, or t
ttttacggggaagnaagctaagaatttcagaaagtnaaacatcccacctaaatggctgcctaagttattaggtagtaggtttctttaactggaatcaggagagaattctggaactgggtttaaagttccagatttcttgaggaggcaagtcagtttcaataattgagtatctcatctccaagtgctttctccctccctgcagtgtcctctagccatcttcagccctgctgactccaatcctaatgggacctggctctttgagtgggaattctcccaaaggnagaaaaggggaaaaccttatgttgggttgtaattctgncacactgattcccaaaaccctcagaaaagattttacntaatccccagcnattaaaatggaa

SEQ ID NO: 306717 - DNA, 533 bp, Homo Sapiens
ttaataccagttaacttatacttctgatattgggccacctagaccaaatgaatcttaacttcaaaacagccataatattcatctttctcataacagaagccaaaacaatatgatgcttaatatttaaaagagattgtttaaaaacaggcgacaaaagcagtaaggaataaaggcaatcaaaggctgtcactgcagtcctaaacttgtggtgagatggggcttgagacagtcatcatttagaagaataatagagtaacagacttccagagccaaaagaaaatttagagagaatatggcatattcctttccatcaaaaagagaaaactgaagctctgacaggtgaggtgatttactgaaaggcgcaggggcggttaagaagcagggctgggcctgcagcctagggttccttttctccttggccggtgctccccttctttcactatgccatcctgtctctccagcccagtctcaggcctccagggcaatctaagggggcgaccttgtgctcccgggcctcatgtaagagctggggg

SEQ ID NO: 306718 - DNA, 204 bp, Homo Sapiens
ggaaagtatcttaaatctatgtctgtttaatcgtattcattagattataagggttgaatgatttgagatttacatgacttagtgactgtcatttgtattggtattaagccattttatgagaggaggacttttaagactataatgattatagacaaatatgtcatctctatttatgtcttactgaacatcagaatgttaattctg

SEQ ID NO: 306719 - DNA, 204 bp, Homo Sapiens
  misc_feature (47)..(47): n is a, c, g, or t
  misc_feature (92)..(92): n is a, c, g, or t
  misc_feature (122)..(122): n is a, c, g, or t
  misc_feature (169)..(169): n is a, c, g, or t
ccaattctttccccattttcttgtatgtaagtatccagatcaacctnggggatatcatttatgactagccagcttttctgaacccaaattgngacaagttcaagagttattacacagaccangggacagaatatttacaattggaacagtcttagaaaatccgagctgngtagtcacactggctatgatccagttcttttacca

SEQ ID NO: 306720 - DNA, 591 bp, Homo Sapiens
  misc_feature (76)..(76): n is a, c, g, or t
  misc_feature (413)..(413): n is a, c, g, or t
  misc_feature (458)..(458): n is a, c, g, or t
  misc_feature (522)..(522): n is a, c, g, or t
  misc_feature (538)..(538): n is a, c, g, or t
  misc_feature (543)..(543): n is a, c, g, or t
  misc_feature (548)..(548): n is a, c, g, or t
  misc_feature (567)..(567): n is a, c, g, or t
  misc_feature (581)..(581): n is a, c, g, or t
acccatctgtgatccatcttgaccttttttctcctctctcagctgttcatcagggagcctccactgcagccatagnattgggtacttgctgagggagaggaaacaatagtggtgatgtgggggtctgagccacctgctcatatagctcctggtgatctctggctctgcttgtacttcatactgaatgaaccacttgcatcttagagactcacctaaaagagcccagctcatcatgggtggctctcttcagccacagtaaatgcctgaagagggacttggctgagtcctcagcaagccaacactttgacaagctgggggaagtgaagtacctcgtccttaaaaagggaaattaggaaagtgcattacagagcccacatcaagcatcgaatctccaacacaagtctatgaagaanctagggatggcattaatactgccatcttgcagatcaagaatctgnagtatcacaaggttaaacaacttcttcagtcattgaaaatcaatccagcctcagaacaacagtntctgaccaggactgtncatanggagncaatgtgagtcccaaaggntatgctaaattttntggtaacaat

SEQ ID NO: 306721 - DNA, 361 bp, Homo Sapiens
  misc_feature (189)..(189): n is a, c, g, or t
  misc_feature (343)..(343): n is a, c, g, or t
agaagtttggtgtggtgctttttctatagtaaatttagaatttatatctactcaagtctgatttcaggagataagaatatatataaacaaaaataatcatgaaaacaaattgagattggtatgacaaattcatccacagtttagtgtttgctacatttctaggaaacttcttcagagaatggtagtgtntttgtgtgtgtgtgatctttattgatgtgaaaacatgaatctcgtataggcatgcgtgtgaacatttgggctcttattctacgaagtttctgatagtcaaagctctaaccctaaagatactcactttgaaaatactcattttctcaataagtanagtggattgttagaaatt

SEQ ID NO: 306722 - DNA, 436 bp, Homo Sapiens
  misc_feature (80)..(80): n is a, c, g, or t
  misc_feature (101)..(240): n is a, c, g, or t
  misc_feature (247)..(247): n is a, c, g, or t
cgaggcttccagttgtggcaaatgcaaatgtaggagatttatgctaacacccagtaaagctgctgctgcctctgcagagnccgctgagagcaggatatttnnnnnnnnnnnnnnnnnnnnnnnnnnnnnnnnnnnnnnnnnnnnnnnnnnnnnnnnnnnnnnnnnnnnnnnnnnnnnnnnnnnnnnnnnnnnnnnnnnnnnnnnnnnnnnnnnnnnnnnnnnnnnnnnnnnnnnnnnnnngcactanggtgacacctgagtcccttctaggtcctagagtctatagggaggaatcttctcttttccttctcaaacaggcttcagaaaacaaagctgttaaggataattaaatgttaagaaaatagcttgcccacctccaaggactcttcacttctgctaagaaagacatcaaatggctcttctttgctagactaaa

SEQ ID NO: 306723 - DNA, 475 bp, Homo Sapiens
gttgctgctggtagggatggttaaaaatacctcagctcttatcccaggatagtgaacaccaggaaggggaatgactgctatggaaataggcttcaccaaatcttgaactattaggatgaaggagaagtcttggtcaaaataagttgaggttatatacgaggagaaactgttcacatagaggcccagacactggtgaactggtgggagaaatagaaaggcaaggcatatccgtgatttgaaatgagtggcacatctgtaagcagcttctactggaaatgaagaccttacctgaccttctggattcatggaaaggaatggccatatcctcccatgtgaacagaatattccatgtgcttgtcccattgtcataaagagcatggcatagatgatcatgaatgaagatctggggatggctatcctatgtcccatgcaatccgggccacaagtcacttgtattacttaaactccacatagc

SEQ ID NO: 306724 - DNA, 205 bp, Homo Sapiens
gaaagttgctgccgaacactatggagagtaacagattaggataaataataatagcaaccaaggggctataaatcctgctcccatctgggcacaataaacggccactgaggaacagtaagtaaggtttctgaagtcaacaccaaacatggcttggtcattactgagccactacaaagaaaacctcaggcaacatatcttagttatt

SEQ ID NO: 306725 - DNA, 156 bp, Homo Sapiens
aatcaacagtgaggtaaacacttcttgggaccatctgggcaagcattttaatccaaaatattctgtaaacactgactccatttgagtacccaggaactaccgtccagccgccatcaactgcatttttatttcagttttaagcagtaattgaaatag

SEQ ID NO: 306726 - DNA, 438 bp, Homo Sapiens
  misc_feature (37)..(37): n is a, c, g, or t
  misc_feature (252)..(252): n is a, c, g, or t
  misc_feature (257)..(257): n is a, c, g, or t
  misc_feature (270)..(270): n is a, c, g, or t
  misc_feature (297)..(297): n is a, c, g, or t
  misc_feature (308)..(308): n is a, c, g, or t
  misc_feature (389)..(389): n is a, c, g, or t
  misc_feature (427)..(427): n is a, c, g, or t
gcctcagattccctgttgagttgctgttaagaaatgnagatttctggctctcattgggtaaggttttctgagttttatatcttattagatcacatccctttacccagaacaaatgcttcactgtcttctgattggcagtactcctgtggctttgtgccttgactcattttgttgtcttcagccttgaaggcccttcccacatggactgacatccactcatgtgcttgatccctgaagcctcccagcacccanttcangttgcatccccangggcacaggactttgatctcttctgtngccctcgctanggttctccctgggtcgggttagtgctttgtatctgtctctctgcccctcactaatttctacacccatgagaattagacatntattctccttaaatatataaggaccatataatctgtanctttttggtgg

SEQ ID NO: 306727 - DNA, 441 bp, Homo Sapiens
caggagtgaaccaactgttatctgtaattcaacagataattaactgaaactcagtgctcaaattgctactgggagtttctgcagccaaggtcattctcatggtgctgcttgattttgtttctgtgtctcttatatcgttttaggcagggaggaacttggattgtccttcagtaaaattccactttgatgcgcaaacaaccttgaatttctgcttggcctaccacaggcctgcaacatgcactttctcctcgaggtgagaaggtctttttctctccactctgaaacaccgctgcctgcaccttttgctgagtttagagtagcatcatactttctgccacgaatgccacaaatactgccttttcaacttgggttttgtaaaatgtaatggtactaaatccgccaaagggataaagcacccttactttggatttgccagtccca

SEQ ID NO: 306728 - DNA, 398 bp, Homo Sapiens
  misc_feature (377)..(377): n is a, c, g, or t
gaggaataggtgtccctgggaacccaaacatcctggagaatagctgagaacctaccaagggaaacagtcccatcacacacacatagtaggtaaagagacagaaaattagcttagagatgggaggtggcacggatctctaaagctgtcccgctgccattcaggagtgcctcatgcataagtcctaataaactcatctactagccaagctgaacttgtcccagacatgcttggtctctttgctccctcccagtttggggtaaggttttttttaaatacaattccaggtttttctcattacaattgctgtcatgagcaggatctgagaaaccaatggatgaattaggaaggcgcatctgcggggagaatcctaagggtgntttggcaacatgcatggtggg

SEQ ID NO: 306729 - DNA, 366 bp, Homo Sapiens
  misc_feature (31)..(31): n is a, c, g, or t
  misc_feature (264)..(264): n is a, c, g, or t
ttaatggctaacaatgcttctttattatggnagagattgattgatatctccttatggtataacaaaagtcacaatcggttttctgttatcctttatgtcataaaaatgttgcagaaattatctgttaatacttgaaagatttcctttcaaagaagaaaacgtaaagcctatacagttatcatcacattggcgtcagttaagaaaagttatccgtgtacagagggttttagaaggaagaatagtaaggtttgctctagcttgganggcctttactcctttacagacgtgcacgaaagaaatacctgtgattatttccttcagtccttttttctcagctgtgacatgtttattgtatttccgttggta

SEQ ID NO: 306730 - DNA, 453 bp, Homo Sapiens
  misc_feature (400)..(400): n is a, c, g, or t
cggtttctagtcattttcactgccagcaggtgccctttctatgcataatagacttcacaagtgtaattaacacatgaggaccactgctgccagtttttcttcaggtacatgctgctaggagttttcaggacaacagtgtaggccataagagctttttacatggcgcctgaagatgaagtcttcgttgacttctggacaaagacatgttaaatggagctgagcccagaccctgctgttggtatcacaggtcacagtcattgagtccagaaaccccagaagctgtattgcaagctttctgtggaccagaggccatgacagcaaaactctaagtttgcatgcagttaataaatgaaaagttaggatacttgaaaaccctaccattatgtggaggaccaatttncgcattcacaaatacgacatacaatcatctgagttaactttaattagagctat

SEQ ID NO: 306731 - DNA, 454 bp, Homo Sapiens
  misc_feature (264)..(264): n is a, c, g, or t
  misc_feature (440)..(440): n is a, c, g, or t
ctttagaagactagtttgtcttcctttaaggagaagaatatggaagatttgtctttagaaatgtagatgtttggcttttaaaagaataaatggtttgtcttcctttaaaaataggcttttaaagacacaagtaagttttaatttgagtgtaattgtaaggaggccactttttagttcgttggaaaatatgtgttcagaagacaatgtagtatcagtttttgtctgatttttcaagtgttggtttcccttttggttgaacagcangatctttctccgtatatgtgtaattctaaaggattgtacagaaaattaacgggagatctaaatacttagatttttaaagtttatctggtgaactctgattttgggtgatgataataaatgactgcattgaggataatgcatttcattggttatatcctaatgaagctttagggtcntcctcgcctcagaa

SEQ ID NO: 306732 - DNA, 451 bp, Homo Sapiens
  misc_feature (20)..(20): n is a, c, g, or t
  misc_feature (128)..(128): n is a, c, g, or t
  misc_feature (362)..(362): n is a, c, g, or t
  misc_feature (364)..(364): n is a, c, g, or t
ccggtccccatcctcaaggncctcgagcccttctgcgccaggtcacactccacggctgggccttcctgccctggctctgcaccactgcccaggctgtgctcctgctacatgcccttcctttccccctnctcgggtgctgcgatttcctggaagcttcctctgccagtgccccaacctggagagaatgtgtcacattgcccccctctgcagccatgttctgggagggaggtctgcatcttgtcccaggtctggtgccaggacaaagcagcactcctgggaaatggcatttcccctgggtgcacaaaacctgtagggaccatagcctaggttccggggactgctggctcactcactcccacacncngctgcccacagacactcctcgctggtggcatcgtggaactctgtgccttaaacgcccgctctggtccctctactcaagctgctggct

SEQ ID NO: 306733 - DNA, 132 bp, Homo Sapiens
caagaaatgcttaaggattttaggctttgtggaaagagggttggtgggagaatgatggggtaagagttgaggtaagaagaatggaggaagggcaaacatgtaagaaaatacttaattttagaaaaaattttc

SEQ ID NO: 306734 - DNA, 403 bp, Homo Sapiens
  misc_feature (34)..(34): n is a, c, g, or t
  misc_feature (38)..(38): n is a, c, g, or t
  misc_feature (295)..(295): n is a, c, g, or t
atactttaagatctaggctacatgtgcacagcgnaggntttgctacacaggtatgcatgtgccatgttggtttgctgcgatgcatgttttaaatggttttacttcttcaccctcatctgcagcgtggataggtgagtgagaacgccattctaaccagggatggtagaggaaggatgtgctcacagacatctcaaagcaaactttatgccagcttttctgagagttttcaaataccacaaatgggtggatgtgatctctagaacaaaagggggcctgtgacagcccgtcctctgtngggtctgtggctcagcacgagttcagacacaagatcccagatgttccatctagagtaggtctttagatcagtatctcaagtgtggtgggagtgtcggcctttaaaaag

SEQ ID NO: 306735 - DNA, 249 bp, Homo Sapiens
  misc_feature (122)..(122): n is a, c, g, or t
cagttttcactgttcaagtctcttccttctcacagccacttcagacgttagcctcaatcttggagaactggtgaggccagggaccccaggacacgtgtggggatgtcaggcagggctgagtnaaaggtcaaaggactccttaatttttaggagaaaatatattctagcagctctcaggtctgaaagcagtgagttaatactcaagtcttcaaacataaaaagtgtcttccagcgacagattactctcat

SEQ ID NO: 306736 - DNA, 360 bp, Homo Sapiens
  misc_feature (301)..(301): n is a, c, g, or t
atgagccagcacacctggcaatttgtctgctgtttagtggaggacagcagcaaggaatgtatcctcataatcaaacaactggaataagaagtagaaactacactacagccctattttgtgaccaaaattacgttttagctgatagcatagaaaatgtgctgggcaaaaatgtgtaatgttacggatattgcttggtgattcctttttctcaattcaggggcctaacagctaactttttacctttgccgtaccttctggtaatcagggtgaggactaaggaatgggtccaagtgcaagtagntaaccttgctggtccctgggaagcactctttccagaaagcctaataatttgaaatagtg

SEQ ID NO: 306737 - DNA, 435 bp, Homo Sapiens
  misc_feature (301)..(301): n is a, c, g, or t
gaaatttattggtggggtggagcaggtagttctacaaggcaaaccaaggtttccccacacccactgttgctctgtctcagctagtgtgtattcaagataaaggcattttttgatcccagccatgttctcttatatctgctgtagttaaaaaactgcttaagtccacaagtactgcttttggtccagaattctattaatccaacttttcactcagatcctacccctcagatgtgattccacttcatgttgtttagaaaatatttgggtaccaatttggatagcacctattgcgaatgaactngggactagaagcaggcattctcaagtaattttaaaggttttaatgagtaacaggggtcccatttaataatccaaggagaagttatggttagcagaagacagttcagttaatgggcaaatcttttagggaaatca

SEQ ID NO: 306738 - DNA, 176 bp, Homo Sapiens
aaaaagggcagaagcacagctgaaaggtgtggtgctccaggaactacctcgcctcccttcccaaggctgagtgagagaggccaccccatcatcccatcttagagaggctgggaaaggaagtcccaactttgcagccatttgcaaagtcccgggatccttcagacctggggcgggcg

SEQ ID NO: 306739 - DNA, 487 bp, Homo Sapiens
  misc_feature (35)..(35): n is a, c, g, or t
  misc_feature (89)..(89): n is a, c, g, or t
  misc_feature (96)..(96): n is a, c, g, or t
  misc_feature (160)..(161): n is a, c, g, or t
  misc_feature (175)..(175): n is a, c, g, or t
  misc_feature (254)..(254): n is a, c, g, or t
  misc_feature (330)..(330): n is a, c, g, or t
  misc_feature (341)..(341): n is a, c, g, or t
  misc_feature (364)..(364): n is a, c, g, or t
tctcactcttttttcctggcctgagcgaggagcgnggctgagaagagtggtagagtttcagaaacccacatccacagagccttgcagangagacgngaaaccgcctcaccccgggttcttgtgtgggcgctgtttactgcaccctcctcgcccgagcacnntgacagcgacaggngcgtaggtctaggtggctgagacgccaggggaggtgaagtgaccgaagaaatgtttcctgacatattcggtggattttntttaaaaacatatagcatctgtaagttgtatcgtcaaaggtaaataaaagaacctgtgacgctcatcgataacccnggtcctatttnctaattctcccttctcgttgtanactttagtttgttgtttgtagcttatccatgccatctacagaatgaaaacatccaaatgcaaactagaaatagtagtgtttacttggtgaacctggctgtgatactttaagtttctggggttt

SEQ ID NO: 306740 - DNA, 513 bp, Homo Sapiens
  misc_feature (481)..(481): n is a, c, g, or t
catataaatttattgttatttaaagatgcttaaatctgtgaggctatcacattatctgatttacattttttcaggtatttattttcctctttccttctataattggtggtatttctccctgggagagtgtttgtgtgctacggagaaatactgtggcaagatgccattcgaggcaggtccactatttggactcctgaagtgacttgcttggctttgctgcttacaaagccaaagataattattcattttatgtcagcctagactcttagatagttgggaaagagtgagacttcttccaggcttaaggccatttttgacatgtttcacagaagatggtgtggggctggtgttgctagggagggaaatggaaaattaacataggtagaaaagaaaatagtctgtcgtcttgtgaactgaggggcttttttactcactcattcacccatcctggtgccaagatgaaaagtggtgcaatagttcngcaattatggactcctgtaacagctgttcagg

SEQ ID NO: 306741 - DNA, 390 bp, Homo Sapiens
  misc_feature (280)..(280): n is a, c, g, or t
gagaagtagtgactcctgcatccttttttaaggtttaggaacctgagttcagaaacacctctcatggaagctgtactagttgtgatttacttaattccttaagttccatgacctgaagttaaccccgttcttcctctgctctcaacccattgccccttgagataactgtacatgtcactctgatcatggtaacagcatccctattgcttctgccagctgtcatggcaatcgtgtttcccatcacctgggcggttcagagccagttcatgggctgctgagntttaattggagcattgtttccaggttcttgcatggcaaactgtactcatgacttaggagttgagtttttacttccatgtgcctgtcaagctttgtgagggggaatgtgga

SEQ ID NO: 306742 - DNA, 301 bp, Homo Sapiens
  misc_feature (201)..(201): n is a, c, g, or t
  misc_feature (262)..(262): n is a, c, g, or t
gcttgcctttccttttttatattatctaccatattagaaaatgcagagggaagagttagtgcaaattgggaaagtgagtaccgatgcatttgtactcctgattggtgagcaaaataaaactgctcagcctcctataggattaaagtagaacttacactggacgatgtttgatctttctgtataaactgtttgtgataaaancatgcttatttaaaataagaagatcaggaatgatatgatataaaattaactggattcagantttctgagattttagaataggatgtcagctatttaccag

SEQ ID NO: 306743 - DNA, 336 bp, Homo Sapiens
atgattttatcgcccatcactgtttcccgcctcctcatttacccacttcccccactaccaacccctgggccaacctcttctgggcctctagctcccctcccccactttggctggattcaggtgcgcacctcaggctagccaccagttcacacctggttctaagcaggttccaacactcgctgcagccatctccattcacaggacctgtttaggaagtagacttttagcgaggaagccttcaccacaacagccaaactccccagaaaacactagctagtggctctataatgtggtttgctgagaaatataaggaaactggaaaaggcgggaaacagg

SEQ ID NO: 306744 - DNA, 342 bp, Homo Sapiens
  misc_feature (28)..(28): n is a, c, g, or t
  misc_feature (46)..(121): n is a, c, g, or t
  misc_feature (269)..(269): n is a, c, g, or t
  misc_feature (291)..(291): n is a, c, g, or t
tggagccagtcacagtggcacgtttctntagtcaagctattcaatnnnnnnnnnnnnnnnnnnnnnnnnnnnnnnnnnnnnnnnnnnnnnnnnnnnnnnnnnnnnnnnnnnnnnnnnnnnntttaaaaaattgtatatttattttttcctgatataaatttccttctgctatgttggattaaagctggaattattcagggtttggtgctgagcctcctccttttctcactcttccctgtatcacaatggaggacacccagtgcaagcangtaaggacgagaatggagcctnggctatggattacatggcacgaagccacctgcgcaccggccatgagcagtt

SEQ ID NO: 306745 - DNA, 368 bp, Homo Sapiens
  misc_feature (195)..(195): n is a, c, g, or t
  misc_feature (208)..(208): n is a, c, g, or t
  misc_feature (231)..(231): n is a, c, g, or t
  misc_feature (274)..(274): n is a, c, g, or t
  misc_feature (281)..(281): n is a, c, g, or t
  misc_feature (354)..(354): n is a, c, g, or t
tgtattcacggctgaacattaattttgaaatagcctttttatatttaaagacattaccaagttacgactttcccaacccatcttagaagttgacctctcaagtgcacctgtgtaagacttcactcgttaacaataagagatgcatggaattgccccgtgtatacgccacgtgcatggagtgtagtagttttgtangggaccaaagtantaaggcctagtaagacgcagtantatgggttccaaaccaacgtattggacttggtgaagtggcgangttgcangacacaactctgggaatccctgctgttgaaggacagaagcaggcacattggggaggagcagttttaagactangaaaattgagattt

SEQ ID NO: 306746 - DNA, 200 bp, Homo Sapiens
  misc_feature (33)..(34): n is a, c, g, or t
aatcatataaccaatatataaaatacaaatttnnatcccaaactattcttacaggaattttacataaaatatataccaattcagaacaaagcatttcatctattaaacattctcataaggccaattacctaaatgaaataggaactaggaactataaactagggattattaagaccttcttttcacatgcaaaaggggaa

SEQ ID NO: 306747 - DNA, 376 bp, Homo Sapiens
  misc_feature (116)..(116): n is a, c, g, or t
aaaaattgttcctcagctaagttgctttgactggaagattttgccttctctgggcctccagatgaagtgtcctggagatcctttttcttaaatcttagcttcaagtcccagctccnctttactaatccttctcgtcaacctagtccactctgatgcaagcagacctgtaacagctcccctggcagcctccatgccacactcaattctgctcccccatcatcagcctccctctatttctgagcttcctggtccccatatacactgtggcctccacatctaccctatgaagctcccacagggaaaaagagggaagcagccagagggtttcttgacctagagcgtccaaaatgaaccccaggtgtggagtcagtaggag

SEQ ID NO: 306748 - DNA, 393 bp, Homo Sapiens
  misc_feature (48)..(92): n is a, c, g, or t
  misc_feature (226)..(226): n is a, c, g, or t
  misc_feature (304)..(304): n is a, c, g, or t
cagaagagttaaaattttaagaaacccacttagctcagtattggtggnnnnnnnnnnnnnnnnnnnnnnnnnnnnnnnnnnnnnnnnnnnnncatgtttacttaaggtcatcaaaatatggacttcagtcatatgggagaactgaaatagcttgacagttttttgactcttcaagtttggcccttaaaattcttatggtttttacatgtatccaaatacataaaangtaaataattttttaaagcctcatgcacctttcgttttccctttgtttggctctcactaggttataaaagaatatatnggtgataataaaacaaataggtaaaacaaaaccttagaatttgacataaggttttgtggataatgacttccaactgtgtttttacagtg

SEQ ID NO: 306749 - DNA, 331 bp, Homo Sapiens
atagtgcatatttatgattcttaattccaaaaacacatggcaatgataatgtctctgcttcttttgagaaattaacttggttctgaaagatggtgtttgcttttcacacctgtatcattaatacttccttgccaaacctaactaggatcctcaccaccactgttagagaaaactgatgctcagttgaaccagaatgttaaatgtgaacaggatttgtctgtgttgttgcccagctatgtttatccatacacattacctggaggaagagaaatctgagataattgagttgattagattacttacatgaagatggtttaattgtatcaataca

SEQ ID NO: 306750 - DNA, 400 bp, Homo Sapiens
  misc_feature (30)..(30): n is a, c, g, or t
  misc_feature (51)..(51): n is a, c, g, or t
  misc_feature (324)..(324): n is a, c, g, or t
  misc_feature (365)..(365): n is a, c, g, or t
gtattagcttaaccagaaataagctggaanaggagttcagtagcctctcanccccctaaagatgttggtcataccccctctttcaccgtctgagtcgagaggacaccaagccaaacaaactgtgccccaaactgggtcatctagtcctcccaggtccttccttgctaactcgaggaaacaaggaaaaccaactttggatggcaacttcaacaaggtaaccctcctttcttcaatggccagactgatgcccactgacaatggctttgagatgcttggacagcagactgtcatgtcaagactgcccagacccccaccacacttgtngaaaagggcagcaccagacccacttggagatgaggctcttnagcaaagtgctagcaaaaagaactcaaaggtgtct

SEQ ID NO: 306751 - DNA, 160 bp, Homo Sapiens
  misc_feature (33)..(33): n is a, c, g, or t
  misc_feature (42)..(42): n is a, c, g, or t
tgcactccttcccatctgcaagtagctagtgcngtagtgcantttcccattatatcactccactagtagtctgacctctcctgtcagagtgctccaggctaccacatagcctttctttccataacatacagctaagatgtttatttccccattgtgccta

SEQ ID NO: 306752 - DNA, 261 bp, Homo Sapiens
tcgttcccttaaatgtggtactaaaattatagatggcaatactaatgcctttgtcatagaagccttagaatcccagccaggcctgtgtgagtatgctcagacagttgcaaagtgatttcactcctctcaccttggggtcaacacctacccccactacacccctggtcagcaggaagaatttagaggggtcttcgcccttttcccatcttcattagctaacaccttaagattaaggtgttataaaatccaaagggagacgat

SEQ ID NO: 306753 - DNA, 448 bp, Homo Sapiens
gagctgaattctgaagcctgagctactgagaatgctgataaaagatgttataaggactgtgttggaacctgctgtgaccaccccgcttcataatgttataacatagcaattcagaatagtaacgtatgcccctcatgaaaagccaagcagtgcaaaaatccactccaaaaagccagactccctcccagcactgagccccagcttctgtgttcccctctccaaaggcagtggttgttattagttacttgcatatcctgttggatatgtgttttctatcagggataaactatacagatatgcacttacaaacatatcatattatttatccttgacagaaaacacaagtgaagtttagccgacgatatacattgtcctacaccttgtattttagatctaacattgccttctagaggtcaacagtacacatgaaagtgcctacgtcttttca

SEQ ID NO: 306754 - DNA, 399 bp, Homo Sapiens
  misc_feature (92)..(92): n is a, c, g, or t
  misc_feature (122)..(122): n is a, c, g, or t
  misc_feature (131)..(131): n is a, c, g, or t
  misc_feature (168)..(169): n is a, c, g, or t
  misc_feature (171)..(171): n is a, c, g, or t
  misc_feature (178)..(178): n is a, c, g, or t
  misc_feature (246)..(246): n is a, c, g, or t
  misc_feature (288)..(288): n is a, c, g, or t
  misc_feature (331)..(331): n is a, c, g, or t
  misc_feature (377)..(377): n is a, c, g, or t
tctggttggctctctgcaaggctgctttaaagcaacactgcagtgctagcagtggaggccctgctgatcagtgattcatcccagggattctnaggggccatccatatcaggcaggtggccancctgcccantgatccctctcaccctgctcagcaggtcctcccctgnnancgagcgnaaacatctgtgtccttcaatgacctgcccaactctgtttggtttcctgcggagagagggctttttaantttctgcttcctgcctcgccctgcttccctggttggcccacnggagtgacctctgatcctctagtctcagttgagccaaattctngactgtggactgttgtctggcgttctagagttacttcaaaccgcgngagaagagggggttttggtttt

SEQ ID NO: 306755 - DNA, 293 bp, Homo Sapiens
  misc_feature (234)..(246): n is a, c, g, or t
cttggactttactttgttaaagtttttggatccatgggtttatagttttattcaaatttggaaagctttggctgtattcttcactttctttcctctctcttttagagctcatatgtatgttagactatatggcctattcatttctttttaattcttattttctctcactgcttcaacttcaatcatttctattgctatgtcattgctttctactgttaattcaatccagtgtgnnnnnnnnnnnnnagatattattttcttcctctctatgagtttttaaaaaatgatatggg

SEQ ID NO: 306756 - DNA, 396 bp, Homo Sapiens
  misc_feature (287)..(287): n is a, c, g, or t
  misc_feature (307)..(307): n is a, c, g, or t
  misc_feature (315)..(315): n is a, c, g, or t
  misc_feature (324)..(324): n is a, c, g, or t
ttgagacagtcttgctctgtcgcccaggcttttcttggttggtaggctatttattactgcctcaatttcagaacttgttattggactattcggggattcaatttcttcctggttgagtcttgagcgggtgtatgtgtccaggaattgatccatttcttctagattgtccagtttacatgcataaaggtgtttatggtattctctgataattgtatttctgtggaataagtggtgatatcccccttataatttctgattatgtgtatttgaatcttatctcttttctnctttattagtctagctagtnggcctatnaattttttnaaaaaaccagatcctgggatttgttaatttttgaagggatttttgtgtctctatctccttcagttcagcttt

SEQ ID NO: 306757 - DNA, 328 bp, Homo Sapiens
  misc_feature (35)..(35): n is a, c, g, or t
  misc_feature (67)..(146): n is a, c, g, or t
  misc_feature (259)..(259): n is a, c, g, or t
cagaagtcatgtgggcacttattgttttgagtgcngtgaatgtgtagtttgatggactgtgatgtgnnnnnnnnnnnnnnnnnnnnnnnnnnnnnnnnnnnnnnnnnnnnnnnnnnnnnnnnnnnnnnnnnnnnnnnnnnnnnnnntagattttctgcaggtgtagggatggttactttcaggaagtttgtcctattgtggatgctgagcgagacaatggctgcctgttcccatacattccctgcttggccacagccangttttgtccaggatttctgttgtacacagtacagttgcagctggattatgtgattggtttgaaattaaa

SEQ ID NO: 306758 - DNA, 159 bp, Homo Sapiens
  misc_feature (76)..(79): n is a, c, g, or t
atgcaatttaatttttaataacaaagatactgtattttaacatggtgaaatatacttggctaagtccagattaaannnnaaaagtatctagcccaacagtacaattatacagctttgtacagaacattccatagatcaacagaaaatacatttgagcac

SEQ ID NO: 306759 - DNA, 209 bp, Homo Sapiens
atgagcaccgtacccagctaaggctggttttaaaatcctctcatttctcctagaagatggtgaggatgtgatgtgggtcacgtgggccaggctcggggggtcatgggcagcacactgtccttggaaacagcagcagtggtgcctcctgtttgttcctgtcacctcttgcttcctagctgagcctctgcctcagtggtcccctctccaaa

SEQ ID NO: 306760 - DNA, 371 bp, Homo Sapiens
cgggtaagcgatggactgcaagtgggagaatgaactgttagctcagtctctctcacaccctgaagagtgtacacgtgacttgtgtattgaatcagcctgtaggtctctttaaaccgggtggtggctttaaaccacagagaggttgcttcttcccagaggatattgcctgtgctggttggtccccattgtttaagttgcgatgcacgctaatgtgctgttgcggcattctggacgaattgctgaggagactgtatttgttcatgacatctgatgtgagtcttgaacttgttacatttatttctctgcttttggtcacatcttgggtctgatgaccaaacaaggcaactgtgcccttttctagactggatgtc

SEQ ID NO: 306761 - DNA, 126 bp, Homo Sapiens
tacttttgtgtaaacactgaaaaatctctggtcatctccgagaattaacttgcaactgttttctatagtgctgtcgtcttgggcaatgggcaattacatgactttgtgtttgcttcctttgcagtc

SEQ ID NO: 306762 - DNA, 458 bp, Homo Sapiens
  misc_feature (41)..(41): n is a, c, g, or t
  misc_feature (58)..(93): n is a, c, g, or t
  misc_feature (189)..(189): n is a, c, g, or t
  misc_feature (367)..(367): n is a, c, g, or t
  misc_feature (397)..(397): n is a, c, g, or t
  misc_feature (448)..(448): n is a, c, g, or t
atctgtttcaattctagtcactagcagccccacctacatantgtttccagtcctgttnnnnnnnnnnnnnnnnnnnnnnnnnnnnnnnnnnnnggtttggtgtctgtacatctcagctattgacacattgctgtatatatatccactgattataatgcatgtgtctgtgttttcaggaagccttttgangctgctgcataatgtgtaaatggataatgctcaaagagacaaattaccttttaataatagattgacagttatttttaagaaatgaaaaccaattttgaattgatatttgtaggcccacactgtgcctcaatgtatgaaacctcacctaaaccaggaagcctaatgacgatgcgccctntcctcttaactgttttgcagcctgcagttnggcactggttcgtgatgcatggtctgggttgtgccctgtgctggcatggangtcaccctta

SEQ ID NO: 306763 - DNA, 501 bp, Homo Sapiens
cagggctgcagcactaaatattccccataacaaggcaaagggaagtgacaagagctattattctcaaccctcccacttggaaacaagaggtgagacaaaccttcccctagatgttcttagggaaaggcaagacccccaaagaaatctttcagagctgagcacatgcctaatacagcaagacagggatgggagaagattggcattttcatttgcctgggtgtccacaatattgcaggggaagctctgtgggcagctgggaaatacaacaataaattggagggggatgaacaatagggtcagtggggctgtgtgctgagtgaatgctggattttattctacatgcccaattcactccaataagataaacttgacttcctccagtgtggctttcttatttcagcttctctgactgtggcataattgaaagtcatatttcatctagattattggttttcaactccaaatgcaggtggcttatgaagactcagcctgaatatataa

SEQ ID NO: 306764 - DNA, 415 bp, Homo Sapiens
  misc_feature (233)..(233): n is a, c, g, or t
  misc_feature (316)..(316): n is a, c, g, or t
  misc_feature (330)..(330): n is a, c, g, or t
  misc_feature (359)..(359): n is a, c, g, or t
tctaaatttcaaacaaggtaagctgtatagcagtagcagatttccttttatattcaacctctgaaccatggtaagtgtgtgacttattattttttctatactctttaaaaacattgttgtatcttgcaggtagtatgacataggagaaaaaacttgagtcagaccacaataatagaatttccaaagtcagtttcaagtgttattaaatattacctggtctcaggtattgctangggacaatcaatcagtagcctcaatgagttcctgctgcatggcaggttgtgaaccagctcttcttttggccctgggtaatctnggggttcccagctnggaagcaattttccctgacactcagtctncagcactgagagctgttcttagggcccctgaatgtcagcttgttctgggagatgaa

SEQ ID NO: 306765 - DNA, 276 bp, Homo Sapiens
  misc_feature (60)..(60): n is a, c, g, or t
  misc_feature (81)..(131): n is a, c, g, or t
  misc_feature (193)..(193): n is a, c, g, or t
tcatgatgtgtgcgccattggttacacccctcttcttgaagctttctctgtctggaagtncttgccaccgtgttctcccgnnnnnnnnnnnnnnnnnnnnnnnnnnnnnnnnnnnnnnnnnnnnnnnnnnnatgtgggccacagtgttggggtcctccaggcgtcaccctcagtgctctgctcccctcttacnctcacacctcacacctgagtagcttcactcagctccttgctccacctaactcccaaaccccacatgttcgactgttgtttttt

SEQ ID NO: 306766 - DNA, 428 bp, Homo Sapiens
  misc_feature (39)..(39): n is a, c, g, or t
  misc_feature (66)..(66): n is a, c, g, or t
  misc_feature (305)..(305): n is a, c, g, or t
  misc_feature (307)..(307): n is a, c, g, or t
  misc_feature (315)..(315): n is a, c, g, or t
  misc_feature (411)..(411): n is a, c, g, or t
catgataaactttattaggaaaaactaacgcttatggantttctgtggagagagcagtccccccanaagtccattctcacttttttatttctacctttgattctcccattgctccaattcaaatcatgctcattcagaatccctctttttccataatgccttatttacttactgtgtcagccttaagggtctgatttgaagctatggatagtttggtgatcaaaacctcacaaagtaggccagagaccatacttttcacctctcattttctgtaactttggcaagtgtcttaatcagtgccctantnttacatantgggggacaatagtacctcccatagttccctaggttgttctgaggaatgcatactaagtccttgacatgatgtgttgtaagcccttagtaattgtnaactcttctactagtag

SEQ ID NO: 306767 - DNA, 427 bp, Homo Sapiens
  misc_feature (314)..(314): n is a, c, g, or t
  misc_feature (415)..(415): n is a, c, g, or t
attatttgtctgggtatatatttcgaaatttgtcatttaggctatattttaatacactcttatatgttgaatctcggtttacactacatacagaattttcaaacaactggtcacgtggccgatttaagaattcggagagccagggatactgagataagaaattcactggatcctgaggttaagggagccttttgcaggtgatgtagaagccagcttttgcacctatgagagtgaaatcatcttgattataaggagagcaagaggatggaggctttctctaatttcttttttacattttatgagcattttctctnaaaaagaaggtcctgcgtagtgccatgccataactggaactgcagaaaaacagcacggcctatgtttggtgtcaaaagctggaactttcaatcagccccgncttgtttttcag

SEQ ID NO: 306768 - DNA, 110 bp, Homo Sapiens
gttcaagcgaccttcctgccacagtctcccaagtagctgggactacaggcgcatgcaccacatctggataatttttgtattttctgaagagatggagtttcaccatgttg

SEQ ID NO: 306769 - DNA, 561 bp, Homo Sapiens
  misc_feature (491)..(491): n is a, c, g, or t
  misc_feature (501)..(501): n is a, c, g, or t
  misc_feature (509)..(509): n is a, c, g, or t
  misc_feature (534)..(534): n is a, c, g, or t
  misc_feature (546)..(546): n is a, c, g, or t
aatgttcaagaattcttttgaaccctccatggctccaagaaaaactatttgaaatgtcccttcttatggggccagggggttaagtgccagggatggaaggctaaatgccagggatgctggttgcagggattcttgggaccggggctaatggcctccctgctgtgggctcaggaataccaggcccaggcactggttgccctgagagatgcagccatttttacttctgattgaagggcaccaccttccgggattttcccttctctggtgggaaacagagtagaatatgccaagggaccaacagggtctgttgcccaagagtggagggcactgaaggtgataacatggaggcactgggatagggtgagaccaatgacttatacagcttagaatttggtccttcctggcgggaaagaagatgcactttgtgggagcacatgggtaattgcccttccgtaagggtgatctcaaaaaggtccaccggatgggccttngaatagcccnatgtcccngaaacagtccattgtgtagctatgnctatacatgttnaagggacccctcttt

SEQ ID NO: 306770 - DNA, 583 bp, Homo Sapiens
  misc_feature (444)..(444): n is a, c, g, or t
  misc_feature (498)..(498): n is a, c, g, or t
  misc_feature (518)..(518): n is a, c, g, or t
  misc_feature (528)..(528): n is a, c, g, or t
  misc_feature (533)..(533): n is a, c, g, or t
  misc_feature (540)..(540): n is a, c, g, or t
  misc_feature (572)..(572): n is a, c, g, or t
ggcaaggagaatatgggtacacaaaaataaaacacagttactaattagttacattatctgtgaagtctatcagggtgcaaaacctagatcaaaagaaaatttcaaacttcttttatataactggggtcaatggcatgagcttcagtttatgatttttgattaagtgactaaagtaatgcttaaatctcagaaaggacataatatctacctaggagttattgtgaaataaaaccacgtaccatgtaaacaaagcatccatgccatatgtggaatatacttttcactcaagctgtgtttattactattgttgttgtatgtaggggctggatagaggaaaataatttgctcaaatcgtcaataactgttacaacttcctacttaatgcggtcgctgtgaaaggagactaactactgtgtagattgaccacccaatcccaaggattcnatacaggttccataaggcctttgatgccacctaatttttaagtagttggggagnccctggggcccgtgctgccncaagtgttcntacancaatgtnacagccaccaggcgcgtgtctaagtgctctcntaaataacagg

SEQ ID NO: 306771 - DNA, 460 bp, Homo Sapiens
  misc_feature (203)..(203): n is a, c, g, or t
  misc_feature (385)..(385): n is a, c, g, or t
  misc_feature (413)..(413): n is a, c, g, or t
  misc_feature (434)..(434): n is a, c, g, or t
ggcacgaggggcctttgggttgtgtttgtaacatgtatccacaatcagctgtcataataagccgagcatcctgattaattcactgtaccctccagtcgaagtattcacggatgtaactagttgaaatgcggatacacaagttcctactggtcttaaaagaaatgatttttctggtagttttataattttaacaattcagattncgtacatttgaggttagaaaattcagcagacagcctaaatgcggcatcatgctaatggagtcctggaagctgctggtgttaaaatgagtaaattaaggagtcaacactgcttatttaggcacattaggataaaatagtatgagagctcggacttaacaaaaatcaattcagcacgcagagtnacatccatcagggctttgttatgatgtnagggcgagcagcaaccctgtnttatgttatgaagaatgctacattag

SEQ ID NO: 306772 - DNA, 424 bp, Homo Sapiens
  misc_feature (34)..(34): n is a, c, g, or t
  misc_feature (75)..(75): n is a, c, g, or t
  misc_feature (79)..(79): n is a, c, g, or t
  misc_feature (160)..(171): n is a, c, g, or t
  misc_feature (247)..(247): n is a, c, g, or t
  misc_feature (342)..(342): n is a, c, g, or t
  misc_feature (373)..(373): n is a, c, g, or t
  misc_feature (386)..(386): n is a, c, g, or t
gacccgcgtggccggcggaaaggagcagcgggancgcggccgtagggaagccacgggaagacgggcagctgcgcngcantgcgcggccctctccctgaagccctcggtcaggcgccacaggaaaggctccttcgggcaggcctcagctttcagcttaagnnnnnnnnnnnnggccgagtcaactgcggtgccgagttgtattttcctttcagaggtgtgtccgagaaccattcttaggagacgcctnccggccgctttgggatagggcctgtctgcccatgctggcttccaaaggcctctgtgtgttcctgtatgtgggcgtgcacgtacctgtcacatgtntacgcgcagaccacaggatgtccacactggnttccaaacacatntctggtgtttctggctgtgagtgtgtacgcaggtgtca

SEQ ID NO: 306773 - DNA, 156 bp, Homo Sapiens
aaacatatgcacgttgaacctataagcaaaaagtaaaaatcaaaacattaattcaataaaaaggaattaattccctctatggctctagatatggtaaataaatctaaaaggaagtttttataaatcggaattttatacagactactatatgtagct

SEQ ID NO: 306774 - DNA, 429 bp, Homo Sapiens
  misc_feature (75)..(195): n is a, c, g, or t
  misc_feature (217)..(265): n is a, c, g, or t
ttttgagatggatttattaacatttggagcagctggaggtgggatgggggagggacagggtatcacccagctaannnnnnnnnnnnnnnnnnnnnnnnnnnnnnnnnnnnnnnnnnnnnnnnnnnnnnnnnnnnnnnnnnnnnnnnnnnnnnnnnnnnnnnnnnnnnnnnnnnnnnnnnnnnnnnnnnnnnnnnntgacaccggcgcctggccagcnnnnnnnnnnnnnnnnnnnnnnnnnnnnnnnnnnnnnnnnnnnnnnnnnatatatatatactacttaagaaagtagaaaatatagagcaacataaaaacagactattgataaactagatacttacatgcttcacttcattcttatttcattatagtccttgaactataaaaggcagaaatactgcaggttaattaattccttccaaaatttat

SEQ ID NO: 306775 - DNA, 453 bp, Homo Sapiens
  misc_feature (46)..(46): n is a, c, g, or t
  misc_feature (54)..(54): n is a, c, g, or t
aaagtacctgtactataaataattctaagaccttgaattggttggngacgtcanttcattactattacaggtaaatgtctctggaaaagtgacatgataactgctccttgagacacaaagctgcagggcacatttatataattaattacaccacagaaacacgcacataaacctagagtaatttggtcaaatacacattaagatcacctttatttgcattctcaggataaatctgtctcttgacacgtttcatcttgggtacaggtaagagtacgtcagcaggttttattctggtctttgaagaacaaaggcatgagtgtctggctaaatgaatgagcctataaatctgtgttttataacatattgtacttccagtctggaacaaaacagtgcttattaaatggagcaatgtacaaatggttcagttaatttggttaaagggagtaaggaatc

SEQ ID NO: 306776 - DNA, 333 bp, Homo Sapiens
  misc_feature (38)..(38): n is a, c, g, or t
  misc_feature (229)..(229): n is a, c, g, or t
ttatacatgaaaccaatgtatctttcacatctcaagtngcttggctaaagacagagttgcattagcttaagttacagttcttgaggatacatgaggacagtataatattgctacagaaaaataaggtactactgatgggaatttatatgtactctcatcttttgcattcctaacaaatctgaagaagaaaattgagctatttctgaattaagcatttgcaatatttgancttcaatttgaagaatgttagttcagatttaaattcagttataggtccctggttttaaactataaagtggttattgcaaatctcacattgcatctggaatataa

SEQ ID NO: 306777 - DNA, 479 bp, Homo Sapiens
  misc_feature (452)..(452): n is a, c, g, or t
gagtatgaagcatgagtgataatgttggggaattgagagaatgatgctctgaaataagtgactttcattggctatgattgccaggctgtgacaattttcaaggatagacaacctcaaatttacttattactgtcataatgcagtaaaacacgccaaaaaataaaatatgatcaaatgcagttaccgtttattttggactgcatgacaatattcacttgcacaaaaccatataaacaacacccacctgtgtttgaaggcaaggtatctttgatcagaatctctgaaatatccctttgagttagctatcactatagcaaactttattaatttgtacctgacagtaattttaggatttatgattatttagttgaactaaagccataaatatatgaaggaagagttagccaagtaagtgaatagtgtgagtaaccatttcctttgggccaggagtntttgttgagggggatggtcctacagaa

SEQ ID NO: 306778 - DNA, 495 bp, Homo Sapiens
  misc_feature (22)..(22): n is a, c, g, or t
  misc_feature (50)..(50): n is a, c, g, or t
  misc_feature (73)..(73): n is a, c, g, or t
  misc_feature (79)..(79): n is a, c, g, or t
  misc_feature (108)..(108): n is a, c, g, or t
  misc_feature (341)..(341): n is a, c, g, or t
  misc_feature (355)..(355): n is a, c, g, or t
  misc_feature (380)..(380): n is a, c, g, or t
gcactttgtttccagggtgggnccctcactgagaaagcctggtcccctgnagtacttgctactgggcctgcancctctncccgtttgcctacagaaataaagttttanatgtcactcactgatcagattaaccttggaaggcatcagattcttcccatggggtctccgcgcttaggcctggaagccccatgttcctcatggacataatttgttttgtttgcacagatttgaattagttatcaccatgtaaaagccagccatttaaaaataaaaattcagatttctttaaaaccagaagttctggtgcccctccaattgcctgcccctttccccaacaccangggaaggaaaagcnggggggttttctggtttaagcattncccattgctgcccgttgggggtttccttggttcagtaaaaaaggcaagagaagtgtgttaaaatccaagttttagcctagagctaccctccttaagaaaattttaaagttcagcc

SEQ ID NO: 306779 - DNA, 470 bp, Homo Sapiens
  misc_feature (347)..(347): n is a, c, g, or t
tttaaaactgcctgatatacttgggtgatattcttccaggaatgataaaatgagacagaaatggcctttgagtgttttcaggaagggaaaatggaaaatgaaagctggactaaaaggtgttacaaaagcaaactagttaatacttccaagaaatgaatatgctaagatattgtttgctgatcaacatttattaaacatttactgtgtaccactgatctaggctcttggccagatatgagcaacaaaaagaagatagtgtagtgcttgccttccaaaatctagcacagtcctagaaagaattcaggtttcactaaggctacttagggagagagttctctaggttctangaaattaaggcaggcacccacacaaagactcagttgcaaatgggtggaaagaatgatttttattaatcagcacaatatcttaaaaatcccagtgtagccttctttgataaaagacagagtact

SEQ ID NO: 306780 - DNA, 273 bp, Homo Sapiens
  misc_feature (212)..(212): n is a, c, g, or t
  misc_feature (232)..(232): n is a, c, g, or t
  misc_feature (241)..(241): n is a, c, g, or t
agaatgagaataccagaggcactaacttggcctttgagggaacatgaccggtgggccgcactgcatttccatttgttcccagggcatctctggccttcagctgaagtctctgcagtttcataaaatttgtttcctgagttaatttacctccccaaatggaattaagcctcttgagggagaaaacagttttaaacatttctgacattctctgnggtccatagtactgttggantgtggattngggactctttttgatttggatggctttggggc

SEQ ID NO: 306781 - DNA, 411 bp, Homo Sapiens
  misc_feature (295)..(295): n is a, c, g, or t
  misc_feature (327)..(327): n is a, c, g, or t
  misc_feature (354)..(354): n is a, c, g, or t
  misc_feature (368)..(368): n is a, c, g, or t
  misc_feature (375)..(375): n is a, c, g, or t
  misc_feature (386)..(386): n is a, c, g, or t
  misc_feature (394)..(394): n is a, c, g, or t
gtggcttatgtacagccttttagactatgaggcatgaatagcaaacagtggcaatcgatgctgaaaaaccagaatgtttaaaaactgggccataaaaatgtagaacgtattctgtcaccagagctggggtcagtggggtgaccccatccctgcctccctgccccccagttctccccagaccttcctgcctgcctgtttcctgcctccaggacagtgtgcaccctgtgtccgtcttctgccgctacacctgtgaactggcaccacaggtggcgaacatgcccttcaggccacgatntctggtttttggtttttgctttactgccaaantatgatctagtgctacattcaacttangttgatttattganggctaanaaatttcctanccatttgnttattcacttagggaat

SEQ ID NO: 306782 - DNA, 212 bp, Homo Sapiens
  misc_feature (202)..(202): n is a, c, g, or t
tattcagccatcccgtgattcatcccgtgattctcgtgcctcagacatctgagtagtcaggatcaaaggtggtgtgccaccagccccagctaattgttgtattttttagtagaggcatggttttaccatgttgggccaggctggtttcgaactcctgggtctcaagtcatctgcccgcctcggcctcccaaaagtgctgggnattataaggc

SEQ ID NO: 306783 - DNA, 292 bp, Homo Sapiens
  misc_feature (69)..(69): n is a, c, g, or t
  misc_feature (79)..(79): n is a, c, g, or t
cctaccctgacacgacaaacaggttgtggaggagtagccttttggggatgtcaggtggaggaagcagantgcccacagnatctccaggaactctcaggtgtgtctgaactggcccaaccgcacactggacgtggcgaacttcatcacattcaagcgatctggattttagtcctgttaaatgctcaggtgtttttgtggtgataactggaaggaagctgccagggggagtgggagtggttagagaacgtgggatgaggcctaatgataattgcaatcacctgacactggcgag

SEQ ID NO: 306784 - DNA, 474 bp, Homo Sapiens
  misc_feature (76)..(76): n is a, c, g, or t
agcaaaattcagttatattcttcttcagttgccagatctacctctctccagaagttgggatcaaactttgctttantcattaatcagttaggtacttgatcagacaaaaaatatttgtgtcactaagtataattttccctctttccaaagaaaagcaaaaaagaactaaaattcatactatgctttatttaaaacatatccaagcatatgagtattctacataacataaatatcaaaagctcccacctgtcacctggacacatagacccatccaggccactgcacgcatctcaaactgctctggggtcagaaggccttcacagcggtccaatggagctgacagcacatacaggagcctgctgccctcttgtccaatactaatcatcctcccctaccaactcacacgtaaaaaggaagcatgctgccctatcatccaatacaaattatccttccctaccaacccacatgtaaaaa

SEQ ID NO: 306785 - DNA, 414 bp, Homo Sapiens
aggcatcaaataaaactgtactgttgtcgaataaatttagctggcttaggaaaattctccaggtttctttacttagaataacaatttctagccctaacaaacccaacataccttttttgcaaacatttcatactgtgggaaatcgttggttttgatcatttttaaaagtgcattcaatagtgaaggctaacagagtatccatcacaagtgaacagctagaaggttctggagcatgtgttccacggatgaaaagcctgatacttgcttgggtctctcaatgcaccagcagtacagaaatgtaacaccacctcctttaccatcctgaaacaaaattcacagatatgtcctatataaacgtaatttccagaaaggctgacaacaacaacataatgtgtattttaatatggcaaatgt

SEQ ID NO: 306786 - DNA, 358 bp, Homo Sapiens
ctgggataacaggaaggagaggggcagaggcagaagaaagggaggcttcttttgctgcctcatcggcctttctgttgcctcgagatttcatctgaacctgttcgatggtcctcaacagtgtataactcctgctttagctgggaggtgtgtggcctgaaggagttagtaaataaggtggccattagtgataggggttcctttggcagtaaggagtcctctcttttgccagatagcagcgtgggaacgaggaatgtgataggcatatttgggagtctgtataaatgttgactcgtttgcctttggaaagatttagggccctggttgagagctatgagttctgctttttgggaggaggatc

SEQ ID NO: 306787 - DNA, 462 bp, Homo Sapiens
  misc_feature (29)..(29): n is a, c, g, or t
ccaacagtggagagagatgctctcatctntgaactctagggcctaatggttgcccaggtcagctatatctcccttgttttcttagtgaagtagttattctctcttctatcctttgaagcaattcccttctgcctgcaaagtttggtttgaaccttaaaggttttcaaaagcactaagaaatacttctgttttagtaacgttatattttccttcagtatttctagtttacatgtaatatctgtcaagtggcacattttttacggttctctctgttgtaccaatagacaacttgaaggagcttttatgtgcgtaccacttaatttgtgtatgaggaggacagaaccttaaccttgctgaaaagaggagtcgataagaaaatcacaagaagtgtttaacctgtgatgacaattttaacttgccattttttcatttttcacaaaggtcagatataaagtgtgcagt

SEQ ID NO: 306788 - DNA, 208 bp, Homo Sapiens
  misc_feature (36)..(36): n is a, c, g, or t
  misc_feature (125)..(125): n is a, c, g, or t
aagaaagcagagaccattttgcgaagtcaagttganaggcatggactagtaaatttgaagaaattgtggtgacatgctatgctgtcttacactgtgtggtaagttggaggttccatagagctcanagctttcactgcattccactacctatctgacacactgggtcattttaacagacaaaggtgacccaggctacttttggggaatt

SEQ ID NO: 306789 - DNA, 406 bp, Homo Sapiens
gtgtgagctactgcgcccggtttcctctttcttttaaatatcatacagtaaacaaggaatgatgggtccacaggaagagagaccaccatgtcttcagatctcctcacagccttgccctccagagtttagatgtggagggaatagattaaaggcaaacttcttgttttgctgtttatctttggacctgtcaggctgtaactgtgtgtttttctcctgtggtgtggggcactgcgtgagtttaagcaccaatcacatacatccacatgtacctgcacttctgttcccagaaggaagaccgtgagtgtgagttgtccaggtccttgatattttgaacaaataattgaacagaaagcacaaaggaatgaaaaacgggaaggaagcagcaaaagcaagaatttattaaagt

SEQ ID NO: 306790 - DNA, 207 bp, Homo Sapiens
  misc_feature (105)..(105): n is a, c, g, or t
  misc_feature (158)..(158): n is a, c, g, or t
  misc_feature (193)..(193): n is a, c, g, or t
tgatggcatggctagacttttacaactttggatcctctggcaatgcatatatctgtcaaatcagcccacactaaagcacagcaataagaggcatgggggtgaggnagcgatcaggacaatcctaaaccttggcattttttccagatgagatcggggtncagtcaggggtagtattggcatgcaggacatttgngggttttttcaaga

SEQ ID NO: 306791 - DNA, 222 bp, Homo Sapiens
  misc_feature (212)..(212): n is a, c, g, or t
ttgcgaattcaatgcaagatctgagagttaaatgcccacatgccctcgcccctgtttaaactagacctctcacttagctaactgtacacatgtggaaacatgaatcagtcaggattttgttatctgtgacaggtcaaaacagcagtggcttcagaaacgtagaaattttcttctctccagtgcagacgtagacaatctggggctcctagtgnccccctgagg

SEQ ID NO: 306792 - DNA, 459 bp, Homo Sapiens
tcctgttaatatccttctttggctttccaccttgtgaactcctattgattctttgtatcccagatcaggcctttatcttttccctttcccctcatcttctacataacagtgattactctatacctctattatagccgctgtgattttcgtattgcagtgaatatatttccttcaccctagtatgcaccatcaatttaataacttttctgacaaataaacaccacttcagtaaatgcatacatagatttcaaaaatgttagcattagaagaaaatatgcattgttgaattaaagaaatatgggttatttgtttgcatttccctttttattggttttagagttatttgagtgtagtgactttgttggccactccagtaagctagtagtacagtgtgtgggacataggaggtggttagcaaatttggtccattaagcccgctcttcccaggggggccttttg

SEQ ID NO: 306793 - DNA, 512 bp, Homo Sapiens
  misc_feature (87)..(87): n is a, c, g, or t
  misc_feature (89)..(89): n is a, c, g, or t
  misc_feature (445)..(445): n is a, c, g, or t
  misc_feature (456)..(456): n is a, c, g, or t
  misc_feature (482)..(482): n is a, c, g, or t
ttaatgatgcgagtttaggtgggaagcgaaaacaaaaaaaggataagttggtgattaccataaaattcaggatagtggtacctttangngggagggagaatattgtgattaagaggggccaggtgtgagatttcaaagttgctggcaagttgtatttatttatttggatggcagttccaggttttacttgcggtagatcattgagctgtgtatacctgtgaagtactggtttatccatacacacagacatgcatatagcacaattatatatgagtatatgtatgtgggtgctcaggacttggaggtgaagtctttatataccatgccagggcaggtaaagcacaagctcagcttttgatctgttttcttctccccaacactccagaacaccaactccactccatccctgcccaaaggaggaagtaaaaggccttcatcatttccnatgggatttancctttgaatgttgatcccaaagtcanccaatagcccgttaggtagggccagtgtcc

SEQ ID NO: 306794 - DNA, 484 bp, Homo Sapiens
  misc_feature (258)..(258): n is a, c, g, or t
  misc_feature (388)..(388): n is a, c, g, or t
  misc_feature (449)..(449): n is a, c, g, or t
  misc_feature (461)..(461): n is a, c, g, or t
aacctcacatttacccccaggaccacagttatgagggagcacatggcccagagaagattggaggtccagaatctttacctctttaccttccctgtatgctgctactcctgggcctcttagcagtggcagcaccttccaaatcctcttcacccctaacctctgttttgaccccaagcaactctacaaaccctctagtcccaactgctgcaaggacctacttctttttacttcccagtctgagaaaagaatgtgtgtgangtaaaaggacctcatggggattaaagaacaggagggcagaatggctggggcagtgatgagagggttgaagtttgaagaggaggtagacttgggagaagtaaggcagggccaactttctcctaggaccttnttatatctcgagaagggtttgggatcttcttccaaagttccgatggaaaagtactgactantcccctttcccnaattcaagtggcatcaagggggg

SEQ ID NO: 306795 - DNA, 432 bp, Homo Sapiens
  misc_feature (66)..(66): n is a, c, g, or t
  misc_feature (197)..(197): n is a, c, g, or t
  misc_feature (230)..(230): n is a, c, g, or t
  misc_feature (293)..(293): n is a, c, g, or t
  misc_feature (343)..(343): n is a, c, g, or t
  misc_feature (348)..(348): n is a, c, g, or t
  misc_feature (355)..(355): n is a, c, g, or t
  misc_feature (362)..(362): n is a, c, g, or t
  misc_feature (396)..(396): n is a, c, g, or t
  misc_feature (403)..(403): n is a, c, g, or t
tgttagaggatgctggctgataattccagaaaacttactgatgctaaatcacagtacatgcatgantctttttcagctttactatagttcatgacctggactttctgtactcttggaagctgtgctccttaaaggaggcctctagtgaacacctttatctccatgtccctcttagagcccagagagctgcccatagnattttccagaattcctcatgtcacctagttcantttccattaactcagatcagccattgtgattcaccatttggtcaggctctcaggtttaacaanaacctactatcaccatcatcctttcaacagccacaggtctgaattggagncaacnatttttnttctttngagaaagaagtgggactgggggcacaactttttnaggtctngagggggagctaagtgggaaatctagaca

SEQ ID NO: 306796 - DNA, 147 bp, Homo Sapiens
  misc_feature (100)..(100): n is a, c, g, or t
  misc_feature (107)..(107): n is a, c, g, or t
  misc_feature (132)..(132): n is a, c, g, or t
cacacagcgtctggccatcagcagagtttttaatttaggagaatgacaagaggtggtacagttttttagatggtacctggtggctgttaagggctaattnactgacnaacacacccaactttggcggctgcngcccaaggaaggtgg

SEQ ID NO: 306797 - DNA, 340 bp, Homo Sapiens
gtggagaaaagggtggggaagaggccttcaagtgaactcagtttctgatgaattttggagaccagggggagcttagggtcaatccaggacagtcagggctttaaaataattaaacaggatggtggccccagttgccactgccacccacccaactcctcaaatacccaagatgtgcaagggaactatggaacagacaggttaaacaaatgtgattaattcagtatagaaaaaaagaggcccagctggtgacagaggttgctaaccatctatccagaaacccagtgtccacctcctgggcggccgccaagtttgggtgtgtttgtcagtcaatagcccttaa

SEQ ID NO: 306798 - DNA, 397 bp, Homo Sapiens
  misc_feature (376)..(376): n is a, c, g, or t
gattattagaaaaagtaatattttcttccctttatgattacatcattataaatcaagtccttccatgaacacatttaaggtgtgtggagatgagatgtctgaatccatttggggatgggctgcatttttggggaactctatgcctgtccagtgaagagtgcctaaaacattaattatagatcaaagatgttctgttgagggacaaagcttgatggtcatcaaacacaaggctttgtaaaaatacgaccacctattccacttactggatctgtcaggtgtgtaaaacttctctcgccagttcatcatgcttccatgagccctcaggactgggatttgagccttcctggctcttttatcccttgggggcagacatggnaccatctctgagggaccaggt

SEQ ID NO: 306799 - DNA, 368 bp, Homo Sapiens
  misc_feature (200)..(200): n is a, c, g, or t
  misc_feature (222)..(222): n is a, c, g, or t
gagaggcaagtatttaaaaaacaaccgcatgtgttagtagagaagaggataagagtctaaattttgacatacgtgtattagtaaacctaagctacttttgactttgcacactgtttatttatgttgtggtcacagagttaattatatctgttagaacaagcctttgaaagtttaatgagctctttagcattaacaacctntcatatttccttatttgttttncacctttccattcatccatcttaaattttgcagctcttaacaatgttattcgcactatgaaccccagagcagcattaggtgagtggaatgtgttccagggttaaaataaaaacaaggcacagtacatagtggtgttattcctatga

SEQ ID NO: 306800 - DNA, 442 bp, Homo Sapiens
  misc_feature (430)..(430): n is a, c, g, or t
cattggaacagctgctctggcctgttgcctggactggagatggctgaggacggcatccctccctggtgtcctctgttgaagactgtggcgggtccttgcctgtctttgcttggccatgcctggtggtgctctggcgggctccacttcacttcatctctcatggcatgattcccctctggtctctgtcttatccttcatcctgctcttgccctagtggtccctgaaacctttgtagtggcattatctctcccgtaccactgtgggctctcaacccatcccaagcccgtctgcacctgctcactcccaatccacctctatccagacaggatttttctgggtctgtgtaaacaaaaagtcagggccacagaggaaggatacactctaagccattgttctctctggactttgctgtagcactgaagttttcttngaatgtagctga

SEQ ID NO: 306801 - DNA, 271 bp, Homo Sapiens
  misc_feature (37)..(37): n is a, c, g, or t
  misc_feature (181)..(181): n is a, c, g, or t
gtataaaggggttgaggtcaccgggaaggggtaaaancgcgacgggacctgagctgaaggacgggatctcaagcctcaagtccctgcgccatcccgccgtctctgtgtcctcccctggggcccaaaacctccatcctccttctaggctcgctggctcaaggccaaggagctcagcgagccncctccgcccggaacgcaaacagctgttcccagagacgtctccgctctcaactttgccaactactccgcacgcactttgaccagcggacaa

SEQ ID NO: 306802 - DNA, 159 bp, Homo Sapiens
  misc_feature (69)..(69): n is a, c, g, or t
  misc_feature (96)..(96): n is a, c, g, or t
aattgaaagttggaaaagaatttccccttgtctggaagtaaaaaagaatgcatttatactgagatatcntcattttttgtatagagcttctctatnacctagaactaaatgcttatcatctgggaaccagggatgcaaactacagtcacagattaagga

SEQ ID NO: 306803 - DNA, 301 bp, Homo Sapiens
  misc_feature (264)..(264): n is a, c, g, or t
aagcgattctcctgtaaacgcatccttcttttgtagagatgcctacgtctgcagcctgcatgctgtgatcgtctcagatttacacccagacatcgtgctgagggacaggcggccacacgcagaccccacgtggaccccggggaggttggagatggtgctgggtcctcaccgtaccatgctcttgacttcgtattctttcacaaattcccaccacaaaatgttaaaaaataaacaggagagaattctaaaaatcaacatccattncttactagaaccccgctaaaaactttaagaacacgcg

SEQ ID NO: 306804 - DNA, 420 bp, Homo Sapiens
caggaattcaaccttatatagaaaatatagtgtttttagtgatttcattttgaaatattttgtacataaaaacaaaatgaaactattttgagtactttatgcctatacagactactagtaactgaacattcatataacgtagtatgttttgtaaaatgtttagcggttgcaaactggtttcccagatatgttttgtttagtaaaacttgagttgtaatcctttcaaagatggaagtaatatatagaaacggacgtttctgccctcttgaaaaagatgtggcaagagcaggcccacattttacatggcaacagttgataagggctaagctgtcttccccagatagatggaagaggacattgtccagcttgctgcaatccacacctgggtctctttattcagtcatgttctttgtactttcg

SEQ ID NO: 306805 - DNA, 390 bp, Homo Sapiens
ctgtatatagtaaaggaaaactcgtggcaaggagataagtaaggttttccttactgatcaactatagttatagttgttcaagcttaaaaggcaatagttatgatagtggcagtaatttgacagaggcaaaacactagaagaactaaaaactctccatgaaaataactatgaaccacaaagtaaaacatatttgtgaagtagtaaagaactgtgctcaagagcccagaccgcacaaacacctggcgattcaaatcaactccagctctaccacatactatatagttaaatttctgagactagttttcttcatataaaacaagttgtgaagattaaataatatatataaagcacaacccctggcaattagtaattacttaattatgtacaatt

SEQ ID NO: 306806 - DNA, 414 bp, Homo Sapiens
  misc_feature (401)..(401): n is a, c, g, or t
acctattccttttcaatgttttttctccgggatttggatagttttctcatacgcatgtgctgttcagtgccagctgaaaatttgagggagcccctgctggtctgcagcactctcttctcaggtactcctgctgtgaattcagccagtgtggcctccctaaattctcactcccatctcagctgctcagggcgacttcccgagctgtttgggcatcccctccctgtgccatagtctggaaactcggcagtaagctggggcagttgttggagtcacctcctttgccttccttttcttataactactgttgagtgtctgaaactttgtatgttttgttcagctttctggtactttaaggtaggacagtaaatctggtccctattactccgtcttgactggaagtngaaactgtttcag

SEQ ID NO: 306807 - DNA, 162 bp, Homo Sapiens
ctcaactgttaccttactaattcagtgtttctataaaaattttagtttatgagatgacattatcaaagtgatctaataaataagtatgccaattagactggtgagctatagattcttcattttcactttaacattaaaaatataattttcagtatggcttgg

SEQ ID NO: 306808 - DNA, 421 bp, Homo Sapiens
gataccagatgcatgtaatgaaatatcctgttaatgtagcactgtaaggaagtcatatacagaataagaaccaaatttttcaagaagacgagaagtagctatttcacctttctttcatttaacataaaaaaacggtgcaggcagcctctccattttccctgaatgtcatcttttggctgatggcagaagccaaccactatttgcatactgatgctcccataattacagttgagtcccttaaacatagtctccaagttacgatttgtttgcaatataatatagcagggttaccaactttataagcaatgctatgtgtcattttgctttaggctacagtatcacattcatcttgtaagcatcaaataaatacaattaaatatgacaggtctttaaactgggcttgaagggtgatgggcattag

SEQ ID NO: 306809 - DNA, 424 bp, Homo Sapiens
  misc_feature (301)..(301): n is a, c, g, or t
cgggtagtgattgcagatgaattcagactgaaaggcttacccacatcaaagacttaatgcaaatgtggtcctttctacacagcacatggaaaagtggggtgcctctggttgtaatttgggtggaattcacaataaatctccaccttatccctcccaccttcttccaggattgcttcctcatgtggactggataaacagctggagtggaattttaacttcacataaacgagtgctgctaagctgccttggatcactagcctcccactcaggtcccagagtagccgcccagctgctccagcantgcattttaccaactccaggggccactccatccagtcctggacttgtgtggtgcagcacccctgcactgtgcccatgtgtttccaatcaccatgcagcccttgaccagagccctagcatccgt

SEQ ID NO: 306810 - DNA, 414 bp, Homo Sapiens
  misc_feature (227)..(227): n is a, c, g, or t
  misc_feature (251)..(251): n is a, c, g, or t
  misc_feature (253)..(253): n is a, c, g, or t
  misc_feature (263)..(263): n is a, c, g, or t
  misc_feature (268)..(268): n is a, c, g, or t
  misc_feature (276)..(276): n is a, c, g, or t
  misc_feature (279)..(279): n is a, c, g, or t
  misc_feature (305)..(305): n is a, c, g, or t
  misc_feature (314)..(314): n is a, c, g, or t
  misc_feature (327)..(327): n is a, c, g, or t
ttgtcttttaatgagggttgataactatgtgtgtgttcaaagtagataaaggatacaaagcaactacttcaagttattcaaaaagctcaaccagaaaaaacaactaataattgcatgttttccccccaaatgtactcagctagatctttctaagctcttaattcacgtttcacactcaattgatgttatgcaaagtatgtttttaaacatgatccaggaatatcaantacagctttacacaactcatatantncccatatttntgtgngtatacanatnagcaacagtgaactgccagatgcttngggaagaanattaccagaaaanaatttgttgttaagtcttccacatctaattgaaacatcagttccagtgagtatttgggagaagcaccaatccaacagcttaacataa

SEQ ID NO: 306811 - DNA, 390 bp, Homo Sapiens
  misc_feature (377)..(377): n is a, c, g, or t
tactgtgtatcccatcattaaggtaactaattttcagtaattaaactgttggtcttctgtttagccattattctcagttctgtgcaggagtgagctgaaacaaagttgtatagcccagagagtgagaagctgcatttcatgtctcccaacagtcagaaagggattatgtactgtttaaggaaggagtttggcgaatattttgaaacccttttgggaaagcatagaatattgaaaatccaaaattaaccaaatccgtgagtgtgcaagctcaaagctagagaccttaggaatatcttaggatgtgcaaaacaggaagaaaacaagaactggagcaggcagcactaagtaagtgtcatatagcctccccaccccacccntccaaccctactc

SEQ ID NO: 306812 - DNA, 427 bp, Homo Sapiens
  misc_feature (405)..(405): n is a, c, g, or t
tcaaggaggaaggtaatgagttttaagtaacaaaacaggaaattagctcctctgtgacctttgatgagtttgtgaagctggcgttgtgagtgcaggattgaaattgtgaagagcattatatttagtttgctttgttgcttttgcagagtatctatttgccaggaaaacctaggaattgaagttaaagactctgctacctttgtgggaaatgaacaatactcttccttctgctggcaaaatctgggtgtctacttttcagtggctggtttttgctttcacgtagggtcagagtatccttttcctggaaccaagcttgactcaaagccattgtaagttctcttgttctttatccttctaatcaactattttaggagcaattttaaagttgacaccctttcccttctnacctttctgctcaatacaaagc

SEQ ID NO: 306813 - DNA, 432 bp, Homo Sapiens
tggaaaaaaaggaaatccatgatcctggtccccagtgtttttagacaagcaggcacacaacaggctttctctcccattgccactgagatgaggaatggatcagagctaacttgggcattagtcataaagcagatgcacagattctctctaataagggtgggattacttggaaaagccacctgtctgaagatacaaagacagggtaggcaggtattccaggtgggggatcacaagagtaaagttctgtgagcaagcaagccccaagcatgtttgaggagggtgagccatgtgacatgtcggggtacagaactctaggggctggccaggaccatcccaagaagggccaaatgtccgtgccaggaggcttgggacatttgtcctgtgcaaagccccagtacttaaccacatttcatgctgaagcacaaaaacctg

SEQ ID NO: 306814 - DNA, 434 bp, Homo Sapiens
  misc_feature (21)..(21): n is a, c, g, or t
  misc_feature (306)..(306): n is a, c, g, or t
  misc_feature (342)..(342): n is a, c, g, or t
cctcctgtagctgtgaattantattcattctggagttccaggtactcttccagtcacttaccacaataactgtatgctatatgggttctttttttattccagtttgatgtatgagaatacttaggcatagtgagttgcaaagctagaaagtagaatacgtggtatgagaactcaggtaattgagccccagaaccgaaactcttaaattactcttacatttcttttgattttaaggtttatgttactgagatattttaaaaatagtcttttacagtacaacattcagagagaaagagcagaactaantgatctaaccctgcctgttgccagtgaacctcatcngctatcccattggaagcacatcattcagttttggcttaaaatatccttctgtctgcttaatgtttgagagtttctaggctgatattttcaaa

SEQ ID NO: 306815 - DNA, 152 bp, Homo Sapiens
  misc_feature (56)..(56): n is a, c, g, or t
  misc_feature (63)..(63): n is a, c, g, or t
  misc_feature (80)..(80): n is a, c, g, or t
  misc_feature (86)..(86): n is a, c, g, or t
  misc_feature (92)..(92): n is a, c, g, or t
  misc_feature (108)..(108): n is a, c, g, or t
  misc_feature (118)..(118): n is a, c, g, or t
accctggagctggtgcagtggaagaagtagctgcaccagcaataccgcgagcccancagctgntgcagcaggtacccaanatgaanaacaanccacactcgcccgtgntggagctgancaatgtgccactgttccaaccagacagtccaaca

SEQ ID NO: 306816 - DNA, 208 bp, Homo Sapiens
gaattgaaatgataacaataaagagcccccaactgagtgcatcatggtaagcatgtaaaatactcatctctaataaaagttgtggcagtctggcaaagatctgcaaccgtggcttaaatcagactgcttttttgttgagaaaaagtttggctgtgctgatataaaacatgaaatgaagtaaaaccgatattcagctctgcattcagac

SEQ ID NO: 306817 - DNA, 322 bp, Homo Sapiens
  misc_feature (62)..(62): n is a, c, g, or t
  misc_feature (117)..(117): n is a, c, g, or t
  misc_feature (190)..(190): n is a, c, g, or t
  misc_feature (192)..(192): n is a, c, g, or t
gaacatgtgaaagcaaaatgttaaccttgaaaaatgaaactaccctgactattgagcatttntaaaattctgaatttttcctcattcaggtttagggcaattttgaccgacagatcnaaacgctttaaactttaaaagcaaaacagcctgcaagatgacaaatcagaccctaatcaagacaacatgggcngngaggggggctgccaaagacaaaggccaatttctccttagagtaaactgccttaaaacctaaaatgatatcacctcttgacctccagatccacaaagcagcaaagagaaaaggcccaaaagagctaaattt

SEQ ID NO: 306818 - DNA, 434 bp, Homo Sapiens
  misc_feature (424)..(424): n is a, c, g, or t
actttactacattatgtagatgaaaattctttattaaatgtactcccatatggatggaaaaaaatatactgtatcattcattcttctctgagctacaaatgaagagcgttgcatgtggtttgactctagattcaccatttccttttggttcaaagaagtaatcaggttaattcacggcctggtgctatctttcttaaatatcttttgaataattgagatctttgatgggaaattatacacgtattctgtcctgagagatttgaccaggctccttcccccaaaggaggaaattaaaccaaaaatgatttctcagaaattgcctgagtaagccctgtgaatgaaaggtcttttatggactaaatgggactagcctcctctggacttatttccttgataacttcagttacttgggcagggctatttnattctatccc

SEQ ID NO: 306819 - DNA, 402 bp, Homo Sapiens
acttttaataatgagatagtacattctactgtctcaatttctcagatttagatattttattaacttttctgggttataacagtagtctttcatgattgttacttcaatatactaaaaattatcaaaatatatttgtataatgaaaacatttttcattaatattttgtgatttctttctagttatataacgccgttataaaacacaaggaatataggtccccacctgtgacaccatgaaataaatagtaagaggactcactgaaaaatgtaaggatttcctttaaatttctatgacgtgtcatatttgcaagatgctgattttaaaatattaagagcctaaactggatggctactttcaaacatcaataaagacatatctaggagatatgtattaaaaattgt

SEQ ID NO: 306820 - DNA, 368 bp, Homo Sapiens
  misc_feature (53)..(53): n is a, c, g, or t
  misc_feature (140)..(140): n is a, c, g, or t
  misc_feature (142)..(142): n is a, c, g, or t
  misc_feature (332)..(332): n is a, c, g, or t
  misc_feature (344)..(344): n is a, c, g, or t
ggtgttaacatgccaaattctggaagattaataagtatagcctttatttttanatttagaacaacataataaaattaatttctaaatcaatattgaaattcatccagtttccatgtttcgcaattggttttaatttgccncncataggcgttagaaaggctccacagcacctcccccagcctttttatactactcaagctttttattagccctaatgttgattgccttcccagggcatctactagtttgcgtataatttggtctaattaaatttaaagaagagatgtttcagggagcaccatttcatcatttcttcttacactccatgctgnggactttaatgnggacctaaaccccatcttaactca

SEQ ID NO: 306821 - DNA, 411 bp, Homo Sapiens
  misc_feature (202)..(202): n is a, c, g, or t
gaggaccctctccatgctgttttctgtaatggctgtactgatttacgttcccactgacagtgtgtgagagttctttttttctctgcatcctcaccagcatttgttactttttgtctttctaatagccgttctcacttgagtgaggtgaaattttattgtggtgtcgatttgcattttcctgatggttagtcatgatgagcantttttcctatacctgttaggaaatgtctagtttttttaacctcttcctctagagctgtaggtttattaaatacattatctgcttttcaagttattataactgacttttaccaaatattttgtactgcttgttaaggattgccatccttctagcctctgagaagtttccttgctgcctggccttcaagccagtggcatatattttaattt

SEQ ID NO: 306822 - DNA, 178 bp, Homo Sapiens
  misc_feature (136)..(136): n is a, c, g, or t
aaaagtctgtacagaagcattgctaattatacgaaagaaacaaatcaacactgtcctttgttctaattttgatatgatgtactttttgggtctccagaataatcggtttttccattttctaatgttttaaaccttnggaagctctgtttctgggtcgtatgtgaaacacagcattcta

SEQ ID NO: 306823 - DNA, 212 bp, Homo Sapiens
  misc_feature (200)..(200): n is a, c, g, or t
tgggggtgattaaaatgagcaataaattcctcgtgagtctcggtgcagtgaggattgggagtggagatgcaggctggcacgagcacgttcccctcagctgaatattcatcatgggatagctccacatatttttgttttatctgctatcatgtcaacagagatatatttctacctctccttcatctcttagttaagacatngaaaatggtcct

SEQ ID NO: 306824 - DNA, 538 bp, Homo Sapiens
  misc_feature (415)..(415): n is a, c, g, or t
aagaaaatgctgtttgtattttgtggtctaataaggagttcgggatagcctgttgtatttgcctcatgccagcccctgagctgccttgggagaagatgctgattgtccttgtccagagtactgcttttgcagagtgacaggctgctgggacagatgtcctcctgttgcatctttgtggatgtttagtaccaatgatgacacgggaactcacatcactgacaccgctcttcatcttctgttagtctcttgaagagcatttttttgtacttctttgctgatgacctacctcttcataagccaagtgaaacaagttgacgaactgcctaggacttccacgtgttgctcacatacatgatgatttctgtcacgctcttgtgttcagacacactgacattaccatgtatgtcagacctcnttatgatcgcatgtcctgacagttaagctgattgcaaacagactattaaatatgaatggagcaacgctgtatgtcatggatatggtcctggagaaatcttacccatctggatggggcaggccc

SEQ ID NO: 306825 - DNA, 639 bp, Homo Sapiens
  misc_feature (26)..(26): n is a, c, g, or t
  misc_feature (537)..(537): n is a, c, g, or t
  misc_feature (588)..(588): n is a, c, g, or t
ttcctttatttattagaaattttctncagagtagcattcagggtctttggagaaatgatttagaaaatgactcctgaaggtagagtttattttatgaaaaaggatttcagaaaatgtctttagaccctggtttacagaaaaatctacaaaaaaaatcaataacaataatagaagtatgtagtagattactttagcccttctttattaacaattttcactctgagatgacttgaaatgccttataggaaacactgataaaaatcagactggcaaagaccttggcagatatagtcaatataacatttggatttgagctctgtggtaggcaaagaagagtatataaatttacccaaacatatgaaagcaggccacgtgctttcagaggtaaaaacttaactccagtttttaaggcgaacttctaaattttgtcttattacctgtttgacatcgtaaaagatttagaggtgaaagagtatccgggaaattttagccttaaagctgcccatcaggaccaggaacccagagttgcagctccgnggtggctccgggctgcccattgggatacccggggattagagcctgttagcncagtggtcctccagaaccttaatttccccaagagagtccgataatgggccc

SEQ ID NO: 306826 - DNA, 604 bp, Homo Sapiens
  misc_feature (409)..(409): n is a, c, g, or t
  misc_feature (513)..(513): n is a, c, g, or t
  misc_feature (536)..(536): n is a, c, g, or t
agggaactggattttagtacattatgggtgtatgagatgattggagccttaatgaatcattacatgctatcattgaggcgctcctcactgtatggttttcagatacagagaacctagtgtatgcatgagaaagtaaatctcctcccttcctttgctggaaggaggagagcagttgccacccaccagtgccctggttggtcatagtgccttcccctttagatggactcaggacaatggcagatcaaaagacagtggaagcccacaagctccctgcagatctgcagcaccccatgggactttatattcaccttgtccccttccttgcttgtatgttgactgaccctgatatttagcaattttccatgggctaaatgatatacaaggctaatatgggccaggcagttttaancacaatctggacacatttccttatgtggtaagtgggattttggaaaatcattttccggtttttgttggttcccttctcattaagccaacatgtataatcataantacaccctttaatgtcaattganacactttcctaccctggatatggactgtgaaagggaataatcttgggacccccaatcggtaagctaag

SEQ ID NO: 306827 - DNA, 358 bp, Homo Sapiens
  misc_feature (26)..(26): n is a, c, g, or t
  misc_feature (141)..(141): n is a, c, g, or t
ggcacgagattatgagaaaaatgganaagagaattccatatggagggaatagcattagcaaaataagaatgctcaagatttgtatggaaaataagtggttcattttgttgacgatacgatatatgaaaggaattagcagangtgaagtttggagaggaatgttggagctactgatagaagtatttgaatgcaggaataaggaattcaagccttactctgtttgaaagccccagtgataaaggacattatcaggactatctttatgagtttgacaatgttacgtggaaagacagactgaaataaataccgactggttctccgaataatgtttcattccgatgttgtttcattataatgt

SEQ ID NO: 306828 - DNA, 218 bp, Homo Sapiens
  misc_feature (120)..(120): n is a, c, g, or t
ggcacgagcaatacctgacaaatactaattaaggaattcaaaggccaaggaatgaacttatgcctctgacttgctttaagaaatgactatatccacaatggaatggaaaatgccaggtgnctagtaataaagtctttcattacattattaaacaatgtgttgacaatactttagggcctgtgcacaagccacacacattcctggtttttcttttgtgg

SEQ ID NO: 306829 - DNA, 551 bp, Homo Sapiens
  misc_feature (265)..(265): n is a, c, g, or t
  misc_feature (418)..(418): n is a, c, g, or t
  misc_feature (444)..(444): n is a, c, g, or t
cggtttatttttgattttcattatttccttccctctgctcactttgttttaaatttgccttctccagccccaacccccagtttcttaagacggaatccgagaccatttatttgagacctgtcttcttttctaacacagaagttattactataaagatctccctatatatcaacagcatttcaccaatttttatatgctgttttttactttcattcaattcaaaatactaacatctcttttggtctcttctttgacccatgggcantttagacatttgttacttagtttccagatgtttggagatctttcagatctctctgttattgatttataatttaatttattgattgattttaaggctcaaaatagtgtctgtcttggtaaatgttctgaatgaacttataacgaatgtgtatcntggctgatattgggatgtggtgttcnataaatggcaattaggtcatggttgggttggataatgcagttcaagacatccctactgatcctccggttgcctccggtctacccattaggggagaaatatattgaaa

SEQ ID NO: 306830 - DNA, 556 bp, Homo Sapiens
  misc_feature (308)..(308): n is a, c, g, or t
  misc_feature (396)..(424): n is a, c, g, or t
  misc_feature (487)..(487): n is a, c, g, or t
  misc_feature (536)..(536): n is a, c, g, or t
  misc_feature (545)..(545): n is a, c, g, or t
tccatttttcggtcttttgagaaagctagaaaataaattcttagtcaaagttgcccatcctgtttgccgcactttataagttattgttgctgaatgattgggagctgtccatcagcggcagagaacttgcagtttacttaagaaattgcgtgtgtgacaaaagcagctgccaggagtgtggtggtccgcgtgaatagagggagagaaggcaattagggggctgtgtggttggggctttttacttgtcaaagtggaggctcattgcttttgttaccaccatgtaaagggaatggcagggttttgttttnggtattaagggccttaaagattgctgcctgacacttacacaggaaggccagataagtccagaaagagaggccacggagcagtattttnnnnnnnnnnnnnnnnnnnnnnnnnnnnnttcccacttttttgttaatttttaagcctgcccagcccttggtttttgttgaattttttggtngggaaccgccaagggtgattacctgtcccgtgtcttaacagattgtttnaagacctanatccgtgaaaa

SEQ ID NO: 306831 - DNA, 441 bp, Homo Sapiens
  misc_feature (273)..(273): n is a, c, g, or t
  misc_feature (328)..(328): n is a, c, g, or t
  misc_feature (340)..(340): n is a, c, g, or t
  misc_feature (361)..(361): n is a, c, g, or t
  misc_feature (373)..(373): n is a, c, g, or t
  misc_feature (384)..(384): n is a, c, g, or t
  misc_feature (398)..(398): n is a, c, g, or t
  misc_feature (405)..(405): n is a, c, g, or t
  misc_feature (421)..(421): n is a, c, g, or t
cacttgaagaccttgatgtttattcatagatgttccatacccctcattgtttaaaaagaaatacataggaagaccacaggcttttattttcaaatattgtaaaatagcaaattagtaccaaggtgatttttttccagccatatagctttttcagcttctccatagtagaaatagatagaaaggccatgctaatctactgcactctgctcatcttcagggaagccgccaagcggccttggggctgccacttgagcaggtgacaaaaggaatggnaaaaaacagaggggcagagttttactcctgaccccactttaatggtcctgggggntaagcgggaacnggggaaagcttaccttaccanaacatgggctcntatttaaaacnaattaggttgaaanaaattgnatttggtcttttcccncccggtgggggggttttgga

SEQ ID NO: 306832 - DNA, 563 bp, Homo Sapiens
  misc_feature (64)..(112): n is a, c, g, or t
  misc_feature (199)..(264): n is a, c, g, or t
  misc_feature (423)..(423): n is a, c, g, or t
  misc_feature (442)..(442): n is a, c, g, or t
  misc_feature (475)..(475): n is a, c, g, or t
  misc_feature (482)..(482): n is a, c, g, or t
  misc_feature (493)..(493): n is a, c, g, or t
  misc_feature (505)..(505): n is a, c, g, or t
aagttttccagaaggaagaaagggccagggcaggggtttgttaccggaaaaagggtcttatccnnnnnnnnnnnnnnnnnnnnnnnnnnnnnnnnnnnnnnnnnnnnnnnnntctttatttacttagcatcattaacttattccctcaaccttaaatatcttgtgaccaggactgcccaatcccctgggactataaccnnnnnnnnnnnnnnnnnnnnnnnnnnnnnnnnnnnnnnnnnnnnnnnnnnnnnnnnnnnnnnnnnngattcactgcagcaccaagcccgagggctcctccagagctaagagcaggaagaagcaaggccaccccaacacacagggaacccaccagactttgaatggggcaacagcaaagatttcccagcaggaactattgagattccaaaacatcccagttattanggggtttgttaccacaggnaggttgctgaagtcagcacagaggcagaggacnttgcaanccagaagcttnaaatttattttnaaaaccaaccaaaccaaggattaagagttgttttgtctgcttgttggcaatttttgaa

SEQ ID NO: 306833 - DNA, 457 bp, Homo Sapiens
  misc_feature (344)..(344): n is a, c, g, or t
  misc_feature (362)..(362): n is a, c, g, or t
  misc_feature (404)..(404): n is a, c, g, or t
  misc_feature (413)..(413): n is a, c, g, or t
  misc_feature (423)..(423): n is a, c, g, or t
aaacttctcgatcatatcatcctatccttgctacagcaatttcacaattccaggatgtgaagttggcttaatattataagaaaaagtaaaataagaggcatgtattaactaaattaaatatcaagggatgaataacttgcagggacacagagaaaatataaaaaatctcatctcattacttatgactttgaaatggatactgttttcaactacctggcagagtacttcactccttatatgcatggaaaataaagtttaaacaatacccatgtgtctagaagttgattttggttgaaagcacaattctctactggttgagttttaaacaaccggaactggaatcntaccaacttggggagggnaacctggtcctaacttggtttccataatatatatataatatngtattttcnttgagagggnttccaaatggtccggggagaaaaactggcctggg

SEQ ID NO: 306834 - DNA, 534 bp, Homo Sapiens
  misc_feature (132)..(132): n is a, c, g, or t
  misc_feature (428)..(428): n is a, c, g, or t
  misc_feature (449)..(449): n is a, c, g, or t
  misc_feature (489)..(489): n is a, c, g, or t
  misc_feature (519)..(519): n is a, c, g, or t
atgcaatcatgtataggtttatttagcaggatttaaagcagaaacagctctcaaagtaacactaggattatccaggaggatgacctgatacctattcagtcttctagaggtaagtcagtagctccacttctngttccaacaaatagcatacacagtgtggggtgtgtacagtgctaggttaacccaaagtgaactcttctgcctcctggagaagatcacaagtggtgccagtggtcagagataagaagtccaacccatcataacaatgtccagctgttttgaaaagtaggctacaggcctcatgatattccccaagttctttggggttactactcctaaaccccatcccttctctctcatggtatgaacaaatccaatgggctttcttagttcaggggggtctcaagtaggccagaatccatttaggnaatttttacctaatggggtangaaagggccctttgacattccctgtccatctagaaggtcnagtgtccggggcctaggggcttcatggagncattttggccataag

SEQ ID NO: 306835 - DNA, 524 bp, Homo Sapiens
  misc_feature (408)..(408): n is a, c, g, or t
  misc_feature (463)..(463): n is a, c, g, or t
  misc_feature (474)..(474): n is a, c, g, or t
aattattatttcaatagtattgggggaacaggtggtgtctggttacatgggtgagttctttagtggttatttctgagattttggtgcgcctatcacccaagcagtgtacactgcacccaatgtgtattcttttacccctcacccgactcccatccttccccccaagtccccagagtccattatcattcttatgcctttgtgtcctcaaagcttggctgccacttataagtgagaatgatgtttggttttccattcccaagttccttcacttagaataatgacctccaattccatccagtttgctgcaaatgccattatttcattcctttttatgggctgagtaagtattccatgggtaaaatacacaaccatttttaatgggatgaaaattatcctggttaaaaatangggcctaaatcatgggtatcaaggtaatccgggcaagggtattaaacatggcagnacggaagcctnggtttccctccctaatcgggataattaaatagacccctaaaccttaaaaa

SEQ ID NO: 306836 - DNA, 434 bp, Homo Sapiens
  misc_feature (317)..(317): n is a, c, g, or t
  misc_feature (365)..(365): n is a, c, g, or t
catcaaaatatttatttttccctttattctttatgctttattgatctttgccattcttttaaaatatttctaacagtttattttaccttcattctaagagagcataattttttattttgttgctccttgctttcatacccagcaaaattcatggttattgggtgagtctattccctaaagagtgagaattggctgtgattttcattctcattttccttctaaatctgtatccgtttttttcttggaatatgtgacctctgagttccattcttttattaatcaaggctatggaaacatatggaatataacataattangttacaatggaaaatttcaagggagagtgggcattttctctgggtacnaaattggcgatttggctaagatgccataaaggtcccaatggctttccatcggcaagggtcacctggtaa

SEQ ID NO: 306837 - DNA, 107 bp, Homo Sapiens
cccaaatcagtattttaaattaaaaaaatgatcttgatagttcatactgtaatgaccttgaataattggagagagcaaaatatgtatttctgttcaggtaaaaatgg

SEQ ID NO: 306838 - DNA, 616 bp, Homo Sapiens
  misc_feature (21)..(21): n is a, c, g, or t
  misc_feature (566)..(566): n is a, c, g, or t
actggggcaagtaagcatgtngaggggtctctgttagtttccaagaactgccataacaaagtatcacaaatttcgtggctaaaaacaacagatgtttattctctcatagttccagaggctagaagtccaaaatcaaggtgttggtagggccacacttcctctgaaatctctagagtagcggtccctaacctttttggcaccagggactgtttcttgcaagacgatttttccatggatgggaagggggatgatttcagggtgaaactgttccacctcacatccgagcattagttggattttcctaaggagcatgcaacctagatccctcgcatgtgcaattcacaatggagttcgcgctcctatgggcatctaatgccgccactgatcggacaggaggcagagtcaggctgtaatgctcgctcgcccactgcagcccggttcctgacaggccacaaaccagttctggtccgaggcccagggactggggactcccgctctagaggaggatctctccttgccacttctaccttctggtagtccaggtgtgtctggacccaacctctgcntccttcatcacgtgccattctcccttctgtgtctctgtcttcacatagca

SEQ ID NO: 306839 - DNA, 163 bp, Homo Sapiens
attgcaggcagcctgatctcttatcttttttttaagtttagagtctatttaatatccgattaaggaagaaaacaagctacgttctgcatgtttaataacatgccagaataacttgataacatgatttaagccctatttttaacaagataattttcatccatta

SEQ ID NO: 306840 - DNA, 619 bp, Homo Sapiens
  misc_feature (440)..(440): n is a, c, g, or t
  misc_feature (504)..(504): n is a, c, g, or t
  misc_feature (510)..(510): n is a, c, g, or t
  misc_feature (520)..(520): n is a, c, g, or t
  misc_feature (572)..(572): n is a, c, g, or t
  misc_feature (581)..(581): n is a, c, g, or t
aagccacaaagcctccccgagccaccacagccccaacctgggccccctctgccagggcctctcctctttgctccagccacacgtgccttccttggtgcggacaagcctgctcctgcactggggttttgtctgttccttctgtgccttccatccacgacgctgacaccagcctacaccctccaggcctcactcagacgttactcctcagaaagacccctggcaacagcccagctgggccaagctctcctcccgccactctgcagctggcaggacgcactacgctgtctcactgggggtggtaaccacgtgtcccacacacctgcctcccattgggccctcatacaacatgttagacaacatgtgctgaggctaccgagagagggcaccaagtcacagtcggaaaaatgtgccccctggccaacccttcccagaggtttctnaagccaaaagctatggagtcttccacggccccttgcagcacagaagtgcccgagcaagtggagnaggctnaagccctggnctggtgtgtgctggtgtgatccgagatagctgaggagaagcttcgagccgcngttaacttngggaacgaggaatttggaagtattaattcgtttcgaaa

SEQ ID NO: 306841 - DNA, 326 bp, Homo Sapiens
  misc_feature (43)..(43): n is a, c, g, or t
  misc_feature (267)..(267): n is a, c, g, or t
  misc_feature (306)..(306): n is a, c, g, or t
atgtgtttggtcttcgacccttttactgacatacaactctaanaatccttagaatctccacagtgatgtcttttgtattttaatgaccggactgatgggtggcagcccgtagatagctccaagatggggctggtcaccagaaagaccaaggcattactagaagattggaaccttcagcccacccccagcctccaagggaggggaagaacagatgaaggttaaagttgatcaccagtggccaatgatgtaatcaattatgaccatatnatgaagtttccataaaaaaccccaaaggacttgggtccnaaagaaacttcctgggatgg

SEQ ID NO: 306842 - DNA, 561 bp, Homo Sapiens
  misc_feature (398)..(398): n is a, c, g, or t
  misc_feature (440)..(440): n is a, c, g, or t
  misc_feature (463)..(463): n is a, c, g, or t
  misc_feature (492)..(492): n is a, c, g, or t
  misc_feature (509)..(509): n is a, c, g, or t
ctcttgcctgatttctctggctaggacttctggtactatgtcaaataggaatggtgagagagtgggtatccttgtcttgttctggttctcaaaggaaatgcagaagctagaaagcgtttgatcattcagtataatgctggctgtgggtctgtcatagatggctcttattattttgaggtatgctgcttcaatgtctagtttgttaaaggtttttaaaatgaagggatgttgaatttttaaaaaagccttttatgtgtctactgacatgatcatgtggtttttgtttttagttctatgtgatgaatcacacttattgatttgtgtatattgaaccaagttttgcatcccagggatacagcctgctcgatcatggtggattagctttttgatgtgctgcngaaattcagtttgctagtattttgtttaggatttttgcatcnatgttcatcagggataatgggcnaaagtaatctttttttgggtggtgtcccngtcaggttttggggaancaaatgatgatacctccatagaatggagttaagggaaggggtaccctcccaa

SEQ ID NO: 306843 - DNA, 601 bp, Homo Sapiens
  misc_feature (109)..(109): n is a, c, g, or t
  misc_feature (559)..(559): n is a, c, g, or t
ctaagacatgtggagaagatcaaatgaggtattgagtgtgtgagctgtgttaggctggctcctactctctccccttgcctagcagaaccagtgcccagtcagatacttnggaagggctgaaggagggtctcacctgtgcccagaaataagtccagacagctgagagatgggtgccactcttcctgggtaatgccatacttgaaaggtagtgtgccccttctcatggatcctgcaccctcctaaggccccagctgctgctggtcgggctgaagaccatgatggactaagcaacactgtcccaacagaaaagtggagaattccctctctacctacaatagaattatcctaactcaggttgttagtacccaattgtcacttgggccttgatgttttatgaagtttttacaaaacactgctttccatgttttttgttgatttgtgtatatttttgcatatagccgtttccaccggatttagataagtggagattgagccaggaggaaaagctgaagtgacgagatggtgtgctattctcatttggttaatcccctagtctggnaacacttttttccctaaggaattgtctcccaggaaatttcct

SEQ ID NO: 306844 - DNA, 475 bp, Homo Sapiens
  misc_feature (201)..(209): n is a, c, g, or t
  misc_feature (333)..(333): n is a, c, g, or t
  misc_feature (417)..(417): n is a, c, g, or t
  misc_feature (432)..(432): n is a, c, g, or t
  misc_feature (440)..(440): n is a, c, g, or t
  misc_feature (455)..(455): n is a, c, g, or t
gagacaaattaaggagtggaaggtaaagggggctgcacgtgaagaaactaaaatggagtctgtccggctctctctccgctattgctctcttaggacagtatatttagatcagagtaaatgaaagtaatgttattaggagataagattaaaattgatcccatttgtaaaaagggaagtaggttatttgtgaactgtaatacnnnnnnnnnagtgaagaatcaccttaaaacttggaaactggatacaagataattccttcattctgtaaaagtttagtagcaaactatatgccaggactgtgctaggtactagggatacatggttgaatatatngtataagatgccttggaagtgtccagataagtttcatataaatgggctccatgcagtatatagacagtggtggtaaaaaggggnctactgagatgcccngagggccngccattaaagcgtcntccgatggtagaaaaagggg

SEQ ID NO: 306845 - DNA, 447 bp, Homo Sapiens
  misc_feature (366)..(366): n is a, c, g, or t
  misc_feature (401)..(401): n is a, c, g, or t
  misc_feature (431)..(431): n is a, c, g, or t
cttaagaaacttactcagagactttccaaaaaaaacttaggtcctacaacatttcttaaagaattcacactctaaaaccactctccattctctaaatgctgatgttgatgaaccttattctccaattccccaatacagcttaatttccactaaccatacacatcaaatgaggtgcccccagacattttcttataggctgggcaccatcttgggtcagccctctaaactttaaaaccacatgaacatgctcagatacaggacagcagagtgctatcagagccatttccatggggtctagagtgctcaatgttccaaggacacaagagaagcttttgatttcattggaacatttcaccatggccaganactgggaaggaacagaggtggaacttggcaacctntggtcctcaagggaacatttaattctagtngggggaacaggaaaag

SEQ ID NO: 306846 - DNA, 543 bp, Homo Sapiens
aagcatcttggactaaaaagatcaaacccaaccacaaaatgactgatcagggaaaagaaagccaccttactatgaaacccttactaatttgtgatataaatttatccagaaacctttcgtccaaagatctcaaaaactcttaacaagaaagttttaaccaccgcacaacaatcctaagaagttgggatggctcagaactgaattctcaacgttggggtctcctgaaactcttgataagcagtgttcctcaatgtgaggtctgagaaccacctgcactcctcatctaaatgcatgtgaaatgcacattcgtggattccatttccactgctacatcaaaatctctggggaaggaaattggaacctttaataaataacccccagaaagttccaacactaaatttctaaaccaagcgatgactcactctccctcctccacaaacaacggcagaccgggtaagtaaatccaaaatgttggtctacaacttcaaggggcttcacagggcctcctgaaggtctttccacagggttcacaggtaagaaccc

SEQ ID NO: 306847 - DNA, 550 bp, Homo Sapiens
  misc_feature (56)..(56): n is a, c, g, or t
  misc_feature (295)..(295): n is a, c, g, or t
  misc_feature (311)..(311): n is a, c, g, or t
  misc_feature (315)..(316): n is a, c, g, or t
  misc_feature (318)..(318): n is a, c, g, or t
  misc_feature (324)..(324): n is a, c, g, or t
  misc_feature (328)..(328): n is a, c, g, or t
  misc_feature (471)..(471): n is a, c, g, or t
  misc_feature (480)..(480): n is a, c, g, or t
caaataatgcttaataaacctacttacatatagacacagacacatctttgtgcatntttcgtatttgttacaataaagccatgaaaactaaattgccagcttgaaagggtacacacacaataaaagttttcaatgtttactgtccaaatgtgatcttaaaaagagattatgctcatttattctttatgagtaaagggttaaaaaacaccctttttccttttatatgagaatttgacctttggttaactttctagctctgttctcttaggaacctatactgtcgacagtgttatangcatcattgcttaggnaagnntnacccanttgntaaattgtatcttgagagaaaaaaccataaatacctaataggtaccatatctttgggccttcctgggttcaatgacttttataactggtatgttctttgcagagaactgggaagctatgcagtacagctgttactatagatantgggctccngggggcacgaggcctaccaagccaggaaggttccaacccacttcttagcagccaagttgtatcctggggg

SEQ ID NO: 306848 - DNA, 589 bp, Homo Sapiens
  misc_feature (210)..(238): n is a, c, g, or t
  misc_feature (251)..(384): n is a, c, g, or t
  misc_feature (390)..(405): n is a, c, g, or t
  misc_feature (417)..(498): n is a, c, g, or t
  misc_feature (540)..(540): n is a, c, g, or t
  misc_feature (553)..(553): n is a, c, g, or t
  misc_feature (562)..(562): n is a, c, g, or t
  misc_feature (567)..(567): n is a, c, g, or t
agccactgacccgcccaaatcctgaaatttctgaaacaactatatctttaggtaacttactagcttttgaagagttcaggtttgccttttattacaattattgcattgatactagtagtattttatagactttcttgtgtgaaatgaaaagctccttgtgactattaatttttcttattccagttattgaattgctattgtcaccatatnnnnnnnnnnnnnnnnnnnnnnnnnnnnngagatggagtttnnnnnnnnnnnnnnnnnnnnnnnnnnnnnnnnnnnnnnnnnnnnnnnnnnnnnnnnnnnnnnnnnnnnnnnnnnnnnnnnnnnnnnnnnnnnnnnnnnnnnnnnnnnnnnnnnnnnnnnnnnnnnnnnnnnnnngttaannnnnnnnnnnnnnnnagtagagactgnnnnnnnnnnnnnnnnnnnnnnnnnnnnnnnnnnnnnnnnnnnnnnnnnnnnnnnnnnnnnnnnnnnnnnnnnnnnnnnnnnggtggtgagccacccccgcccaggccaattttaataattttntaaaatataaaantgcctttcnggatngggatgtcattaggttaatgga

SEQ ID NO: 306849 - DNA, 567 bp, Homo Sapiens
  misc_feature (74)..(74): n is a, c, g, or t
  misc_feature (116)..(116): n is a, c, g, or t
  misc_feature (470)..(470): n is a, c, g, or t
gtagacaggtcacaaaaaggacacctggacaagtcagtcacacccacaggtgacataattttctggccttctgnaaggagggaaagccctctcctcccatagcctgctctgccagncatgtgcagactgaggctgttaggtcttctggagtttgccagaatagacagccttctgcatcacaggccatgcatgcctcataaaatcctcacatggttccagatctctggattacacaaactgatgttacctgaacaggaagagtagtcatatatacggtgataggggagatgattttaggtgtacagtgacacaatgttttatactgataattatatgctgtatttggaaaacttataactaaggatcaaacccacaatttcacaatcatttacatagaaaatttactttcattatagatgtaagtaataatgagtttcttataaaaattttacatagtatggacttgattntttttttaaagtgaaggtggggataattgaatgatgaaagttaagaagccctgactggtgttgcatacaccaggggtccttacctgtggacctgtgg

SEQ ID NO: 306850 - DNA, 548 bp, Homo Sapiens
  misc_feature (95)..(191): n is a, c, g, or t
  misc_feature (367)..(367): n is a, c, g, or t
  misc_feature (396)..(396): n is a, c, g, or t
  misc_feature (420)..(420): n is a, c, g, or t
  misc_feature (440)..(440): n is a, c, g, or t
  misc_feature (449)..(449): n is a, c, g, or t
  misc_feature (471)..(471): n is a, c, g, or t
  misc_feature (526)..(526): n is a, c, g, or t
  misc_feature (536)..(536): n is a, c, g, or t
tgttctttgtcctttgctatggttttaaaggaaaagcaggaaaataagaggcaaattcttcccctaaaaattctttaaaattcgaacattcattnnnnnnnnnnnnnnnnnnnnnnnnnnnnnnnnnnnnnnnnnnnnnnnnnnnnnnnnnnnnnnnnnnnnnnnnnnnnnnnnnnnnnnnnnnnnnnnnntcttgttgctatcagttgctagtcccttgaaagactttattgataatatcctgtggtgataaggggacaaagaaaatggcattcagatgtattcgtggtctagtgggccatgccatccggggttcttaggtttagctaaatattcagattgacccacctgtccataagccacatcntggcacctgttggctcagaagagaggtanctgggggataagccagcatgcctngagggttttgctcctcagtnggagcccgngtggacactccacttagttgtncatacaaccatctgggaagccaccattcttggggaccccaagatacaactttgcnggcctaagantggggtttgagc

SEQ ID NO: 306851 - DNA, 535 bp, Homo Sapiens
  misc_feature (141)..(141): n is a, c, g, or t
  misc_feature (348)..(348): n is a, c, g, or t
  misc_feature (352)..(352): n is a, c, g, or t
attaacatacacatgtgataacagtgcttcagtgctcattttagacttaaaatctaaactcctgggtggtatttttcaccaattccccaggaagtttttcatcaatggctgaatacttatggtggtttggctgtgcatgcntctcctgaacctctgtatcttctcacttcttctgcccatctacctgattaacttttatttatcttttaaatctcacctgtttcctaggggaagccccctggtcttcagctacttaaacttaagttctgttgtgcccttggtcctatggccctgtgctcacgattattgagagtctgtctccacactgtcctggaagctgctgcaaanaagngtcctgtcatttttgtgttcccaatgcctaacagtgcctggagtgctgcaggtgactggagaggtttgctgagaatggaacaagatcccaaaagggatcaggattcataggtagaggaattagcttagttaagaatctccctatcttgagctaacaagctatgaaaataatgtttgacattaa

SEQ ID NO: 306852 - DNA, 487 bp, Homo Sapiens
  misc_feature (260)..(260): n is a, c, g, or t
  misc_feature (314)..(314): n is a, c, g, or t
  misc_feature (322)..(322): n is a, c, g, or t
  misc_feature (345)..(345): n is a, c, g, or t
  misc_feature (414)..(414): n is a, c, g, or t
  misc_feature (440)..(440): n is a, c, g, or t
  misc_feature (470)..(470): n is a, c, g, or t
tatggattccaaaattagttgtggaaatctgcaattataggtaattcatttttttagtggaagtaaattcaaaggtctatcatgagttaatgttaagtttgcttatattttaaagaaaaatgtagatatttaaaaactattctactaatcccagtgttaaatcatccacatctttgaaaatatatgtagtaatttggaatattcattagacataaattctcttttatattttaaaacacataatcacaaagaattatgtngcttggataattttacttgtagttgattgtgttcaaatttacaaacatagtctnctactatntatactttaacttttgttctatntgtgtaacctgccttacagattggaaacgtattatcaaaagttttgcatttggtgctacttttaaacanaatagtgtataaagaataagaattcntatactttgctcatatctatcacctctttntcagtcacactgctagc

SEQ ID NO: 306853 - DNA, 181 bp, Homo Sapiens
  misc_feature (106)..(106): n is a, c, g, or t
  misc_feature (134)..(134): n is a, c, g, or t
  misc_feature (161)..(161): n is a, c, g, or t
acatcctaaatctctcccagtctagtgtgctaaatttgctgacttcctcccattagtctttctgaattctggcatttttaagtgtatatattcttttcctcatatntacttaacagtgtgggctggaaaccacnccgtgtccattcataatggatcttccncagtctggtttttataccat

SEQ ID NO: 306854 - DNA, 369 bp, Homo Sapiens
  misc_feature (14)..(14): n is a, c, g, or t
  misc_feature (35)..(35): n is a, c, g, or t
  misc_feature (230)..(291): n is a, c, g, or t
  misc_feature (328)..(328): n is a, c, g, or t
  misc_feature (346)..(346): n is a, c, g, or t
ttgacttgaaattnttactaaatcaagtaacttgngaaaagagggtagaatttttagtgtcttagatttaaattaaaagtttttagaatatgaagactggccaaaccagtgattttaaagaagatagaccttcacgtttcaggtaagaatattgtaaaaccttttaaattttttaagaagaaaattcgttcattttgtggcttagattttaaaaattttagaaagtatannnnnnnnnnnnnnnnnnnnnnnnnnnnnnnnnnnnnnnnnnnnnnnnnnnnnnnnnnnnnntgcttgacgccactgccgactccgacgaccacggctngggccaaataccggcganaaccctccacttcttgcaaagaa

SEQ ID NO: 306855 - DNA, 278 bp, Homo Sapiens
  misc_feature (26)..(26): n is a, c, g, or t
  misc_feature (28)..(28): n is a, c, g, or t
  misc_feature (240)..(240): n is a, c, g, or t
tgagtcatgtttggcatgtatgtgtngngggggtgggcataggagttacacatttaagaaagccctatcttttagtagaataaattaatgcagattggcctgtcttcctgcctgcctggtcagtaacagtggactttggagattgatctagtgatgataaacctattgtatgtggcataagccagagaagtcagcttcgatagcaagtttctacattggcgtgagagacgaagcatttangttaacatttcaaagtaactaaagcctgttagcatcca

SEQ ID NO: 306856 - DNA, 546 bp, Homo Sapiens
  misc_feature (209)..(209): n is a, c, g, or t
  misc_feature (271)..(271): n is a, c, g, or t
  misc_feature (317)..(317): n is a, c, g, or t
  misc_feature (407)..(407): n is a, c, g, or t
atagtttaaatccatataattgtgtgagaataaccctttgttatttgaaggtgatgtttgaaaggttttctaactgtgccttttagttagtcttaaatttctaattgtagttaaaaacatgccattgtcatttctgaaattttaagtatatggtttagaagtggttagtatagttctattgttttgcagtagcttttagataatttttntcttacaaaagtaaaagtgaatactcattacttgtgaaagaagttacgttagcttgccttanggtacgatacgcaagagaagacgtccctggaaacgtccctggtcangtgcctcatccctgcataacatataaagaagcctggaaaaaatcaagctgcagacactaacaagggaactaacatatgttgttgtgcttnggagacatgcccgtggctggcagagatagaaaaacctctggcccatttggataaaaacttgtacaaacctccagctcactcagataaaaggaacaagaacgacctagcacagaaatgcctttgttttgggccagccacg

SEQ ID NO: 306857 - DNA, 268 bp, Homo Sapiens
  misc_feature (106)..(153): n is a, c, g, or t
  misc_feature (174)..(174): n is a, c, g, or t
  misc_feature (234)..(234): n is a, c, g, or t
  misc_feature (253)..(253): n is a, c, g, or t
actaggctagcactatacactgtcttgaaagtggaagctccagggttctgtttaaaacttatcaccttcaaatgttagcattgaagtcaccttaaagatcagatcnnnnnnnnnnnnnnnnnnnnnnnnnnnnnnnnnnnnnnnnnnnnnnnngttctatcccatgacatattnaatctgaattttcagaaagggggttcagaaataatgatgttatttaagttctgcacgttnattctgatacccactagtnggtaggtaaccacaa

SEQ ID NO: 306858 - DNA, 539 bp, Homo Sapiens
  misc_feature (182)..(182): n is a, c, g, or t
  misc_feature (235)..(235): n is a, c, g, or t
  misc_feature (365)..(365): n is a, c, g, or t
  misc_feature (396)..(396): n is a, c, g, or t
  misc_feature (427)..(427): n is a, c, g, or t
  misc_feature (434)..(434): n is a, c, g, or t
  misc_feature (488)..(488): n is a, c, g, or t
  misc_feature (505)..(505): n is a, c, g, or t
  misc_feature (519)..(519): n is a, c, g, or t
atgtttctgtgctgataaatgcagtatcttagttgtattagagtggattaaaatggaaaacaatgtcctacttatactctgaatagggtggataataatgttctatgaggtgatcaccagctaatacactaaatctttgttgttacagaattctgcacagccatgggtcccggactcttatnttcccccatctgttctcaataccgtttttgaaattgaaactcacccttttttntaatcaaaaacattgccagaccatttagtcctcttggaagggcctctccggtggggcttcagtcctgttaaagatggttaccagacatcaccaggttgaatgctgggactggtgtaccgtgagaagagtnggaaagtaaagaggctggcttttgaaaaatngtggtcttctcaaaggctgcccctactcccntattggncatttcagctgcattccatcatcctcttcctcactgggtcgcttttataccacntcaaaaaggggggctgngcctctggggaccnggaactgaggacgcctctgg

SEQ ID NO: 306859 - DNA, 451 bp, Homo Sapiens
  misc_feature (13)..(13): n is a, c, g, or t
  misc_feature (325)..(325): n is a, c, g, or t
agatcaacctttncttctgtaaggttttgcacaactgactccagagaaaacacaacaacaccatcctcatcagagctctggacaaattcttccatttcctacagaggaaaaactttcttcattataaagatgcaatgccacatagaataatatagtttatgtatacttctaaaataaaattttgaagttgacatatatatagttatatcatccctattttctgaggtgcattttagaatagaaatgttcaagtttgtgttagaaacatatggcttcagtacataataattatttactagaaaaagcacacaaccaaataattatnaagaacatttaagtgagaaatgtgcagctcatttaatatttaatagacatcaaattctaaaaacataatggtttgcaaactcataaaactatttcaacaatatcaagtgtcaatttgctgggcatt

SEQ ID NO: 306860 - DNA, 559 bp, Homo Sapiens
  misc_feature (44)..(44): n is a, c, g, or t
  misc_feature (502)..(502): n is a, c, g, or t
  misc_feature (537)..(537): n is a, c, g, or t
ttagcaacatgaggtaactttctcaagaccacatggctaaaaantggaggcatgacttccagctacagcactgatatagaatatacagtttcagatgataagttttagatgatgcttttaatggaaatttggtgacatccatacaagttctcgtcttcatctttttgccttttctttttccatgggattttgagtgaggattttcatcttcaaagatgttagagacagaatgttcaaacactttaaaaatttaacattaatttaaatttataagaaacctaaaatagctatttcctcaagttgttatttccaactctccaggtggactccaaatcactacgtaatcatcgagaaaagacttttattagatatgttcctgctgggtttagaaaatcctatatcttctgttgatacagcaaggtcagcaggaatctttaatatttacaaaatgaaaggagaacagctagttgcaaaaacttcctagtgattccattcccctaancctaatctcaagggaaagacagcacactgggtttnctgctgtgaactttggcagcac

SEQ ID NO: 306861 - DNA, 309 bp, Homo Sapiens
ctgggtacttgtgggtaaatcgtccacactgtctgcttccaatctacttaagcaagtggttgtaaaagtcagatgactgcataaagcacgagttctctctaaaaggagtagactcagaagagaaagcagttggcctccgagtcctgcgtgagggaggtaatcatctctcagaaggccctgcatgcaagccagaaaaatctctgacttcaaggatgaaaagtaaaataacactgaaacttctgacttcgtttcactgcaggccaggatgcatgtaaatacactttggagactttaggattttctatgtgg

SEQ ID NO: 306862 - DNA, 562 bp, Homo Sapiens
  misc_feature (140)..(140): n is a, c, g, or t
  misc_feature (232)..(232): n is a, c, g, or t
  misc_feature (321)..(321): n is a, c, g, or t
  misc_feature (333)..(333): n is a, c, g, or t
  misc_feature (371)..(371): n is a, c, g, or t
  misc_feature (393)..(393): n is a, c, g, or t
  misc_feature (409)..(409): n is a, c, g, or t
  misc_feature (427)..(427): n is a, c, g, or t
  misc_feature (444)..(444): n is a, c, g, or t
  misc_feature (451)..(451): n is a, c, g, or t
  misc_feature (457)..(457): n is a, c, g, or t
  misc_feature (478)..(478): n is a, c, g, or t
  misc_feature (510)..(510): n is a, c, g, or t
  misc_feature (521)..(521): n is a, c, g, or t
  misc_feature (534)..(534): n is a, c, g, or t
  misc_feature (551)..(551): n is a, c, g, or t
aggactcctttgagcaattcttgtttggctggctagtggtgacaaattccctcagtgtttgcttgcctgtaaaaggctttatttcttctccatttataaagtttattctgacaggatataaaattcttggctgacatttncttttagctctttgaaaatagcatctcattctcttttgggttttaaggtttctgctgataagtctattagtctgatggggattcctttatanggtgactagatgcttttctctttctgattttataattatttctttcatggtgccttttcacagtctgattatatggcatgaagtctgtnctgcaattgatnttcttgacaatcactgggggctttggatatctgaacgnctaaatctcttgctgagactanggaagttttggtcaantattcccttatataggtnttctcaacttttttacnttttctnccttcntcaggaatacaagtgtggatngatttatgttggtctcatagatctcaaaaggngcgtgtgcatncgtgtttggcctngtgggtttttggcgggnttaaagcaaaa

SEQ ID NO: 306863 - DNA, 268 bp, Homo Sapiens
  misc_feature (255)..(255): n is a, c, g, or t
tattcaacttaaaagatctctggccagcagactaaaatgtttgttttataattgcccgctgaactatgatagtttgtttccagatggtgcccttccttcaacctgcacacaatctctccttgttcaaaactattcaacctcctgctggatcccacccccctatttaaggctacaaagaggaaatcctaaggagattcccgcccccagtctccagcaatttttggtgatgtaatatgtgggctgaacttgagtctnctgacgaaagagg

SEQ ID NO: 306864 - DNA, 340 bp, Homo Sapiens
  misc_feature (80)..(123): n is a, c, g, or t
  misc_feature (232)..(232): n is a, c, g, or t
  misc_feature (241)..(241): n is a, c, g, or t
  misc_feature (248)..(248): n is a, c, g, or t
acatcttttacatctcagtatgttcaacatttcctctaagtttctggaacatatggaatagttataagaattgttttccnnnnnnnnnnnnnnnnnnnnnnnnnnnnnnnnnnnnnnnnnnnntgaatagttttctattgctatgtcctcaaattcattaatctcttctgcaatgtctaatctgctattaatctactgttttatatactttcacatcacatgctatagtttncatctctangaatttngttttttttacatcttttacatctcagtatgttcaacatttcctctaagtttctggaacatatgggaataggttataagaattgtgttcatg

SEQ ID NO: 306865 - DNA, 461 bp, Homo Sapiens
  misc_feature (137)..(149): n is a, c, g, or t
  misc_feature (281)..(281): n is a, c, g, or t
  misc_feature (389)..(389): n is a, c, g, or t
  misc_feature (430)..(430): n is a, c, g, or t
ctcacaaaatttcatttgtaatcatcttctttacaaagcacaatacttaagacttttctaaatacaactttataaaatgaagcaaaaaaataatctccatagatgcctggtcgagtccatgctgaatgcaaaataannnnnnnnnnnnncaaaagtgatacttccaagcttttcaacattctcgatgggtccattttgtaaagagtaaagatggtggcagtttgggtagcggctcgtccagttccttgatgcagaatcctcttgctgggtagcccgagggnccgcaatgaagctagacataccaacttctccttccagaatcacttctccctctccttatacaaaggaagccaatggcctctatgagggggaagacatcagctctctanattccatgttgccagtgttccatgagggtgttccaaccgcncaatttcatcaacaatcctactctgtataca

SEQ ID NO: 306866 - DNA, 500 bp, Homo Sapiens
gcatttccaccgtgtgcatttattgttattgctcagtatagtgttgaaaaggcagacaaatcccattaattacaaagagcacaagccaaagatacacagaaataaagagtgtacaataagagcacagtcacttcccagccccgattgtcccagagccccccagagcccgggcagcttacggaagctggaggcggcaccattccctcgctactctattataaaatatgtgcacacaagagttagcaaagtgtggtgacccccgagaggaaaggtccaggagggagagcaccacaagcattacaaaacagactttagggggcttgagaagggcagtcccaaagcagcctccaatattgttttcagtggagggggtgatggctgctgccttggggctggggaccctcctcccccacctgggttggtatgatctctacattaaaatcaggagagcttggtttggaactttgaaaaggcctggggacttcctgctatttgtctga

SEQ ID NO: 306867 - DNA, 132 bp, Homo Sapiens
tttagctgcagccccgcccaccctggaggctgggggtgggattatcctaatcccagggttggtccatctggtaaccagcccctttcctcctagagtcacctcagtaatataaacgctggtgtagttgaaagg

SEQ ID NO: 306868 - DNA, 484 bp, Homo Sapiens
  misc_feature (23)..(23): n is a, c, g, or t
  misc_feature (302)..(302): n is a, c, g, or t
  misc_feature (425)..(425): n is a, c, g, or t
  misc_feature (430)..(430): n is a, c, g, or t
  misc_feature (465)..(465): n is a, c, g, or t
ggtccactgttgttaacattttngctcacctaggtacacatagagagctattataatctgatgtaaacaaacgatgaggagctaacacacaatgtccatttattttttttccttttcaaagacacttctttgtcatcaaggttgggtgtgcttaggaattaaggtatatatataaagggaagcctactgattaatacttctgttttctccagaatcaccaggaaatacattaatgccttcaagaaagattaaatgggaaaaaggaatgtttggatggaaagaccgaatattataaagatttngtttcttcccaagttaaattgtagatataattcaatttcaatgaaaatcccaagagaggttataaaaaattacttataaagtatttgtaagtgaaaatagctttgaaaaatggaataattaanatganaagcatgattaacaacaccaaatatttttaaaatnttataaagtgtgaataatt

SEQ ID NO: 306869 - DNA, 441 bp, Homo Sapiens
  misc_feature (32)..(32): n is a, c, g, or t
tatttcaactgaaaatggcaccattgggtggnaagtaggaagggagatggttttccctgggtgggttatgctgtggctggtttaggtgaggtttggggagctctttctgatgtaagccccccaccccaaggacggacctctgtaatatggggaagcttgggcttctgtgggccgactcatcttgaaatgagctttgatactcatgtttccacacacgtagaactgggattcagaagtagagggatcccaaattttaggaggagagagacttctgttagtgctgggtcccatctggcctgcttggtgctatgactgaatgtgtcattccggcatacttccagagttctctctggagtcagtattgggtgatgggactgaattgtgaagtgaatggagaaataccacctaactaggtttgtttgaaaaccagaggtaaatgga

SEQ ID NO: 306870 - DNA, 415 bp, Homo Sapiens
  misc_feature (92)..(92): n is a, c, g, or t
  misc_feature (229)..(230): n is a, c, g, or t
  misc_feature (314)..(314): n is a, c, g, or t
  misc_feature (351)..(351): n is a, c, g, or t
  misc_feature (361)..(361): n is a, c, g, or t
  misc_feature (389)..(389): n is a, c, g, or t
  misc_feature (403)..(403): n is a, c, g, or t
tccataatccccggagaagcagggaacaggttctgtgggtggggtttgggctccccagcctgctttgcccagcaggggtgggggcagtggcntcatgagtccagacccccaggaagcagctggaaacatccagggggctgggatgggagtagggtcccccagatggccaagttttctccccttagcaaggcacaggtagtcatgcttccctgtcgcaggcaagcggctnnactgccttgctgtaggctcccctttcccccgtaagcaccaaggtcccatcatctaatcagacagccccaccctgttgtgtgtgntctgtccactcactccagcactgggctggatggtggngtttttgggncccaaggaaggcccagaaatgaagcccngttggggttctggncttgtctgggtg

SEQ ID NO: 306871 - DNA, 415 bp, Homo Sapiens
  misc_feature (65)..(65): n is a, c, g, or t
ccctataatattattggtgttattttccttcccttgctctacacctcacccccacccaggtggtnatgactgtagagaatgttggttaggggtttttggctctgctttcatagccctgtgcacttctgttggcaagttttatattgggctgtgtagttcaacctgtttgccagtatatggcacttatgggtaagccagctgcaaccaacatggctgggtatataattgattcttgtttactgggagaagctctctgttgtctcaggcaatgggctgatctgtggagtgcatagtggtcagatattcctactaagcctcagggaatcaaggccaaatggggtgggaacagaccaggctggacctacccacaggtaaccttttggcagacacaaaaaccagtgccaagggtgaatcc

SEQ ID NO: 306872 - DNA, 511 bp, Homo Sapiens
caatttatagcaagaaaaaagctgggtttacccaagaatactgacttactttcaccaaaaagaaattgggggacaagagaggaaggagaagactgaaaaaaacaagtatgactctactattttatggtctctgaaatcaagagacaagtggttgcatgaacataaaataataaatggaagggaagaactacagctctgctaaaccaaaacctaccacttgtagatgcaaaaactgatccctgataattagtgaattgctcaagcttactacagaattagaaccagactgcaggttttgtaaccttagccccctattaatttagagttttatctattttccttatactgaatataaactaaaggccaggagatggaaatctactctttaacattaatgtactacttagatcttagatattttattgttagtttctctggaagctaataccaaaagaataacaggctccctgttttatagaaatactatgcactggttagaaggccatctgcc

SEQ ID NO: 306873 - DNA, 313 bp, Homo Sapiens
ggctttttgggtttttaaaaataatctgcatttatttgctattttaagtctcaataatgcattaactttttgttcgtctccctgaaatatcagcagtctgataaactaccgacagtggctgtggctctgctgtgagtgacttcattcaaaatggtaggaaaagtccacaacaattgcaaggaagaaatttattttctaggccacagcaagctgtgcagccagacagaccagtgaaatcctgagatgtctggaccagtttttttgacttgaatgccaaagcaccatagagacctaataagaaattgtgtgtgtg

SEQ ID NO: 306874 - DNA, 424 bp, Homo Sapiens
  misc_feature (346)..(346): n is a, c, g, or t
ccagctttattggggaatggttgacaaataaaaatggtatgtattcaaagcatacaatgtgatgttttgatatatgtctatgttgtgaaataattaccataatcaagctaattaacgttaatcacctaacatagttatatatatattgtgtgtgtgtatagtgagaaaattttaaatctactctcttagaaaacttcaaatgtataatatatttttattaactataggcaaggtgtcagcatttacttacctcttatggcaatgtctaaaaatccctaactcccaaatctgacatgctctttctcataaaatttcaaatgcctacatgtcttatttctacaatctnccaaaaattttttgttaataatgtacgtaaataagagaaatagaaagtgtaacataaatatatgtgtaagtataatat

SEQ ID NO: 306875 - DNA, 371 bp, Homo Sapiens
  misc_feature (188)..(188): n is a, c, g, or t
  misc_feature (198)..(227): n is a, c, g, or t
  misc_feature (282)..(282): n is a, c, g, or t
  misc_feature (323)..(323): n is a, c, g, or t
acctaatcactgagagactgttacacactcaaaatgtgtgttttgagatatgagtctttatctgctaatggtaattctctcaaaagactattgaaatcaaaggtcaagactaatcactcactaaaatgtggtgtaccacgatagccagccccactgcttctacaaagcagcagtcattcattccctcncgcctccttnnnnnnnnnnnnnnnnnnnnnnnnnnnnnnctaagttccccccagttaatgcagtggcgccgggatggatttactgggctgcttntgaggtgctaacaacctgttaacccttccagttgctggttngtaatcttttagtctaatgtgaattgataaagacctttagcttaatta

SEQ ID NO: 306876 - DNA, 283 bp, Homo Sapiens
aatgtatttctttaataataagacttgagtgtcgaaattactcctttatccattatgggttgtggaatgaatgttgtgtcaacaggcatgaagacaacattcctttccttgtatgttaacatgcaagggctggtccctctgcaggctctcgggaggatccagcccgtccagcctcgagcatctgaggccctgtcatgctgcatcactgcctcctttctccacattttgaggaccctgtgattcccttgggcttgtctgggtaatccaggacaggattcttatt

SEQ ID NO: 306877 - DNA, 380 bp, Homo Sapiens
  misc_feature (45)..(128): n is a, c, g, or t
  misc_feature (332)..(332): n is a, c, g, or t
  misc_feature (341)..(341): n is a, c, g, or t
  misc_feature (346)..(346): n is a, c, g, or t
  misc_feature (362)..(362): n is a, c, g, or t
cttgtggcaatgaagattctgggcccctgcacttgaacactgcannnnnnnnnnnnnnnnnnnnnnnnnnnnnnnnnnnnnnnnnnnnnnnnnnnnnnnnnnnnnnnnnnnnnnnnnnnnnnnnnnnnccttataggatctagtattggtttacctcacagcgaacgaaaactcagctcactgactatttaatttgtagactatactaatcactgctgatttgtttctatctcatcacagctcccatttactgaatagctacactgggctaggcactgaactagggtgctgtcacatgcatttgtcccttatggatctcacaggatactttncagaagganggaantggcgcgttcccactnttattatgatattggagg

SEQ ID NO: 306878 - DNA, 478 bp, Homo Sapiens
aaaaagtccccgattgataaacaccttaaattttgagaaacagggatctggttcttttaatatatcaccatccaaactgcatttgaactttattacttttaggcatcatttactgaatccttatgatgtgctaattacagtgctaggccttaaacacagtatctcatttaactctcaaccctgtgaagtcatatcattatctccattttaagaatgtgaaaattgaggctcaagtgactaaatcacctgctcaaagagcccatcagttccaaagttagcatttgaacctcatctgtctaaccacaaaccttttttgccaaattgcaccaattcccttcaattccaaaatttgtatttcgaaggctatgctggcagaattaattactctggttgcctgtattttctaatcaacttaaggcagattttggtggtttattataattcttgccggcaacctatctaaagacacagcagatca

SEQ ID NO: 306879 - DNA, 237 bp, Homo Sapiens
aaaaagtgactatattagcaatgagaaagtaagattggtattagtaactaatattatgcaatggggaaaataagttaggggtgagatttccagaatagaaggactatatggttttgtacacttttgcttagagcttcttttgcatatcacacaaacacagaaaccacgttcaaaagtacttaaaaaataagcttagggcaaacaaacttagtcttactcctgagatctcagggaaat

SEQ ID NO: 306880 - DNA, 497 bp, Homo Sapiens
  misc_feature (135)..(135): n is a, c, g, or t
  misc_feature (475)..(475): n is a, c, g, or t
gattcattcattcatttgatacttattaaaaacatactttgagccaaactttatgtagagtgacatagattcagaagaacaaaaagctcatattttcccttgcaaaactactccagtaaggaagattatgatcanaaaagaaattattatagaatgacatgccttggttagcatttgttttcaaaaaggctttctagaacagttgcctttaaattgagacatggagtatgcatagaaattaatgaagccagaagttggtggaaatgtgatccaggcaatccagttctttgagctgcctatcacatgaaatacttttgtattccttcaccagagagctaaatatgtccttcagtagcatatctgtccccttactaaagtgcacaactctaggtatgtactaaccagagcagagtggagcaggtctcatcacctgtcctccctcattatgtactttataatggctttttaatatganggagagcctggggcaacatggg

SEQ ID NO: 306881 - DNA, 521 bp, Homo Sapiens
  misc_feature (21)..(21): n is a, c, g, or t
  misc_feature (132)..(184): n is a, c, g, or t
  misc_feature (504)..(504): n is a, c, g, or t
ggattttattttagcagtatnccaggaaaaacatacaggaaatactttctcatatttaaaatgatttaaaatgtcaacatcatttcttactctctttcctgaagacttacgctccaatcctggtggttcccnnnnnnnnnnnnnnnnnnnnnnnnnnnnnnnnnnnnnnnnnnnnnnnnnnnnnccagctaagagatctccctccagctcagtattaaaactaacaccagcttttctttaatttgtgaagagctaaaagattgcctcacattggtgttgtgttttactcagtattttctgcctttatgtaacatctaatttgtttccaggtaggcatttttaaaagctctttaaaggaaagatggcgtgagaaagtagaacacttggaaatatgtttgtagtaagttgcaaaacagtgaaaatgactcactggttatctcctgttattttatcccaagaatataacctcatgaaaatttttctttggaacattaaatctggggncatggtaattatatggg

SEQ ID NO: 306882 - DNA, 205 bp, Homo Sapiens
  misc_feature (75)..(148): n is a, c, g, or t
  misc_feature (156)..(156): n is a, c, g, or t
  misc_feature (180)..(180): n is a, c, g, or t
  misc_feature (195)..(195): n is a, c, g, or t
cagaacgggtgacagtaatacgtcatgacggacatcagataggggctgctagagtccaggggcagggtactctcnnnnnnnnnnnnnnnnnnnnnnnnnnnnnnnnnnnnnnnnnnnnnnnnnnnnnnnnnnnnnnnnnnnnnnnnnnccaaaatngattttggaacttgtgacacctanagattctgtgttgtncctattatgt

SEQ ID NO: 306883 - DNA, 283 bp, Homo Sapiens
aagttatggtaataaaaaaatggaagtgggtacaaagcccaggacaacaaaggggcctagaaacgcctgttttttctccacagataaggataaagagggccccttccttccttactaggaacactgttaacaccatcatcttggaactccgcaaaacttctaccacaacagttaggaagttgaaaggaggaatctgacaagaagaatcttagttttcccaaaaattataatatgctgctgctactaataactgcttgttgttgtagtttttcaaagtacttcc

SEQ ID NO: 306884 - DNA, 390 bp, Homo Sapiens
  misc_feature (20)..(20): n is a, c, g, or t
  misc_feature (34)..(34): n is a, c, g, or t
  misc_feature (45)..(45): n is a, c, g, or t
  misc_feature (61)..(61): n is a, c, g, or t
  misc_feature (80)..(80): n is a, c, g, or t
  misc_feature (105)..(105): n is a, c, g, or t
  misc_feature (113)..(113): n is a, c, g, or t
  misc_feature (137)..(137): n is a, c, g, or t
  misc_feature (329)..(329): n is a, c, g, or t
  misc_feature (331)..(331): n is a, c, g, or t
  misc_feature (376)..(376): n is a, c, g, or t
tattgttcagtctggcgtgnagtcacatgacaanagctcattaangccttgccctcctggntctaagtgaatcccccaanctcagcctcctgagtagctggtacnacaggaangtgccaccacacccagaaaattanaaaaattttttttgtagagatggggtctcactacattgctcaggctagtcttgaagtcctcggctcaggcaatcctcccatgctagcccctctaatgtgctgcgattataggcatgagccatcacacctggccgccaaagctgtactctgaattgcaaaaacctggttcctccaagacctcgcacctggtgnanaaagcaatgacttgttttgggagttcctcaggcccaaaaccatgnaaagtcatcctttg

SEQ ID NO: 306885 - DNA, 468 bp, Homo Sapiens
cactgtttttcccagaatggcctttataaataagaatatgttgattcatgtgcttcaaagcctctaatggcttcccattgtgacaaaaacaaaatcagctttctgtggcacatagaccccaccaaacccccaaacctcaccaagttcccctgtccttcaattctctgtaccttacacactggtcccctcactgccattggacagaattaacttattcttatctgagggtagtagtattttctatccctgtttttggaatacatcccttagatctgtctctttctcagctctaatcctacctccttagagaaattttccctgatcattctatctaaaacggtacctgacctatcctccagtccctctacccaattacccattcaatttttcctacagccccattcactggtttaaagttatataatccaaatactcgttcactggatttactggtatactgacacttgg

SEQ ID NO: 306886 - DNA, 151 bp, Homo Sapiens
tcctaggacttattccaggaattccctaagtcccaggcaaacccggatgattggttgccctcctcgcacctcttgtttcagacgcagagcccccgagaagcaaggaaagccatgacggtctaaccatcacaacccccaaacctggagccta

SEQ ID NO: 306887 - DNA, 518 bp, Homo Sapiens
  misc_feature (59)..(59): n is a, c, g, or t
  misc_feature (263)..(263): n is a, c, g, or t
  misc_feature (267)..(267): n is a, c, g, or t
  misc_feature (271)..(271): n is a, c, g, or t
  misc_feature (273)..(274): n is a, c, g, or t
  misc_feature (282)..(284): n is a, c, g, or t
  misc_feature (286)..(286): n is a, c, g, or t
  misc_feature (292)..(292): n is a, c, g, or t
  misc_feature (294)..(294): n is a, c, g, or t
  misc_feature (302)..(303): n is a, c, g, or t
  misc_feature (309)..(310): n is a, c, g, or t
  misc_feature (312)..(312): n is a, c, g, or t
  misc_feature (321)..(321): n is a, c, g, or t
  misc_feature (333)..(333): n is a, c, g, or t
  misc_feature (339)..(339): n is a, c, g, or t
  misc_feature (342)..(342): n is a, c, g, or t
  misc_feature (345)..(345): n is a, c, g, or t
  misc_feature (348)..(348): n is a, c, g, or t
  misc_feature (353)..(353): n is a, c, g, or t
  misc_feature (355)..(355): n is a, c, g, or t
  misc_feature (358)..(358): n is a, c, g, or t
  misc_feature (365)..(365): n is a, c, g, or t
  misc_feature (370)..(371): n is a, c, g, or t
  misc_feature (376)..(376): n is a, c, g, or t
  misc_feature (385)..(385): n is a, c, g, or t
  misc_feature (387)..(387): n is a, c, g, or t
  misc_feature (389)..(389): n is a, c, g, or t
  misc_feature (392)..(393): n is a, c, g, or t
  misc_feature (396)..(396): n is a, c, g, or t
  misc_feature (402)..(403): n is a, c, g, or t
  misc_feature (407)..(409): n is a, c, g, or t
  misc_feature (414)..(414): n is a, c, g, or t
  misc_feature (434)..(437): n is a, c, g, or t
  misc_feature (489)..(489): n is a, c, g, or t
gtctggtttagatgttctacattctagttctgaattttcagtggctttctcaatgtttntaagatgaatgcctgactttctcaaatgagtatttctaccatcgtcctatggaaagactaggttacagtcatcaccccatccccatcttatatgttacagttcagtattttcattccatctctttattctctccccaagtagcactccctgggaacttcctaggccaggttccattggaggatttgtgtgggagaaaccagccngcgngtancnngggcaccnnncngagcgnanaaaccggnnccattnnantgacacaanaacacttctgcncttcgnggnaanccnccacncnaantaaacanttccnngtggntcctggaanananaannccncccccnnccannnttgtnaggctctggtgttcatcatnnnnacgccacaaaggggcatcccagttcctgtggtggagactagggataggatgntgggtaagttgacattggtggttttgaaa

SEQ ID NO: 306888 - DNA, 337 bp, Homo Sapiens
  misc_feature (53)..(53): n is a, c, g, or t
  misc_feature (113)..(113): n is a, c, g, or t
  misc_feature (172)..(172): n is a, c, g, or t
  misc_feature (304)..(304): n is a, c, g, or t
ccaaattcaagaaagaagtctcagtgttgaatgtagacttctgcatggcagtncttaacagaaaaggggctaggaggtagcaagctttggttcttaatggaccaaaggtatangacagaagaaaagaacttggatgtggctggaacacaacgtacataattcacgtgtctgnggttaagagctctgatggtataaattattttgcaagtacaaaaaagggctccaaattcctgagtgggacagaggaaaagtacagaccatcatgcctgggtaagtggataaggcatccttactaattcactgngggaagtctggaagtgcttactaagctcacaga

SEQ ID NO: 306889 - DNA, 473 bp, Homo Sapiens
  misc_feature (57)..(57): n is a, c, g, or t
  misc_feature (81)..(81): n is a, c, g, or t
  misc_feature (151)..(151): n is a, c, g, or t
  misc_feature (243)..(243): n is a, c, g, or t
  misc_feature (387)..(387): n is a, c, g, or t
  misc_feature (437)..(437): n is a, c, g, or t
  misc_feature (459)..(459): n is a, c, g, or t
tatctatggaatgatatctaatatggtaatatacagtaataaaacactcgtagttanatataattaataggaatttagganaagagcataattgaacttctaatgtttgcagagtcattatcaaattaatataaattcctatggacctcanataaggtcacagcagggttgataaggccagagagagattcttcaagctttcaatttatatacacttctggaggcctggaggatgcaaagctnacttttagtggttgcaatggcctgcattacaccaactccattagataacagagagttctgtgctactcatctttgaagtgctctgcgtttagaggaatgagtgtttaggtgatctacgtattagcagccccgaggaactctctnggcactcctttaatagcatgactgacttcgccatcattttcaccaattcntttaactctatcccttccattnttatacacttaaag

SEQ ID NO: 306890 - DNA, 418 bp, Homo Sapiens
  misc_feature (19)..(19): n is a, c, g, or t
  misc_feature (29)..(29): n is a, c, g, or t
  misc_feature (202)..(202): n is a, c, g, or t
  misc_feature (291)..(291): n is a, c, g, or t
  misc_feature (301)..(301): n is a, c, g, or t
  misc_feature (313)..(337): n is a, c, g, or t
  misc_feature (350)..(350): n is a, c, g, or t
  misc_feature (364)..(364): n is a, c, g, or t
aactccagttacaaaaatnacagctttangggtttcactgaaattcccataaaactggggggaattcaactgccaactggatttgctgctgcaggagataatccactttggttcagaggtggcccctttagcttgaaaggaaaccaggaccttcctgaaaactgtcatgggctatctaaaccacaccagcccttagaactcncactcccaatttctaaattcccaagtgtctcccttcaaaaacgagaaagggggtacctccatgtatttaaagaaggtcgattaattttnatcctcccgnggtcctaaggtnnnnnnnnnnnnnnnnnnnnnnnnncctgggcaatttngcttttaaaacatngagagtacttttcccaagggggttggacaattgtggttgagaaacaatcaggag

SEQ ID NO: 306891 - DNA, 446 bp, Homo Sapiens
  misc_feature (229)..(229): n is a, c, g, or t
  misc_feature (312)..(312): n is a, c, g, or t
  misc_feature (418)..(418): n is a, c, g, or t
taccctaaagagcttatgtgtcagggcaaagcagagttggaaacttctataagccatttagaagaactgcaatctgaaaagtacaacaatcacaacttatggtattgaaacaggtttttccattacttcaaccttctaaccaattgggttcattactatcctgtcaacagaagaatttcagcatttatgaacagaacttacaggaaacatacacaaacccctcccactnctaaggcacaggacctttggctcagacctttggggtagtcacacaacgccaaatgaatcctcccgtaaggctttccctacctnagcctacgtccctgggtcactaagaagtcattaccctcgctaattactagaaatgggtttggggctcttcacctccagaatgttgctgacagagataaacattgcnacattccattgtttgctccagaaaaact

SEQ ID NO: 306892 - DNA, 160 bp, Homo Sapiens
  misc_feature (57)..(57): n is a, c, g, or t
tttaaaatatctgggttggctgcaatttttgccactgcatctgtatggtgcattatnttcctaactaatatgcctgctacacaatattagagagataaatattcacaaatttaattccattgcagatgatttattaatctgcagcttttgcaagcacaca

SEQ ID NO: 306893 - DNA, 336 bp, Homo Sapiens
  misc_feature (133)..(133): n is a, c, g, or t
  misc_feature (197)..(197): n is a, c, g, or t
cctaaaatattctctccctagccagattccttcaccgtttctgactaaacatagaatcactaaaaatagaacgacacaaccacaatatcatcttctcaggcaattccagcctactttctcagcaaaagcagtntcttctctttctggctgcattccttgcaggcaatccgagctgcttgcaagaaaacaaagttccntgctcatctttgcagtcctgaaacctattgctgaggcaatgctttgccccatgtcctgacgggagctccgttatcacaaaaccttctgtcggtttactcctttgtttcaggggccacttggaagagaaagactaaatgc

SEQ ID NO: 306894 - DNA, 422 bp, Homo Sapiens
  misc_feature (299)..(299): n is a, c, g, or t
aaaattggtctgcaattagaacatgtaagaggagattaggaattaaaatggattctgagaggcaatttctaactactgaacttttataacaggagtatctttgattaaataaggagctagtctaaactaaaagcaaaactgtaccataataacccaacttaattatctttgcagaatacatttataaatgattggctcatttctacctttacttgactaagtaaatatgcctcttaaattctcaaacattgaaaattctgattctcacagttgcacagacttatctaaatcaaaacttncaaaaagttacaatataattactgactcccattggctaagatgccagtacaagttccaagtaaggaagtttaagctctggtaacttccactcctcaacctagaacctccaaggtcacttgttc

SEQ ID NO: 306895 - DNA, 468 bp, Homo Sapiens
gtcacaattaacttaaaaaaataaattattggtcttctccttagagaaatgacattgtgctaagcaactatgatattaccaagttcctactgtgttaaaagatagatctaagcagggaagtggttttcaaaacatgagtcactaaacaaaggaaagttttatactgctttctcatgcttttcacttgttttcatcagaagatctgacaagcataaaagtgttaacatcttttattttacagatgttcttagttttccctcaaactgtaaaagatgctatatcagagtagcttggtaggaaataatttcaacacctcctttcacttaccgtgataacttattgtttgtctaagcttgtggatacttttggagagagtgaattgaggcaagaaaagatagcatattgagatctaattgttctcatttttgacatatataccagtcagtctatctgctatattatatagtc

SEQ ID NO: 306896 - DNA, 439 bp, Homo Sapiens
agccacctatcatcaaatggaaatggtgtattagaaacagcccaggcaggttcagaaggtataagtaaattgtatgagcaggcggctcagactcttccaacatcaactcctgttgctttgcctcctctccctcattctacaactatggcttcttgggatgctgcctatgtccagttgactgagggagaaaaacctccagcttggattatagatgggtctgtatgatgtgctggtaccacatgaaagagaacagctgcagcattcactcacactcactcaggggtgactgtgaagggcagtggtgaaggagaatccttccagtgagcagaaactcaaggctgtccactatgtctggagtgagagatggccagaatacagacctaaattgattcatggacagtcgctgatggtttagctggatggtcagggccttaaaaag

SEQ ID NO: 306897 - DNA, 478 bp, Homo Sapiens
  misc_feature (405)..(405): n is a, c, g, or t
  misc_feature (442)..(442): n is a, c, g, or t
  misc_feature (450)..(450): n is a, c, g, or t
  misc_feature (462)..(462): n is a, c, g, or t
ctgggagctgctgcctgagccctgtccagacagccgagatacactggatgttgggcagtgctttggctggacattgaaatgctcatctgattggctaatttagtttccatttatatccctaacaaggcaagggaagagagaagccagcttctctcttgttctccttctataatgagagacaaaccatgcctctctcagacactcacaatggagaattcctcaatcctaagaaaggtggatcggttactgactgtgacagatgactgtcataactttcatgttcacggaaacttctttataaagtttctaaaatgaaacgaaaaccttggctaccaacctactctagtaacgcaacaacttgccccctctggttcttttggagttcctgggcttctggatttggtnttctcaccaacatttggtccaacttcccttggggaangtactccngtatggtttttnaaaagcaaattggcca

SEQ ID NO: 306898 - DNA, 274 bp, Homo Sapiens
  misc_feature (127)..(127): n is a, c, g, or t
  misc_feature (195)..(195): n is a, c, g, or t
  misc_feature (246)..(246): n is a, c, g, or t
  misc_feature (254)..(254): n is a, c, g, or t
tgaaatgtgcttggtctgtgatctcttggtcagatatctgccttccagcgatcctttgaggttgtgtaattcagctggccctggctcctggtccctgttactgagctgggcagtcgaaccgaaggcnagatgagctcaagatcatgccttgggaagcatggtgctctaggggtgcctttttattcctttcattgnattatagactgtttccaaatttatggttagaaataggtaaagtgggtcttngtgttttnagggtagaacccagcctaag

SEQ ID NO: 306899 - DNA, 445 bp, Homo Sapiens
  misc_feature (121)..(161): n is a, c, g, or t
ggggcgggggggaagggtgtggtataagacctaatattaaagctcaatttaaaacattttaaaaataaattttattgtgcatacctgaggtttacaacatgatgttatgggagatatatannnnnnnnnnnnnnnnnnnnnnnnnnnnnnnnnnnnnnnnnatgtatatgcatgtgcacacacgtacatatatagagacagtaaaatggtaatatagtgaagcaagttaacatattactcatcacatatactgttttttatgtgtgaccagagcacctaaaatctacttatttaacaaagtacctaatacaattttattaactatagccttcatgttgtatattagatccctagacttgttcatcgtacatatccactacttgtatcctctgacgcgtatctcccgatttcctctccctcctcccccaccaacctacctttctgt

SEQ ID NO: 306900 - DNA, 329 bp, Homo Sapiens
actctttctcttatcaaaggccagactaaccttcaaagccaagtggcttcggctgaggttcctaatggagatgaagggggtctcaacttttagaacatatttgactcattcatgtgtgactatacttgataaatgcatgtcagctatctggcttcaaactggagcttctacaaactctactgcccaacaaaagcttacatctcacatctttcagcctatacccacacatctatttcctgcggtgtgccctgaagttggaacagtagacgtaggcattcctcatgcatactagatctagctctattattttacttagttcctatgtagtc

SEQ ID NO: 306901 - DNA, 301 bp, Homo Sapiens
  misc_feature (280)..(280): n is a, c, g, or t
tgaccataagagttggcctgagaccagtttgttttctggggatttggtaagataggcagttcccatgggaaattgcttaaattgctttgttgcctatgatttgattctaaacaagtggtgctatcttctccctcaatatggctgtcttgagtttgtcttgcagtatcacaccattataccaattctttgggttgcttctgacacattcaaagtgaactctggctgatgttgctcgtttcaggtataccatctgggagttaatttcctaagcagaaaggtngaaacgtccaggagaaattcg

SEQ ID NO: 306902 - DNA, 275 bp, Homo Sapiens
  misc_feature (129)..(129): n is a, c, g, or t
  misc_feature (167)..(167): n is a, c, g, or t
  misc_feature (193)..(193): n is a, c, g, or t
  misc_feature (195)..(195): n is a, c, g, or t
  misc_feature (216)..(216): n is a, c, g, or t
ggagaggcaacttcactttataacaatccattctttcaagaattattccatacctaaaataatcaacccaatctcaaaagacatgaatccatcttaatgacctattttccttttaaaggcagtacctcncaacagtgccacattggggaacatggttcaaacatgangttttggtagaaataaaccacattcnantcacagcattctatccctggnctccccctataactcatgtactcacaatggaaaaatgttttccaacccattttcaatag

SEQ ID NO: 306903 - DNA, 524 bp, Homo Sapiens
  misc_feature (308)..(308): n is a, c, g, or t
  misc_feature (319)..(319): n is a, c, g, or t
  misc_feature (336)..(336): n is a, c, g, or t
  misc_feature (352)..(352): n is a, c, g, or t
  misc_feature (399)..(399): n is a, c, g, or t
  misc_feature (409)..(409): n is a, c, g, or t
  misc_feature (428)..(428): n is a, c, g, or t
  misc_feature (435)..(435): n is a, c, g, or t
  misc_feature (461)..(461): n is a, c, g, or t
  misc_feature (473)..(473): n is a, c, g, or t
  misc_feature (511)..(511): n is a, c, g, or t
aaaagggatgaggggatgacaaactagggaacttttgttaggatgtgctgctcgtggattctattggaaaggaagtttattgagcggggataattaagacaatcctaaaatgtaattaaatctctacttaaaagtaatagtcttcctatgggaccatgacacatctgacttcccagggaaaaatatctttgggactcaaccttgaaggtttattttcacataatctttaaattctaataagtgcttgattcaaatgtagcatgactctgcttaaagggaaatgatactgctatatcagagacagatanttaccctggtntttcacttcctaatggnccttagtaaaatctgncttttttcctgaaaccacccaacttgtgtccctcctgccttttccangagaagttcntggattaggccaagtgggnccaaaangggtccatggctggaaaggtttcccngtgaatgggcanttaccaccggaaatccataccagggatgggttcagcanttcgactaatttt

SEQ ID NO: 306904 - DNA, 291 bp, Homo Sapiens
  misc_feature (269)..(269): n is a, c, g, or t
aatattgggggagcccgcccccaatatttcagtgtaggttctttctattttccataagtgtcggctgactgagaaataaagagagacagtacaaagagaagagttttacagttgggctgccaggggtgacatcacatatcggtaggcctgtgatgccctcctgagtctcagaccagcaagtttttattaagggtttcaaaagggcagggagtgtaagaacaaggagtaggtacaaagatcacatgcttcaaagggcaaaaaacagaatnactaataagggtctaacaaaga

SEQ ID NO: 306905 - DNA, 166 bp, Homo Sapiens
  misc_feature (57)..(57): n is a, c, g, or t
  misc_feature (115)..(115): n is a, c, g, or t
  misc_feature (121)..(121): n is a, c, g, or t
ctacccatatgtctatgcatgttttacatagttgcaatcatagtatgtgtacatatnttggatcttaatttgtgcttttccactagtgctcttggtattacaagaagggagagancacttncaataagtgcctttattcctgctcacagactgtttctcagattac

SEQ ID NO: 306906 - DNA, 112 bp, Homo Sapiens
  misc_feature (88)..(88): n is a, c, g, or t
ggcgggaaaagagagatcattcctcaaattttgaggcctgtgccatagaaaggtatgaaaaggttttcttttgttaatgttattttantgttgtaagacaaacatagcctgt

SEQ ID NO: 306907 - DNA, 110 bp, Homo Sapiens
tcccaacaacctgcttggtttagtaattgaaagcttgggtctctgaaacaaggctaccaaggtttggatactggttttgcacctattgtgtgtgtaattttgggaaggcc

SEQ ID NO: 306908 - DNA, 476 bp, Homo Sapiens
  misc_feature (244)..(244): n is a, c, g, or t
  misc_feature (285)..(285): n is a, c, g, or t
  misc_feature (331)..(331): n is a, c, g, or t
  misc_feature (369)..(369): n is a, c, g, or t
  misc_feature (444)..(444): n is a, c, g, or t
ttaagccaaggatggggtgtataggcccactgaacagatgtgagatggatttgggctaagactccaggtagcacctgatctaggtaagttcttgagtattggactgtggtggcacttgaaagggtctgggtaattccatttcttcagtgctcagtcacatgataaatgctgaagactccctggggaaggaaagtgttttggaactatggccactttgcaagggtttcaaggaacctctctctanggttacttgggggagctctaaggtctatgaatgcaggttangatctgggatctgggtaagaagctgtgaaattctttatgggacttnagttagggtttctgctcagtaaatctaagaaattttcnttattaaattatccaagccatccaacttaaggaggaccagacacctgattgctccaatttacccggttgaattcnttgtgggggccagaaattattcctgatcacca

SEQ ID NO: 306909 - DNA, 451 bp, Homo Sapiens
  misc_feature (399)..(399): n is a, c, g, or t
aagctaatttgaattgcaaccaatatgggaaacattatctggcacctcttttctgctgtcacattcctacacataatttaacacttatttaccatctactctattccagggcttgtgcaagcaattcccctagtccatcacctggcacgtagggcacacaggtcactaccttgacctgcatggcaccgcagactcatggagctagcacttcctccaggggcccttccaccctcagctccccacacctcgctattctgaagtctggatctgagcagagtcctgaaggatcagcacgctttggcacaaaccccaagtaaaagtagcggaagtgattttgctgtaaaccctctccctcctgacagctatcaacgggaacatggagaggttcctggccacggnttggtttctcactttagaaatgctttcacagtagaagtaagctctctgacaa

SEQ ID NO: 306910 - DNA, 400 bp, Homo Sapiens
tcctggcttaagtccagggcatagcacagcaaaatctaccctttggacgttcataaagaacatgcatagttctggcctcgtggcggtcgcagctctcccagggccctgctcttctctgagtgaccactgccctctggtctggtggacgcctgggcatctgtttctatgaaacaacctgtttgtttctgtgtttcaaatatttgtgtttattatggaagagacattattttttcatggaattctgaagactgtcatttttgaaggataagcaaggttttggacaatttgcaattcttacaactgtctgtaaatttacattactgttataaatgagaagacccttctgatattcagacaccttgttaaatactggctcgtcattgatgcgtgcagcccagtg

SEQ ID NO: 306911 - DNA, 358 bp, Homo Sapiens
  misc_feature (283)..(283): n is a, c, g, or t
  misc_feature (285)..(285): n is a, c, g, or t
  misc_feature (333)..(333): n is a, c, g, or t
ccttgtctgccagcctctctcagtgtccctgtctggccacaccctcttgcagcatcgcccaccagtttgccagcatttgcagaccctgctgctgtacccccactggagcatgtgtatgtgtggaccctgctgctatgccagcgctggtgcacatacatgtacatggactcaactgccaccactctgacaaagcactgttgctgcccaccccccataccccccattggagtgttgttgccagcagactggggacacattggcccctccagtgatagcaggtcananaacaaagccatggggtctagtcccagcacctagggttagagcatgcanaccaagagtgctaaactgagccttg

SEQ ID NO: 306912 - DNA, 298 bp, Homo Sapiens
  misc_feature (152)..(152): n is a, c, g, or t
  misc_feature (169)..(169): n is a, c, g, or t
  misc_feature (260)..(260): n is a, c, g, or t
  misc_feature (265)..(265): n is a, c, g, or t
  misc_feature (273)..(273): n is a, c, g, or t
catgtttgcaggctgttggttttcatggttgttacggagcttgggtggaggggtgagaatatgacaaattaaaaatgccaccaagctgttcttcctgagattcaggcatttttcttaggtaaatactgtgcacattgttgcaagtttttgcnttaattttcagagttcnaaaaaaagtttaatttggaccaattttttaccaattaattccccattggtttttggtgggagggaaagggattttttgggaggatactccncccangtcactgnatatcacccctttgggttcctcctt

SEQ ID NO: 306913 - DNA, 421 bp, Homo Sapiens
gtttgttttagacagggaaagactgtaatgtgagttgagtgagtttgtacctctgcccatctgcaggtttgctactgcacaaattcctaccaactgagttgggacctagacgctgtcttgagagggaagatgtaaggcccaggtggaaaataaacaaatagtaataatgctacaaagaaacaggtccgaccaggccaagtcagtcctcaaccatcttacacctcaccagttctggaaaatcaagctctctgtgcgtcaatttcaaaatgattttaaagttgtgttaggtcgctataccaatggacatatgtatagaaatatttcagtgcttctcgaagtgagaaaattaaagatggacagactctttcctaacatctgactcaaaagcctagaaaacacatagaaaagaagcaaataatac

SEQ ID NO: 306914 - DNA, 429 bp, Homo Sapiens
  misc_feature (191)..(191): n is a, c, g, or t
  misc_feature (364)..(364): n is a, c, g, or t
ggaacagaggaccgggagtttcccataagggagggtgggcttgggagaacagggaaaaggaggccatcctggacagccggaggagaagataaaaggagccatcatcactgctgccttttttgttcctggaacaggattaaataggcttagaggcgtccccttaagactagataattatcgggtgcctggcnatgccagagccttcttggaccaatgttggggctttggactggagaaaccaagagatggctgtgcagatttttctctgttaactgggcttctggggaaacttaccagtaggcgagatcagttgaccgactgcattgcacagagaggcgactggaggctgaggacctttcctttngtccagctgctgtgggcctgctcttttgggggtggagggctaggtccatgggggatgcagacctg

SEQ ID NO: 306915 - DNA, 297 bp, Homo Sapiens
cagatttttggaatatttgcatatacataatgacatatcttggggatggaacctgtttatacatgaaataaatttatgtttcatatatatcttatactcatagcctgacagtaatttcatataatattttaaataatctgcatgaaacaaagcttatatatattgaaccatcataaagcaaaggtatcactaccttggccacccatgtggactatctgtggctgttcagcatcaccaccattcctgactcacagtacattttaacagcaacccattacatgaggtcaggtgtgaaat

SEQ ID NO: 306916 - DNA, 422 bp, Homo Sapiens
  misc_feature (312)..(312): n is a, c, g, or t
ttttaatgaataaaaatcctgttctagaatagggctggatgtggatccaaatgcagagattaagataaaaaagaatttatttctggatatttacattgatttccagaagagatttaatgctttgcaaaataagaccttttataacaggcagtccattgtataaatgtagtagatgcttgaaactcatttcagttaatgtcagagaggctgtttctccattacatggcatatacaacatgcaatcatttcattcactctttcatccaaaaatacaattcagctttttctaaattctatgcattgtgcctgagnttgggataaaactaaacaaaacagacatgtgatctgcctgcacagaacttaaagtgtatgagggatgccgtctataatggattcgaaatgaaaggattgataatgattcc

SEQ ID NO: 306917 - DNA, 337 bp, Homo Sapiens
  misc_feature (249)..(249): n is a, c, g, or t
  misc_feature (310)..(310): n is a, c, g, or t
aatctgaaaatggggataagacattggtatattttgaattaaaggatgtacagtgcctaagaagtgttttcttccttctgagagggctctaacacaaaggacataaactttcttgctcaaaaatatgcattccacctgtggaagcttgctactgtttccaacagcccacagtcaggcaacacagtttaacactgtgctggtacctttttctttcattttgggttggcagtaaaaacagttgaagctggntgatgatggcacacagcctctggtcttttctcaaccctgtgcagttgagaagagaccaacngattctactaagtaaccaaaatcttat

SEQ ID NO: 306918 - DNA, 293 bp, Homo Sapiens
tgagtaacaccagggccaagtttcaagttctgaacaggtaggcctaccttataataaaccagatcaaacctaaaccaattcagagctggccctcaggaaagccaaatgaataacaagccccaggcaagagaggagctagtactcttgctagctcctgcccatcagcattatcctaacactgaatgacagcaataagagtggcagccaccattatttgctagtcactgccaaggaggcatctgacaagcaacatcccattttcttcttcattaccttgggagataagaagtctt

SEQ ID NO: 306919 - DNA, 338 bp, Homo Sapiens
  misc_feature (185)..(185): n is a, c, g, or t
  misc_feature (315)..(315): n is a, c, g, or t
tcccctgcatagcttggcctacatttcttgtttcttgcttaaatttcctgacaaagtgatgttaaaaatagagacaaattactaaataaatacatgcatatgcgtcatctaaggatacacagcaattttcagatatagcccatattaggatttcaaaagcagttgattataaaattgacttgcancaataaaagctcaactataggatacgtcaataacacagacttgtcttgtcaatgtgtaagatgactacttccaatttaacctccttcccattattgaactgtagcagtcaccatcccatagtcccatttnttcaatcactgactttttatgtg

SEQ ID NO: 306920 - DNA, 523 bp, Homo Sapiens
  misc_feature (322)..(322): n is a, c, g, or t
aacagtgctgtcaatgcaacatttgattgcacatccctctaccagagagagcagtatcagctctggtggagggccccatggaaagtggcccttgcttggttttcccagggagctagaggacacttctccgtaagaaactgtgacttgctgttgcatggaagtggggctggctgcctgcttccaatctgaaagacttccagaagtcttcccaccttacctgagggtgcctgccaaattgttttgggaacaggaaaggccattgcagactcactaagattaatgagttcctcactatctcaagcaaggtgttgggtatctccanggtttggggactggccgtacagatcacatttgtctatgaagaacctcgttgtgggagattactccagagtcaatggcagccttttttagatttgttcccttctggtcctttccactcaaaactgaaaaattgcccaggctgcccaagagggccaagccaagtagagagcaaggaacaccaggggaagtgtcaagacattaa

SEQ ID NO: 306921 - DNA, 486 bp, Homo Sapiens
  misc_feature (78)..(78): n is a, c, g, or t
  misc_feature (148)..(148): n is a, c, g, or t
  misc_feature (156)..(156): n is a, c, g, or t
  misc_feature (214)..(214): n is a, c, g, or t
  misc_feature (344)..(344): n is a, c, g, or t
  misc_feature (350)..(350): n is a, c, g, or t
  misc_feature (355)..(355): n is a, c, g, or t
  misc_feature (394)..(394): n is a, c, g, or t
  misc_feature (450)..(450): n is a, c, g, or t
tcctggtcaggaccccctccttggtcccagttgtagcctatgaggagatggctcttggctctgtcaacacctgtcttngccactccagcctgagggagggtagtgatctcgtgttgctgctgatctctgggcctcacccttctacttntgtcttcnctgctcttccaagacctttctaagtagttttctgtattaaagtctcactagcaagctntctggaaggggttcgtttttctgatggcgccatgactgacacaggtgattatttgagaaaatgcctctaaagtacttagaatagtgcttggacattagaaattgcttcaataaagggtagctaacaaaanctactnacttncttccttacctagattctctgcggccaatttaacccagncgggcaggcccctgcatacaacatagctcctgaatcattgcccacttcttctcttnctggttgaccaagtccatagacatgggcttctattg

SEQ ID NO: 306922 - DNA, 330 bp, Homo Sapiens
  misc_feature (92)..(175): n is a, c, g, or t
  misc_feature (181)..(181): n is a, c, g, or t
  misc_feature (187)..(187): n is a, c, g, or t
  misc_feature (195)..(195): n is a, c, g, or t
  misc_feature (226)..(226): n is a, c, g, or t
  misc_feature (249)..(249): n is a, c, g, or t
tagggttaacataaggaattctataaaaaggactcacttggtactagaagcactcatgtattagggttctctagagtgacagaaaaataggnnnnnnnnnnnnnnnnnnnnnnnnnnnnnnnnnnnnnnnnnnnnnnnnnnnnnnnnnnnnnnnnnnnnnnnnnnnnnnnnnnnnggagtntattangtgttagnaactcatgtgatcacaaggtcctacaatagnctgtctacaagctgaggagccanaaagccaggtctgagtcccaaagcctgaacaacctggagtcctgtgttgggagggcaggaagcatccatgtgctggagaaa

SEQ ID NO: 306923 - DNA, 545 bp, Homo Sapiens
  misc_feature (432)..(432): n is a, c, g, or t
  misc_feature (459)..(459): n is a, c, g, or t
  misc_feature (520)..(520): n is a, c, g, or t
ttttgtagctctgaggcattttatagaaagttgatactcatacacataaaaagtagtaggaacctaaaattcatcatacattgatttcatttttgagcttgacgtagtaaatccttagcttcattgatttgggttgctatataaggagatccttctttgggcgatttaagatcatatttgttactgagcatctcttatttttcctttaatggcagtaaggcttagaggtagtattgctgcttcccattttgtcctttttagttcaagcccacctctctaatagccaccgctgaaggcagattttggtagactttgaaaatcctgttttacttcaggctatatgtgcttcctgacttgcaaaacctgcagcagaaatggccagtccagctgccaccactgtactgaccgtggctgcagctcagcttctttcanctccatctggattggtacagcacctgncactaactacactcctttaccagaaagctaggcagccactgccagcagtcacaaccccagnggaactttaaaaaacaggtgagtgt

SEQ ID NO: 306924 - DNA, 407 bp, Homo Sapiens
  misc_feature (99)..(99): n is a, c, g, or t
  misc_feature (155)..(155): n is a, c, g, or t
  misc_feature (338)..(338): n is a, c, g, or t
  misc_feature (349)..(349): n is a, c, g, or t
  misc_feature (362)..(362): n is a, c, g, or t
atctttagggagtaaagtgatagggaagagggaaagtagaagaaaggaagtgtttaactttcctaaggaataaaaatgagggttcctaatgtccttttntcttttcgctttgtctgaagcaaagaaacattcgatgtgatgtatgctaaagtttnagtttagtacacagctatgactcaggataaatcgaatcagtattactcattcccttatcaagccagctcatggggcctgaacctaaacctatcattccattcatggctttgcaatccccaaaaattcagctatgcttgttggggtttgggttgggttgctgggtcagtcagaggatgctaagnactcaaaatcnttgtggtaatttnaagatgggtatcattatcttatcctgaccttatgattttgacaaa

SEQ ID NO: 306925 - DNA, 319 bp, Homo Sapiens
  misc_feature (158)..(158): n is a, c, g, or t
  misc_feature (180)..(180): n is a, c, g, or t
gtcgagataaactccttaaaagcatgggcaaaattcccttttctgtgaccagtttttttaaaaatgacaaagtcacacaagagaggaaatgaaaagggaaatttttagacttctcatctgtgctgaaaccccgggctgtttcagaacccggtcaggtnaaccgtcagcctgcggtcaccngctgcaatcccaggaggccttgcgtcacggccattatatcaataaggaagtacaatcaccaaaccacaagccggcttcttttctaagcccacatgttgctttagagggttttcaaacaagagactttcctgtttttgga

SEQ ID NO: 306926 - DNA, 496 bp, Homo Sapiens
  misc_feature (93)..(93): n is a, c, g, or t
  misc_feature (236)..(236): n is a, c, g, or t
  misc_feature (395)..(395): n is a, c, g, or t
  misc_feature (408)..(408): n is a, c, g, or t
  misc_feature (444)..(444): n is a, c, g, or t
  misc_feature (463)..(463): n is a, c, g, or t
  misc_feature (480)..(480): n is a, c, g, or t
ccccgcaccccccaaaaaaagccttaattgaagacacagaaaccggttttgaaaataaaagaatcctcagatgttatgtttcagcaattcgtncatcattcttcccttctgtgacccttaatcacgtttggtctttagccctagcagataacacacagtgccactactgagcacagttgctcatgtgtgtgctctttaataggaatttggaagtcatgttctgcagaatgttttanttccatactgggtggattgagattattcctgtttgtggatcacccacattgtcagtcctcactgatgacataggtgatgattcaaccaccatttcaatttggaacagcatacagggaacactactgatgtcaaatgtaggattataatttctaatttgnatttctaattctngctctctgggtcccccttcgttctcaacaatttttngctataagtacctgatgangggccttaaactggaancacactcgatttatta

SEQ ID NO: 306927 - DNA, 455 bp, Homo Sapiens
  misc_feature (387)..(387): n is a, c, g, or t
  misc_feature (389)..(399): n is a, c, g, or t
actgggggttcgttttccgccatcagattagcaaaaagaatgaatgataatgtccagtttagtccaaggcatattgaaacccgttgcgtgccctagcagctctaccaggagtggataattagagtaaaacttggcattacctacagacgtttttaaagtatatatcctttttcccggcagtttcacttctagacattagttataaagaataagtacacatatacaaaagtcatttgtgaagatgtttaatgccatattgtttgcgtgctagagaaacactgggtggggggggaatgtagattaacaggaaactggttaagtgaacgctgctacattcaatccgggttactaacatccatccaagaatgagctacatctaggtagtgncnnnnnnnnnnnatacaagacattaagtttaaaaagcagaacactgcacattatataatcttgtttta

SEQ ID NO: 306928 - DNA, 342 bp, Homo Sapiens
  misc_feature (168)..(168): n is a, c, g, or t
  misc_feature (230)..(230): n is a, c, g, or t
  misc_feature (287)..(287): n is a, c, g, or t
  misc_feature (320)..(320): n is a, c, g, or t
caaatttattaaaactttgcagttaacaattattgaagaaattagtatgttaactataaaaacctagaagtcccaggaattagatttcaaaggatttggtttcaaagaattccttataagtgattttaacattacattctttgttaaactgggactttttctaatttnggggattattttgccccagctgtggccatgtttaaaattaagtcagcagcacatgaaagttngtggagagatgatgaggttcgcactcttatccaaagtttttaggcaaataagcactngtatttcccattttaattggaaattgcagtttnctttctggccgggtttcctttt

SEQ ID NO: 306929 - DNA, 244 bp, Homo Sapiens
ttttatgagtgcctactatctacaaggcttttaaataggtatcacagaaaggccgtgtgtaagtgcattctaacctgcaaaagtgtgtagagattcaaggcaggactacagtataatgaaatactggatgattggtcttgtttcttcactcatttactattgcagaattatacttccacatcctttgctgtgggttttgcagtgcctccccctagggcatgtagaatataattctccatctatt

SEQ ID NO: 306930 - DNA, 352 bp, Homo Sapiens
aagggataggttcttactatgttgtctaggctagtctcaaactcctggcctcaagccatcttcccgcctcatcctcctgagtagctggaactgcaggtacatgccaccatgcccggcccacaaattcttcagagagtttctctaataatgaataaattcaagttttagacagtaatctgatttatatcagcattttgtactctgagcatggggacatttgtttatttaattccacattatttattaaaggtgcctattctggagcctgaccttgggaattagaaatagcagtggaaatatttttctttaaaaacctcaatttctccatggggaggcttttaaaaaaccttta

SEQ ID NO: 306931 - DNA, 223 bp, Homo Sapiens
  misc_feature (160)..(160): n is a, c, g, or t
  misc_feature (186)..(186): n is a, c, g, or t
  misc_feature (210)..(210): n is a, c, g, or t
ggcacgaggaggctctgagacatgccgcctcccatggcgcctgaaagcgggtgcctctcatcctcccctggagtccatgcatgtaagtccaaggcagtgagaagagacttcattttagctacagtcaattcagagtgagggaatgagttctttagttccntagaggaagagaatattgggagtctngggatctgaagaaactggaggctngtttctgcccttg

SEQ ID NO: 306932 - DNA, 269 bp, Homo Sapiens
  misc_feature (23)..(23): n is a, c, g, or t
atggctctctgctaatacatcangtttcttttgaatctcatagcagaaaacatggagcctgttactcagcagacatccagtgatggctgctggttgatcatcactaaggatcattccaaaacagaactagctttctcagacaaacacggccaatgcaccaatgccaagtggaactgggcccagggctatctgagatcctccagaccttgtctgggatgttttcattgagcctccccaccaagacccttctcattgaaaccttgggccaa

SEQ ID NO: 306933 - DNA, 324 bp, Homo Sapiens
  misc_feature (185)..(185): n is a, c, g, or t
  misc_feature (303)..(303): n is a, c, g, or t
agttcggcacagagccagagcagttccgcaatgagaaatgaatgcagcttatgtttgtctcaggctcagtccacacaaccatatgactcctctgagtctaaataaattcagttccttaaacagatcagcaagtcttgatcattttttaaaatggaatctcaacgttcaataagttcaatgtcttntcacattaagaagagattagcaagaaatgagatgagatgggtctataacggacaaaacagacaaccacttaacactattgattatgtatgtttgccctaatatatactgtcctgttanatttatatgaggtgggataca

SEQ ID NO: 306934 - DNA, 460 bp, Homo Sapiens
  misc_feature (341)..(341): n is a, c, g, or t
  misc_feature (409)..(409): n is a, c, g, or t
taaatagatagtagcattaacaaaaacggagcagataaagagaggactgggtttaaggggacagaggagaaaagttgtctttatcagccataggactagaattctagtgtccagatttccagacaaatctattttccactctccctattactccagtgtcagaaaacattaaattgccaggggactatgggctgagtgcccataaaaagttgaaggcattgtgcctagtaagaggccagatacttcctatggccacagaattagagacctaagggtagaggtgattttcaaggtgatcatgtgatacctgaagcaccctctgcatcattgcttccaaatanttggcgtggcatctgcatgatattttcccagtgaccaggaagccaccttgcaggacatttccttgaanacggcagatggaatgcattgggaaacagtaatctaaggatctacctccccc

SEQ ID NO: 306935 - DNA, 495 bp, Homo Sapiens
  misc_feature (36)..(36): n is a, c, g, or t
  misc_feature (42)..(42): n is a, c, g, or t
  misc_feature (236)..(349): n is a, c, g, or t
  misc_feature (353)..(353): n is a, c, g, or t
  misc_feature (403)..(403): n is a, c, g, or t
agagagcccctcacccaagcccagggcacattgccnaccgantcaatgtttggctctaccacatccccgatataaccatgagaccaagccccaactcagtcatctaagacggcatcaggactgggggcctgggtgtggggaaggttccccagaaactgcctgatagggtgcaaaggagaggaaaaatagctgctctgcacagaatgagaagctccaacacacttcttttttaaatnnnnnnnnnnnnnnnnnnnnnnnnnnnnnnnnnnnnnnnnnnnnnnnnnnnnnnnnnnnnnnnnnnnnnnnnnnnnnnnnnnnnnnnnnnnnnnnnnnnnnnnnnnnnnnnnnngaanccaccgtgcccagcacccaacacacttctaaacagagttccaaaggcagnaatagaacgtagaaaagcattatttaaggagatcgtagctgagaattttctaggatgaagcatgagccccttaagctgaaaatatccagcca

SEQ ID NO: 306936 - DNA, 324 bp, Homo Sapiens
  misc_feature (203)..(203): n is a, c, g, or t
  misc_feature (242)..(242): n is a, c, g, or t
ctaaagggtgggcttaggtacagtgtgagaaatggggctataaatgagaatgaattaaaattctacaaaaaacagacaaagctagttacaacaaattctctctgccctctccctctccagaacacaaccacccaggtactttccctaggaaaaaaagagaaggctgttatccaaagaaatggaatagaatgtctgggtaaaanctaagatgtgggtactacgaccacccacatggaggtacnaaatcttccatgggctggcatttgggagcaacccctactagaaaaatactccatcctactcaccataaagcaggggttctca

SEQ ID NO: 306937 - DNA, 508 bp, Homo Sapiens
  misc_feature (37)..(37): n is a, c, g, or t
  misc_feature (327)..(438): n is a, c, g, or t
  misc_feature (462)..(462): n is a, c, g, or t
atttattagagttagggaataggtatgtagctaattnggggaggaaaagacaatgaaggaaaactcagatatgacccttccccaaacatataaacaacttggatacatgagaaatgtttagcgtattgttgccttcttatgttgtattgtctaagtcattttcttattgagtgttttggattgttgtctcccagaggagaaatccctaggtatttatgtgcattgttttgtgaataatttgcagttttactcaaggattgttgtctaatggttccctctcagtctagaagtttgtcagtaaaggtacacaataataattgagaagcnnnnnnnnnnnnnnnnnnnnnnnnnnnnnnnnnnnnnnnnnnnnnnnnnnnnnnnnnnnnnnnnnnnnnnnnnnnnnnnnnnnnnnnnnnnnnnnnnnnnnnnnnnnnnnnncactggtttgatcagatgtaaganaataatcacatctgccttattagtttgtagtgagaataaatttgag

SEQ ID NO: 306938 - DNA, 352 bp, Homo Sapiens
  misc_feature (318)..(318): n is a, c, g, or t
tgaagtagaactgaaaggacttattcccattggataggatatggggagagggtaagagaaagagaacaatcaaaggtgccaaaagtttttagctcaagcaactgggtagctggaggtgccatttgttgacacagtcaaggcttaaggaaaggaaaaagttagcgctatgttttgacacagcaagtctgagaagccgattggacatctaatgaagatgctgagaagagatgtgtatctaagtctggagctcaggatgagaggtccaggctggagatgtgactccactaggtcaagagtccagtgtaacaagaagccatngggctggatggcgtcaacaagggagcaataaaga

SEQ ID NO: 306939 - DNA, 297 bp, Homo Sapiens
  misc_feature (116)..(116): n is a, c, g, or t
  misc_feature (137)..(137): n is a, c, g, or t
  misc_feature (170)..(170): n is a, c, g, or t
tggttactatggcaaccatgcaaggagaaaggggagctttccatggacacgggagcaaaagaacagctatttgtcctcccactggcggaacagggccattcgtgagattagcatgnggtgccaatataaataagcgngcagcctgcttcaggaaggccgagaagacattntcagagcaaactctctcctgaagcaattatatcacacctcaatgaagtgcactgttttgtgctgaaatgaagacatggtcttttgtgcccaaaagcagatacacaagggaagccagtttgttggtcc

SEQ ID NO: 306940 - DNA, 137 bp, Homo Sapiens
gtggagctcagaacacatggcctgaccccatgtgggttgttactggagcagttgttttgatctgtcttacatctgggggatctgcaagagatttcgagggatgagggccagttcccttgctaaaacttagaatgttt

SEQ ID NO: 306941 - DNA, 289 bp, Homo Sapiens
agagatagtcaacaaatttatttatccatcctctgcacatcagtccactggagcaggagttctacacattaaaaatgtaatgggatcagcctagcattgtttggtgttcttttgttgtattttttagaatgggggtgggggcctaagtgtccttatgaagctgtggtccacgacaggagcttgttgggggagtaccagggttctgctgctttcctgcatctgagcaacacaacagagatcattagttttaaatagagtaagccctcacaatcaaaatatcataagaata

SEQ ID NO: 306942 - DNA, 357 bp, Homo Sapiens
  misc_feature (33)..(34): n is a, c, g, or t
  misc_feature (126)..(126): n is a, c, g, or t
  misc_feature (269)..(269): n is a, c, g, or t
  misc_feature (295)..(295): n is a, c, g, or t
ctcagggcagcacgagtggtagcctcggagtgnncttcaccctccaggcactgcggtcctccagattggctcacagccagctcttgctcccatacccacagccatgagagcagccacctccccagngggccataagcgcttctcaccaggagcccacctaggccaggagggagctgggggcaagttccaactgcccccttgaacacttgcatacccatgaatctggcaggggcatctgggaagagatttgaccactgaaaggactgtangggaaacccttgaacctcaagtccgntacgccacggtggaatttgcttccttgtgagctgcccaaggaagcgcctctcgttggttgga

SEQ ID NO: 306943 - DNA, 391 bp, Homo Sapiens
  misc_feature (48)..(48): n is a, c, g, or t
  misc_feature (84)..(84): n is a, c, g, or t
  misc_feature (87)..(87): n is a, c, g, or t
  misc_feature (179)..(351): n is a, c, g, or t
aattttgtaactgtttgtacagatacataatatttaaacaaatttatnggggtacatgtggtactttgttacatgcagagaatntanaattatcaagttgaggtatttaggatatccgttaccatgagcatttatcatttctatgtgttgggaacttttcaagtcctcacttctaagcnnnnnnnnnnnnnnnnnnnnnnnnnnnnnnnnnnnnnnnnnnnnnnnnnnnnnnnnnnnnnnnnnnnnnnnnnnnnnnnnnnnnnnnnnnnnnnnnnnnnnnnnnnnnnnnnnnnnnnnnnnnnnnnnnnnnnnnnnnnnnnnnnnnnnnnnnnnnnnnnnnnnnnnnnnnnnctttgggaaagaccattggtggttaaaattaaaataaaac

SEQ ID NO: 306944 - DNA, 345 bp, Homo Sapiens
  misc_feature (247)..(247): n is a, c, g, or t
  misc_feature (305)..(305): n is a, c, g, or t
gcaaatttacaaataaatacaaatccatatacaaaaaccacaacaaaaccataaagggacaagtaaagaaagaaagataatgtggtgtaagaagacagagggccaagacaaagcagagatgcccactggggcataaaattttctcagcctcaggctcaggtgacagtgagggataaaatactaaccttgagccacacaaatctgaatgaaaaggcagatcatggaggtttgaggcacggacattctntgccctgaagtttcagagcatcacaaatttttcctaagtttcccttttccattagaantattatttctgacctttgggttccctttattcattacatt

SEQ ID NO: 306945 - DNA, 357 bp, Homo Sapiens
  misc_feature (112)..(112): n is a, c, g, or t
  misc_feature (139)..(139): n is a, c, g, or t
gggtcatgtacccctgtcgcctatcccagactctgggttaagaaggcttggactagatacaatcaaaacccatccaagtcctacaggctcagatgcaggctcagggcgagantcgtgtgagaggcagggaacgccctcntatcctgtgacactcaagccagggcaagctcagggtggagagtacagatgtgtggcttggtgcttaaggccaccagtggtcagcctggtgaaggccactgggcccagcctttcttacctcattggccatccctacttcaagaaatgtggccttaaatcctcttttcagcagccttttcggggattttgatgagtgaagcgtattgatgatcttgtcca

SEQ ID NO: 306946 - DNA, 389 bp, Homo Sapiens
  misc_feature (168)..(215): n is a, c, g, or t
aagaatggagagttggcatattactgaattggaagacaaaaaaatattattctacccacatttatgatagattcaatgcattctcaatatcctaacaggttcttaaaaatagaaattgacagggtggttccaatatttatatagaaatcaaaaagaatagtcaaaatnnnnnnnnnnnnnnnnnnnnnnnnnnnnnnnnnnnnnnnnnnnnnnnnggaaacaggcgcccactctgtcacccaggttggtacgcagcggtgcaatcatagttcactgcagccttgaactcttgggctcaagtgatccttctgcctccctgtagagatggggtagagcctcctgagtcggctaggattataggtgtgcaccacaccatctggatacttaaa

SEQ ID NO: 306947 - DNA, 380 bp, Homo Sapiens
  misc_feature (193)..(248): n is a, c, g, or t
cgcacatgaatgtccacttgatccagcaacagttattgaaaagacatctgttacccccaataaattgccttggtacatttattgaaaaccaattagagagaaatgtataggtctttttctagactcattaatatattccactaatctcgtgtctatcattttttgtttctgtctttagacaggttctcactcnnnnnnnnnnnnnnnnnnnnnnnnnnnnnnnnnnnnnnnnnnnnnnnnnnnnnnnnttgacctcaagcaatcctcctaccttggtctgccaaagagctggaattataagtgtgagtgtctgtgattgaccccatgtctatccttgtggtaataccacagtgtcgactaatgtagtctgaaaatcaagt

SEQ ID NO: 306948 - DNA, 430 bp, Homo Sapiens
  misc_feature (395)..(395): n is a, c, g, or t
aaaaatctaaggactagagaccacgggtgcaaggggttatggccagtggaacaagaaaagatcatacgtggtaataaatataggtaacagtccattctggatgaggtcaactgggcaggaattctttatgctccatctaggcaggaaatacatggaggcctttgaagtcccactggcatgtgtgcaaggagccactgttaatttacacaggaaaaaggaatggagggagtaacagcatcagtttgaggtcctgtgatatatccattgggggtgaattgtcccacagttattaaattatttaaaatcagtactgtattctaagttacactgccctgatttcagtgcttactttcccggctatagtaattaagacagtgtaagtattggcgtaagtntaaaacagatagatttgatgggaacagaatttttt

SEQ ID NO: 306949 - DNA, 300 bp, Homo Sapiens
  misc_feature (65)..(65): n is a, c, g, or t
  misc_feature (189)..(189): n is a, c, g, or t
  misc_feature (194)..(194): n is a, c, g, or t
  misc_feature (197)..(198): n is a, c, g, or t
  misc_feature (204)..(204): n is a, c, g, or t
  misc_feature (222)..(222): n is a, c, g, or t
taacattgtgtttaggacagcattttacatgactgattgctgaaaatagcccagcaattatatantttcccccaaattaatctatgtttctatcaactgaaagactgtttgtaattcaaaaacctgagattttcctttttctacaaactgaatttctttcttcctattcaagtatgctttttgcaaaanaaaanaannaaaaangacttaacttacagtgtnacactttagagagagatttaccaagggttccaaaattttactcatgttttaaaatcctatttatctgtttgttatgga

SEQ ID NO: 306950 - DNA, 282 bp, Homo Sapiens
  misc_feature (74)..(74): n is a, c, g, or t
tttgcttcttttgcctgttcttttgaggtcttatttataaaatcatttcccagaccaatgtcctgaagtgtttntcctttgttttcttctaatagttttaacatttggggtcttacatttaggtctttgatccattttgagtggatttttgtgttgggtgaaagataagggtctactttcattcttctgcatgtggattttcagttttttcagcaccatttattgaaaagactgtcctcccaatgaaggttctcagcatttttgtcaaaaatcagttcactg

SEQ ID NO: 306951 - DNA, 518 bp, Homo Sapiens
  misc_feature (480)..(480): n is a, c, g, or t
gctatgaatctgttattttaatctgtatttcaaaggactctacaattcccccaaattcccaagaggctgccccctgagtattatagatgtcagagagcaggaccctaggtactgcaacccgtttcaagcaaagcagccattttacatgaaaacagttatgggaatggagaaaggtaaggaaaatgtacccaagtaagccctttattaccactaaaaccaaacatcagaaagactttacttccctaagtcagggcttcctctgctatgctgcctccctgccacctcctctctccaatttaacccaggccacataacacaatcagactagtacactgagtctaaatgacctcattaccacacagaaacctgcaaaatggatgccctacttaatcatttcttgtctccctacttctcaggtcctctagggccctggcatcaaaccacctttctacccttatctccaaccattcccctacaacncagacaaaatgaaaccaccttggctccctgaacccaag

SEQ ID NO: 306952 - DNA, 515 bp, Homo Sapiens
cagaaatgattataaatttgcactactcttgttccatcctctccagatacctggttgtggtcagtgtctgtggtcaaggcaatgcgaggcacatccagcatccctgagcaagatgtgctcaaacacatgtacgctacaatgttcccataacatctgcctccatagcatcagcaactgacctaaatgcctgccttaatgggcagggcttttttgcatgctagatgtccaggatgcttgctgtccctacttgtaatttaccattgcagttgttatttacattattttccaagtaaccaattcatagaacagccagacaagagctgagtcatcttggaagagagcccaaaaatctcccctgcacagcaagctttacaaaaagatcatcctttgtggaatgcaaacaaaatggcctccacaatttattaatgttcccaagagctgtgattatgaatccagacattttaacaatgttgaatctaattatgccaggtgaacagagtatctatcacaagtta

SEQ ID NO: 306953 - DNA, 296 bp, Homo Sapiens
  misc_feature (91)..(91): n is a, c, g, or t
cctgcagatgagattagtgtataaagtcattaatccccctaatgcttttatcagcagtcctgtcagatgcaaaaaatatctaagaggcatnaaaggaaactcatggaagtgttgcctcaaggggtgcaggtcctagtgttacaaggcagaacatggtgtcatcaaaggaaaagcacttgatgggcagttagctgaccccacagctacgtactttcctcattaaacagatcatatctggttctttgcagaaaaagcaaagttcagagaccatgaccctgttttcctacagaaccagg

SEQ ID NO: 306954 - DNA, 407 bp, Homo Sapiens
  misc_feature (249)..(249): n is a, c, g, or t
attagtacattctcacattgttacaaataaatacccaatacttggtaattcataagaaaaaaggtttaattggctcacagttctgcaggctgtacaggaagcatagtagcatctgtttctggggaggcctaagggagcttttactcatgaagccaacacttcacatggtgaaagcaggagtatgagaccaagaggggaggtgccacacacttttaaacaaccagattgtgaggacagcaccaagaggtntaaaccattcatgataaatctgcccccatgatctaatcacttcccagcaggccccacctccaacattggggattacagtttgacatgagatttggtggggacataaacccaaaccataacacagtgaactgatttttgacaaaaatgctgagaacctt

SEQ ID NO: 306955 - DNA, 348 bp, Homo Sapiens
gaaattttttttagtgttatagaattagtattggtgaattccttctttgctattgttttaaatttcctttgaaaacaaacagcagttgaattaaatatgttgaattgggaatatgccaatattttattcttcttaaaattggagaatgtgatgactctgaaacatatgcatcctggcttagtctaagcatcagtcattgattgctgtggctgccttcagtgtaaatcttgtttaaccttagtctagctcaaaagacaaaatgctctcagttaggtttgacagaagaacctgtaaaaacaagaggcttacattgtacctctggatggtttggagtaacttgtgatagag

SEQ ID NO: 306956 - DNA, 369 bp, Homo Sapiens
  misc_feature (54)..(54): n is a, c, g, or t
  misc_feature (124)..(124): n is a, c, g, or t
  misc_feature (156)..(237): n is a, c, g, or t
  misc_feature (281)..(281): n is a, c, g, or t
  misc_feature (293)..(293): n is a, c, g, or t
  misc_feature (314)..(314): n is a, c, g, or t
  misc_feature (321)..(321): n is a, c, g, or t
  misc_feature (348)..(348): n is a, c, g, or t
  misc_feature (354)..(354): n is a, c, g, or t
atgagcaccaccctggctgcaagagaccattctgatcaaacccttttcctttantcatgtaaaggctggcttctgttgcaaatgcaaacagtggagtccttaaaatcacaggtttggccccagntgccagatttcaatcccagatctgctacatgnnnnnnnnnnnnnnnnnnnnnnnnnnnnnnnnnnnnnnnnnnnnnnnnnnnnnnnnnnnnnnnnnnnnnnnnnnnnnnnnnnaatgggcggattaggtctaaatggaatacatttatatgaggtgntgagaacagggnctgggccataagaaagctttntatggtnagtgcttgcttgttgaccatatcatgncttgtnccaagttactatatt

SEQ ID NO: 306957 - DNA, 399 bp, Homo Sapiens
  misc_feature (44)..(45): n is a, c, g, or t
  misc_feature (66)..(66): n is a, c, g, or t
  misc_feature (68)..(68): n is a, c, g, or t
  misc_feature (75)..(75): n is a, c, g, or t
  misc_feature (80)..(80): n is a, c, g, or t
  misc_feature (82)..(84): n is a, c, g, or t
  misc_feature (92)..(130): n is a, c, g, or t
  misc_feature (135)..(135): n is a, c, g, or t
  misc_feature (137)..(138): n is a, c, g, or t
  misc_feature (140)..(141): n is a, c, g, or t
  misc_feature (272)..(272): n is a, c, g, or t
  misc_feature (297)..(297): n is a, c, g, or t
gcgtcctcacatgtgaaaggtgcacaaacacaaaaacacatctnntaaaaagagccatacattgcnangtgaaangaaantnnntagccccnnnnnnnnnnnnnnnnnnnnnnnnnnnnnnnnnnnnnnnccccntnntnnagttgctgggaattgatgagagaaagttagcctggggaaggctctgaaaaccaagagatttgctgccagccctaggaggagttaggatgaggggatagggtggtggatttgagaccctgctgcccacatcnttggaagactcggagggaaaccggncacctttgggaagaaagaagggactggggaacccacagagcacagcttctcttccaaagcacaaagcccacacacacgagtctggattccgcctggtgaccc

SEQ ID NO: 306958 - DNA, 476 bp, Homo Sapiens
  misc_feature (24)..(24): n is a, c, g, or t
  misc_feature (27)..(27): n is a, c, g, or t
  misc_feature (36)..(36): n is a, c, g, or t
  misc_feature (49)..(49): n is a, c, g, or t
  misc_feature (302)..(303): n is a, c, g, or t
  misc_feature (313)..(313): n is a, c, g, or t
  misc_feature (356)..(356): n is a, c, g, or t
  misc_feature (395)..(395): n is a, c, g, or t
  misc_feature (408)..(408): n is a, c, g, or t
  misc_feature (428)..(428): n is a, c, g, or t
  misc_feature (438)..(438): n is a, c, g, or t
  misc_feature (453)..(453): n is a, c, g, or t
  misc_feature (459)..(459): n is a, c, g, or t
ctttaccctagcagagaactgtgnatncagccttgntggagaagacganggactgcctggttaacttgaaagcagcctgtactttaaagtgtagcaaagcaaagctgcaggctttattccctggggtcaggaggcttggactttgtctgtttgtacccaagggctgcataaccgcttctgacctggttttgtgtgttagtggatcgaggattgggacagacgtggaatttgggcctgggcagcctgccacttgtgtaaccttggagctcaggaaaaaatgaaggtgcaagggagaggggtgnntagccaggantcccacatggacccgttcaagatgccttttggtcttgagccanagccctctggatcccttatatttggggctgcctaatttngtgacttggaagncagagacggccctcctgggnacatgccatnggtgcacactgtagntggggngccaggattgttattgt

SEQ ID NO: 306959 - DNA, 451 bp, Homo Sapiens
  misc_feature (21)..(21): n is a, c, g, or t
  misc_feature (70)..(399): n is a, c, g, or t
  misc_feature (402)..(402): n is a, c, g, or t
  misc_feature (412)..(412): n is a, c, g, or t
  misc_feature (433)..(433): n is a, c, g, or t
acaaataacacttcaaaatgnacatcataatgtaaaaggcatgttgttgctaagactataggttgagtannnnnnnnnnnnnnnnnnnnnnnnnnnnnnnnnnnnnnnnnnnnnnnnnnnnnnnnnnnnnnnnnnnnnnnnnnnnnnnnnnnnnnnnnnnnnnnnnnnnnnnnnnnnnnnnnnnnnnnnnnnnnnnnnnnnnnnnnnnnnnnnnnnnnnnnnnnnnnnnnnnnnnnnnnnnnnnnnnnnnnnnnnnnnnnnnnnnnnnnnnnnnnnnnnnnnnnnnnnnnnnnnnnnnnnnnnnnnnnnnnnnnnnnnnnnnnnnnnnnnnnnnnnnnnnnnnnnnnnnnnnnnnnnnnnnnnnnnnnnnnnnnnnnnnnnnnnnnnnnnnnnnnnnnnggnagaaaaaaanggaatttccttgtacaaagtnagcattttgataataatc

SEQ ID NO: 306960 - DNA, 154 bp, Homo Sapiens
  misc_feature (59)..(59): n is a, c, g, or t
agcattgacacaactctagaagcatgtgttaaacatcactggcactgcctaggtttaanggggaagaaatagggaagtagaaattcactgttcttcaacactccttctgttggataggcaagattagtacatagaacagttatggagccatgtg

SEQ ID NO: 306961 - DNA, 100 bp, Homo Sapiens
acctgtaaaaatgaaacaacatctacttcccagggttgctgttaagaattaagtgagatgctgcaggtaacacactaggtgtgttactgtatactaggag

SEQ ID NO: 306962 - DNA, 435 bp, Homo Sapiens
  misc_feature (408)..(408): n is a, c, g, or t
  misc_feature (415)..(415): n is a, c, g, or t
tcacatacctttttttcatgttatttgaaacttggtatgaatatcgtgatttaaagcatatcaaagcaattcatcaaagtcagtattgttttcagactatgccccctcttttcctgtttgctcttgagaatctctgatctagatcacctcattttacaggagaaaactgagaactagatgagacttactcatggccacatagcttgcgaagtgcctaggctgagactcagtcctcatgctcagagtagcaggaaattcccctgcactctctgctgtcaggtaatcccagatcatggaattgggacaaatgagcattgtttctgagccgaagctcccctgccgctggagatttccatttgtctgtctggtactggaagaaacacaggggaacaggaacaaggggtggtngggccanctggcctgagcaatccctct

SEQ ID NO: 306963 - DNA, 304 bp, Homo Sapiens
  misc_feature (98)..(98): n is a, c, g, or t
  misc_feature (102)..(102): n is a, c, g, or t
  misc_feature (195)..(195): n is a, c, g, or t
agctaaaccccccagttctatcaatcagacaagacttctgctagaaagaaaatcagcatttgctcccacaactctccgtccttggagagcacagtgtntcangaagagcagcactgcttgcaaagggagcccgtagctctgggaggcaggctgactccacacccaagtcttcatctgtcactgttggccatttgnatgtagcactcagacctcagtttctttgtgtgcaaaatgggggtgatggcatggaagaacatacacattttttaaaattcttacccgatttttctgtggggtaacattt

SEQ ID NO: 306964 - DNA, 206 bp, Homo Sapiens
actgcaccctggcctgatacttctttatagagtataataaatggacttattatttaagcccatcattctctctttaacagaatgcaccaagagtttctcctggctttgagtgattggccaggcacctcacgttagcgtctgcagccttgaatcgggaggcaggttgggcgcaggcttctcgtggcgcaccaggaggcacccggggt

SEQ ID NO: 306965 - DNA, 321 bp, Homo Sapiens
gagatagcctttattataatatacatgctttcttgagctagctgggtttgtgtttcttggtaaccaaagagtcaataccagaaacaggccaagaggaaggcatgcatttcctgacttggccagtgattttcaagacaatccacgagtctcccgctccccttccttcccagccactgaccaggagactcatgaaaagggacagctggaaactcaggagagtgatcatacaacaaactccagtacatggatttggcagaagagttggtccagataaacccctttcctcttccagcagctggccttctctaacctcaaagagag

SEQ ID NO: 306966 - DNA, 421 bp, Homo Sapiens
  misc_feature (226)..(226): n is a, c, g, or t
  misc_feature (307)..(307): n is a, c, g, or t
  misc_feature (317)..(317): n is a, c, g, or t
  misc_feature (334)..(334): n is a, c, g, or t
  misc_feature (350)..(350): n is a, c, g, or t
  misc_feature (383)..(383): n is a, c, g, or t
ggcacagcagaaggtcgaggaataacaatatgctgtttctgccctctggtggttgaaagagatgttgtaaataagtaattacaaagatgtgtggtcctatgactctaaccacctatggcattatagtttcttttattccacctgcatttattggttcactgatgtatcaagcatgtaatgagcatcttctatatgactggtctttatcagtactctaaagtgcctngtctagtagcattctggccattagaaacaagttaacatatgtgaggtcttacaaatgaagttccaaaagcccgcttttgcnatgtctagancctgacttttgggcacnccaggtttggattgcnaagtgtcgtcctatctaaatctaaaatttctangatacactgaacttaattgggtagtacacatggtgaat

SEQ ID NO: 306967 - DNA, 307 bp, Homo Sapiens
  misc_feature (53)..(54): n is a, c, g, or t
  misc_feature (67)..(67): n is a, c, g, or t
  misc_feature (73)..(73): n is a, c, g, or t
  misc_feature (75)..(75): n is a, c, g, or t
  misc_feature (91)..(91): n is a, c, g, or t
  misc_feature (106)..(107): n is a, c, g, or t
  misc_feature (139)..(139): n is a, c, g, or t
  misc_feature (295)..(295): n is a, c, g, or t
atttcggcacaggtttaattggctgtacaggaagtatggcagcatcttctccnngggatgccttagngagctngnatgggtggcagaaggnaaagcggacagggcnntcttaaatggcaggagcaggaccgagagaganaagggaggtgctgcccacttgtaaacaaccaggtctcatgagaacccactcactattgagtacaaaggggaaaatccaccacatgatccagtcacctcctcccaggctccacctccaacattgggaattactattcaacatgagatttgtgtgggnacacagatttta

SEQ ID NO: 306968 - DNA, 424 bp, Homo Sapiens
  misc_feature (280)..(280): n is a, c, g, or t
  misc_feature (392)..(392): n is a, c, g, or t
ttatgcaagtaaattgtagactctcttgaatgagtggggactctcaacttcaagagttagcttggaaatggatccacatttgactccatctctgcctgagagcaacttccagaattgtgtctatagagaattatggagcggactttttccattgaattcaatttgtcagtatgattaataaactgcataaattaaataagtttcttaaggggaattttcaataattgtgaatagacagatttatagaatttactaaaacttgatgtgtgcagagaggtgncatctcctcccactgctccatatgtgccaactccagttatactgagttgcctacagagcgacacagctatggcacgtcacgtcaacatctgaatgcctttggtgcctctgcnaatgtgttctctcacttaggggcccagaaatg

SEQ ID NO: 306969 - DNA, 459 bp, Homo Sapiens
  misc_feature (55)..(219): n is a, c, g, or t
  misc_feature (315)..(315): n is a, c, g, or t
  misc_feature (319)..(319): n is a, c, g, or t
  misc_feature (321)..(321): n is a, c, g, or t
  misc_feature (398)..(398): n is a, c, g, or t
  misc_feature (401)..(401): n is a, c, g, or t
  misc_feature (426)..(427): n is a, c, g, or t
gcaccagaaatatgtgtgtacagacatacataaggttcacaattcaataaaaaannnnnnnnnnnnnnnnnnnnnnnnnnnnnnnnnnnnnnnnnnnnnnnnnnnnnnnnnnnnnnnnnnnnnnnnnnnnnnnnnnnnnnnnnnnnnnnnnnnnnnnnnnnnnnnnnnnnnnnnnnnnnnnnnnnnnnnnnnnnnnnnnnnnnnnnnnnnnnnnnnnnnggccctgtgttctctgtgtagcaagaggcaggaagctaagcacaaaggttgccagatagcatgggactggctggctgttagtgagccaggggccangtgnantttaattgcagtcattccctgttctttgctgagctttggtcataactatttgtagaggacccctagacttttttttngtntcttccaggacaaaaagtgatccannaacatactgtcttcagtttttgagcattggac

SEQ ID NO: 306970 - DNA, 474 bp, Homo Sapiens
  misc_feature (225)..(225): n is a, c, g, or t
gggcggcccatttgtagaatgaaggtgataactgcctcgtggggttattggcattaaatgaagaatgtagggaacctagcatggttcttgatgtctaggaggtgctcggtgaagggtgcctatgattcgctttgtcttctaaatacttttggcagcacttgaggtgttaaagtctgtatcccagactttattagtcttgttgttttacgtgacttaagcgattantcaaacgcccaagtacaaaatggggctaaacccaggttttccgacacgattctacctccatggctctatctccaagctccacccaaggcctccaaaatggtgttctcctaaagtgaccaacaaaacaccaaagctgtgtcatggtgccactttggcgatgtggtctcttaggagagggaattctaagtaagttaattagcttgttcctttctacgttgtagtcttgaccaaggacaatgtgttggcatt

SEQ ID NO: 306971 - DNA, 327 bp, Homo Sapiens
  misc_feature (17)..(17): n is a, c, g, or t
  misc_feature (256)..(256): n is a, c, g, or t
  misc_feature (276)..(276): n is a, c, g, or t
  misc_feature (301)..(301): n is a, c, g, or t
caagttatgcacatttnaatattatatgttttgctgttaacagcagatgctacagaaaatttcatccccttgttcccagccttccctcactgccccatctacagacagtggtttccatcgcatcttccacactgggtgaggctgatcggatggacatttgaataatcacaacacacaattatttttaattttcagtcacgttttagttaaagccaagtggaatgtctggcatgtggcaggtgatcaataagtgtcngcagaatttctaggagtaangaaattcagaaaatgagggaggacngctcagtttttccataaatggttgag

SEQ ID NO: 306972 - DNA, 191 bp, Homo Sapiens
  misc_feature (167)..(167): n is a, c, g, or t
taacacgaagctgtacttggtaattttccaggtttcaagttgggtatcaaaattctcttttgagagctttctctagtaaaactggaactccaccccatcctctctcatactcgcttctaagaatgcacaggagccacttcactcaagtagctagaatccaatgacanataccacagaggggaccaagggtt

SEQ ID NO: 306973 - DNA, 288 bp, Homo Sapiens
  misc_feature (237)..(237): n is a, c, g, or t
  misc_feature (258)..(258): n is a, c, g, or t
gatatcctatatggtctttcccactcatagtatgcataaaattaagatgttatctttcctgtagagaaatgaaattctcctaacactctcaactttatctggatattgtcagaatatcaacacacaaaatataagtctaataaagattgaaatgcagttttagcaaggcattgtttagtaataaaaagatatgagatacactaggagtcactattttcctgttttcctagatattangaatccatgtaagtactaaanagcacagtttacttcctaccaaggccagtt

SEQ ID NO: 306974 - DNA, 232 bp, Homo Sapiens
  misc_feature (151)..(151): n is a, c, g, or t
tgcgacgagctctcattcattgcggacacgtcattcggagcagatctaagccagagaccagatctcattagataaagcccatcagaactaagaaaatggaggagccactaattaaagcttttaattgtgcggattcgctgcagcaaggcanccgctttatctgaaatcttggagggagaggaggcagaagcccagctctgcccatcgacacttggccgcggagggggagggg

SEQ ID NO: 306975 - DNA, 419 bp, Homo Sapiens
  misc_feature (135)..(199): n is a, c, g, or t
  misc_feature (379)..(379): n is a, c, g, or t
  misc_feature (398)..(398): n is a, c, g, or t
  misc_feature (406)..(406): n is a, c, g, or t
ttaaattaagaagacaaacctattaagtctaccttgcccatgactgaatccctctaagtgcctcatttccttctctacaaaataggaataacagaacttaactcacagggctgttttgagtatgacaatagacannnnnnnnnnnnnnnnnnnnnnnnnnnnnnnnnnnnnnnnnnnnnnnnnnnnnnnnnnnnnnnnnatcagttcttcccgtcacgaaatgggaggaatgcctgtcccctacattgtccaacaagggagatacctaaggaatgcccttttaaagggtctgaacacataggtaagtgctccattaggcactgggtttgccttggttaaaataggaaaactccattatttactaaggccataatggctngtcggtttaggaaattttntcccccanccaaggaacttca

SEQ ID NO: 306976 - DNA, 312 bp, Homo Sapiens
  misc_feature (223)..(266): n is a, c, g, or t
  misc_feature (280)..(280): n is a, c, g, or t
  misc_feature (301)..(301): n is a, c, g, or t
agctgtgtttttaagaagtgtttctactcctttccttactcaatcctgaccctgtaaaattcccacttgctggctgccccctccccaaggaaaggccgcccctctgcccctccacagtgggtggtgcccagagtcatggggacatggtctgggctttcctattcttgctgacccagctatagagaccgtgctctttcccattcagagagtcatagctacttgnnnnnnnnnnnnnnnnnnnnnnnnnnnnnnnnnnnnnnnnnnnngtgtgagtggcctntaatttacgcttgggggtggnccttttaaaaa

SEQ ID NO: 306977 - DNA, 160 bp, Homo Sapiens
taagattattattaaaattggcagagtattactcttcagaaagaatttatgatatcgtaggatgactcacagcccaggcagttcgtattatatagtgcacaagggaaacgagaactacacctgtatatgctggaattgctccaacgggacctttagaagc

SEQ ID NO: 306978 - DNA, 274 bp, Homo Sapiens
  misc_feature (196)..(215): n is a, c, g, or t
ttttattgggaaataattgtagattacaggaagactcaaaggcacaggagggaggtccaggtccagagcactcttcagctgggcttcccagtgttaacatcttgcataactgtagtacattattgaaaccaggaaattgacattagcacaatccatagagctgattcagatttcattagttatacagatactcatnnnnnnnnnnnnnnnnnnnnatagctgtatgcaatgttatcatgagtagctttgtatacaccaccaccacaatctagat

SEQ ID NO: 306979 - DNA, 273 bp, Homo Sapiens
  misc_feature (23)..(23): n is a, c, g, or t
  misc_feature (54)..(54): n is a, c, g, or t
gtgatcagaatggcctcacttgngtttaatactctgctgtcttcatcttaaaantcttaataatttaatgtttgagcccgtgctttgtaagtgaagtctgatggaacaacggagcatgcgcgtgagtagaggagatacagacgatacgtgtgtcttagttttttgtggctccattagcatatggtgttgatgatgccccctgagcacagaattctggtgagcccacaatgcatgggagttcagcgagattcaatgccagtacaagtgggcctc

SEQ ID NO: 306980 - DNA, 257 bp, Homo Sapiens
  misc_feature (71)..(72): n is a, c, g, or t
  misc_feature (77)..(77): n is a, c, g, or t
  misc_feature (80)..(80): n is a, c, g, or t
  misc_feature (82)..(83): n is a, c, g, or t
  misc_feature (198)..(198): n is a, c, g, or t
  misc_feature (212)..(212): n is a, c, g, or t
  misc_feature (228)..(228): n is a, c, g, or t
ccattattccacacataaagcaataagaaaaattaaatgctaagccgtatggtattgattaggtaaaacgnnaaccnccngnngagctcggtagtgtcagaagagcgcaaatccatcctggggatgagatgcgtgctgagcctgaaagagcaaggttttaaacggaaggccttccacctgtggagagggcaggaaganaggcatgaggatgngaagcagacaggctangtgggaaaggcgagaacagattcccaaaa

SEQ ID NO: 306981 - DNA, 255 bp, Homo Sapiens
  misc_feature (201)..(201): n is a, c, g, or t
ttttacattgtaattatttaagcaattactctattaaataattaaggaagaatcattgttttaaatattattccatcttcatatccagaaacatgtgagatgtatataattatacaaatgttctattatgattccttttaaagtgttatgattttcttcaaacttcttatgattatttgtagatattttatatttaaccanttagaatcacagttgtaaatggaatgtatttatccattatatcttgttatttat

SEQ ID NO: 306982 - DNA, 367 bp, Homo Sapiens
actaaacagtgaaaatggatgacccagtccttagcctatgttatggagttagcgaacaagctccagtgccctgtggcttagtcatacaataaatacttactgtcacacagtggctgctcagtaaatatttatgctttttaaactaaacagtgaaaatgggtgaccagtccttagcctttgcttatgaagtgagcagaagcaaactccagtgcccagtggcttagtcatacaataaatatttactggagcagctactttgtgccacacactatgctaggttcttggcaacaaggacactgtttggtcattaaggaaacatgggaaaagttgagggatgccccctctccaagcaagcctggaccccctc

SEQ ID NO: 306983 - DNA, 336 bp, Homo Sapiens
actaaatttggcaggaaaagcaaagggaagctgcttcttccagttccccacctgccccgcccttctgttccacagagaacagaaagtgccgtaagcaacaactaagtttacactggccactccaaccacatatctagcaataacttcataatttgtttttaagcatacattttcaggaggcgaggcgggggacaggatctactgaggtatacacacttcatccttgaaggaaataaacatgagtcatattcaaacattccaaatcaaagcataggaccctggttgatacatcttgctcctgcaatcagaaagaaagagtttagaatctaccagaag

SEQ ID NO: 306984 - DNA, 389 bp, Homo Sapiens
tggttttttgttcatggataagttatttagtgatggtttccgagatttttgtgcacctgtcccctgagcagtgtatactgtacccagtgagtagtcttttatctctcacctctatcctacctttccccttagtccctgaagtccattatatcactcttatgcctttgagtcctcatagcttagctcccacttataagtgacaacacatgatatttggttttccattcctgagttatttcttttacagtaatggtctccaactccatccaggtggctacgagtgccattatttcattcctttttgtggctaagtagtattccatggtgtatatgtaccacattttctttatccactcactcattggttgataggcatttggcttgtttac

SEQ ID NO: 306985 - DNA, 467 bp, Homo Sapiens
  misc_feature (276)..(276): n is a, c, g, or t
gtgaaataatgtctatgacactgcaggaatagactcttggcagggctgctgaaactgatgacctccccagccacaaagtctcagcaagaccgtgggctgctttccggtcttcatttgtcccctgagcacctatcagagcccccactacacccacgtggaaaaacaagccataggacaaacctcctggaggcctccactgtggggagaatcctgatgatgtgcctcttgtacctggaccacaacttgatccaaaggaccaccatccccacggggggntcctttggcaagcctgcaagccctgtcttcaatctggaacatcccaggccaatccctgctttatccagatattccctgagtttcctgtccttgttatttaaaaaaatgcacatcttccacagtcttctgccatcttcctgacacatcatgggttctgtggcaatgaccacatgatacctgcatcctccagg

SEQ ID NO: 306986 - DNA, 453 bp, Homo Sapiens
  misc_feature (68)..(69): n is a, c, g, or t
  misc_feature (115)..(126): n is a, c, g, or t
  misc_feature (143)..(169): n is a, c, g, or t
  misc_feature (193)..(278): n is a, c, g, or t
tgtaataatcataggtaataagtataattatcttttatacatgtagaaactaaagtttatgaaaacgnnatcatgtacccaaagtcatgattaataagtaaagttgaacccaacnnnnnnnnnnnnactttaaatcctgtgcnnnnnnnnnnnnnnnnnnnnnnnnnnngagacaagttctctgtctcccagnnnnnnnnnnnnnnnnnnnnnnnnnnnnnnnnnnnnnnnnnnnnnnnnnnnnnnnnnnnnnnnnnnnnnnnnnnnnnnnnnnnnnngctaaccatggaaaatgatattgatggatccaagtgatacagtttgtttcaacatattgagatattggatccttttaaattctttgtactgctcatgaccagttgccatacaccgcagaatggtcaattgcctacaaggtaaatttcacatcggtcgacttaccctcctgtcacg

SEQ ID NO: 306987 - DNA, 503 bp, Homo Sapiens
  misc_feature (30)..(30): n is a, c, g, or t
  misc_feature (232)..(232): n is a, c, g, or t
  misc_feature (336)..(336): n is a, c, g, or t
  misc_feature (463)..(463): n is a, c, g, or t
agaaggctgctggctgcagtaacgggccgnaagagggaggcaggggtgctcttagcagattgacagagcctgatctaaaggaaagacatgaaggactgagctaggggcgggataagagctcggccactagtctctaaggaatctacctcataaatctaaagcagcaaatcctgtcccctcagttctccacttttgctcaatgcttattcattaggggccagctctttccagnctatgcacgccgtgatgactgcacagataaaggtggcgtgggccttgccgcattacagagtgtcactgcttagtgggcagtgggcatctccagttattccttcntcatgtgatatgtgttttaaatgcccttagcttttgcgtttttcctccgtggagtggtctagttgatatttccccttaactggtcgtgtcttgaaactgaattgcaggctctaggtaatggtgtgancaatgtggactagggcccgggctgttaccttcctttctgt

SEQ ID NO: 306988 - DNA, 491 bp, Homo Sapiens
  misc_feature (314)..(314): n is a, c, g, or t
  misc_feature (353)..(353): n is a, c, g, or t
  misc_feature (373)..(373): n is a, c, g, or t
  misc_feature (393)..(393): n is a, c, g, or t
  misc_feature (425)..(425): n is a, c, g, or t
  misc_feature (433)..(433): n is a, c, g, or t
  misc_feature (440)..(440): n is a, c, g, or t
  misc_feature (456)..(456): n is a, c, g, or t
aagagactttctttgttatgtagtttatttttatctaaggaatgttggagggaccccagctcccttttttttctaacagctcttcagctgtcctaaaccacatttattgatgaatttacttcccccggtgattaggaatgccaccttttcccaatctggaggcacagtgtgaagcagcctacatctgccaggactctgacatatgccctaccttcgagaacgtttcagtgaatgatgctgatgcaaatatacaagggaactcgtcaatcatttgtgtccgcttacaaccaagagaataaattaacaggattganaaccagagattaaaaaaacatctcaaaagcatgggagcnaccaggaaacttgttttaancaaggataatggtctaaatnaaggatattaggtttggaaccttaccccttanggtgcggntgaaatncaaagccttccggttnccggaagaggaattaggttgggggaaggcgaaccc

SEQ ID NO: 306989 - DNA, 235 bp, Homo Sapiens
  misc_feature (112)..(112): n is a, c, g, or t
  misc_feature (201)..(201): n is a, c, g, or t
gtagtggaaatgggttttctaaccatggctttagtatttaaatcttctgtacctctaatttcttacatagtaagtggaagttcaacaactggaagatctctgtggtctttangcgtcctcaccctctctctatgctttctcattcagcaaagatttgtcaagtgtctactctgtggcagaattttgtgtaagaacttgggngatagtctgtcttcagatgagctcagagtctagt

SEQ ID NO: 306990 - DNA, 445 bp, Homo Sapiens
gaaaattgacagaattatcagccaagtttcaggtagttctgcctgacacatcttttgaagcagtgaaagtcatacagtgaatgatcacactggcctcatttgcaacaatggctgctttaaatcaaatgagcaggacaggttaggaatattgcattagctcacccctttctgcagagatagactcactctcagggtaaagttgcccagagctcaaaggatgcactgtttcatgcaagagctgccttacaggatctgagaaagagaagccgggctctgagccttcatcttcagcccactccactacaactgtgatttgggagcctttcaaggtttgtttcaggttgagtttggggagcagtttggccagatctgttcctttgaatgaatgtcttcacttttaatcttgcaatgcaaagcccatacgctttcaaaagaaaaggcccat

SEQ ID NO: 306991 - DNA, 479 bp, Homo Sapiens
  misc_feature (44)..(54): n is a, c, g, or t
  misc_feature (337)..(384): n is a, c, g, or t
tattaaacctaaatttttagggacatatggctacagagagagcnnnnnnnnnnngtacaaggaatataaggagcagagaggggagtgcagtggcctcaagaaggtaaagcacatgttaggaaatatggtcagttctaattatgtggccatatatcaaaatttctaatatgatggagttgctgaaccaggacacaggctgtcagaggtatttcattagcagtcaatttggctgagatctgtatagtcaccagacatcaaaccatcacctaccatcagcgaagtcatgtgttcagacacactaaattattacaatatttcttgttactgaatggtgtgnnnnnnnnnnnnnnnnnnnnnnnnnnnnnnnnnnnnnnnnnnnnnnnntctagtgtaagtagagaataaggaaagctcttgttgacttgggcttgtcctaaaaaatagactttattgtactcacttgacctcccttagcgaga

SEQ ID NO: 306992 - DNA, 439 bp, Homo Sapiens
  misc_feature (29)..(29): n is a, c, g, or t
  misc_feature (50)..(50): n is a, c, g, or t
ttgttgaatagtttaatcacaagtacatntgctaggaaacgttctctganggaaggctgaagtggactcctagctcagaaggaaacctcggaagatacaagcctgctgatgagctggaccactcacagattgctcacgtgcactgggctttggtattccatcaaggctcctctcccacacagcaacactgtagaatacaaggaggaccagggacatgatccaaagaaatgggcaagaacttctgcctgagtaaaagaactgatcgctttactctttctgggacttgattagtctagtacataactaagaatgaagatcagcctttttgacatgctattttgctttcagcacttgagaacacaaagaaacatgcctgggtctttccttcatacatttgatttactgttgggtttatttccttatcaggcaaggacttggt

SEQ ID NO: 306993 - DNA, 417 bp, Homo Sapiens
  misc_feature (29)..(29): n is a, c, g, or t
  misc_feature (33)..(33): n is a, c, g, or t
acaactgtttatttttgtgaaagcgagantatngccatctaaaacaatgcaaaccatatatgaaagtccaaagaaggaagaggagagagtgcctcacattctgctctgtagaggagacagttgtgagcattgtggtgcctgtgcttcacctttctccctgctcgcgtcacacacatgtgcacatgtacagctttacgtatgtcgactctgacagtgtggtgtgtgttgagctgtccctggtcagtatggacagacccacatagcttggagcatgtgttgaagagtgtaaatgtcagagccagcgtaccgggtttgagtccctgccttgccattgacaagcagggcatgacagacaagtgatgtctgtgtctgtttgcttgtctgtaaagtgggacgccggccgtgctgccctgttgg

SEQ ID NO: 306994 - DNA, 343 bp, Homo Sapiens
  misc_feature (107)..(107): n is a, c, g, or t
  misc_feature (317)..(317): n is a, c, g, or t
gttttatgtattacaaaaccacataaacagtgcttcttggtctgtaggcccacctgtgcagtggacttctggatttctctgtgtgctctgaggaagggatccaagtngccattgttgacaggccattggctgtcgttgacagcttgtttctgttatgcctttgctcagtatagtcttgctggtggtagcgacagggggaagtgaaagaccactgagtgcctcttaaatcagttgtcattttggcagattcaatctaaaccaacggatgacttccatatgcaatggctgtgcaaggaatgttttggcccaatgcaaantagatacttaaatcaagccatttgtc

SEQ ID NO: 306995 - DNA, 157 bp, Homo Sapiens
  misc_feature (26)..(26): n is a, c, g, or t
ggggcacgtaataggtgtatatattnatgggatacatcaagtattttggtaaaggtaggcaatgcataataatgatgtcagggtaaatgcggtatccatcacctcaagcatttatactttatgttacatataatcagtccaaatatactcttttagt

SEQ ID NO: 306996 - DNA, 491 bp, Homo Sapiens
  misc_feature (89)..(203): n is a, c, g, or t
  misc_feature (371)..(371): n is a, c, g, or t
  misc_feature (377)..(377): n is a, c, g, or t
  misc_feature (441)..(441): n is a, c, g, or t
  misc_feature (474)..(474): n is a, c, g, or t
tgggatgatgttttctgctttatttttacaaatttgatactagaaaacagttaacaagtcttctgattgcatttctcttttgatcatannnnnnnnnnnnnnnnnnnnnnnnnnnnnnnnnnnnnnnnnnnnnnnnnnnnnnnnnnnnnnnnnnnnnnnnnnnnnnnnnnnnnnnnnnnnnnnnnnnnnnnnnnnnnnnnnnncaagacactatatatatatgcagatttcacacagaaaaaaatcaaaacttacttgttgtataattatggtcttattttcaaagagtacaaataaaagtgtaaggatcttaatttaaaaatagttttaaaacacttttcaaaaatataaagtagattttagagatttcnagaaanaaaactggtgccagcaagccaagaacaaagcataggcaagtacatcacactactccttataatnatgcctggaaacttagaaatggtctaggcttcncctgcagaccatttttt

SEQ ID NO: 306997 - DNA, 192 bp, Homo Sapiens
  misc_feature (153)..(153): n is a, c, g, or t
ccttctggtggatcaaacttagttacctagcacaccagcctgctgaaatgtgggagaataaaccacacacagtcatttagggattgtgtcacatgtagaagcccattttgccccagtgtgggtctaggggagagagactgagtgatatggganggagccaggctaaggcacaggtttttcatgccttgcctg

SEQ ID NO: 306998 - DNA, 492 bp, Homo Sapiens
  misc_feature (32)..(32): n is a, c, g, or t
  misc_feature (309)..(309): n is a, c, g, or t
  misc_feature (365)..(365): n is a, c, g, or t
  misc_feature (382)..(382): n is a, c, g, or t
  misc_feature (407)..(407): n is a, c, g, or t
  misc_feature (427)..(427): n is a, c, g, or t
tcctatgaggcagggcaaattgagccagatgncagcagaggcataaaaacagcatgtcttgaaactgcatgggtgtctgaaatgagctttgatcgtttcacctttaagatgggtgggtggggcatgtgggcttccattaaggacattatgtggagaagaatttcagcttggtaatttaccataaagcttaatcaatcatttggccttcctagtgaatattctgggatattgaaagccatgatgagattatagcagctttggcaggattcatgaagtacaccttgttagctatgactcagctactcaganggatggtgaaaggctgagcgtcgctctggcttgctgtcatcctcctgtgaataaancttcatcctaaacccancaatggtccccagccctaggcattntaacttgttctaacagaggnccatctgaagccaccaactgctgtatggatcacaatgggagactttggagaatcactggccttgt

SEQ ID NO: 306999 - DNA, 382 bp, Homo Sapiens
  misc_feature (340)..(340): n is a, c, g, or t
gcccatcttccccataattacaaggaaaagtttgtattggattcaccaacactacaggataaacggagctgtctttaacaatattagacacaggtaaagcctcagcaggaaaatgtgaatttttgaaggtggtaaaacgagttttccttgataggaagttataatttcaatgcaaggactagaattttatcaacagaattagcaagagggattttagcatgttatggtaacatataatttcactgtgaaaaaatcccaaatgctttcggtcttccaggttattagaatgcagtaacaaccagtatgcaatgcattgctgcaatattacccacaagggggntggatattttcacagaaacctgccattatttgattcattatg

SEQ ID NO: 307000 - DNA, 465 bp, Homo Sapiens
  misc_feature (258)..(258): n is a, c, g, or t
  misc_feature (271)..(271): n is a, c, g, or t
  misc_feature (382)..(382): n is a, c, g, or t
gttctggacttgataaaaggctcattcaatgctgacacacatcgtccaaactcatcccaataaggggaaaaaatcacatcaactttaataaatgctgtcatttttctttctaaaatttctgaagattcaactgctactctagatagttttccacatacagtacgtgcaagaggaaagtcctggaggctgaggctcagcggcctcgggagtgcctgagagagaacctgagggcaatagtgtcccaaagggtgacggagnggttctctccganatctgactcaaataaacatttctatcatattacataattcttctgccctctcacttcacctggactaaattctggaaacctcctcatgaactctggtgacaaaagcagctnaaatgactacacatgacacaccataggctccacatccttatttttgtggtgtttgcatatgggtactacatttcaggcccact

SEQ ID NO: 307001 - DNA, 269 bp, Homo Sapiens
  misc_feature (91)..(91): n is a, c, g, or t
  misc_feature (129)..(129): n is a, c, g, or t
  misc_feature (165)..(165): n is a, c, g, or t
  misc_feature (230)..(230): n is a, c, g, or t
  misc_feature (235)..(235): n is a, c, g, or t
actggacacacatagaaatgtgacccacagctatggtttgcaaatacagtctttcaagaagtcctgccatgtcctaaatgcccaaatcccntgcctcccatgattcttctcctcaaaggaccttctgcnggacgccgccccctccctctccagccccaccagggncctccccgccatcctcttaggccacagcagccaataaagagtttttttattccatgatctgtacnccctnatgaatccataatccataagtttcaaatgtagtt

SEQ ID NO: 307002 - DNA, 491 bp, Homo Sapiens
  misc_feature (425)..(425): n is a, c, g, or t
  misc_feature (471)..(471): n is a, c, g, or t
aaacttgcgtatatagactactagttctgggcttgatgtctgcatttaatactccgtgattgtaaatcagtccctgtttctcaaaacctcaatttcctgatttatgaggtaggaagctgtgagaattaaaggagataaaacattttgtgtagtgtctggtgtagagtggaccgttcaataagtgttaccttttgttataatcagatgctaattatatattaatagtctataatcctttgtaattagatttttgtgtaattttttaattagatgtaatgttttgtaattatatatattttataatgagatgtgttttggatcataagtcctcctgggagtcagaagaaaaatatacttttcacagagtagggtaagatatgaaccaagccctaaatgaccaggtgtgattccgttaaccatgaganagggaagggaggccccctccaaagccaaaagcccaaacctgcaccnggccgttgggagcctcctaa

SEQ ID NO: 307003 - DNA, 492 bp, Homo Sapiens
  misc_feature (406)..(406): n is a, c, g, or t
  misc_feature (473)..(473): n is a, c, g, or t
ggtgtattagatttgtaacaaaccctgtggaacctgtaagatgttcttcctctctaaaaaggctgtatatatctgctttgcctgtccaaggaactaagtctccagtgctgtcatagagatcaggatcaaatattaagtttacactgaaggatatagatgtcatattatatggcgtgttttacaatcagctctcacttctcaccatggggtaatgtgtacaaagggtgccgtttcttacaattttagtgtcattaagtgttggatttttagaggttagatgtgacatattgttgtctccccccacccatcccgagttggtgcttctgctttcatgtgacagtaataattctgtactttaaaacctctgatttaaaatacaaagtccttgctttaaaaaccttttgantctaaaggtattattgtgaaatggtccccattatagtgccataggatttccagtaaataaaatttangaatagcctgggtgtggtg

SEQ ID NO: 307004 - DNA, 578 bp, Homo Sapiens
  misc_feature (69)..(86): n is a, c, g, or t
  misc_feature (100)..(100): n is a, c, g, or t
  misc_feature (105)..(105): n is a, c, g, or t
  misc_feature (336)..(336): n is a, c, g, or t
  misc_feature (526)..(526): n is a, c, g, or t
  misc_feature (535)..(535): n is a, c, g, or t
  misc_feature (551)..(551): n is a, c, g, or t
agttcttggcattcaagtttctcaacaccctgtccttgactggttttttcagcttctgccctatactcnnnnnnnnnnnnnnnnnnagcgcgcacgtgcncacancacacgcacacacaaaattctccccctccagccagaatagcctccttactgcctctaaatatgttctccccttctctgttctctgactcctttctgaagtatgcttccaaggatccaaaagtgatgcatcactcaaatctcaattcagtgtttgatctcctgcttgaagtcttctaattgaaggccttgaagaattgcccttaccacagatttgtctgtgtcactgactcngtatttaatcacccaccatattgtgtttaaaacatcttatagtgttcagataaggccttaaccccttcaatttacaagtaaatgatacctgctgtcattgcagctctggtgcctgtctactctgagctgggatatggttgcatggtcacaagaatgcaaagatgaataagaaatggcttaatgccctgangagctgagngtccgtcagagtgganccaactcggtgataacttaaaggtaag

SEQ ID NO: 307005 - DNA, 575 bp, Homo Sapiens
  misc_feature (140)..(241): n is a, c, g, or t
  misc_feature (256)..(256): n is a, c, g, or t
  misc_feature (432)..(432): n is a, c, g, or t
  misc_feature (468)..(468): n is a, c, g, or t
  misc_feature (507)..(507): n is a, c, g, or t
  misc_feature (517)..(517): n is a, c, g, or t
  misc_feature (565)..(565): n is a, c, g, or t
ttattttttcttgagacagggtctaactctgctgcctagggtggagtacagtggtatgaacacagcttactgcagcctcgacctcctgggctcaggtgatcctcccaagtagctgggactacaggcatgtgccaccacannnnnnnnnnnnnnnnnnnnnnnnnnnnnnnnnnnnnnnnnnnnnnnnnnnnnnnnnnnnnnnnnnnnnnnnnnnnnnnnnnnnnnnnnnnnnnnnnnnnnnaggcgtgacacgcantgcctcgcactggcctgtattaaattctttgaatcatcctaaattccttcttaccttaaggttttcatacatcgtcttaccttcacttagataactctcaccctatccccacctcccagactgacttgttaaggtatctcatgtgaagaaacctgcagtattttcaaccttcactncttggttgcttgtgcaatggtatatgttttcacagnatatttaattttactttcatattcttagaatatataccnatgtaatggnttaagtaatacgtatcttcttcagaatggaggtaatttgaagaacccnaagtgtttgc

SEQ ID NO: 307006 - DNA, 345 bp, Homo Sapiens
  misc_feature (50)..(60): n is a, c, g, or t
  misc_feature (242)..(242): n is a, c, g, or t
gttagctacttttgttatgaccatttacgcatattatttcacacaagccnnnnnnnnnnnctggttcctgtgaacttttaaagaacattattctactctatcaagaccatgaacaagaaccataatcatcacagtcttttatccactgacatttatcccagtggtattggcaacaaacaccattccaggcacttaacattcagctcatataatctgctcaactgctgtgagcaagtgtcagncccacttcacaccgtgaggcagtaagttcagagaggctggacttggtccagatagaagttaactgaccagagacactcctacttctccctccaatctatggga

SEQ ID NO: 307007 - DNA, 145 bp, Homo Sapiens
tatgatttgtttcagttttattttcctgtctcagtttcagtaaaagattcagagaactgattgacacacatcataagctatcacccatataccctaaatatacactgtttatgctttttctttttcacggaacaaggtgacacta

SEQ ID NO: 307008 - DNA, 663 bp, Homo Sapiens
  misc_feature (578)..(578): n is a, c, g, or t
  misc_feature (610)..(610): n is a, c, g, or t
  misc_feature (627)..(627): n is a, c, g, or t
gaaattaaagagtagcaaattaagtgctaataaaactgagatagtcacttacataattcattgccatgggaggtcacagaggcaaattttgtggctacattaaatatggggctggataattttatgaccgctaatgatatttttagcagtcaaggctgatactgtgagagaagaaatcctattacattctccagtagatggtttgcagggacctctggcaagaggtttctgagaagtgcaagagcagaccttgtgagttctaacctttggtgtactcaaaattggtttttaaggggaaagttcccaggcatcccattcatacctcagtcccatattttcttggtagagatccaaaagccctttctagtctgaagcagtggagaaagacattgcccagaattaaatcctttctggtctttgggaaccactcgacttatttatcgtatgccacccgtgcgtcaggtccttcgcttggagttttaaaaaatcttttggggacataaacatttggacacatcagtggcattctgagtgaaggggatgtactaaaggtggaatgcagagtttcatgggaagcncgaagaagccaagggatgtctcaacctgtganggtcagggaaggctccngagaaggtgacatttgaatcgactcttaaaggatga

SEQ ID NO: 307009 - DNA, 153 bp, Homo Sapiens
ggcacgagctggcaaattgtctagtgtcttcacattaaaattaaatcattacttagaacctcctgacttctcttaagttcaagttttaatgagcttctgattatttataacttggggataattaaagacttacagggaagtgccatgctaggc

SEQ ID NO: 307010 - DNA, 487 bp, Homo Sapiens
  misc_feature (407)..(407): n is a, c, g, or t
  misc_feature (419)..(419): n is a, c, g, or t
  misc_feature (426)..(426): n is a, c, g, or t
  misc_feature (439)..(439): n is a, c, g, or t
  misc_feature (461)..(461): n is a, c, g, or t
  misc_feature (471)..(471): n is a, c, g, or t
tttctaccacccactcaaaatgtcaggttcctcctggtctccataatgatccataaatatctaccctgaactcatgatgatgattggattcaacattataattgcatatgcctgacttttccactctgtcaacagcctcttttctggagtatctcccagtgatcatgtcatatcctgttaggtaaattgtgaaccctgtaaggatggtatcccctagttttatgagtgaagatcacatttaattctctgtcattttcagaacataacacatcgttagtgctttaaaaggatgaaacatgcagggcatttgtaaactttaaaagtactttttttatctggttattttatggcaatccctacaattaatcctttgaagggctgggcaaatcccgggtttgaccaaatgnggaaaaactggngggcatnaaagggctaaggngaccttccctggaggtcccccnggggcctaancccggatttggggttc

SEQ ID NO: 307011 - DNA, 514 bp, Homo Sapiens
  misc_feature (246)..(246): n is a, c, g, or t
  misc_feature (468)..(468): n is a, c, g, or t
agaaaagttgagggcaagaaagttgtttaggataaaggggatttaggataaagcagggatttacccacaacctctgtggttaccaagaacagggtgggaggcagccaaagggattcaggtggaggtagcaggaaccgggaggaaagcctgtctcagagcagcagatgcggctttagggatgcaggagcttgaggatggggaccaaaaaaggggcgagtgctggaggagagaaactggcagagcacnggaagcagaaaaggacaacttgttgagcaagaagatttgaagggaaaggacctgtgtcttgagacctgagcgggcaggccggattcccaaccgattacagacaaacccacaaaggaagcctgtggagagggggtagtggcggaagggctctaatgaaaacaattttgcaaccttacttatagcgttctccaaccttaaactaatagctattctgcacttttnaatatagcattggctccagagaagactctgaaatctttatttttac

SEQ ID NO: 307012 - DNA, 909 bp, Homo Sapiens
  misc_feature (889)..(889): n is a, c, g, or t
ttggttaagatactttgacaggggttttccgtttcatacaactgaaagtatcctgacttaaacaccttttgaggttctgccccaagcctttattgattttctcctcttgaatcaccaccagcatttctgcatttctcttagtaccacgttttttctattccccacacccaccaccccctctcttccctagctgtttctgtctcaaacaatacagggaaacattttagggtgtctgacagatcacacccacccctttctcagaccttctcaaccacaaggtgctctcccacctccagcgaggtttgtacttcacagttgatggggtcccggtagattcaggctgggcaacctgagagtctgtctcagtaacaaagggaaccctgcgcccagctgaagtgcaggcaatgtttacccgaaagctgggggtgggtccgcatttccaggaggaagccaagactctccctcatcctctgcagaaagaggaaggaagcgtaaacagagaaaaacagtagcagagtctgacagcgtgggtgctgtgtatggttgtgcattttgtgctctgaaaggctccgatccctgctaaaggcgtgcttctagattaagaggctctgtcttgaggtctatggttgtagattgatcatcactcatcgatttggcttagatatttgagtgggactcaattctaatgagacgtgataaacaaagcttctcgtgatcttatgatgagcactaaacatttatacatgttgataactaattggtagtcatgagtagaattggtgtggtttctgagacggctttaaaaagctgttgcgtgcatcctcggccataagattctcgaaaagctctatataatcggcttgatattaactctaaatcgcgtgcttgntaggacctgggtggtgtacg

SEQ ID NO: 307013 - DNA, 627 bp, Homo Sapiens
  misc_feature (228)..(312): n is a, c, g, or t
ttggaaaggaatttagagattatctgatccaagccttattttagagataagaaagatgctacagttgcttaatagatactcagactctgcccaaggcaaatacatgttaacacttctttcaggtttggtgggatctgcagatactcctatatcctacctcccaatcttatctccagggtggaaatgctgggcagtattagtcagggttctcttagagggacagaactnnnnnnnnnnnnnnnnnnnnnnnnnnnnnnnnnnnnnnnnnnnnnnnnnnnnnnnnnnnnnnnnnnnnnnnnnnnnnnnnnnnnngtgacggggagtttattaagtattaacttacatgaccacaaggccccacaataggctgcctataagctgaggagcaaggagagccagtccgagtgccaaaactgaagaacctggagtttgatgtttgaggggaggaagcatccagcatcggagaaagatgcaggctggaaggctaggcatgtctcgctcatttcacatttttctgcctgctttatatcactggcagctgattagattgtgccaccaggttaaggtggtctgcttcctagccactgctccatgtaactcttttggacccctacagctcaagagctc

SEQ ID NO: 307014 - DNA, 374 bp, Homo Sapiens
tttattttcgaactacacttggtgcgccttgtttagtgctcgacttgtccacgctattttccctgcctcctggtactgcggctatgttatctctacgactagaatttttggatgcgtagtggattgaatcggttctgttctgtcctctccagcatcctcaccgcactccgtctggtgtgtgtgccgcgaccgcggtggccgccgtctctactgctgcgtcgcggaacgtcggtacaccaacccgatggtcgttgtttcggcgcttggatctgtggagggtcgttgttgaagtaaggcagcatggttgcgcatttctccaagacttgagtgaagggagaagccgccgcgtagatccgtgggaaggctgctgtggc

SEQ ID NO: 307015 - DNA, 721 bp, Homo Sapiens
  misc_feature (388)..(408): n is a, c, g, or t
tggccaaagattcaagtcagtgcaataaaaaaagtacatttctgatcacatctccatttcttcaacatttacatatttatatttccaagatactccatacagcatgaatccacgaagaattaggcttcgactaagattctttctacattgatctcgagtttagcaaagggagcctatgaatgagctgccttccctgatgtcagcactgaaactcgagaaacaagtttctctgaaatctctggatcatcttacattctggcgagttctaccttctgttaatgaaggtagtcgtctctttccaactagatggtaaatttgtgttcctgatttgtcattctctaaactaataacctgaagagagaatcagtctctctccagaattttcttnnnnnnnnnnnnnnnnnnnnnccttctgtgacacttttccgagctaaccattcattcattgtaacactgaccagtgttttgactattcagctattcatcttttatcgattgggtagtaccttaatccaacttttccagacaccgttatggctaagctgaatatagcaaaggtcaggagagtgtaacgtggtaagatcgttggaacatggaagaccagggaagtcttctgtcgcctgggggtgagggaggcagtactcggtgggggcggagtcaccctgtctggggcctgtcacttcagacgtggggcctctagaaggtacgctgaaggtccggg

SEQ ID NO: 307016 - DNA, 322 bp, Homo Sapiens
  misc_feature (175)..(175): n is a, c, g, or t
  misc_feature (193)..(193): n is a, c, g, or t
  misc_feature (306)..(306): n is a, c, g, or t
acggtgctatatggtcatatcgatttcgaaagtcgtgaccatcaccgaaaggtggatttgcatattaatatcacattacttcttaaaaatcaacacaggtggtccacctttctcagacactatccgatcgaggcaaatggtgcgactagggtctgagattatcggcgacgttcgntgtggggttttcttgcangcggggtgtagaggtgggcgctctttggcgcttcggtgtgggcgccgctccatcggtggggcctcgtgcggttgtcggatgccggtctctttgccgaggtggtccgatggctnctggtcgccttgacgg

SEQ ID NO: 307017 - DNA, 338 bp, Homo Sapiens
  misc_feature (50)..(50): n is a, c, g, or t
  misc_feature (144)..(144): n is a, c, g, or t
  misc_feature (215)..(215): n is a, c, g, or t
acagtgctatatggtcatatgcattgttcagagtcgtgacccatcaccanaagggtgcatttcgtattgtgattatcgtcatagcgtcgttaaggatcaacgcaggtgtgctcacgttctctctgaccttatcgattcgaggcnacatgatcggctcagtgtctgagatattcggccgacttcccttgtgggtattcgtggatgcgcgtttgacngggagggtcttgcatcgtccgccggggttgagcccgccttagtccgtagggcgtcgtgcggttgtggggacccggtttcttcggcaaagtggtcacaaggggtgtgggtccgcttgccgtagg

SEQ ID NO: 307018 - DNA, 728 bp, Homo Sapiens
  misc_feature (153)..(154): n is a, c, g, or t
  misc_feature (593)..(593): n is a, c, g, or t
ttaggcttctgtgccattgtgctggcttatccagtgacacagggagccacagtcagattccacagcacagggcagaggctgctcgatgctgcagaagactcttcaaaagggccttcggttctagtcctagactgacactaaccccggaatganncaaacatgtcccctccctgggcatcagtttcctcttacttaccctaataggattggactggtgatcttaggtccttccactcctgcaacagtgattctagaattggttgactggtattttgaagaaagtaccagacaagctcattggcaggttatatctgttggtatctacctcttgacccattccatctgctatctgagatcagtcaggcaagtcagaaagcagttagcaccaccagaggctttggataaggcaccgtgggggttgaaagggggaatttgcttctagcccgattctgtagtgttagcccatgatggattccggctacatctgtacctaaacactctctctgctcttgttcagaattagtgttcctcttatctctcatatctcattgcctttgcgcaactcagggacttagctcgagcagatgtctgcnactcctacgtactggctcaagctctctcgtggtcattcagacatgacacgaaagagaaagagcgataatcgataatcatcagcctaacgacaacctggtgaatactccgagggttgtcttgtgcgaaagcccaaa

SEQ ID NO: 307019 - DNA, 881 bp, Homo Sapiens
  misc_feature (487)..(487): n is a, c, g, or t
  misc_feature (605)..(605): n is a, c, g, or t
aaagtattacttttttatacctctagaacaggggtttctaaaataagggtgtgtatcctatagagtttaccaaaatgattgctggaatagggaaggaaacattagaagttctatttatggttatttttctcctattttcataccattttggtatatattttgttatgtacatctacatttataatttgtataattagaaatatatagtgtgttcaaaaactgatcaagatctatgattactttggaagtcgctactctctataagtaattgctacaaatgaagacttgtgagagtttctatatacatttctaattttttggatgtaaaaattaatgaatactcaattactaaattttgcgtaagacctaaaaatattttcatttctatagattttcaagtgtttatctttttgttgtgaatattacataactttagcattacattttcaagtgtttcctttcagcttaatgttgcttttagcagtanatcgaactcttactagcaagacggaggaactgagtaaattttgattatgaggaatatttagtttggttctgaaattcatgtagtaggtatacagacttcccccttagcactcgacacncatctgaaggaagttcctgacagctgtgacgatggtatgagtaatcctttgacattgagtgacatcccatgcccattacttggaggactctctaaagtgcggagcgccactcaggccgaattaatggatctacaggatggaagggtaggccactctagggtgtatacctccgtcggggaaaaagccctgtttcaccacctggtttggcgaacgcctctgagagtccctggaaccactttttggcaaacaaggaacctgaacacaggtggcagccgg

SEQ ID NO: 307020 - DNA, 150 bp, Homo Sapiens
  misc_feature (69)..(69): n is a, c, g, or t
  misc_feature (75)..(75): n is a, c, g, or t
tggggtcacatgatctctaatcagcacctgagagctgggatctcagctgcgtgcagatgagctgctcanaataanaaatatatagattcttaagatggttactgtgagacgtgtgtttatgatgatgttaatacatggagaggactcctt

SEQ ID NO: 307021 - DNA, 757 bp, Homo Sapiens
  misc_feature (625)..(625): n is a, c, g, or t
  misc_feature (637)..(637): n is a, c, g, or t
  misc_feature (736)..(736): n is a, c, g, or t
  misc_feature (744)..(744): n is a, c, g, or t
agggccggcctggagcgcttggcgtctccccgaagtctctctgagagctggggaggcggttgggccgctaggtcactaggtcgggcaggggtcttcccccaaacatggaagttttcaccgatatttcgccggtgacattggggccttgtgcaacagactttgctgaagtgaacccaaagttcaaccctccgggagagtccttgcaacgattcggccactcagttctggagccgtcggactacattctaagttgcggtggactccactggcatctgcgtgactatctccggccggtgtgcataggcgcccgtcgggtcgggggctgaggaccttggacagggcggccacacccctctcgtacagcagcgcctctgtccattctgcgcaggcgcctctggggtcagggacggaggaacccgggcgagtagcacgccccttcacaggtgtcttccctcgaccgctactttcgcccctggcagccaaacacaggaacgcctgaaaacaggcctagaggttgatttgaggaattacatcggtcacttagagttgaactggaggaagattcttgtacgtcgttatacctcccgtgaatctaatcctaacccctgttaggatacaaaagtcnggacagacctcntcgctagaataatggtagtgtgtaatatctgatttttactcaggaaaatcgtatgtcaagatatcctgagcgtgtagaataggaaagattagcatctgnataattgntcagatctcacct

SEQ ID NO: 307022 - DNA, 901 bp, Homo Sapiens
cttatttgtgaaatcctagcagtccaagaagaaagacttgcatatattgatattggcatctctccaactaaatgtcccaaccagattaccctgcagtaagctcacaggccacaagccctactcacatgctcagtcagtgctctccagctaaatgtcccaaccaggtcaccctgcagtaagctcacagaccacaagccctactcacatgctcagtcagtgctctccagctaaatgtcccaaccagatcaccctgcaataagctcacagaccacaagtcctactcacatgctcagtcagtgctctccagctaaatgtcccaaccaggtcaccctgcagtaagctcacagaccacaagccctaccctttgccagctgtatgacaaaaattaggaggagatttacattttaatcatatggatatgcataaagccatcccaaaggtaaccataagaatgtctactagctcttcaaagttggggcagaagtttaaccgctctgtggggggctattctagctgggagttggcggagttttacagagtccgtgaatgggaaactcctggggtgtccctaatatatgcgatgcgtgattcactcttggcaattgggtcatccggatggcccctgcagagcttctgcagggtggcgagcttgggattggacgcctattgcgcgttacggtggcttgtaggtaccgggccggttaattcgagcctagacgtcttggttctcgtgttgtgcgtcggttcggtaagtaagggcccattggccgttcagtttcgcgccaaagattgggcgggcccctagcgtttggggccttttgggttaggaacacgcttgtaggcgcggggaggtaaagtaaccaggtgcgcgttattgaagtgagctctcccgcgtatcgtc

SEQ ID NO: 307023 - DNA, 820 bp, Homo Sapiens
  misc_feature (707)..(707): n is a, c, g, or t
tcaagcattctcacacttagaggtaacaaacacacaaagccacaggatgagactgcccacactgtctcatacgggctcttaatctctgacaagcaatgggctatgggcaagcattcctggcttcaggcctgggtcctcatgccattgattgggcaacttggctttctcccaaaaatgaatgcgggcaatcttttatcagaaaggccacagcagcagatgtgaaactggagcatcctgggtcaacccgcttaaaaacagactcccctttcagatagaggcagagagagtcctgttgggatccttagccctttgtgatgtcatgggaatctgtggcaacgtggtggcctttttgagtccccctaagccacatcctcccacccctgcctgtgtgaaagccaggacagcctgtgcagagtcagacttgcgcgagttgctgagtgtgctttctaagggatacacctgcctcaggtcctgtggctccctgttgagcagtctgcccgttctggtgacctcatctgccagccaaggggtaaactactagacctttgggagctctagtctgagtaaacttgtgtagcagtgagtacagacttgcttgacggagctttatccactgtgttcagtccatgatacgcatgcttattctaggaggcatgactggagcagagcaaatgtctaagtctgggctgcagctgcatgcttagtgngactgacatggcgccttccccggttcgctttttaaagggggggaatgtttgccaaattaagggcttccgcaaggcaaagcttgactaccctaggccatccatctgcaaagcta

SEQ ID NO: 307024 - DNA, 279 bp, Homo Sapiens
tctcagaggactttgacccaggaacatatttgcacagggtttccctcagctggagaaggtttctctgggagagcaccagccaggtgtgtgtcatgggatatatttacagggtggtgagctctcctggtccaacctaaaaggtcccagcaaggtgtaggggcccttctggccatttgacatcaccagggcagttagtgctgatacaaaccacagagaatgaacaaactccaactcaaacgggaatggattttatgtcattctgggactttcaaacttgat

SEQ ID NO: 307025 - DNA, 872 bp, Homo Sapiens
  misc_feature (342)..(542): n is a, c, g, or t
  misc_feature (752)..(752): n is a, c, g, or t
ataggcaggcctatgaagaaaggccttttactcttccatctcgtcccagccccgagttgacccacgttgctgctcctcacaccatggtgatgcaggtctcgtagtgtgggcacaggcctggctacctcatctttttagtgcctctctcctcttccacaggatggggtcccacagctgcagcagctggccccgtagttgagcatgtgtggttatcctgtagagcttttcccaagaagggtgtttgaacttagagtcttaataaaatcttaccaaataaattttgagtagaataatcgtcttttgcaatgtacattttaaaaatttcacacattcttttttgtnnnnnnnnnnnnnnnnnnnnnnnnnnnnnnnnnnnnnnnnnnnnnnnnnnnnnnnnnnnnnnnnnnnnnnnnnnnnnnnnnnnnnnnnnnnnnnnnnnnnnnnnnnnnnnnnnnnnnnnnnnnnnnnnnnnnnnnnnnnnnnnnnnnnnnnnnnnnnnnnnnnnnnnnnnnnnnnnnnnnnnnnnnnnnnnnnnnnnnnnntgaggtggaagatacttgaccccggagttgaggctcaatgactgtgattcggactgaatgaagctggacatgaactgtcttctaaatagaaaaaagagaaggtcttatatgcgccagctatccttggtgggtatttacttgcaggcgcggtcaaatcgactggaactgtggacaattacctgggaacctttccccaggtaaaaaacgccngtcgcgcgctgagcgggagagcctggcgtacgggttttccaggaattcccggttgtctcttgggccacaacgtggttgcccaaaggtgctgacttggttttcaattggcgaaatacgcct

SEQ ID NO: 307026 - DNA, 151 bp, Homo Sapiens
tcaccaagccacgtgctattgatcatctgctgctcctcacagtcgagactcatgctactcgagaacatacataagccaagaatatgaagaagtaatagtcggtgcactgaccgtatccatggagaagggattccagcaaatgtgctatgag

SEQ ID NO: 307027 - DNA, 886 bp, Homo Sapiens
  misc_feature (505)..(505): n is a, c, g, or t
  misc_feature (755)..(755): n is a, c, g, or t
ccttaggtattgtggggatgtaggtaaggatctctattttatgtatagaaagactcaagcaggctaagatacaaaattttaactctgagtcatagctatgacaaaactctcaactttcattgcagtattttaatttgctagactaactttccagtaaactaactgaatttatatccacaaggaataatgatggcagatgagatgaagttatgaacctgtgagtgctgatgattgatgtggattcctttgatttcagtgcattgacatctgctttcatgtgttggcatcctgttctttcctgggtttgtctaccaaagtgagaagctgaaatcaatcatgtctatgtaattatttttttcatgtagcaaataatgatatccagtgtatattattgaatatttgttttatgatggtgaagcacatcataattccaaattgcagtggctcttcttcaaaaaagacttaaagacgattaatagacatgtattagtgacccaatatctanaagtgtcactgaagcttcttatcagtagaattcatcgagtcttcctaagcatcgctctgtagaatatcctgttgcacacgtaacggttgatacatggggatggtatggagtcaccagggaagacccaggtaatgtggccagctgtaggtctgggtgggtagaacccctgtgccgtaagagaacctccgtaatactgaatccggttcctacttgtgactggacatctgcagcgttctctcaaacactctgngggggttagagctctccacacggggggtattcctcgggaaaagacggctcctgtcacgcgattctccagaaaagggtttcctcccaggcctcgggcaaaacggtgggtccaattgacggcccggcggggac

SEQ ID NO: 307028 - DNA, 827 bp, Homo Sapiens
tcaagcttagtagaaaaaaattggattctcatgtttctgaatccaatctgttgtgatacattcttttggttgaaatgtatgaagaatacccagcctcacccagtacttcaataatcttttccaataattgtgattattctcctttgatactgcaccaaaagtggaagttttcttgcttgttgcactgtggaatctagctccgtatcactgactttttttgctttgttacatcaaaatctgtttgtctgttttatattttgaatggatcttttatccatgcctaattttgtaatatcatgcattggtcatttggaacttattggccccttaagtgccctggatcttccaaatgttgaaatatttcattatataatatcaagcactcacagtaaatattagcattaatctaatcagtggtgggtaggagtttttgcttgattttattactggaaacgaatactgtcagttgttttccttgatatgacaggctcactttgttaatttttcaaaagaaaagctactgaactctagctatgtatcatagtttgacagcatctttaaataaaagatctgtcatgaaaaatgtggtagtcactccactcaccggacaatatgcggagcatgtggactagcactcttgcatgcccaacttaaggtggccagtggtttaatgttgtacgctggtggagaacaggaggggagaagccagcagggctccgatgttatgcccccctttggggtaccaggagccggcttttggaggaaggccatcgcgcccaagcaggaagccttggccaaggcccatgaggggcggaacaattcggtcg

SEQ ID NO: 307029 - DNA, 182 bp, Homo Sapiens
  misc_feature (114)..(114): n is a, c, g, or t
attgtgagtggtcctctccaaggctccgaggaccagcttgccagaacttgttctgctctagctccgaatgtagcaatgccttgtgtgtaacgcctatgttgtgcattgttttgngctaggatgagaaagacatgatgcatttgcacgtgcaaaaggtttgctagataacatggcaagtgctt

SEQ ID NO: 307030 - DNA, 796 bp, Homo Sapiens
tgagattttcctgttgcttggtatgctgaatgattttggattgtattctgcacacctgaatattgtaagactctgtcctcttaacctcttctggagaatactgataaaaattttttttagtaggcaattaacagagtttcaggccagaagtcctgactctcctcctgtgagctttcattccagtgtcagtttaattttcaaagcctctgtagtgctgctcagatccacccctcaatagccatccagggacctggctctcaggccacacagcatttcagatcctgaggcccttgtgtacccttctgggtcatttcaatgcatgtgtgtagggatgagcgtaggaactcataatgcagcttcaggggaccctttcttgagctccctcctctttgtggtatcccaacactcttagacacagagggcgctttctctccctcaggctggcaagtggggtctgagcattctgcctgtcttgtactccacaactaggcttctttgcggcaaggggaaagacagaagaacacagtaaagatctctcaactttgaccagggttcttaccagtttctgcaagaaagatctagcgttgtatgcaacacatgacagattccaacctaggtcgtggcagtgtgcaataaagatcctatctactaggtctctgcctatgagaatcctaatttggggctaccgagcattccttgccatggaataaaaccaaggcgtacccgcgcaatgatggcctctgggtcctaaggtcccctgtctaacacctggctttttaaaggggccatctcctcc

SEQ ID NO: 307031 - DNA, 853 bp, Homo Sapiens
tggactccaacgacactttcatgactctaaaagtccttccagaaagcttgattggttacctggtaggagaccctgaaactgcctagctgaggcatgagctggttcaggggcacatggtcagtcaacagatccacttggtgtcatgggcaaattgagacccaagctggaagacagaaccagaaatgtgaagagatctgggggttgaatacggggcattgcagctgaatctggagaccagatatttctaagtaggactgcttcatcctccacaattttaagaagtgatatcttctgtttcgggtgaaaggtttagtatggattggacaggggaataatttcacctggccaaaatcctcagttgggagggttttttttctgaggtcacatgaggtcttcactgaatatctgtgcttcctagtgtcttccaaggttcctgaggacctaatattggttcctactggttactttcctgttctgggatcccttatactgccttgcttggaagctgtgatagaaacgaggattttgagcaggagcctgggccacctaagtgctgagctcagttctcatctgaatgttagcacacacaggtgatgtatgagcagtagagtcattgtgaagtgctataatatgactctagtgatgcctacttcagttaggtctatctggatgagatagctatattgaagctgatgacggcttgataaggcatatcgatatggctgtacctcgtggttaactttggcactaggggggactcgtttccgaaaggggcatacatcggttgaacgtcgccatggcacccctcggcaacgctttcggaatcttatgtacactcctcggttccagaacg

SEQ ID NO: 307032 - DNA, 258 bp, Homo Sapiens
gcggttcgtggcctccacacgtaattctattactggtatcatgggagccgcacattgccaggattatcgggtacttcatgaagtatgataagcctgggtgttttcccagagaagtggtcactaggcactgctctgatgtctgagtggatattattagtggtctggaagcggtaaccgattatagaatttatgtctctgtgttggagaattatcagaagatctagcacttgattggaaggaaatcagagagtcgagctt

SEQ ID NO: 307033 - DNA, 485 bp, Homo Sapiens
gggaaggtctcgaagtttcctcgcctgagttgaaagctggaggtgggggcacctctgcccgttcctaactgccccgttataaggtccccctccccacaattggttctcacctcgccctcggagctcttgggagatccctccgtccctcctactgtgccctcgggagcatgagtctggtcccagcttctggactgcccactgtcggccacttgagagttggggacggtggggcattgtgacgctctccaaccttggaacacggtggcaaagtggccgatcaatatatgggacaagtgggttctgcggggcggactctaaggtggaaaaaacaatactacttgggatttaaggaagcaatctggattctgtctccccttggttcttcggagcttagaggtctaacggcgacattcctcctacagtaagggctcttctgggtctctcgtttccaaaggcatgaaagttctgacctgaaaattgtggcc

SEQ ID NO: 307034 - DNA, 863 bp, Homo Sapiens
  misc_feature (667)..(667): n is a, c, g, or t
ggcacgaggtcacctcagagaaagcgatcgtgaggcactggtgatatccatatcccccttcacacagtcgtccacagggctggcctttcctcagtacagtaggcaattacccacaggctgtgttccaaagggtgccagagaagccattgtcactgccccacagactgcaggctctgtaacagaaactgcatgatcagtgactcattaagatttccatgttcagagaacctcttcctaaaagccaaagaatcttagtaggattaatatatccagattgtaacatttagtattggtaagttcatcaggtggcctgtgaatttcagatcagagggctggatttaagagctttgtgctgaaagaggagagcaaggccatgaaaagcaagatgtggaagatgccaaggatcaattttgccttcataattttgtttaataatggtcttggtcaccagcatagagtctttaaagtgaatgcatgccccagaggcttgcaaaacaatccattgagatgtgagaataacattcaactataatttatattactttgattttgtgaaagtaggctctctaatatttaccttttgaaatgttatataatgttatttcagagagataggtctgcatatgcttagctgtctgactcctgcttagcatctccctcagatcgnaggctgtatcagctggctcggcagtctcaaattatggatgcgggtcccgacgttcgtctagcacaggattggacggctaggttgtggggctaggatgaccttgtgtctcttttctcgggggggagagtaacctctcggtcggcccaaaaaacagctcgttggcgggaagcacccccggcaccgggccccccgtacg

SEQ ID NO: 307035 - DNA, 893 bp, Homo Sapiens
aaaaaaaaggtaaagctgttgctacttgccagcttttctttttgccttttgctgatagatggcactttttttgctggcactgttatcaactttattaatagatttaaaagtactgacaatttttcaagccacaaaaggtttaaaaatctttggaacttcttgtcatacttctggttttctgctttcctgaggccgttgtcccatagagtactgtcaatacagtgttgagaagtgaatgggagttaaactagctccctaatatgccatcagtggcttccagtccatttccttgaggggtctaatcttgggctttggggagattacttagagatttatacaggtgagtagtgaaatttgcccagggatttgagttgtactttttagccttacggattttagctaactccagagaaaatgcgatagagaaacgttggttcaagacagacagccctcaacgaagaattatcttcataagcttgctttcatcctgtttctcagagagttccaggccagtgtcaagacttccgtggctctggacaatattaatagttcatgaatgagctacaagaatcctgatggatcaattgtatgagctatagtcaggctcttgaactgagcagaggatgctgacccagagtctggccagctgggacatgcagctcttctgaatgaaataataaagttctatagcgcgagctatccttaggagtaattcatgcatcgcgtgtaccagcgtggacttgtggcccgttgagttgatccacctcgcgaatgaggccatctctcaatccgaatgatggcgttcgacgcgttggtcgcagcagacgtgctttctgttgtgcgaataggtgctatcaccaaacggcgtacttggatcgccagtcggcgtccag

SEQ ID NO: 307036 - DNA, 867 bp, Homo Sapiens
  misc_feature (748)..(748): n is a, c, g, or t
ggcacgagggaaagaacatcaagatgaatggagtctgagttcctgacaacatggagcatcatgccagccatgaaccacttttgagacatccctatgagacaaaaataaacttccatgttctttaatttatcattttggagggttttctgttattgccgcaaaacctaatcttaactaatacagacattgtatctgacattcccaggaaaatccctgtaaacgtgttgcttgccacgaataactggcctctaccagtatcacattccagatgagcagaacagggaaaggattggaagacaagagaggggaggaacacacctcgctctctcctgctattggctgtgctggctgcaactagatatgctgggtccattgcaaatggccacacatctaaggccctaccaccatgggaacagccactgggagataactagcagcttttaacatttgtcatttaattattttaaagttagacactttttctgtttgaatgtctgcaagagaatggcctgagacatattatggaacagtcttatagagctgaattgtgactgttaaaaatataaagtacgacatagtagccacacagaacgaagacgttagttacagccgagcttatcctttatgaggtcattagcttggctgcgcgtgtcacgcgtgctggaagttgcgtacactactgctgtagaaccctagcaacggtatcgaagctgcgttcaccacattccggatggattgccgttaccgntacgcggagttgtcggcgggaattggcacgttgtctttcgcggtccaaacagctgcattctcgctatagggtgcgcgagcttgggtagctaaccctttcggaagactatcgactgaact

SEQ ID NO: 307037 - DNA, 322 bp, Homo Sapiens
ttttatatcaactttaacatttacttacgactttgttaaattggtaaaattctttttcctttatctgttttgtaatcaaagaaagactattagactgaaaagtgaatatcagttttcctaatagttactttttcctaaaaagtcttttcatttaacatttaagagagaaatctaatgttatatgacttatcttttgtacataattatgacagaaagttacaggaagtatttttaaaaactaatgtgttgagtctcaataacataagttttaaaaataatttaacagccttagttaccctaagtctgcttttcaacaataacc

SEQ ID NO: 307038 - DNA, 646 bp, Homo Sapiens
  misc_feature (615)..(615): n is a, c, g, or t
tgggatgaaggtagcacttcatgggagaaattattctttacagctttttatataggacccttggagctttgtgtataccaccctatcacagccttactgctgacattgctatagtgacttcttgctctctgtgcttgaccattaaagatgcaaaacatttaggaaaacaaaataatttccctatgaacaagatgcaggaagctgtgctcctgctgcattgataacccagtggatgtgcttacagagcaccagagaccacaggaaagcataaagcacatcagtgtatttattaggaattatactttcagttcatactctggacatttttaaatcttagcctgttcactcaatccattgctctttcactgccttatttggagtatgcgcaggtacttgcaaactaattttaaaactaacctacctcaaagtgagtatggggaacagatgtgtgaaggatattctaaagataagtgacttgtatgttacctgtttttatttttaactctatggcactgcttcttttcatttaaatctagaaactagacggtgaacttttttgtagattgggcctgtgttcagatactacgtggcacatagtaaccattcagtcatgtntgttaggcattgagcattgcgatattggctt

SEQ ID NO: 307039 - DNA, 630 bp, Homo Sapiens
  misc_feature (468)..(468): n is a, c, g, or t
aaatatgtcaaccttcattaagaaccttaaattcctaaatgtaaatcaagttacaaaaatcattatccatctggagagaaacctaatgatttccctatgccagctgtggaaataacaggtttgagccatgttaaaaatcaatgttacccaaataaagagttttctcagattcctctctggtaacatgctgttaatgttggtaacagaggccactgtcagagcatttgcccaagtccagaatactatccttgagaattgaaagagagaatacctgtgtggaggtatcctattatctggtgaatttgaggcaggagaatagggtgtggaggcaaggaacctaaggccagttcatgctgacttcctagaactaaatcaaaaggaaaaccccaattttccacacctaagtaacaaaaggaccagaggctactccctttgcaacactttctacatggctgatggaaaattganagtacctctgattggttgcagaaagcaaccaagcagatgtttgcataggagtgtaactttgtaacttcactttggcctctgattgtgggcactgcttcatttgcaccgggtgtacatcaagtggccgatggtggatttggaccccagaagactgtgtaccag

SEQ ID NO: 307040 - DNA, 857 bp, Homo Sapiens
  misc_feature (237)..(332): n is a, c, g, or t
ataaaaatataccataaaaactataagcattagagagttggattctatattaatatcagacaaaatagacttttaagacaatgattattattagagaaaaagatggatattctataataataataagactcatcttaaagcttcaaaatacttgaggcaaaacctgacagaattgaaaggagaaatagactaatcatcaagtacagttggagattttaatattcgtctcagtaactnnnnnnnnnnnnnnnnnnnnnnnnnnnnnnnnnnnnnnnnnnnnnnnnnnnnnnnnnnnnnnnnnnnnnnnnnnnnnnnnnnnnnnnnnnnnnnnnaacagcaaatgttgtttggtgttgaacattcaccatggtagaccatttgctgagttacaaggcaggtctgaatatattaagtcttaaatttatgaatgtaaaagaattgaagtgacacacgtatgtgttctgatttgcacctgagttaaattagaatcagttaccatgaaaactctagataaattaaatggagagccactagtaatactcattgatccaagagaatggagctgcttaacggatggtctgaactcacatgcagactgtgggtcactgacagtcttgaggaatttgtttaagcgtatgctgccgtgcgttctgcatcgccattgggctggtggagtcatgtgctggttgtgcgccttgtgctggtacgcgtctggtgttttttacttggtttgaataaaatatcaggcgggcgtggtggctgataatttttttgcggcaggactcttttgtgggcgccctgtggctcccggggtggctcctctcttcgggtttggtcgctactgggagtcttggttg

SEQ ID NO: 307041 - DNA, 869 bp, Homo Sapiens
  misc_feature (692)..(692): n is a, c, g, or t
gaacagtaagcaacaacagacacaggcaagaaaagacggtgagagaagagatgttgggttgaacagtcccccatgctagccgtcatggacatacaatagcttagagcttggttgctaccaaagcagaaatctggggaggtctgaggagcagggatgacagcacagatcagccaattgaagtgtagaggtgtttacaagagagacacctgcatccttgtttacatcatgagccagcctagcccctctgatcttcctccttgtcttttcatatataggtgcttcattctccttacttaattgcaggtttggaatgggcagagattgtcttcagctttctgggctctcacacctgagttttcccatagttcctggtagaggcactgaggagcctggtgaagttcccctacctctgcctaattgatgattccttgcctgagtctcatccttattctcagttgcacctggggtgacagagcgtaaatgccaagtggtcccttcagcccttcccaggacctggaatctctttctgctttggaatgaagtgtgggcagatcgtaactagagccccagtgagcatgggatcaagctggggaatgaaatcactcttgtcatatggaatgtatttccctgtccttgcttgaggaaaactatacctggatagcactgtctgactgagcgaagacacactactncggcagtgagaactggaagcgaatgggaccgacagatattcatcagatgttcaagtgcgggagcccaggtgtttgtgtttcttaaatcctgccaccagagggttttgcagggcggttaaaatccaaaatttcgcttggtcggttggaagaaccctaggcctgccgtgcaccccattg

SEQ ID NO: 307042 - DNA, 749 bp, Homo Sapiens
  misc_feature (590)..(590): n is a, c, g, or t
  misc_feature (652)..(652): n is a, c, g, or t
cagagtgttatgaaaggaaattataggagaatggggtaaaggacagtctctctgaggagctgacttcagctgttacctgaaagataggaaagagtcagccgctcaaacagcttccctgtagcgagcattgtaagcaccaggcagtaaagagactgatgtgtactaggaactagtagatacccaaggtaggaagaagaaagcaagccagaattttccctggttttctggaaaaggaaggaggcatgagaaggcattggactgggattcatgtccccacactgcatctcaggtaacctgtagactccctgaagcagggaccagttttcttgttcaatgctctgacgcccagcagagcatttagaccataggaggcacttaaacatatttgctggataacacataaatgaattttaacttgtattctcatttgcttctttgtcaaatttaattgaaaaactcagagcctcagagttagaagggatattgcgagtcagcttgtctggtccccatctgtttgcgtaaatccctctgcacgtgcgtggcaagaccgacagctcgacttctgacacttcagggagaaggccattccnttgaccagtcagcacttaagattatttgtaagctgcatgcatatcagatcaaagtctacttntgtttgaagcagtgctcacctgctcacactggtgttctcaggaacatcttggcgaagtttcttcggtggctgaagtaagggtttagattgagatttg

SEQ ID NO: 307043 - DNA, 885 bp, Homo Sapiens
  misc_feature (362)..(391): n is a, c, g, or t
  misc_feature (675)..(675): n is a, c, g, or t
  misc_feature (794)..(794): n is a, c, g, or t
gcacatgtaataaaaatgtaatatggagagataaattaggatgagggaaaatgggaatagaggtggaaagtcaagaccgcataaaagggaaacatggttacagtttgatggtgagagctcaaatttactggtaatatttcatgagtacctattgttgagcatttgtaggaaatctgtggggatagtaatctaaaacaaatttcattagtaattaaggaaaagtaatttaaacaataaattttagccatttatgtttgtaaaactgtcaagaatgagaatgtgaatatatgtagtacctaagacagtttaaagccagttttattcttatgtgcaatcaaatttgattaaacatatcaaatccnnnnnnnnnnnnnnnnnnnnnnnnnnnnnngcatgcatatatagctatgtgtatctaggtctatctctgtattatgaagttgagctgataatctaggtaaacaacgagtgctccaagggtacttggtattggaatatcaacttgttatatttgacagaataattggggttgctttggagtttatagtccagaagagattggaagattaatgctcctttgataaccttgtaacgggagatataatatgggctcaagtccaggggagatagtcatgtgccggtgacagtgggttataggagtgggacaagtgagangactctgtgttacaacccagttcacttaagtgagtggcccccggggtaagtggctttgacgccagcacctggttttgtgtgagacagttggcagaggccgggcgcgcgtgttgtggtgngcgccactgccgaggttttcttgcggtagcggggggtctcggtttccgtcccctgtgggttattgggccggtttttgccggcggcagtaca

SEQ ID NO: 307044 - DNA, 411 bp, Homo Sapiens
  misc_feature (320)..(320): n is a, c, g, or t
atgttgagcagggaagtgtgcagcaccaacaggcaactggctccggtttaggagtatctgagctccaggcagaagaacagacatcccagaactgcacaaagactacggagcacatggaaactcacatagaagcgcagatcatgcagcatgcaacacagcaagaaacacgaggacaacgtgaacaacctgaaagtaaccgagaaagagtaccaggaggcgttggaaaagggagatgttacagcacaagatactcatcagcatgcactagagatcaatgatggtgagtcatatcagacatagagtattctggacaaacctcngcactaacagtggaggagaacccaaaaggaagttgataggagacatcaaacaagaaattggtaccttaggacagtttaaggagaagctgac

SEQ ID NO: 307045 - DNA, 656 bp, Homo Sapiens
  misc_feature (260)..(260): n is a, c, g, or t
  misc_feature (514)..(514): n is a, c, g, or t
  misc_feature (554)..(554): n is a, c, g, or t
atgaagagagtttttctaattgaaaaatctttaagtcattcagaagaataaaactgaaaatgtttccaataactgagccctagaagctcttaggtctgaagggttcagtcccagtgaagtccacaagggcaatatgagggccctcactggggtgtctctgcatggggaagcaggtagtactgtgagccaggagcaagtctggggttcctttcctttcctgcttccaccatgtatttagccttttttcacagcttcagcgntggcctgtgctctccaaggcactctggacatgtgtctgtccacctccccaagtgctggcttttagctaatgtaagctccattgggatgcagcatctgtgtcttcttgaaggaactgcggcatcttggcaagttcagtcattgattcttaggcaggtgggtctcagtgttttggcctctctcaactctgggaatgtctccttgccctgtgtatactaacacacagccacatcacgagagtcaaaagggcagctgngtgaacttactgattcggtgtttcaagttcgagttcaccntagggactagtttcagtttggtcttgcagttggtcttagagcatcctgagtcagttaaactgcttcacgtccaccatttaagtttacccgataacctaagct

SEQ ID NO: 307046 - DNA, 206 bp, Homo Sapiens
ttcagagtagatttattagaataagagattagatttgttaaacatctaggttaaggatggttatgaggattttcatacaactgtaggcactatgcacgtgggttacgacagcgttggtactgggatatggggagagataggtccggcatgttagtgtcttgatcaatgtgtgacatgcgaaaggatccattgtagaacattaatca

SEQ ID NO: 307047 - DNA, 588 bp, Homo Sapiens
  misc_feature (534)..(534): n is a, c, g, or t
ccttcccccatcaatcagcacaggcaaaggccagaagtgacaagtgattgtgtattagacaagctaatgtttgtgtggagaaaacacttttgttccctgaatctctggtggcaaaggacccagaactcaagaagcaaatcttccagtctcctttaagccttctcttccataagtggcctcctccctggaattggaaaccactgtcaagtatctacgtccctgttggcccagcgtgagacttctacacctttggctctttgaatgccacctgacatgaaccctctggccacttgcaaaaggaggtcagaggttgctgccactcatgctgctaataatgtctgataatgataaaaccacgtcctgtttgtcttgtattttatcataaagagcactttgatgtgcagattctctttccaaggtgttaggaaaacaaaagtagataagacacattttcaaccttaatgatcatttcaatccagttaattataactcgtttaatccccagaatgtagaaaggaggataagagagttaantattaccccattttcaaatgaaggagctggggtgttaaaaattattttcagaaa

SEQ ID NO: 307048 - DNA, 580 bp, Homo Sapiens
aggtttaacttcagcctagtgcacggaagacatggtaaatggtcatcgcttctcccttgaatggaccgagggcccccgactcccatagcactaccccataaagtctaggctcccgacttcggcattcacggccttcagtgataaatccaggcccaccatccgtccccacaccacctttcacacaccccctgcccccaccctcgcaggcctcttattttagctgcacatgctctccctgcctccgaaatgcttgcggcctttcctttccatttattgacgcccttgtgttctctctgagcagcccttccctgtgtccctagctggagttcctcactccctcctcagtgtcctgaagcttcttgttagagctgctgcagccacttggttgtgtctggaagcaagtctgcagcctctggcttccttgcgggactgcaggtgacttgaaagcacagctggtttccaggaagctggctttcgtgccaatgggcccaggggttaaagcaggcacagttccagcaactggtgagtctccaaattcataatgtcaagacctcagagaatttaaccatgacccactggg

SEQ ID NO: 307049 - DNA, 527 bp, Homo Sapiens
agtgttctacgtgtcctctctggagggaggctgagctggagatgggagggagtctttgctgccagcgccctgcagggtaatccaaccatccttggtgacatcatgttttctgagtggatgtttgcttcagaagctgcaaaataatctcaactttcagccccaacttctccccaggagggcagcatcctgtgaatttggccaaaacggaactcacaccacagctcattaagggagcaatcagcgagggtaccaaaatgctgcctccctcacactttccaccctgcatcccccatcaaaactctcatagcctgtgtctctctgggtgccagagggagagaaaatgcatgttccaatggggtattgaggaagggagaggagaaagaggggcaggtcgaaggagcctggtagagaaagggggtgacccacctggctccctccagggctggggtctcttgtgacaggcactgggctagtggaaagcagcttcgggaccttggcagacccaagttgggccaactggagagaga

SEQ ID NO: 307050 - DNA, 172 bp, Homo Sapiens
tgagtaccgtacccatgacatcaactcactaccacaactcgcaaatatctcagacagtcgacaaagtccaatgatgcagcgctcatttaacaacatatgaacacctgcagacgtcatagccactagccctactatacattcgcatgcacgccctcgaccaccgtcctcttct

SEQ ID NO: 307051 - DNA, 932 bp, Homo Sapiens
  misc_feature (701)..(701): n is a, c, g, or t
  misc_feature (867)..(867): n is a, c, g, or t
  misc_feature (884)..(884): n is a, c, g, or t
  misc_feature (914)..(914): n is a, c, g, or t
agtcttcatttaatgaataggctgtttcaggtctttgaaagtatcgtctttttttaattcaaagtgcattttaatatagaaacagtttaaaagtagctggccaaaacctagcttatatacagcttccacatatattgtcatatattatcttacttaagacatgctatagctgagataaatagtaataacagcagctaggtgctgtgttcttagcagcactacctgagagctttagacctggtggtagagtgatagcaactggcagctgcctggtcccattgtgcctctagagatggctcctctggcagcagagagttccagttagcaagacaggatgcctgccagtgggcatacagctgggtaggaggaagcctgaggggcaagagaactgagcagcatccacagtgggtatggagagatggtagaagtgattcacaaatcagggatttcaagaaagaaaataagctggaaagggtttagaaaacatttcgaatgaactcactgagcagagataatagctttcatataaagataactaagtaattcgaatcttgaccgagaaaatgaagctacaatatggtaaaagttaaacatgaatgaaagaatcatatggtgatctaatatgtaatttttaatggacggtgtaatgaaattaaatatgtctggcttagatacagcgtgaccacagcctggccagatgnatttaagctattccgaaaaagaaaaggctgtattacgtgcgggtgtctctttggggggatttctccgcggggatttacagcgtgacatgtgtcgcgtatacttgtgtcccctctcggtgggacgcgcgcctcacctttgtggcgcctccgtcagggttgtccggtntccgcgggtcttgttgngcgcaaggtggttccacaatgggcggttgntggcacattgtggggcct

SEQ ID NO: 307052 - DNA, 135 bp, Homo Sapiens
tttatgtatccatttgatatcttatgttcctcatgattttttgtatcatgtttcttggttcttggcattgtttctaatttcttgtattgttacttgtgtgatttttattattgttttcggttctgattgtatggg

SEQ ID NO: 307053 - DNA, 897 bp, Homo Sapiens
  misc_feature (212)..(245): n is a, c, g, or t
  misc_feature (876)..(876): n is a, c, g, or t
tttttccaatgactggtgaaaacaaaatttctactaatctctcctaattaagccaacatggggcccttagtattctcaatctagtaaaaatcagtagaagaatagtaagcattaatactattaatctagtatgcagccttcatgagtatatccagttacaagatgctgcctctatgaatttcatttttcttagcatttatgaacatatagannnnnnnnnnnnnnnnnnnnnnnnnnnnnnnnnntcatgactaagtacagccttagtcattcataacagatattggtgaatggactttagctagagagatggtttttcagatgccaccttgtagtgccatgaaccttttaagatagctgactctccggacaggaatttactttgtctttcttctgtcagacagtagtcaaatatttcactgtttagtttggagctgatcccaggagattttcccaaaagtcacatcttcagcatcaaaacagacatacaactcagcaaagaccagcaaaaggaacaagagatatgcaggtaaaagccacattagtgccaggtcatttggggacttccttggtgacaattgctagagaatgaagttctaggccagtacgttcagtctggtgcatccagtgtcctgggctccgtactgggataagcagatcatggaattctaggcatcatactgcacctgatgctgctgccacagtgtagatgcttgagatgtgtcctggccgctctgtagtaatacacattggctacgaacaaattgtgtgggtggagaatcgtttagagaagcttggggaggtcgccctaaggcggccgctaaaaagtttgcggcctgggtccggggtgcgttgataccctctgggcgcataggncgggacgcgccctcgacccgg

SEQ ID NO: 307054 - DNA, 668 bp, Homo Sapiens
agagtagaggccatcttggaattgtttgaagagtactattggaagtgaatatatacaccttacgtttaaataactgcctgtgaagggaagtagaggcttgtgctggggggaggggtgttataggattgaaaataaattagtataggctcagatggtacccagacctaagtgattaattcaccactttataattagataatagaaatactgtaccaaaattctgtaaaagctgctgtgattatctctctgtgccatcattagccctcatgtagtcactagagggcgctccactctcttttcagtctatgtgattgataactggtaccgttcaaggattactttgagactcctatagttgccacaagtcttaattcagtcatactcatatttatatagcattacatttttatttttattaatgagtctttccagtgcagtagtccctaaggcctttctatgaaatgtacattctgaaactggtgtggtataccactgttttcaactgattatcaacagtatggataccactcataccacagaaattgagattcaggtagaagtggcataggttgtagtcggaagttagggtggatcagtgctccgtcaaatcctaccttgggagccaggtgatgctggccaacgtgaacagctcgcaatgcaactgcctc

SEQ ID NO: 307055 - DNA, 751 bp, Homo Sapiens
aggcattctctttgtttatagtctaagccaagtcacctgattcactctcactactctgcagtttggaattgtaaaaagcaaaaggctacaaaaatcaaaaccatccacctatgtaatgaaccatttcttatcacagcccaggaaggcacagataggaatcagtgtgcgtaactctccacgtggaaaccctgtgaaaacagcagcctttcctaagcatctggctcctaggagctggatgttaattgttgctaaagcctgggttcattactacaaaagaaaataaacattccagagtgattttgaaagcattttgattgttctagaatattcacccaaggttgagcgtctcatggtgcatggcaggttcggccaggagctggccgtggcgtttccactcctttcctgccatcctgaagattcaattgcttggggcttggaattctcctttcaattcaatcttaagctcctaaacctcaacaaatggtcttggagaattagaaacggctaagccccaacctggctggtctcctttctactcagtggggaaattggatcactcgcttggttgatactcgccttggggaaagcttttacgtactgaatcatcccttctacggttttatctacagtagccagctgtgagacacataaaattcgtgctggaagagtcaattgttggaaaatgatttcgaagctaccagagatgcgagggtttaaattctaggtggtcgggtatgtgcaataagtagcg

SEQ ID NO: 307056 - DNA, 774 bp, Homo Sapiens
  misc_feature (630)..(630): n is a, c, g, or t
  misc_feature (721)..(721): n is a, c, g, or t
ataaccataaaaataggcaaccagcagcccttggggtgactcttcctatggagtagccattctgtatttctttactttcttaatattaactactttcactttgtggactcgcccgaattcttttcttgagcaaggtccaagaactctctcttggggactggatcacgaccgctttctggtaacaggagcaatacaaatggctattagtaaacgaacgcttaagtaactctagtacatctatgatgaaataccaggccacagtttttttaaaaatgaggatgttctctatatactgacgcacagtcaccaagacatgcactttataggaaattataagctcctccttgcctaaatctccttaattttgcttaataaataacaagtgaagccagaagctgtaaactcataattttaatgaagaaatgggatccagaagatggagatgtttttcattctactttattagatgaggaaaaggagagtaaatacttgtatgccagctaccacacgttttaaagttaatgttaaccctgctaagacagcaggagatttatatcagcaaggtttagttgccagaaccacaccagttatttaggcaagccttataggagtgtctatatttagtactanaaggcagagagatccagggtcttgagtacactgtacagtgcacccagatgggagctgatggctcgatgttcgtgctcgaacgttacgtcgntagtgctgtttgaacgtaaaccacgatctttgcagaggtctaggtcccgtgaa

SEQ ID NO: 307057 - DNA, 820 bp, Homo Sapiens
  misc_feature (661)..(661): n is a, c, g, or t
cgaattacagcctcaaggcctctgcagttaagttgagaaaaagggccatgtctcaggacagaaccatggatgtggcttttagcacgtggagaggattcaaacagagaagaaggtaactaggtttttgagaaaggtctactgaccaaaaaagtataagcccatatttaaacagtttgcaaccgttcaaatcttctaatggtcattgagtctcagctacctagatgcaggactgagagcattctttccttttcttttcactgtcttccttggtcacacatgaggggacattgagaataggctttctgtgggggctgagtcagttcctttgcagcttcctgcttttgctttgcctccttcaagtaccagaagagtagcactgcagaaaacagttgaaaatccctgatttcatcccagtctcattctatacatgggactctaaggtccagacaaaccacttactggccctggctgtgagattgggactcagagcacctgactcacaacctggtccactgtagccctcatcaaggctctggtcaagtcttccccttcttgggcctactgctcacctctgagtctctctacgctacactgcgtcttccactctcctgctctaacactgtgggtccatgggatggcagtgtgatctggatgagatctntgaagtgatatgactgcagtttcatgttgagatgtgtaataaatatagagcgtgtttgcaagcttgcagctagaacactaaacatgtggcaggtaagtcttccaataagaaggttttgcccctttggttggaggagaccccaccctttggagcggctct

SEQ ID NO: 307058 - DNA, 112 bp, Homo Sapiens
  misc_feature (89)..(89): n is a, c, g, or t
acagggaataatttgtgaacactactggagaatgaagatcaagccggatttcatggggaaggccactacacacaaacgagtcaaggtcnttgatgacaagagcagcataatg

SEQ ID NO: 307059 - DNA, 109 bp, Homo Sapiens
cagcagccggaaagataggggaaagggcatccaggataaccagaagaaccatggtatgcggcgcagggaagaggggcagcaacggcgcgaggaggccacaggggaacaa

SEQ ID NO: 307060 - DNA, 303 bp, Homo Sapiens
aggtaacatggtgacaaccacagtaaatggtgggatgggttcttgcctattcttgaggagcttggcagaagagtgatgacgaggagtgctgatacatggactttgatgatggtatccacgtgaactgggcccactggataatgtgcaggggcactgcggtgcattctgttgtctcatccaactagatagaacatggctgctggggtccgcgcataactgcagcttggaatagtctgtagacttgtagttgtgacggtacagtagactcaagggacctggacgccactatgatgacaattgttg

SEQ ID NO: 307061 - DNA, 126 bp, Homo Sapiens
aaggcgagaaggcgccaccccaaacactggggtagggagcggcctggacgcaaccgcagacaggaagggcacggcaccacaccccaccaacgcatggcggcgccggcacgcccaccaagtagtacc

SEQ ID NO: 307062 - DNA, 246 bp, Homo Sapiens
  misc_feature (68)..(83): n is a, c, g, or t
tgggctcgaatgatcttcctgattttcccaagtagctgggactacaggtgcattccactgtgcctaannnnnnnnnnnnnnnngtagagatggggggtctcactttgttgcccaggccggtcttgaactcctggggtcaactgacccacctccttcaacctctcaaagtgctgtaattacaggtgtgagccattgtgcctagccttaatttttccaatggggaaactgaacttcagaaagattaag

SEQ ID NO: 307063 - DNA, 309 bp, Homo Sapiens
  misc_feature (157)..(165): n is a, c, g, or t
gggttgtgtttgaaaacctattgagttttgtttataactcctgtttatatatagaatcttgtccttagatgtcgactattttttttctagccctgttataagacatacagcttagtaaataaatttgccttttgagaagagtagtcgaaaggcctannnnnnnnncacctatagtaaagattaaaagtcagactaaagcctttcccctgcacctgagagacagaacaacaaaatgttactgttgtctaggggttacaaacctgcaggttttgggggatagaaaggatttcttgggccaccagctgtgat

SEQ ID NO: 307064 - DNA, 209 bp, Homo Sapiens
tgtctcgaagagtagaggagcgtctacaggtctttccacaccttcagtcggcgggtggcggactttaccgtgacagagaagtggaatggtacatctaggcaccgcagccagtgccttcatgcaggaaacccagtgagagatttacacagctcgtgacatcatccctggttttgataccgagatagctagtgtacttagcgtcgctggct

SEQ ID NO: 307065 - DNA, 121 bp, Homo Sapiens
catctatacgtcacgtggtctatcccatgtggattttttgatggtggggaagccttgagctaccattaaaagctttgccagagtcagtgaacttataaggctgccccccggcaggaattct

SEQ ID NO: 307066 - DNA, 168 bp, Homo Sapiens
gtggacgagacctggaagatttgtagttgtgtaaaactttgatcgaagttgcgttagacctcatgggctggagagaagagtaatatgagttgggaagtaaaacacgttaatagccagggtaaactttgttagaaatgtacatgttgccaaaatagtagtagtaaaatt

SEQ ID NO: 307067 - DNA, 278 bp, Homo Sapiens
cagactgtccctgaggtccttacttgaccagaagagaaacactcatctttacagttttgcttctcctgcttcagaatttgagctaattatggaaaagccttatttggtatagtgaattttgtgcactatccagatgtccccttcagaaacaggcatttatttccctagctcctgagagtgttggctgcagaagctgacagctatggctctttctaagagttgccccactgatgggaatggtctcaccaaggttacgtctcttccctggggcaggcctg

SEQ ID NO: 307068 - DNA, 409 bp, Homo Sapiens
aggataacttaaatctctttttgttcttagacaaagctagacaaatcacctttttatgggctatttccctgtctccactagcagttggttgagggccgtgtgactacacccagaccagcatgatgtaagaaacatgacgcaacccacttccagatctgtccttcaaggtatctcatgaaaccttccaggcatctcctcatagctgtggtaaggccacatgttctaaatgccagaggtataagatgaagaagtgacacccaactgcattggactttgcatgagcctaaaataaacttttattgtagtaagcctctgaggcatgcttgttgactacattatagtctagtccatctagtatcagacacttactacaggtctttttcaggtatgaacattgtgatggttaact

SEQ ID NO: 307069 - DNA, 333 bp, Homo Sapiens
catagaatttttaaaacagattttcaaatatatattataaagtgttcaatcattattttaatatataaaaggcttttccatgtcatagttttaaaataatttctaaaggctttaaaaaaactctactttagacttgtcataccctcttaaaatctttaaccttgtactttagccagatatcgataatctcataacaaatcaatattactaatctcagttggatcatttcagtctcataatttgtctcctttcctaaattcatccaatcatgctttgatgacttgctttgttacattatgtttgtaatcccttataatttgatgagaaatttac

SEQ ID NO: 307070 - DNA, 411 bp, Homo Sapiens
  misc_feature (382)..(382): n is a, c, g, or t
ccaacttacaaggtccttcttcttctcacctctccccatttatcacctttccatttctgcagcagttttcctagagcagtagcttctaattcctgaacagctcacatgggcctccagttgtcgacacaccctgtctcctctctggctaatggtggccccagctgcctgtccacgtctccagagtaggcctgggcagggacagggaaggacatacttcctaaccaaaagaaaagagcaaaccgcagccatggaaggaagtaggaagtcatcctgagcgcagatccctagatgaggcctgagcacagcccctgatggcaggcagtgggcagtccctccccagatggactagggaagctggcacttaggaagagaaagatcgttntggggacagggagcaggatgaaacacatc

SEQ ID NO: 307071 - DNA, 106 bp, Homo Sapiens
tcttctaggccttgtttggaaaagactgttaccccagctctccagaagcttatagttcaggtaatcaagtaaacaagtgcatggacaatttccacttcaaagaggg

SEQ ID NO: 307072 - DNA, 325 bp, Homo Sapiens
tggcactagaagattctccagactcatcttctattttctctgcccaagccctaggatctgtcatttgtccaagaaggctttccttttatcaagagagtggtatttagaagcaagttctggctgctgagtgcatgctgattttgttttataatcagctttattgagaaataattcatgttccatacaacttgcatgctgacctgaaaacctccacttatccctccttcatcagagttcaatacataaaacttgctcagcagaaacctgtggattgatccagggaccattctccacgaagaagaagtcaatccccattctagctctg

SEQ ID NO: 307073 - DNA, 323 bp, Homo Sapiens
ccagaaagaataatctattagtgggtggctaagcttccacagtgacccttgttctcagctgggcacagaaaccctttgtaggagcacgtgtcccgatgtttattttggaaaacagattcttgctgttactggccgagatcccgcccgctgccctctggattccgaggcctccgaggccgccccattggaaactgcgcccaccggcgtgggtagccaaaacctcagtattcgttggtgctgtgaggacatctgggggtgctcggttctggggtcacacacggtccactggctgcccccaccgtctccaaggtctggacccaaga

SEQ ID NO: 307074 - DNA, 308 bp, Homo Sapiens
gacaataggtttttattcaaaaaacgccatgtatagtcacaaaaatagtatgtcgatttatacgcctgaacagtatttcactcagataaaacccgcaagttaactgcgacgcaaaacacggccccatagaggatgtggatggaacaccgtcgagagatgctttccataagtaaccaatatacacattcagcaatgacggtccccatgacccacacgagtcgggacccgcctgggaaagtccgtgccggtggccccgcagaagtcgaggagctgtggcgctgtatcggcctgagatcccgccatcccca

SEQ ID NO: 307075 - DNA, 425 bp, Homo Sapiens
atttctatttctagagaaacgtgaatatggtttaccaaagacatgtaaaacaaatacatatttattcaaaatattcctaaactataaagaattcaaatgtctgaggaaagaaaagaaattttatgtgaggaaagtgagtgctttcaaattaacaagcccagagttaggcattaaaatgagacagcaacaatgtcttatgtccctgttttgaagccgtgtattcatctattaaaacagcttgctatcatcacaagtggctataaagcaacctaaacatgctgcactggacaccatctctcactccctgtagctgaacaatgtatagctaatcattaatcaatgttatttctgtaaacttcagggagttcctgacaggcaattttgtaccagccaactccccgtctccctttttggtctttagaaac

SEQ ID NO: 307076 - DNA, 412 bp, Homo Sapiens
gggatctattattctaataaattaattgattaacttacaggtgaacaataacacatatatctgtttcataccacattgtgtgtcaaaatacactattagcacctcaagggaaatcacagtcatgtctttattacatacaacaatgaccccaccagacaagaggtgtgcaaggaatagaggaaaaaacacattactgttactgccctacatagagctttcaatataaagagaactgaagagttagcacagaatatacatacaccagtgtatatcaagtatactaatgaattatgctatggaggaagataacagggaacaaagtgctgggacaaagcacaccagcagataggacctaacactgagaactaggaagatggtaacaaagaaggcttctctgaagaaggagcatttc

SEQ ID NO: 307077 - DNA, 751 bp, Homo Sapiens
  misc_feature (88)..(88): n is a, c, g, or t
  misc_feature (96)..(96): n is a, c, g, or t
  misc_feature (242)..(242): n is a, c, g, or t
  misc_feature (414)..(414): n is a, c, g, or t
acttttaaaaacaaggaatacatatttatttatacataagaatcaccaattatatactaatagactttgaaatactagtaaagcttanaagcatanagatgacacattatgggtgaataaataatacagacaatctatatactaggagaaagctgtaagcgttttaattggaaataagcatactgagataatgaaaaaagcagagaagacaaatgacgttaagacaatacaaagtgttgagnaacctcctgtaccactggggattttaattataacatctactcacaagagataaagcaatacaatcctgtagactccagatgagtacacccttgatgaacgagtacagagactttccatagagtctctagaagatgagcccggatatacatcatggtcaaattcagctcgagnaacactcactcagatgagggtgttaacgacggagcccaagccctacatcgattagaagagcaattccgcgaggtaagcagatatgaacctcatgcacttaactatagaccgcagagcatcttctgggctaccagatgtttccgattatataccctgatcaatatcctatcggaatttcacttaggttacatccagctcatgaacacggtgatttcggatacgggaccggaatcgtatgagaatcccctcatcggcccccatttcattccccagactcatacgggtcctgggaatccggtccccggaagcttgtccggtaataaccttctcccgccca

SEQ ID NO: 307078 - DNA, 339 bp, Homo Sapiens
atgagccaccgtgctcagcctcaagatgcatttcttaagtaagatttgagagttgaaattactccttgatccatgggctgcagaacagatgttaacattaatcttactcatctccatgagacctctttggtgactaagcacattctcaatgagcagtaatattttgaaagaaatctttttttctgagctgtagatctcaatagtgggcttaaaatattcagtaaaacatactgtaaacagatatgctactatacaggctttcctgtttcaatgatcagcacacagtagatttttgcatacttcttaagggcactaggattttcagaatggtaaatgagg

SEQ ID NO: 307079 - DNA, 449 bp, Homo Sapiens
  misc_feature (410)..(410): n is a, c, g, or t
ggtctatcttccctactattgatagggacatgggcacagagaaatacctaattagaataggaaaacaacagtgcaagtgtcctgataaagggcaagtgacctcagctggtaagtggtaaatgatttgagtgtcagggaaactattatacaagcagttgtggaaactgtagcgcactggatagccatgcctcatctaacaaggcagctactatctcagccctagttcattgatgccctgtagaaatgttggacaagtagtatcagatattccaccactcagtaatccagattctgagtaatccagaatatctgatactgcttgtacaatctcctgatttggagcccaagtttttagtcattctgtgggccaaactatatacatctgcagaccagatgtggcccatggctgnctgggctataacccctgatctaaatgctgcctggatttt

SEQ ID NO: 307080 - DNA, 280 bp, Homo Sapiens
  misc_feature (180)..(180): n is a, c, g, or t
tgatgagcatccgctccacttaataccatgtaatccagggctaaaatgggactatttcacagaatcttgctacccatagatcagcacaaagcggccaggagaatgggaggaacgatctgagagccaagctacgatagtgcataaacaggtggaataggaggtacagacagagaccatagngagacaaggaattccctatggcatcaggatacatggctgcattagcaattcacatggataactcaacgacgtatactggttgaataactgtactccagcc

SEQ ID NO: 307081 - DNA, 330 bp, Homo Sapiens
ttttcccagactaacaccaacattctttatatataatgagagggaatcatacctcacatggtggtccaggccccagaagcagcactgcagttagaggcgaaagcacaagtgtacagagtgggcacagatccttccataagagatacagctccacagaccagcaggaaatctccactcccgagggcccctactagtaatccagacagcgatctctgatgacagagaggtaattgccctaaaccctacagcatgacgacatgccgacaactgatgctactggagatcccaagagcacactccaggtaaaactggcacgggcatcactgagaa

SEQ ID NO: 307082 - DNA, 133 bp, Homo Sapiens
ggatgcatcccaacatcattccagccatgaataccagtttaggccctggagatcgtgattgggagtcacctaccagatcccattccgtcacgatggtggatgagaaggagattccgtcataaacccggccttc

SEQ ID NO: 307083 - DNA, 403 bp, Homo Sapiens
gatcagactacagaaatgtatttaaacaaccacgccctgtgccaaaattacatactcaacatctagctaggttgttaccatttgcctatagatagacaagtaccatttatcccattttatacatcccacagattttgaggttcaccagaatgtcccataattacacctctgactaagtgagcattcaattcagagactatattttacaacctatgaaagcttatgcattagggtgacttatctgcgaccagagctagagccaacatagctgagtcaattatcccacccagattacacaggtcgcattagtgagctttataccaggtagcaggaacagttactgctacaccacagacttcttactgagagccaaacttcatggaccacatttatcaagccaatg

SEQ ID NO: 307084 - DNA, 160 bp, Homo Sapiens
gtgactccttctcgggtcgggtctacgcaaaattttaggcatacaaacgggcagttttctcacaaagattcactacccccaggatacgccggaactggggatgcgtcatgacgccggggaaccaggggttggtctgagaaaaggcttcgcgaacacaggg

SEQ ID NO: 307085 - DNA, 181 bp, Homo Sapiens
cgagttagataagggagaggggcctgtgatatatatgatatgacgacagggtgctggtagcgtcgcgagcattgctgaaatcagaggggccattcatgctatagggcggttagatagagggcaataccttgttagatccgtgtgcgttcaggctccggatatcgaactgagtatgcctctg

SEQ ID NO: 307086 - DNA, 459 bp, Homo Sapiens
aagtgtgagctgatcatcatttcccctgaagaatcggtacacctaagagtgggcaaaaaaaatgaaataagggctagcattttcccttattgtctcttaaagacagtagtgagatcagccatcccttgggtttacttaacttttctactatgttatctgcaagggaaggaatctttttgattaaatgtttatttctaacacaagaacaccttatctgctcatttaatcctttataataacaattccttaccagtgttttgtggtttccattttataaagcactttagaatgttctccccactagcacctacagtctacctggatcaaaacccagaccagctccatggcaggtagcattacgttctctggtgagtccccagtgatctctggacaccactgggaaccactcagtagctgaccagtggatttgatcttaaggggcctccaggcttgctattt

SEQ ID NO: 307087 - DNA, 526 bp, Homo Sapiens
ctgagcggggaacatgggcggctaattacttgatccagcagagagcataacccatctcttcttgtgaggatggggttttattattcacatagagaattaaagcttggcacacccaatccccatctgagccaatcttaggccaaaagaccgaagcactactaacggggtctttgggccagataaaacagcaatactttatcattttttgtttttccttatagtttgggggttatttccccaagcctgtaacatccttcccagtgaattatctgtgggaatgttggagggggccacgttggctccctccttcctttgttccctaggcctagaatttttgcttcccattttcagctggtcctcatgtctgagttttcctgtgtactcaacccccttattggaggtttcttttacaccctgtgagtcaactgctttgtctgtctccagctgtttccctcgcgggataatggaaccacagactgggactccacacttgctttgtatctaggatacatctcagacacacata

SEQ ID NO: 307088 - DNA, 404 bp, Homo Sapiens
tgacactgctgcccagcccaaatttgcttttgagggctcatgactgccacacggggcccatccctgcagaacatgttcactgcctaagctgtcatgggttggcaatgactgcatcaggtccaaggcttctttttgtctccatgaagttcttttccaaagtcttattggaccagtgacagtctgccccatttcaagagatttctaggaatgaaggctcctgaatcctgtcttttctacatttcctgtgttgggcaaagactttattaagatgctcccatcctgcatccttgtacctgtggatcaagctcaggatcaggggcttctgagagtatcagagctcagacatttgggataacgactgtgttccaggcaccctgtatttagaaatctgacaaagagtgatg

SEQ ID NO: 307089 - DNA, 351 bp, Homo Sapiens
  misc_feature (157)..(204): n is a, c, g, or t
  misc_feature (252)..(302): n is a, c, g, or t
ggcgtacaggaaactcgtaatagcagctgccactggggatgcacacttggagaacaggggagtgagaatctgacttttcactcttcctgggtgcatgtactgccaacccagaacaagtcatgggacataaactatccaacagaatttcattaaaaannnnnnnnnnnnnnnnnnnnnnnnnnnnnnnnnnnnnnnnnnnnnnnntaactagatgagtaaagtgaggctgtccattggaatcatctgtcttgnnnnnnnnnnnnnnnnnnnnnnnnnnnnnnnnnnnnnnnnnnnnnnnnnnntagggaagttgggaacctgcaatgtaaccatttcctcagtagattttgg

SEQ ID NO: 307090 - DNA, 531 bp, Homo Sapiens
  misc_feature (203)..(244): n is a, c, g, or t
cggttcttcctaagactgaccttgctgatgcaagggggaagtgacatcccttagaggccagcacatcgtctcccagtccaggcgggtcttccacccagactctgggcaccctgagctctcttgataatcttcagattttattgtgataacaccttctttttcccccttttgtttcccaccctgtcgttaaccttctgcttaannnnnnnnnnnnnnnnnnnnnnnnnnnnnnnnnnnnnnnnnnaagccagaaacttttccaacatacaaagccatttaaaaacacacaggtagaaagcaagagataactataaagtagattccatgcttcctggcttctgcatggggcaggaactgaggagggcatcaaaaaaacatggttcaacaatataagctgcattgctgtttaagtgcctggaaacagcagtgcccattgaagagtactgaacgtggaatcaatactcaataaggagattcaggttctagggctttgttttaaatattttttctgccagattcaaaaattaactc

SEQ ID NO: 307091 - DNA, 446 bp, Homo Sapiens
atatatactatttgtcctttcttgctctgtctggtaaatgggtaaacagtgctttctgagtatgaattaaaaataaacacctgtcctgactcagggctgctaacttggctttaaaatcctatgagggtttttattatttctaatggagactgtttggatgaggcaggaaagaggaaaggtagcccatcaaaaaagtacattttccaattctatttggaatttcagtacaatacttgattattaggctcaaacaggttaactgtacctgatcctatgggtgtggcaaagaaacaaaatccaaattttggctgaaacagaagcaagataatagtaaaaagatactaatataataagagagccagccaaacagctgaggatacctcactaccacccgcattgataatcaaaagaaatacgctctagtcctaatgcctcttcagtaggaa

SEQ ID NO: 307092 - DNA, 377 bp, Homo Sapiens
ttttaacagttaaagataggtttattttggagactaaacctgagaagggcttctggctgagttaggtcagaggcactctcttttaccgactaagagtttttaaggattcagggcggtacagcttatcacaggctcagaatgtttctgtgtctctttgtcttgcttacctgggagggagagttttgtgtctaatcccatacatcttcctgcagctgcaggcataccccctgagtctgcttttagcttccctatcttagtgtacctaaaggggaaggaatgtgtttattagggcccactgttttactggggcccattgtatgagtgtgaaatttggtggttacccaggagacttttccccctcagacatccctttatgc

SEQ ID NO: 307093 - DNA, 127 bp, Homo Sapiens
tttaactgctgcgatttttctattcagagttgtcaggtctcctaagacttctcttggtggtgacagtttctcagaagtgtatgcattcttaatttacatagaaggtactgttttatagcccattctg

SEQ ID NO: 307094 - DNA, 399 bp, Homo Sapiens
aaccactaaaagataattgacagtttaaagcataaggaaaacaatgtatttggtggttatgtaacatcagtggagtccattctcacactgctataaagaatactacctgagacagggtcattataaggaacaaggtttaattgactcacagttctgcaggtttaacaggaagcatggctaggaggcctcaggaaacttacaatcatggtggaaggggaagcaggcaccttcttaacaaggcggcaggagtgtcagcgtgaaccagaaagtgcctcatttaaaaccatcagctcttgtgagaactccctcactatcatgagaacagcatggggaaaactgccccccagtccaatcatatatatatccaatatatatgatttgatcatatgtgtgtgtgtg

SEQ ID NO: 307095 - DNA, 329 bp, Homo Sapiens
atgcccataataaaggtagtgatttttattagagggttttttttgacatttattcttttatgatctatgtaaaggagaaggtgaaaatatgtataatttaagtctgaaaaatttgtagtgaaacttgatccataaataatccaaaaactcttggaggaaaaagcaaatttaaggagcagagcaatgaaggttgtcacttttgtttaaagggtcacaagcagaaaaacgttgcctatttggcctgattgtgaacctcagatgtgctcttggtgcagcccaggaatcacagttggttttacccactcactcactgtcgctcgcttaagcta

SEQ ID NO: 307096 - DNA, 479 bp, Homo Sapiens
  misc_feature (287)..(329): n is a, c, g, or t
ggcttaaacaacaagtgtttatttctcacagttctggaggctatagacatccaagatgaaggcgctggcaaatgtggtgtgtggcaagggcagcttcctcagagaccatcttctcaccataacctcacatggtggaaagggcgtgagagctctctggggctccaccctcataaccccatcacctcccaaaggccccacgtcctaacactaccatagtgggggtgagcctttcaacacaggaatttgggggggacacaaacattcagtctctaataacagccgtctannnnnnnnnnnnnnnnnnnnnnnnnnnnnnnnnnnnnnnnnnngttgtgtcaggatatgtctgaccctcacagacctagggaggggccaaccggaaggcaccaaagatccacatgatcctctttgatgtcttcatggaatggcatgtgtggattcaatgcagctcatttatgtgcgtgtcttaatagctaatg

SEQ ID NO: 307097 - DNA, 150 bp, Homo Sapiens
agaaactgatggtgattccagattatgcaaggagagggaaagcaacattgtctaaagtgagtttctcagctttggtgagtccagttgctggacctgattagaaattgcccaggaaccggagggttctcatattgcagtgttgtctcaata

SEQ ID NO: 307098 - DNA, 107 bp, Homo Sapiens
caaaaaatgggatatttatttctatttaggataataattttcttcacatatctgcttcacttttcttgttttacagtaaatcgatgtacgtccataataaaaatata

SEQ ID NO: 307099 - DNA, 243 bp, Homo Sapiens
acgttgtatctgacagtggcactgactgatttgataaagcgttaagtaaacaacggcctaactacactccctgttgcctcaggccactggctttgacatgtctggaggccatatgcactgggtttcatgccctgccctcgataccctgtaggctgattgggcaacattctgacattctgcccttgaggcggttgcacgccacaacttggtcgcatccacggtggctaacggctgtgtctgatt

SEQ ID NO: 307100 - DNA, 481 bp, Homo Sapiens
  misc_feature (90)..(161): n is a, c, g, or t
ggtgcacatgatcctataaccttgatgtatatattttaggcaaacactgctcacagaaagcccatattctctctattccacctccacagnnnnnnnnnnnnnnnnnnnnnnnnnnnnnnnnnnnnnnnnnnnnnnnnnnnnnnnnnnnnnnnnnnnnnnnncgatggatggatagaggctgctgggtccttaggaaagagagcagatgagatttattttttatttttgtccctatcccctctttggtcctttggagggattttagtcaggatgggtctggtgcaaccaggtgatccaagggttacaggcacagaggaaagtaactggagctccctttgggtaccacagtaaacactggtgatggaatgccattgtcttatcttctgagaagtagcaggaggcttccagattcttgtgtttcatcaactggctccaatcattaagctaaatactcagcttatgcaatgcacttgcccagctg

SEQ ID NO: 307101 - DNA, 501 bp, Homo Sapiens
  misc_feature (285)..(311): n is a, c, g, or t
attggatacaaatgactaagattgatattgtgactcatgtttataatccataaccacagattctgaaatcttagagctaaaagagattgaccaatacaattctctcttttctactcatttgatgataaagaaactaaggtccagagagggcccacttccaggtctatagaactgggaattgggtgcttagaaatttgcagttctgatagtcaccaggtgattaagttctggaagggcaggaactatctgtcttgttctccactgcattactggccagattttttnnnnnnnnnnnnnnnnnnnnnnnnnnncaaataatctccctccaacgtcatgcagcctgggaccagggaagtatccttactccttgcctggaggtaggggcagataagactgaagccacagactgcttctggcccctaaagggatggtgctctctagctggggagacagaacagagccaggaacaaattctcaagtgttggtggtgccagcagctct

SEQ ID NO: 307102 - DNA, 465 bp, Homo Sapiens
actgtcattttattagaagattggccccgggaaagtattggttaggctttctaacgatatatgtttgttcatggccaactagagcaggaaagtgaaaacagcatgatgaaaaatgcccctctaatcagggctccattttctaaaccatatcattaaggaatggccagttctacggtcattcatgctccaggagaaggaagttatgtctgctttgtccctgagtggctaggatgaatggcagcaagagtgaatcttctttctttccaaatgggttgactgagttagttgccattggctgcagaataggaaaagcttgcaaaatcccccaaatagatgattcctggcagacatggggtgtgtccggggtatttacagctgtaaattctggtaaatattttttgctgtctgtgtccaaagtctcaggatttagcttgagttcggttcagtcccactaaaagtaaattc

SEQ ID NO: 307103 - DNA, 446 bp, Homo Sapiens
ataatggcaaaaatgacataggtcatataacatctgttttcctggcacaaccagacagaaggttgaattggaataaggaaaaattcattccgtgggcatcctaaacataccacattctattttcaaggtatgtggcaatacagattacttactttttctctataaataaacttgagagacaggcttagaattaatacttccaataaggttatatataaaggacaaaaaaaccaaagtgattcctcaaaaaaactccaaaccagcatttggccaacaaattgtcatgtggtgttacatgctggattataaaagtatactgtacaaccatctttaatttttcaaattttcttaccatgtatagaggctatatcatagtttatggactgaacaagtaaatttaagtactctgttaatgtgcaaatgactttggaatccaaaagtcagtt

SEQ ID NO: 307104 - DNA, 388 bp, Homo Sapiens
  misc_feature (136)..(299): n is a, c, g, or t
tcactctgtcactcagggtggagtacagttgtgtaagcacagctcattgaagccttgaactcctggagtgaagggatcctcttgcctcagactcctgagtaactgagaaccacaggtgcacagcacatgcccagcnnnnnnnnnnnnnnnnnnnnnnnnnnnnnnnnnnnnnnnnnnnnnnnnnnnnnnnnnnnnnnnnnnnnnnnnnnnnnnnnnnnnnnnnnnnnnnnnnnnnnnnnnnnnnnnnnnnnnnnnnnnnnnnnnnnnnnnnnnnnnnnnnnnnnnnnnnnnnnnnnnnntagtagttactggggtctctcgccatcttgcccaggcttgtctcaaattcctggtcttaagtgtttctcctgccacggcctcttgaagt

SEQ ID NO: 307105 - DNA, 480 bp, Homo Sapiens
ctacattactgcccttccttgggcatatatgagttctcactcttattagttgacatttttatttcaaaattgaaaaaccacttctggttccttagaattttctctctagccctttcatagcagatctctaagtctgacagttcctttcccaggctgtcagaaagaaactgaaagaagctgcagagtgtggaaaatgttcacggctacaaacccaaaactagaaatcactagggccacctctgtctcgtagcccccgtcctgtgacctcagggctaaggccttggggcaagggggcaatcctctcttctgccgaggccctggggtcagccaagttcaggcagatctttccacgtatatacttactgagccacaacgtgcagtaggaaggaagacaataaaacagctcataggtcagcccaggccttccccagctcagtgggcatttcacaggggcttccagggagcccaacccattgtgat

SEQ ID NO: 307106 - DNA, 292 bp, Homo Sapiens
cctgctaagaaaactcaaagtaacaaatgattccaacccaaaggattttgagacccctttactccttataaaaactctgtgttaccaactaggattttatggatacatataaacaacttatgctattcttacttttaaagcactcactttcaaggcatttagaatctaaaaggatgaaatcaacttcaaaatgtaagtcataagtatgttcgtcccatagaaaacactgaacacactttaaatgaaagattaaacaataggcttacttatattacaaaggctgatcagggag

SEQ ID NO: 307107 - DNA, 259 bp, Homo Sapiens
ccaaaaaggtagatctcacaaaattatcgcataacctgtgatttctctgctctgccccagtgaaggctcaaggtcggctgatggccagcgttcaataactcccagagtggtggcacactagggtcctgaacattggggcacacggtctgcactcctgatccatagggtgtgcgtgcaccagtgcttggggcataaaaggggaatcagacgagcctgaggacttcccaaattcacaaacttcaccacagcctacaacttc

SEQ ID NO: 307108 - DNA, 352 bp, Homo Sapiens
tggctaacgataaccgggaaaacctcacccgagggccgttaatgcacaagcttttccagcaacgccgaacaattgtctggttcaaaggcattaaccagaatgggaatcaccgccggccgcggggtcaaaggaaaacccggttgggcggaaggggccgggttgggaaccctcccccgctggttcaaaagggaatccccgttttgttgaaaagcccaggttgcggttcaagttcaacctcggctttttgggccaggcgaataatttcccgggtaaagctggcggggtccattccaaagcccttacttaaggtggccttcaagtttttgggcggtcaaaataaaaggagaacagg

SEQ ID NO: 307109 - DNA, 107 bp, Homo Sapiens
tcaggattttcatgtcataactggtttcttgataacagcaatgtcacatgcctgaaaaaagtaagcacttggtcattcagagaagattacccaatttttggtttccc

SEQ ID NO: 307110 - DNA, 366 bp, Homo Sapiens
actttgcccaccctaaatatagtatctttaattttgcctccgggcctgcaaaaattaaaacatctgctacctggccttttacagaaaaagaatgccagccactgaactatataattacttacagaataaaaacaaattaaggttgaaagagaatattgcgtgtaatgaatagtctgacatgatagatatgatacagatatgatgatgtcggggggtgatgaggacagcatacatgaaacaatttatgcaactattctcagcaatcacattggttatggtattattagtattgctattctgagactactgtgtaatatacgagaaaacaagcgagtaattaataatgaggatattctagttcattat

SEQ ID NO: 307111 - DNA, 411 bp, Homo Sapiens
aaaagggacatatttattatgaagacacaaaaaccatcacatacaaagtacaatactataacatcctgaaatacatatacacacatactgtacataaatttatattatcaatataaaaatacatcattaacatttctaaggatgacaaatactaaaccaataaatattgcaattctaaaacatctacttacattaagtgctggtgaataggatgacggtaaaagaaagaggacaaagcggaccagaaaaccaaccacctggcttccagttacagacttgagttggtttgggggaggtatcccaatcaatttccccaaacactgaaaagtgcctgatgtcatcaactctcaaaaacagagcaaaggaagaatctgacattatggcactattttttggccacatgcgcgcgcg

SEQ ID NO: 307112 - DNA, 275 bp, Homo Sapiens
atgctgacctcaggtagttatactttgaaaacatccttaaagtgctggctttcttcaaggttcagtcctgggtcctcagctatcttccaatcagtctttcaatctatacattcctatgtgacttgtcattcacaaagcttcacgattatgatctacatattgctaaattccaaatttctaccatcagcccaaatctctcttaactccagatctataaaaccaactgatttagtagacatttgtacttgcttccatagccaaagctcaacctatct

SEQ ID NO: 307113 - DNA, 289 bp, Homo Sapiens
ggatattctaattgcaaatggaagatttattaggacccatagatatgctggtaataaattagaggaaatggcagaagtttgcaaagaatgcagaccagtattctcccagataaggtcagaatatgttaatatctatccaaccaagccttgagtcagttaactgaaacaccaatgtgatcactcagaagtgacattgatctcttctgtcttgtgtttgcaaagcagggacaccagcctgatggttctgggtcttctaatgaacaacgactcagaggttcacttctgtctc

SEQ ID NO: 307114 - DNA, 261 bp, Homo Sapiens
gatattttaaaataagctttagtggcttgtctcctctaagcagggctatttcgacaaggcctctttcagtacctgttagaaatcaccaccagattcagagctcaacaatgggagtttgttcattcaatctgatcattattgactaatttgcatttagaatgctgtctccaaccattaattagtcattcctcaaaacaacccaatggaagagaggaacataattatccctgtttagaaatgaaaccaaccaacagtgcgttc

SEQ ID NO: 307115 - DNA, 503 bp, Homo Sapiens
tgacctgaggcatcaattcaggcacagtataactctgaccagtaagcggaacgtaacccaaatgctttccagggctgaggggacatcatgagagttgtggtcatgtacagaagcacagtcccaggggcacaggtggtacccctgtaaacaaagaatttgcaatattagggcacctcaagcaggacatccattaggctgtacaggtgaacagacctcctaccaggggaactcctgcccaagtgtttccagtcccatctgaaaagttcccagagtccttggcttccaagggactgcctgaaggcagtgagtcccaaacagttttgcttgttcaggatacaagttgatccatctcatgagcatggatgacatttgtgggagatcttcatggaaagcatagaagctagacccactctgttgtcagtctgaactcaaagcactcacagcacatggaaaggcagcactgggaattttcttcagcaagaggaggcttcagggatcaagcc

SEQ ID NO: 307116 - DNA, 188 bp, Homo Sapiens
tccacggcaggatcagacgccacggagagccccagagctggtgcgaccgttcttcctgtgatggtgggtataccgcagcgttctggccatggtgcgtctgagagccgcaggcgatgttgggcagatcgcgcagtctgaccctgtgccaaggggatgtgccgatggtcagccacgaatgcactcatgtc

SEQ ID NO: 307117 - DNA, 448 bp, Homo Sapiens
  misc_feature (172)..(211): n is a, c, g, or t
gagattctattcttttttactggttcttttgtcaatccttgagcctgtcccacatgtcctcctcactatggcttcctaaggagcctcctctctggtcccacctctgagggggctgactcctactcacactctggtctcagcctcctttctggcccctggcatgagattcttnnnnnnnnnnnnnnnnnnnnnnnnnnnnnnnnnnnnnnnntgacgacgcacccggcctctttcccagtgatctcagtgctcctcagattccccctgcataacacccagcagcagaaccatatgaaattgaaactattccactattttttatctacaaacacaaatcattatttacctcagtaacagctgcctggctaaagccctgtgagggagggaagacccgtgatttggacatttgcacacatcatgcttccagcccgggacaggagatacgcgt

SEQ ID NO: 307118 - DNA, 411 bp, Homo Sapiens
ggagctcaagcaatactcccaccttcaactccaaaagtgctgcaattacaggcatgagcaccatgccaggctgcgattttctatcttactgaatttatctttctgtaattgttttcactcaatagcatattaaggcattaaattgctgatacaaatgaagatctgatgtaatagttccatcttctattacatttaatgcatgcattcattcattcatggacatttgagtttttgctaaatatttatgctgctataagcattgtgcctaaatttctatagtgtatttatcttaatgtggactttcttctgactgcattatgtgaatgcctaaaatttactggagactgtcatactacttactgtactatgccatactagatttatactacccatagtgaataagaatgccat

SEQ ID NO: 307119 - DNA, 463 bp, Homo Sapiens
ggtgccagagtttctgtctccaaagtttcttctcttcatgggttcaaaattgattgaagattggttgttgtaattaccaaaatcgttgtagttcccaccatctccaaaactgcttccatcatttaagtactaaatccattatagccatccctgctgcccccatatccaccaatacagctgcctccaaagctaccattaccagtgaaatttttccttgatgaccaaagttgttactcccaccaaaaccacctccatgaccaccaccaaagtttccagaaccactctgacctctctggctggctgaagtactaaccatttctttcttcaacatggttttccatacttcatggtagtggctatgtactttacggtatttctgagagacaatcttattcgcagagtcatggctgtgctcaaaggttaaaaaagtaaagctcttctttttgccattgcctcactcagt

SEQ ID NO: 307120 - DNA, 110 bp, Homo Sapiens
ttggcaacccatcgtaaaaaccacataatatcatttattcaatagaatttgatatggggaactaacatgcaaagttcagacaaggaatggtaaaacaactccagacatca

SEQ ID NO: 307121 - DNA, 316 bp, Homo Sapiens
  misc_feature (69)..(209): n is a, c, g, or t
ttgggttcaaagcaatttccgtgactcagtctcccgagtagctgggactacaggtgtgcaccaccacannnnnnnnnnnnnnnnnnnnnnnnnnnnnnnnnnnnnnnnnnnnnnnnnnnnnnnnnnnnnnnnnnnnnnnnnnnnnnnnnnnnnnnnnnnnnnnnnnnnnnnnnnnnnnnnnnnnnnnnnnnnnnnnnnnnnnnnnnnnnccacacttggctaatttcttaagaatttttcatagagatgagttctggctatgttgcccaggctagtctggaactcctggactcaggtaatccttccaccttggcct

SEQ ID NO: 307122 - DNA, 337 bp, Homo Sapiens
ccacttttaattttgatggtaataataatggacatttataaacaccttatgcaacataatgaattcttcaagttgtttttagtcctactaacaatgttttcttttttatggatgaggcaactgaagtcaagatattaagtaacttgcccaaatttaaaacacctaataagtggcagggcatggttctgaactgaatgcaagtcattctaaagcccttgctccttccttcagacttctagagatggaaatgtttgctaatgattttttaaagtaactaagagaggagtgagcactggtacagaagaatatttatcatgagattcaattttcttgtacc

SEQ ID NO: 307123 - DNA, 391 bp, Homo Sapiens
gctgaatctggagaaggtcaattgtcggtaggaaatacttatgggagcagtctatggtatggtcctagccaatcacttgtacgtatatactacttcattcaggttccccatagctgtcattaaagggagacttctcattgctgattatattgactctttcttctcccagatttttcctctttatggtctcttaggcaagtaaacttatcatgaaaatttctgaagagctttgtgtattattcagtcactaggtgaacagtctatccttaactataatttatcgattattattctctatggcttttgaatccctaaatgcagggagagaaaattaatctgacattttgctacttttcatgcttagttctttacaaccctatttggtaagaat

SEQ ID NO: 307124 - DNA, 441 bp, Homo Sapiens
  misc_feature (179)..(285): n is a, c, g, or t
cctctcaagcgtttcaggggattttgttttgttttgagacagggccttactcctgtcgccaaggctggagtgcagtggccaatcacagcccactgcagcctcaacctcctaggcacaagcgatccttccagctcaacctcctaagtagctgggacctcacacgtgcacaaccatatatnnnnnnnnnnnnnnnnnnnnnnnnnnnnnnnnnnnnnnnnnnnnnnnnnnnnnnnnnnnnnnnnnnnnnnnnnnnnnnnnnnnnnnnnnnnnnnnnnnnnnnnnnnncagtggagaagtctgggagggaacccagtgacaagtcattggattaggagagaagcacaagtacaaaagggataaaagtacaaaagataactagattggactccatcttggacgtgaccaagaataatggaaggcatgatgactttggttgggact

SEQ ID NO: 307125 - DNA, 459 bp, Homo Sapiens
ttttcagaaggaagtacattccatttatttagactgtgatagaggttcagtctggcataccagtcacctgattcacgttttcagggtagtcagatggagaccagagcttgattctctgggggtgggtggtttggagaattctgtgagaccttctgccttggctgctagagtagttgttgactgatgtgtagtagccaaataaggtgtcagagacagggtgtggctggctactctgttgtggatgtgcattagtgtggcctctacaggatcagttcagtatggaccctgtcattatttggtgtttcagaaactgcttacccacaagagataaaattctgagaaaagagatcacgttaaccgaaaggtctaaagaaaggtttgtaagtcagaatagcaatttgtagtggtaggtgtatacctgggtcagaatgtagaattttttgagcaaaccagggattc

SEQ ID NO: 307126 - DNA, 478 bp, Homo Sapiens
  misc_feature (145)..(156): n is a, c, g, or t
tcttggattgcaatagacctgccgagcatggtcatcaaagccagaaaacaaagtttgattgatttgtctctacataacaacaagtaggagagtacatttacaatacatattccaggaaggtttcatatgcttagcttttaagaannnnnnnnnnnnaaatacccaacatgacatgctgttagcatccatagagatccccattcccagggtggtgtacctatattgccagtgcttcagatgttgggtactaatgacttatcttcacccttttccagaggattgtcctgggctgatgagagtcactttacctgaagatacctgggaagttgtgtctcctctgaggttggcccatggcagtagactgatgcaggacattacagccgggcccactggcctcggtggtacaatttatgctcctgagcaccccatgggattacgctgtgtgtggatttctcctgaaaccacatatttgcctctt

SEQ ID NO: 307127 - DNA, 255 bp, Homo Sapiens
tgtcagcgaaaacatgaaaaatcacatcatatgtgaggcaatactctgggatgctaacctagtctttagtgttcctgtttcctttgataatctacttcagtaaatggaaactaaattgctccattaaatttctaaacactacattaagaagataaacagacaagaaaaaaacctctcagtctgcaagggataaatccaaaaccaaacagtgggacacaatgttctccagaaacaattagacttgactttcacacc

SEQ ID NO: 307128 - DNA, 467 bp, Homo Sapiens
cttcaatagaaaactctccttgtattatttgtttttaagatcatcaacaggtagacatcaatttgctgtgatgtgagtatttattggaatgtaagttatgcctgttatagtctcaaacatcaaaaatttggtagaaattaacacatgtaaaatttataagtttctgaaaagaatattctggctttacattatctgtttagctcctgattcaatctactctgggttcctgccctctgctacccagacctgctctctagaatgggcctaacatggttaagccgtgttcacagatccctcacctttcacttgttactagatgtatctgatggcattagaattgtcctgattatggatattttagtcattttctttgttgatcaaaatgttctgattttgtaaataataaaggttacttgtagaatgcatgtaaatgcacatagaatagaaacaattaaaaaccattatgc

SEQ ID NO: 307129 - DNA, 435 bp, Homo Sapiens
gacaaaatcctgttctctagttgctttttcaaatatggaaatttaagcatgatacaaattacatgaactctctactccccccaaccctggctgctggacctgttgtgatcacatatctgtttctacaagccacagaagaaagtgaccttgttactctgaaaatctcactttcattccaactctaccccattaccaatattctttcatacatatggcaattttgggcctttcttcaaaaatgtgaccaaaggtacaataaaatgaaaggctgaaaaatgactgctttctgcttgctctcctgaactacaatcttcttccatcattttttttctaaaccaaaaggtaccagtctatttggaaaataatcagttttataaaaggtacccttacactattatttttacaatgactacatgtatggcaggagaaattaca

SEQ ID NO: 307130 - DNA, 534 bp, Homo Sapiens
  misc_feature (184)..(196): n is a, c, g, or t
acttaaagtcaataaatttttattcaaggaatttcacatgtcatgattctttccactgcccatcaaggtcaccttagtttctctaaagaactggagtcaaaatttatcttcaaaagatttatctgttagtcctttttaattgaactgatgtttaatccaactgttctgtcagccttgcaataannnnnnnnnnnnngtcttcttttatctccttttaaatatggatatactgataaaagttcaaaattctccaccaagaatctttcagatctaatttcttcaaccaatttgcttcagagtcatttgtagagtaggtgaatctgcctagttctcaatttgacactctctctaaacatgaataagttcaaaccatatccattcctaaacgatcatgctcacagttatctatcttagctgatgcttttggcttccccagtggttttctttagaaagggaagcactttagttaccaagagtgagtggatgtgcaagtcagtaggtagattatggatgcttcacggataattggctcag

SEQ ID NO: 307131 - DNA, 517 bp, Homo Sapiens
ttctatttctgtgaagaatgtcattgatattttgagaggattgcattgaatctgtaaattgctttgggtagtattgccattttaacaatactgattcttccaaaccataagcatggaataccctttcatttttttatgtcctcttcaagttctttcatcagtgtttgatagttttccttgcacatatattgcacatctttggttaattgattcctgggtgttttgtttttaaaaaattaaaagaggctaaaagtgttaacactgctgactgtagtggccccctgagattttccaccatgagtacaactggagcccaggtcagttttccaggagagactagtgtgacctctgccttgtactaaaagcagtcacgcccctcttcctccttgatctagtcatttacatattaagtatgacagaattatactactgagggtattttagaaactataaatgtcttctctcttccctctgatatgagagaaaaaaagaagcaaattatgttttcttcaagctc

SEQ ID NO: 307132 - DNA, 138 bp, Homo Sapiens
ggcgaacctgagccggacttcgctgaagaggccatagcctggaatggcgaaacttcggcctgcattcatccaaaagtccccgactccgcaactttaactggttactctcaggtcatccttgagcagggccttggcttt

SEQ ID NO: 307133 - DNA, 424 bp, Homo Sapiens
taaactcaggatttagattactttctgatacctccaggaacagttaagggatcccatatgtattgtgtctatgttaatgcttcaaagacaggagatctacggtaaacttgagtgattcttggctaaaaactaacctaggaatattatgcctggctggttttcagatgagatgagcactctttaaaatctccacagatctctgttctttttacagataacccaatcagaagagcagaatgtgagtgagcccatgacactgttaaagttaacttacccacatacttctgtaatactggattaggtatttattcttcaccccaaactaggtcagattaagagaacttcattactaatactaatagctctggaaggaaaaatagatcaagatggtcttgatggcattttaatttgcattagaaatatg

SEQ ID NO: 307134 - DNA, 271 bp, Homo Sapiens
gagacggatttcacaatttcagtgacgttaaaattttcccgtgtattttatttttccttcctgagcttacaacttttagtacttttgttaggtcatgttcaaagttacaaaacaacttttattgttaacctactcattattttactaaggcaaattaaaagctgcacagcaaaactctccaagacagatacctagaagagacacgaaataaactctccctttggatttgttttggcaaccaccagagactggtaacagggctgcctccata

SEQ ID NO: 307135 - DNA, 400 bp, Homo Sapiens
agtataagcatgcaatatttgggaccccactctcccactcacacatctacgttaactgactggtatcagacttctgagtctgcaaccttagagaggagaaaccatgtgtcatcctctcttctagaatgcctttcctgaggcctcatgtgagggggacacactcagttctgtgtttgcacaactctgtgcagttgttaaatgcctacaaaactgaaaggagacgcactcacagctctccatgatgcagcccccactgacttctccaccatcttctcctgcaacttgccaccttttgcttgcacccagcagttcccggtgctgttgctcacctcgaggttctggcctttactctaactcctctgggtgaagcactcctctccacctcctcacctgccagctc

SEQ ID NO: 307136 - DNA, 403 bp, Homo Sapiens
  misc_feature (146)..(165): n is a, c, g, or t
cactgtttgaaattcgtgccaaaagtttcctgccgggatagactcggacatactaacatcgctattcttattcaaagggagggcttaatatcctctttacggtttggtgaatttgaggctgaaattgtaaattccctaggaaggannnnnnnnnnnnnnnnnnnncgcagaagacattggtagtgtttggccagtgtacttgtaacacacctcataaataccctgttgtcacgacacagcatgattcaacctttgatctgattaaatttgagggacacacgaagactacttgtcctcctcctacttacaaaaatgagtgtctaatagactatgtatgaatgtttctgcttcgagctcttgcaagtcccagcttttataggatctttaggtcataaacgcggct

SEQ ID NO: 307137 - DNA, 268 bp, Homo Sapiens
attacatctttttttattatcttcttggcattaggccctggtgattaaaagatgaactgtacatagtcttcaccctctgagttttgagccaagtgagatgtatgccaaccagttattacagctaaggggtagcccagcacagaagtaaatgcagtgagctgcttattgtctggagaggtcaaggaaggtgttttggaaataacgtgcttgaggctgcctcatattttaaccgttgataaagaggaaaagtaggtgaaatatctttaag

SEQ ID NO: 307138 - DNA, 169 bp, Homo Sapiens
aagcctgggcgcgccgagccaagaaaccttaattcccccgggaaaccaaacaaggcagatcggcctaattacaggggggaaaccaaattttttgggtttgggaaccaaaaaacagggcccctttggattggtggaaaacctggaaaaaagccccggagggaaaggaaaa

SEQ ID NO: 307139 - DNA, 408 bp, Homo Sapiens
  misc_feature (230)..(240): n is a, c, g, or t
aagtttaaaaggtcttttacttcagtccagttggtaactaaaaaataataatacattttttttacatccttcttccataatattgtgtagcctcttacatctacggaatcaaaagggatccttcccaaggttcattctagcaaaggaaaacgtttctttccaccatacaccctgcgacacgtgtcttaatccactcctgctcaactggctcccagtggatccctagggannnnnnnnnnnggagccaacgtgggtcagaaaaaggaagagggtgggtcagccacaggttttcagcggactgggctggcggtcgaaattccccttacttccccacgtaggtaaaagctaacgctgcggcgaggagccgggtcggggcgtctccgctgaagggcccgggcctcctgcacg

SEQ ID NO: 307140 - DNA, 422 bp, Homo Sapiens
cacattggttatagggcaagtatggggtagctaagtttatcttttacctatagatggcaaaatcttaagaagtcatatccagacctgagcaagaattgcccatcaccaagggaccctggactgaggactcaataaagcaactggatgtaattctgttttatctccccttggagaataggtgaatgtggtttttgttgggtctatgattattgcattgtcaggcaggcacatttttgaaattgtatgtttgtcaagaaaagtataggtggatgcaataaagggtgggatatagtgggtgcatttcatttatctgcccatcatctcttccttagggacccatttctccccttccacacagtcctgatgaagttgtcaattatggtggcctactcttctatcctagtggtgggcatgtgtccaag

SEQ ID NO: 307141 - DNA, 420 bp, Homo Sapiens
atgcactcaaagattttattttgaagccggctactttcatacactcggagacttcattatggggtttgcctttatgcactaatgagtaaaatacatgggataaatcagtagcacctgtgataaaagagtctgcgcaccacagcaaatcagttaactcctgttcacaattgaggagtataagaaaaagctgtatcctttgcctcactgtgatccattgaatcatcattctgcctagttttctgggaaatgtctaagactatttggctagtctagtaaatggtaatttacagccctgtgcttttgctgaagtcagtatcaggcaaaccaagagatccccaatgaacacatatcataaatgacagcgaaataattttttaaaacaaatatgcattactttaaatgcttacatttaggaaactc

SEQ ID NO: 307142 - DNA, 404 bp, Homo Sapiens
  misc_feature (237)..(255): n is a, c, g, or t
tgtgatatgttctcaaatccaagtaaagcatctcaaagagacacaaataacataaatcatctctcctacctttaattataatatagtcaggaagtaaaagttaccacacacaaggtcaaatgctatacagtgtggtcctattataatcagtaattcagagaagaaagttaattattatggtaaaaattaaagctgcatactttggaaagtgttttacattttttcttgccaaaaacnnnnnnnnnnnnnnnnnnncagaaattaaggaacaaatgtaaacttgtcagtagctttgctttgagattcagcaattttaactttttaaagaaaggcagtagctgtactgtgttagatgatgaattatagatctaatagggcaatctgcttaaaaccttaaatatatt

SEQ ID NO: 307143 - DNA, 418 bp, Homo Sapiens
atacaatgagcctgtgtttagcaacactcagcttcgttttattattgcgttttatgaagttgccaagacaactgaggccaagtaacagaaccttgactttatgcgccatgaaaatttaataaagaattttgaaaggctttttagaggcaggagctgcagtctcttaaaggcagactcagcacagagcggagggggctggagcacgtggggcctctcaccagacctccaggagcctccgctgtcaggggcgtggaggtgggcagacgtatttcctggcatccgtcttgtttccgcacgtcgagacccttccttttctcgacagacatgtattaagacacttcccaggtggcaagtcccgcacccggttctttacatacattacgacgtgatccccactatctaggcaaggagcagggat

SEQ ID NO: 307144 - DNA, 467 bp, Homo Sapiens
  misc_feature (190)..(207): n is a, c, g, or t
gccatagttatcctcagtgtattacagccttcatgaatctgcagaacagtttgtctctctggtgggcgatggtttactagagcaatgcctgtttgattctttgtgttgtgcctctttgcataatcttgttcctttcctagtagtattttgtgggttacttgttactgaaagcttcttagcttggtggcannnnnnnnnnnnnnnnnnatacagtctgatgttctgattaagtctaagtcaaacactgtgttcctgaatctcaggagggcagcactctcggttctgttgaccactcccgactgcagttttgggctcagggccctcctccaggcataagattctctcccacttctcatctaccccctgaatgttcaccaatggggccaacagagatacccttctccccagagattaaagcgtttttccatagaagaggcagaggggaagaatcacagcagtttcttgac

SEQ ID NO: 307145 - DNA, 222 bp, Homo Sapiens
  misc_feature (83)..(144): n is a, c, g, or t
gtgtgtgccatcatgcccaactaatttgtaaattttttttatagagataagtctccctatgttgcccaggctaaacttgaacnnnnnnnnnnnnnnnnnnnnnnnnnnnnnnnnnnnnnnnnnnnnnnnnnnnnnnnnnnnnnngtatgagcaccatgctcagctatttatataatttcagattaattttgtcccagccattcctctagaaaacaaaatatg

SEQ ID NO: 307146 - DNA, 500 bp, Homo Sapiens
  misc_feature (110)..(110): n is a, c, g, or t
  misc_feature (134)..(191): n is a, c, g, or t
cattctgtatgcacagatttacattcactttcacttattagcataagattaacattataaatggagtctctttattcatccatccttggttatattggactggaagtcangacactagatttctagaattcttnnnnnnnnnnnnnnnnnnnnnnnnnnnnnnnnnnnnnnnnnnnnnnnnnnnnnnnnnnacttaaatcatctgtaagaagagaagtagtctagttcctgggttagggttgattgtaggcagaagtcaagcccctttagctgcatgtgaagaaaggctgggtgggacagggatccagcaagacattacgggtaagtgattgagtcaggtcacattgggtgcaagcatcatttgtatcacaccatcaaagtcactgaacctcatggtgcagggagctttggcttatttgtagtagtactttgtgcgtgaatgcaactatcatgctgacacttgggcaacacactgcattcaactggagcattgtgtcatt

SEQ ID NO: 307147 - DNA, 355 bp, Homo Sapiens
atgcactacagtgcccagtgattaggttttgcttttaaagtacaaaagcaaactcatgtattatacatttatcagggtttagagaacaggataatactactatacagtgacagtgtgggctttctcaaaactggataccaggttaaactaagcttaacttagcttgacagcttaactaagctgtcacattccgttctcatggaatatatataataatagtagaaattattattaatcttgttttgcggaagaggaaactgagattcaagatggctgaagaacttggctgaggtccatgactgtcagtggcagggggctctgctgtcagggctgaatgtgaggcactggttcttaa

SEQ ID NO: 307148 - DNA, 313 bp, Homo Sapiens
  misc_feature (70)..(79): n is a, c, g, or t
  misc_feature (196)..(224): n is a, c, g, or t
ttttatcttttaaaaacatttctttcggaataatttttaaaagttaaacactaaaaggatggtgtcaggnnnnnnnnnnaaatgacagcgtatctctgattcaaagaaaggtgatatcccagaagatcacatcctgtctgtgcacacagaccaaaaagacatagattccagtcaatttgagagaattagtcattgnnnnnnnnnnnnnnnnnnnnnnnnnnnnnagtatacttgagctaatttaagatgtggcagggaggaaaaggttttcatcttcgaaattaagcagcctacacacatccttttttgtttt

SEQ ID NO: 307149 - DNA, 100 bp, Homo Sapiens
aacctgaaagtatcactgtttatttcacatttaaaaaaatcatcggcagaaactaggtagctgtgaaaatagaatagtccactggtagagtttcaattgt

SEQ ID NO: 307150 - DNA, 428 bp, Homo Sapiens
  misc_feature (339)..(339): n is a, c, g, or t
tgttatacagattggaggtttctatgttgcccaggctggcctcgaaagcctagcctcgcctccttatgcaccaggacaacaggcctgatgcaccgtgactcccagaccctgtccttgaaatgcagtcctgtggtcatgaaaaactgcccctgttctcagaagccccacaggaagtaccctgttctcctaatcaccaagaatccccctcccccatcactccagtgacttccactatcccacgaaaccagaacacaccaactgccagcgtcccaccacaccaccttcccagctctttctctagctatcctgaagcaacaattctcagccccacaagcggtngatattgttgaccctattattacatctcccctgtcccttaaccacttcttgctgctcctttccctctcggtcagctcagactcagcagg

SEQ ID NO: 307151 - DNA, 442 bp, Homo Sapiens
  misc_feature (265)..(265): n is a, c, g, or t
ctgtgtttgtatctttaaaaatggttattaaaaccagggttaaagtcccttcctaatcaatcatccctaagacaacaaaagtccagaattctaaaacagctgtttctagatataaaaattcacccacatacaaaatagtgcgcgttttggctacttcagcctcttcccttctctagaaataactcctccttgtacttagtaaaggcacacattcacttcaagagtaggaaaatgtaaatgctctctgctcagcggccgcagctanattattacttcacacagtaagatcagtgtttgctaagtgttatcagccaatgtacagcaccccccaacaccgtcaaacgttgttccagttattttactttaaaagaggatttaaataatgcgacgtgctttccactgagccactaagtaggtgtggacgcacaaccttcaacactaa

SEQ ID NO: 307152 - DNA, 382 bp, Homo Sapiens
aaagcagtattctaagaagtggtatgattatattcaaatacactagttaatattattaattaacgtaggggatattcatatgtatggcaggtacagagatctaaatattgaaagctcttttgtgatcacatatggaatgtagatgtatgattaagcgcatggctatccatggttcatcaaatcaggtagtatattggccaggcaggttcacattcaatcagatagtagtccgatttgctcctggcatctgcacaagatgaggattggtcggaagctgtattcctgtgtcgttaggtcaaatgctgcctgattatgtcaaaggcagggtatggtgcacaggtgctccgattgctttctattcgtaagtcagtgacagctttgg

SEQ ID NO: 307153 - DNA, 137 bp, Homo Sapiens
tttcttttgttaagctattttatgcgtgttgcttagggatgttgctcagtttgtttactgaggagggtgttttgcacgttaggtcttactgtgcatggcaatatatagttgtcgtggcagaagacaccacaggtggc

SEQ ID NO: 307154 - DNA, 385 bp, Homo Sapiens
tcggatgtttatcataatgcaccccagtccagaaagttggtacagaatccgaaaatgcaaagccaaaacaaaaggtctggagtctcagcatccgaagggcaccatatatacgtccaaaggtggaggccaatccaatgcattaccagacagaccttggaagcacagaacagcctagacccagccagagcactcaggaactcacgagacacaaggagtctacacgcctgttctggtgctccgccgtaccaaaagtcgtggagtgatgaaggctttatgatttaccgttgaagtaataatagcagcctggcgcggtagatagccgttattaccatttgaattaccggggttatacggtccaatacaattatgttgtaaagtgttgatt

SEQ ID NO: 307155 - DNA, 303 bp, Homo Sapiens
cacggtgtaataattcgaagactgacttaaaaataaagcaagctgacaaatttggtactagcatgcagtgtcataattaaattgagaatgaaatgtggtcaaggaatcaatatgctttttatcccttaccctataaacaagagtaacttaggataagcaaactgcacttcaaccacacatggtctagctcaattcgccacccaccaccatgcaacactggtaggtgctataaaggacagacacagaactcaacaaattcagctgcgcgcttacactatgcttacggcttatatctcttaaacg

SEQ ID NO: 307156 - DNA, 319 bp, Homo Sapiens
  misc_feature (133)..(152): n is a, c, g, or t
catgctaaatgagaggtagaaataaaatgtaagtcagcaatgaaagaaaatgtatgctttggagaaatccataaaccttattatcaggtcttgattacagatctgtggcaagaataccaaataccggattggnnnnnnnnnnnnnnnnnnnnaaataaatgcatcaaaacttaaatatccaaataaaagctatcctttaacataatcatcttgggaagacatacaggtttctccaatgatgctgccatggctttaaagcatatttagaaggtctcctctgatatggccagcttcaaagatgatatataaaacttggtgc

SEQ ID NO: 307157 - DNA, 223 bp, Homo Sapiens
tcacatagcatgttttcaaggttcatccacattgtatcagtactgtattcctttttatgactggataatattccaccgtatgtacataccacattttgtttaaccattcatctgttgatagacacttgggttggttacaccctttggctaccgtgaataatgatgctacgaacactggcgtacaagtaggttttgagtccttgttgtcaattcttttggctat

SEQ ID NO: 307158 - DNA, 452 bp, Homo Sapiens
  misc_feature (330)..(330): n is a, c, g, or t
tacacttagtttcttgggctgagtgggatttgcgtggctgcagtctgggccccgggcagtcactagcctagaggcttggcagatatgctgccgcaaattgcaagaattacgccttttcacctcctctgctctcctcccggagccggtgcccaccctctttttcacaaaccgcagggctggggagagggacttaacctttggcctacctgcctggctgtttggctctgcgcttgctgtttttggtttctttctcttctactggtctttcctttgtctttgccagccacctatgctgctgttttctcctctgcttccctctcccctagggangggaccggcaggagtggagctactgtttctttccctgagaagaaagaaaaggggagttctgaatatttttcttactactggaggtttgtgtgaggttcaaccccccaacaatagggatttct

SEQ ID NO: 307159 - DNA, 249 bp, Homo Sapiens
tcatttctctttataaccactcaaaagcacgcaaaagaatccatcccacaccagtctttctagtcatctttataaccatagcagtcaagtgtagcagccacttggggccccaaggcacaggcttcagttggcacttcatcaggatcaaccacaggtaattgcttaattgagatgcccagcatgtcatgaattacatttccctttggcaaggagctaagctcaaaacctcaatcaaactgacctttaatc

SEQ ID NO: 307160 - DNA, 364 bp, Homo Sapiens
caaactaaatctacaccccattttacaggtggaaacattgagtgttttggtgactgtaaacaattttctccatggcgactcaactatgcaggcttattacaaatgctgtgcttgtcttctcaagaaatcattccatttagtgaaaacgagagctgttatacaatgagttttgaggctaattttaaagcaagtcatgtgtccctcccattgctctgacccaaatatgagacagggattcaaagttgcacacaaagaaaaccaaaatcaatcaggaggctctatatgaacaatttagtgggttacaggaatgcaagcttcatttttaagccactgcaatgctttatcacttgacatttatttagtg

SEQ ID NO: 307161 - DNA, 143 bp, Homo Sapiens
actctaattgttgaaaaattataaaatacaactaattccccctgtattgattcagccctttctcctccatctggagagtagctgttccccatatcttgaatttaaaatagctttaagtaaaataatctttagatgttggtatg

SEQ ID NO: 307162 - DNA, 434 bp, Homo Sapiens
  misc_feature (51)..(229): n is a, c, g, or t
aacatacatggtctcactatatcacccagtctgtgtttcagtggcacaacnnnnnnnnnnnnnnnnnnnnnnnnnnnnnnnnnnnnnnnnnnnnnnnnnnnnnnnnnnnnnnnnnnnnnnnnnnnnnnnnnnnnnnnnnnnnnnnnnnnnnnnnnnnnnnnnnnnnnnnnnnnnnnnnnnnnnnnnnnnnnnnnnnnnnnnnnnnnnnnnnnnnnnnnnnnnnnnnnnntgtaaaactaaggaaaggccacaaggttaggattatccgcggggagagaattctgctaaaatgtaggtatagttctacaatttcttactgcttgggagtcatgtggctagagatcacaagatttgtgacttctccaactgctcctatagataacatcactattatagaacctaagactggttttctgagagatttttttcagacc

SEQ ID NO: 307163 - DNA, 432 bp, Homo Sapiens
ctctatttcaaactttctcaatctttgcactgtgcatttcttgaaaagctaaagtcttattcaggaaaacaagacattcatatgtacctggataaatgaagtaaaaacaatgctggccatttttaaaaagtaaattgtaatgtcagaatcccaaaataaagacttagatattaataatagccgctgacacttcctgaaatcttactaagtgctaataatgtgctcgatgcattttatgaactgtctcacttagtcttccaataagccaatgagggagatatgattatctttcctgacttaacttttgagaagatgagtcctagagaagagaagtaacccatccaagagcacataagctctgcagttagtaaacagctgtcacaaggtggctagctgcccccaaaagcatgcatgcttcctgttctacactgc

SEQ ID NO: 307164 - DNA, 448 bp, Homo Sapiens
actatatgcattatggacaagtatgccaagttgaaatggcccaccattttaaattccaactttgacaaccattctttatttttcttctggctcagaacttgcagaatcacccaaatgtcagtgataggccaaattgaaacgtattatcaaagctctcaggtccactgaatcatcctaagagactggatagttccctggttctaagagccatcctcagatcaggaagtgccagctgcacccctctctgctcctcaacgtcagccacttgtgattagttgagtgtgaattgggcttcagacctgacctgtgagtgaccagttccatcaacccatccttcatcttagttaaagacccctgttggcctgacctcccaagaagacagtccggtgaagagcctggaacatctaaggcccagctgtcacaaaaaaatgcagggatcttgggggga

SEQ ID NO: 307165 - DNA, 298 bp, Homo Sapiens
ggatggcatacattgagctgcttcatggagatatacagaaaaatcaattgataagcataaaatgcaactcacatttaggaaactgcaaatgataactaattataataagttgctatataaattactttgtgacagtcccagcaatcaatttcaaacacaaatagaccaagcccctggtttgagaggaagatgagtacctaacaactgtgtcaataaaaataatggcaagattgccaacaatagtcaaagtagaaaggttatcatctctaagcaagtttcacagcaaatttcctcttca

SEQ ID NO: 307166 - DNA, 346 bp, Homo Sapiens
  misc_feature (281)..(289): n is a, c, g, or t
aaaaaggcctcccagtccctaaagggggggaaagggacccttatttaaactcatttttagtaaaccccccaaggggggagccaggcccccggggcattaaccaacaggataaaaaaatgggtagacccctaaatcccggggcgggtccaaggccccagggcccctcaacacatacggttaagggaaaaccccaacctcccaacggggtttggggagccccccccgggacgggtcctagctccctcgggggaaaggtgaaaaaaggcgggtttccatttgtnnnnnnnnngggggaaaataaagggccggccccacccggttccctacgggtctgaacctgaggggt

SEQ ID NO: 307167 - DNA, 314 bp, Homo Sapiens
tgggaaaggaaagagcctctccatagagaatccccagttctgccaagcgtttttaatgcggttcaatctcctggccatgtatgtttcgacaattagcatgcacacatttgaaaaacacacagtgtcttttccattttcttcgcttctcttatggagaatgcatccaagagcctatgaagcaactgttgctgatctcaaatcccaaaggacccaccattcactctcaacttttttcataatgcatttcattatagcgtaaccctgacccagttctcctgaaccataaagacaggccacttctttctcatcatgct

SEQ ID NO: 307168 - DNA, 115 bp, Homo Sapiens
cagtgaggatcatgggagagttcattcggcactgagacgtatagtgctattgagttgatctgagggtccaaggatgcggaggacctgggtaagccagccaacggtgcaggaaatt

SEQ ID NO: 307169 - DNA, 429 bp, Homo Sapiens
  misc_feature (68)..(93): n is a, c, g, or t
gttggggccgtggctagcagagctcatggtgaccagtcctgggcctgaccaatgggtgattacatttnnnnnnnnnnnnnnnnnnnnnnnnnntaccaagaacagatcacttgccatggacatcagtaatctattggtaatggtggaaatttcatgaaaatttcccctaaaccataacaaaaactgtcctccttaccccaaaagtgctggaggaaagatggttgcatgacttgacctctctttgaacttgaaatgctaccttcctacccggaaatgcgacacactatacttaaaaggccagatggctgcaggctgtttgcacccctggctctgccagggacacccctctcctggttctaatgctcagacccaggaggcagagtccgcagcccgagggagcttcaaggccgaggggtaggacctgcaggg

SEQ ID NO: 307170 - DNA, 501 bp, Homo Sapiens
ccaatttcaaattggtttctcatttattgccatcattctaaatcaaagcactctacctgttcccaaaggaagtgacagataaagcccttgaactggcaactggaagaactagaagtaggcttttgctcttcggtaggcccagaagattatgaccactgagttgggctggtttcaggccaatgtagaaaggaagcagcaggcctcacactggagtcctccagcacagggagctggtccgctctggatgctgcccataggcggtctttttcagataaaatacatcagtcccctggatttaggtgccccagaatgttctcaaaaactgttcttatatcttattaaagtaaaaattacagtgaaatacagtaaacagatgttaaaggtacaatctaacatgttttaacatatacctcatgtaactaacataccaattaagatatagaattttttaatagcctagagagttatttcagggcctcttccaaacagtccttacttctt

SEQ ID NO: 307171 - DNA, 545 bp, Homo Sapiens
  misc_feature (49)..(49): n is a, c, g, or t
agaaacagggtctcactttgtttttcagcctagctggggccacagggcnatgcaccatgcctagctaatgttttcatttttgtagagatgagatgtcccaatgttgcccaggcaggcttgtctccaactcctgagctcaaggaatctttctgcctcagccccaccaagtgctgagaatacagggatgggccaccatgctcagccttggctactttttaaagggtttgtttttattgttgttgttgttatgagttccttgtaaattctagatattagtaccgtgttggattcttagtttacaaatattttctcccagtcttcaggttgtttgttcactctgttaattatttatttggctatgtggaagtttttcagtttaattatgtcccatttttctgtttttgtttttgttgcctgtgatgttgaagtcttagtcaaaaattctttggctagatcaattgtccagagtttttcctaggttttcttttagtattttttacggtttcaggtcttacatttaggtcttttacccaatttgagttgat

SEQ ID NO: 307172 - DNA, 301 bp, Homo Sapiens
ccacctttctaaagcaggaatcacaaatacaagtccctaaggaccaagcaggcgacacacaggagtaagtaggtgaagtctcagcaggcaaaacacgagggagtggtagggaccatgaccgaccagaaagcacctgccctacctaaaggagtaagagttcattcaatgtggccatttggtccccacaaaggaacatgggtccagtgttcctacgttttctggtctttttaaatatcgaatcacctattttaaaatgaatttgcctgtcattcaaaacacatctgcaagtcaaatttagttt

SEQ ID NO: 307173 - DNA, 337 bp, Homo Sapiens
gcccagcctttattacaattttaaatgtttttctctgtgttagcgaacctttgatggactgttttaaagagtgttaaagagtgtttaaatcactgtgaaaagcacattctgtcttaatatttataattattagggtaccttcattaatagtgtacattgcatagtgccaaacgagatcaccacatcacttctaaaggattcctggaagtctgagtcacaagcatgagacaacagctgcaggactgggtggtgaaggttgtgaaacttcctggctaaacaggaatttgaccaaaacaagaagtcttagggagatagcttagggcttgtctggtggcac

SEQ ID NO: 307174 - DNA, 106 bp, Homo Sapiens
tcttagtttcattagcagacatatctctagcatctgggcgtaagcatttcaggatgaatcacagctcatacttctcgacgaagtcatgttagtccttgtcaacatg

SEQ ID NO: 307175 - DNA, 204 bp, Homo Sapiens
cataggaatggcatccttgggaaaaagctgtgtcgcatcccctataaactggggtcctaatgcttgtgtctcatccacgctgcatgaatcaaggggttaaggggaacaacagagccaggttgagatgaggggtggagggtggtgggctaggctcgctcactccctagactcctacctagatggatgtctaggtagatgatgact

SEQ ID NO: 307176 - DNA, 361 bp, Homo Sapiens
catacttttattcaagattcgtcttcccatgagacactctgggctgtcaggctgtaattagactttctcccaggctgtgtggagtgagagacagagccagattagccccctgtaaacaaatttggtcagttctctcctcaccagccttgttctggttgagcggatttcagcagctcctgggtgaatgttaatgccccccacgtacacagttgcaagaaaaacaataactgtgcatttgtgcctccatttcttgagaacgctctgggtttcacttttcacaggtctttgtgatgtagcactaggcagtggggggtggcatggcagggaagcagtgcaaagagactggaaaaaccttaaggca

SEQ ID NO: 307177 - DNA, 252 bp, Homo Sapiens
tcctgttgagtaccgcagagtgtacctctatcggtgacattacagtataactaccaagtcatcgattgtctttaccagcttggctactgatctctcagacccctcagcatgggtcactgcctccatgcacttctcagtaagaatcttcaactcatcctcacaattgtcttctttaagagagtacttaatacagctgcctcagccctgcaggtctggacatcgtctgatctgcacatcgactctcagcacggg

SEQ ID NO: 307178 - DNA, 426 bp, Homo Sapiens
cggaggggacatgtgcaggattgttacatgggtaaattgcaccttgttgaggttgggtatataaatggtttcatcacccagatagtgagcatagaacccaataggtagttttttgaccttcaccctcttgccgcccttcctgctcaagtaggccccagtgtcttttgttctcctgtttgtgtccatgtgtactcagtgtttagctcccacttatatgtgagaccatttggttctgttcctgcattaacttgcttaagataatggccttcagctgcccccatgtttctgcaaaggacatgattttggtttcttatggctgcaaggtattccatggtatatagggaccatattttcttagccagtccaccgttgatgagtatctaggttgatttcatgtctttgcagtagtgaatagtgctgctatga

SEQ ID NO: 307179 - DNA, 441 bp, Homo Sapiens
ggactttaaaatatttgaggtggctatttattattcatccaagtggaggagtcaagaaggaagttggacacataggcctgcagttgaaggaagagatgaggactaaatctgtatgtcatcagtatacatacgatgtcttagtcactttgtgctgcacaatattacagactgggtaatttataaattatatagatattaattttttcacagctctgaagagggaagaggaagatcagggtgccagcgtggttggcttctagtgagtgcactctgtgccttgcagacagctgccttctcactgcacgctcatgtggcctttcctcggtgtttgccatagagagagctctctcacactctccgtctttttatgaggctacagtcctatagaattagggtgccaccttatgactcctgtagaccttagttatctgccagaaccct

SEQ ID NO: 307180 - DNA, 238 bp, Homo Sapiens
ggcttccgggcctttaaaggggcgggggctgggggcatttcacccaaaggtgcccccgaacctgaggtcaaccttggcggttggctctgcagggacaaggggattgtaaccggcccgtcagctcggggggattcttaaaagcgaaaggaaacccccatggtgttcacccacagtccaaaactgaggagaaccttccctggcccaatccccaaagctttcaacacaggacagggcttgg

SEQ ID NO: 307181 - DNA, 285 bp, Homo Sapiens
tttttttgccattgagttgttggagtttcttatacattttggatactagcccttttatcagatatatggtttgcaaatattctcttcccctctgtaggttgctttttcattctgattatttcccttgctgtgcagacactttttagtttgacgttgtccaacttgtttgttttgcttttgttgcctgtgcttttggtgtcacatctaaaatatcattgctttttccctatgttttttttctaggagttttacagtttcaggtcctgtgtttaagtctttaatcca

SEQ ID NO: 307182 - DNA, 477 bp, Homo Sapiens
gagacaaagcctcactcagatacccaggatggagtgtggtggcacaatcatatctcactgtaaccccgatctggactcaagcaaccctccccgctcagtctccagagtagccgggactacaggtgtgcaccactatgcttggctaatttttttctttgtagtagagacaaggtctcactatattgcccagactcaatttctattcctaccgaaagtacacaggtgtgtttaccacatatttgctaaaactgtgttttaacaatttccataattttgacaaatcttatcagtgaaaaaataaaatactattataattttatttgcaattctttgattactaataaagtcaaagatctctttaggcttatcagccagtctgtattttatttagcctttttctgctgagatattctttgttttctcatagattctaggagttctttgtagattaaggaaaagtcactagaagaattttta

SEQ ID NO: 307183 - DNA, 389 bp, Homo Sapiens
  misc_feature (243)..(243): n is a, c, g, or t
tttttaacagacctaggggaccccgacctacataataatattgttgtgagattgtcctggtgggaagtcagacagatcagccctcgaacagttccaagaagccccactgaaaaggaatcctgattcctaaccaatttaaaacccttaaataatactgaacagtggatgtcatgcgttggaaatatacccatttttgaagaatgctgttccaaaccacgtaatgcttttaaagctgtttatcanaagagctggatgagccacggtggcctgaaacagtttatcagctgttacagggtcgcatgccccatcctaatttccttaagcactccatcattctcggttgtcctagtctcggcagacaacagatgccaatgtttggagacatttgc

SEQ ID NO: 307184 - DNA, 493 bp, Homo Sapiens
gagactgcatagggtcggcgtggggtacaggctgccggctcagggacagaccctccaccatgtcacacacagggtggacggcgctgcacacttccttaggcttcactgggcagctgcctttctaaagggctgtctccttcttgccctgatcctgctgccctctgggagaggcttaggctgcattccagaaggttcccactttctgctgcttctggtccatggatcacatttgaaaaaacacagctttggagtttccaaagcactcgtatacctgctctcatctgacacaagccttgcaacagccaagacgtatgcaagacacaaatgccggccccattttccaggcacggatgttaaggctcaaagaggtcccccacctggtgagtgcagggtggggtggagttgaggtctgctgctcaccactgcccagtgcttccatcacctctccctccttgggcatgacacttcaactccatacatgtgggtgtatgtg

SEQ ID NO: 307185 - DNA, 117 bp, Homo Sapiens
aacaactgtttattgatcactattttatatccatcaccaaacttagtgccaaagagtagaataactatttttagaataaaatgtagcatatatgaattagacaaaatatagcagctt

SEQ ID NO: 307186 - DNA, 313 bp, Homo Sapiens
ttatgtgttgtaaaaggaacaggaaggaacagacatacccagcaggacacaggatttgcagaaaaaactgctggtggccagaataactacaaaacacataccagccataagaagacatcaaagcagcaagagtaaagagtgcagggcagataaactctgcgagcacagcatacttcagaggaccataacagaggccacccaataccaaggatgagcgattgctcagcccttttctagtgcatgggagaaactggggagatggccacagtggggctcttagattgcagatgtgacgtgggtcgaggtttctttc

SEQ ID NO: 307187 - DNA, 216 bp, Homo Sapiens
tgacgaccgcacctgaacttgaagaagatgggcagtgggcactaacctaagtaaaaattgcacaattttgttcaacagacccttctagtttccttgaagtacaaactgctaagataaccgcaaccaagaaatatgaatcttttagagatgtacctaataatatttatgatgctagaatgagatgtacatgagaaaaacagatcatgtattagagag

SEQ ID NO: 307188 - DNA, 472 bp, Homo Sapiens
ctctctattattctataacctcacactgatagagtagataaaggatgaggcaatgcaagtcaacgaatgagaaacaaagatggacgaagaactaaaggaaagtctctgtgtcacttactttactagttacctagcactatttataactcactcattagaattcatacctgcccagaatccaaatgtgaagctgtccagtactctgttctaaaatcaaaacacatcaaatgcccagctttcaattattcctataaaatatatcttaatcactcatatcccttctacctaaccttctgaagtacatgaaaactggcaagagaaaaggaaggaattcttgatatgaatcacactaagtcactgtgagtcacagaaatggccaggtcactcctgcttatctgctaataacagctgcagccacttccaactgaagagcaggagccttcctgcccaccaaacaaagagtggaaacagg

SEQ ID NO: 307189 - DNA, 453 bp, Homo Sapiens
cccctgggagaacatttcaggtttattagacagtttgtctgttaacattattcacttgaaacaaaaccctgggtgtgtgccttttggagaactatgtaaatcaacaaagctatacatagaacagagcgattcgctcagcagccaagttccccacagatagcaggtggacagatcacgccgaggaaaggaagcgcacgctttccttatttttctagcattctaggcttagcagtcaatgcacatcctctatgctgttgttggctattcaaataaatattgacaaaaggtgactaattattacaaggtgttagtttgtatgatcacactgtaagtaatggtggagctcatttctgaaacattagtattatgtgtatttattattttggtcttaattttagaggtaatttagaaatggcatatcaaaaagtaatcaaatatttaaattcatagcta

SEQ ID NO: 307190 - DNA, 452 bp, Homo Sapiens
caactttatgtagttacaaatttcctatagacaaatgttatttaaaacaaaaaacttaaaacactcctatatacagaagtccagcgaacaaaaacacactgcaatagatattgtctgaacctactagaccagttcggttactgtcttccaatgccaaaccatcctttatattctgctgtgatgctgggactcagcaacctgatttctgatttcccagctcgatccataggttctaccaatagcaactgctagagggagacaaggatagagagagaagggacttgttccttcctgtctctttatctgcatcaccccaacagtggtaatgcccaacagcagcagctgaacccaatatccaatttatccaaccctaggagaaccaatctcatcatctccatcagagacactagcaccaggcagctggagcctccttctcagtttgaagtctcgat

SEQ ID NO: 307191 - DNA, 507 bp, Homo Sapiens
  misc_feature (290)..(371): n is a, c, g, or t
ccagttgatattaaccagcctaagcaatggatgaggtttaatgttatctggaagtgggaggaggcgacaggaggagtgagctgccactttcacttcctaagtaagctgctctttggaagcaggggctctgtttccagaaatatggccctacacagagcataagcacatctgactgttaatggcaggagatgggcatcaggaggtaggtagaataagcaggggtgggggtactcactgagcagctggggcagtggttaagaacagggactctgcttcaagtcctgggatannnnnnnnnnnnnnnnnnnnnnnnnnnnnnnnnnnnnnnnnnnnnnnnnnnnnnnnnnnnnnnnnnnnnnnnnnnnnnnnnngcgctgggaagataaaatgagctaaaaacaaacaacaaaaaccctaaactcttagaccagtgtgggacacaggaagtctatgtaaatgctattctcatttagggtctacagatcaggcctgtcatcatttcattta

SEQ ID NO: 307192 - DNA, 473 bp, Homo Sapiens
gcaattagtttatgatccaaaagttaaaaacaaaccagttggattcacccctgtgacaggagacgtatttccactcttcctcatatagggaatactgtgtatatgaaataaaaccaacaatgtccacagtaacatttctaaactaaatatattaaatgtcatactaccatttgctataacatgtctcaacacagaccagtgatataataccaagcacaattcaagtgaaacaatattacaaaaccaggtgctcccaaaatatcaaacagcacagtttaatgtaaaagtaaaaaagaatcccttgtgagtactactattttagtccaactttgttatgaaatgggtagaagccctcaagcagaacaagcactttgccacctcaagagtggagatcttctttgttgctcattaatggcacaagacctaacccctaaggaggtggactgacatcctcttatgaaaagatgctctgc

SEQ ID NO: 307193 - DNA, 247 bp, Homo Sapiens
gagaaaaggcaattgaacgatgctggaagaaatgtttttaaagagaatgtttatcttcagaaagctctggcatatcacctgaaggaaactgacgctctacaaaaaaactcccagaagttgcaagagagtcatactttacttttacatcaaaaggtccctcgcataagacttggtgccttcttactttattaaggattgggttggtaaataccaaaaattgggtataataatgatatataaggacaat

SEQ ID NO: 307194 - DNA, 164 bp, Homo Sapiens
ggcttttccaaaattcccttctttcaccattttgagttgaaaagtcaagataaatatttatgctgtataataacccacctctctgctacagcaaccacaaatgtcacaggttcctaaagcctccaagaatatttgttttacagcaagaagtagttgctttttct

SEQ ID NO: 307195 - DNA, 173 bp, Homo Sapiens
ctaatgataacatctgaacatgcagaaactactgctcctcagcaataaacgggagggaaagtactccgttgctcttacctagcatcatatacacatacaggaactgccatctctcccctctcaacccaacagactcaattcacacattgtaagttcggaaaagcaagtgtttc

SEQ ID NO: 307196 - DNA, 178 bp, Homo Sapiens
ttgggtttattcaaatgtcacctgaaatcaatctacaaccaacaggtaaaagtacaagataaacaggaaataagcaatccttctgcctcagtctcctcaataactggtactataggcatgtgccaccatggcccagctatttttaaattttttgttgagatgagatctcactatgttg

SEQ ID NO: 307197 - DNA, 286 bp, Homo Sapiens
agaaagtcctctcctgatctgaatttatgcattcaaacttgttccttagatttaaccttggctgtttcattttgtagggtagggacttatcctgagacaatggtcttgttaagttggtaaagccattccattacaagtcatcagtactctatccgtgcccttgagtttttcacaacatgagttggttttaattttaaacataacctgaaaaaaattcttcaaatgcttcaaatactctgtgttccaggggagatatcaggcctagcaggaatttggatcatgagca

SEQ ID NO: 307198 - DNA, 451 bp, Homo Sapiens
  misc_feature (334)..(334): n is a, c, g, or t
gttggtccaggactatgttggtactatagattaaaggttaatagaacgtaattcgcatatgaaggacaagtctgaagacggtctggagatggtaatggcctggggtgaagtggaataattgaggtcatgcgtcaggcctgaggagatgacggcttgctcaagcctgggaaataggaggtctctcgttcagtcggcacttcaaaatgcaggggcctcctgcagaagtggcactcggctgagggatgggggctcagttccagggccagttgctggcatgtggctaggaggtgctcaaggaagtagttcatgatctggggtgtgtggtagagggtgngggcgaatccgtagggctcttctcgccgggggaccgtgggtagattgattggctggacgtggatgttatgtcggcgcgttagttcatgacagacttctgtggttttagcagcagctg

SEQ ID NO: 307199 - DNA, 120 bp, Homo Sapiens
gggtgttttttgcataactacggagggcacaagtggttaaagcagagccgctgacaggaagccagcacgcaagtcaaggacagcctcttgcgaggcctggccacccaggcagccctgact

SEQ ID NO: 307200 - DNA, 210 bp, Homo Sapiens
gaaagtttcctgctagcattttgtaagttagtcgagtgcagaccacaataggagttttggtggttgtgttaggggtggtcgtgatgtgtagattacacaagtgtaagctgagacgtagctcagaaataaggttgtagagaatggcattacgaaaggttgggagtgagcagtagagaagacaaacaaacccatggcagggctgttgtgctg

SEQ ID NO: 307201 - DNA, 446 bp, Homo Sapiens
tctcatttgaaacatattctaagaacagctaggatttgcaattggtccagaggtctgctaaaagttttagacctatgaaagagatccttatacttgaaagtaattaattagtatacaaagcaatatatgaatgaaagcattcatttctttacagtttcatttattcattcatcaggaaatatttggttactgcctaaacggtgccaaggactaactcaggtgcctagatttctctcagaattcctgcagaaaagaaaacacaattaagtgcaagaataaaaaacattcatttgtgaggaagatcccatgtaaatactgggcccgcaccaagagttttatatgtgtcacataatctaattatcacaagtaaaatgtgaggtgagcaaaattcttatccccatctgacagatgaaaacgctgaggtgcaatgaggtgaggaaacttgc

SEQ ID NO: 307202 - DNA, 332 bp, Homo Sapiens
gctggttattcaaaatgcactttttattcactttaacacagatgattttttacagttgaaagaaaatatttgatacacaattttgagttttttttagcagcacctgcaacaagaggattgtggaatacctcagaataaagtagagatggctggggcaggcacaaattaacctgatattcatcaatccactgaagacatatggaatctgaggcccctgaaagttagccaatacatgacaataaactaaataaatattctgtatgatgttttaacagaccattgaaaaacagtatagtcctaattagaaatatattattccaaaaatctagtgt

SEQ ID NO: 307203 - DNA, 254 bp, Homo Sapiens
tgggcccaagcaatccatccacctcagcctccagagtagctgagactacaggcatgcgacaccacgcacagctaatttttaaattatttcttggtagagactgggtctcactatgttgcacaggtctcaaattcctgggttcaagcaatcctcccagatttggcctcccaactcaggcctgggattacaggcatgagtcactgtgcccagcctatccatcttttttattttggctatgctagtgggtgttaagt

SEQ ID NO: 307204 - DNA, 351 bp, Homo Sapiens
acccaaagctgaaccctgaaaagcagaataagagtgaagttaaagcacgcatccactcgaaagacaaaggtggtccccatgctaagtgtctgccctcctctgtgcttcttgtgggaagccctccgtgcctccaccacctacaggaaggcaggaaaggtacacacagaagcccctttattctgagtttgtcctctggagctactcagatcccccagaaggcagaaaaaatcctttactttttatgagttatcttcttggtattttagggttcttcctccctcctcggccccagctgtaggcagagggtctctggcttggcctctcagctgtactggaccacatagatccatt

SEQ ID NO: 307205 - DNA, 386 bp, Homo Sapiens
agagagtacaagtgcaggtttcacattcattgtgtcgtggtgaagtctgggcttttagcatacccatcttctgaatagcgaacgttgtacccaacaggtaatttttttgagcctgaccctcctcttaccctcccaccttctgtaatcgccagtgtctattatttcactctgtaggaccacatgtacccattgtttagctcccacctataagtggaaacatgaagtatttgactttctgtttctgagatatttcagttaggataatggcctccagttccattaactaaaatatttgtatatatgttcatatgtttgacctcgctaactccttgggggaaattttgactgttttataatatattagaagttttttaacatctgaattt

SEQ ID NO: 307206 - DNA, 320 bp, Homo Sapiens
caaacaggaaaccaagcctttaaattctcaacccttaaacattcttttctaaactggggtgaaatcaattatttcagagtgtaaatattcacaattttctattttttgctaggccaacagttggcatttattgagcttttgttttttgatcccagggtggatactttgtttacgagtatagtgaagcactcacttgtcatacagacctggattctgtgattttgccacctatcccatatgtgacagtgggtagtttaacctcacgtgttttcctaacaatacactgggcataaacacctattttgaaaggctgttgcaag

SEQ ID NO: 307207 - DNA, 420 bp, Homo Sapiens
  misc_feature (119)..(179): n is a, c, g, or t
tgagggaacaatgaataatttaaattacagtttaagtaagttttagattcctttatattttcaaaatgaaataaaagatatacaatagaattaatattcagataatatttaactatcannnnnnnnnnnnnnnnnnnnnnnnnnnnnnnnnnnnnnnnnnnnnnnnnnnnnnnnnnnnngtgtggaccacggcgcttggccagtactccttctttatacaaagtcatgtagcatactgtgttactatttattaacttgaagttctaaggacatgtgaaatttcctattgtggaataggatcaggttggtctgtgtcatggagaatggtaactgggccttcagaaaggagacaggttcagagggttggagcaggaagtgcaaagtgaagtagttttttgcatctagctaaaaaggatctgc

SEQ ID NO: 307208 - DNA, 283 bp, Homo Sapiens
ttttagtttttcaatgacattcagtagagatagttaaaatggctaatttacccaagtaaagtggtggttggaaagttcctccaatccattggattcccttagaaagcgaattcccaggtggtcaatttatccatggcccaattcaatggttccatggacttgattagggtaaatccctcaggtaactggtaaattttgagggagggttaaaaaattcctccgggggtctaatctggccaagttctttacaggaccggtgcccttgggcgttggggtcaagggg

SEQ ID NO: 307209 - DNA, 321 bp, Homo Sapiens
caacttttattttggtttcaaggtatacatgtgcagttttgttacatgggtaaattctgtgtcactggggtttggtgtacaaattatttaatcacccaggtagtgagcatagtacccaataggtagttttttgatcttcaccctccttccaccaccctctcttgagtaggccctggtgtctattgttcacattagacatttatgtgaacatgtgtactcatgtttagttctcatgaataggggagaacatggggtatttgcttttccgttcctgcattaatatgcttaggataaaggtctccagctatatccatgttgctg

SEQ ID NO: 307210 - DNA, 189 bp, Homo Sapiens
agctactctcttgaatactcgagaaagccaagcactacaattgtgtggctggtaataattttctcagtgggcaaccaccacagttaatattagtgaaattaaagcaggaacagagctgcctctatgtctacagatgttcccatgagccaggaaacttcgctttcttctcttgaacaaatttctttaaaa

SEQ ID NO: 307211 - DNA, 232 bp, Homo Sapiens
tccaattataccaaaaatactacatccagtccggggtaaatatatttaattttgggaacataccttaagtggcaccaattacaccgtaactataaggtgaccaacatggaaccccagaactgtgaatctggcacagactgcactgaacttggggtctttccgggttagccccatttcccaaaaatggccccccccaggctatgcccaaaaaaactctgtaggggtgaagccc

SEQ ID NO: 307212 - DNA, 406 bp, Homo Sapiens
cctggtgtccagttctctcaattaagaatttcatttcgtagtgtggaagcataacaagtgcctctgggtccccagtcttggtgctgtgaatggggttagtggctgtgcatcgactgtatgacctggccatcacaggtgaacttacaacatagtccctagcctcaaaggcatacgtgggtttccctatcgtcctcttcatgagttctttgtgaaaacagaaagactgagtctgccaataaccagcaagagaacaagataaaataaataaaattaaccataagactttaacatatgacaaacaactggtaaggattttcaaaatcttttggtcaactttgatggtatttttccatacaatgaactctaaaatatgaaaaacgtacatccatattttagatataaaagt

SEQ ID NO: 307213 - DNA, 373 bp, Homo Sapiens
ttttaggatgaacattctgcatttaatgaaagcaagattttaaaaattggcttctattatacaacttctaggtcttgtaaaattatacatgtcttggggaccacttagatgctatacaggggtgagttattctctcccaagaaatcttctgtgattacagttgagttccaggtccaacggcttcatataaaacttcctttagagagactggaggtggttactgcctttagtggcatttgcatgttcagcgtgactgagaacactcttgatggtgtgacttcatcacaaagacttgatcaggtgtcaataatttttaaatggccatgtttcttaatgaattctctctctggttcactgcatggaggtgagaggt

SEQ ID NO: 307214 - DNA, 333 bp, Homo Sapiens
aagagggaaaaagcattttagtttaatgggtacaactgctgaggttttgaggcctccatcaagaaggaaaagagagcccagattgcaggtctgttgcgagtaagtgtgtctgcaggttgtattaggcatgtggtgatggtgatggggggttataggagcttacagtgaacttccatcactcctacccatcattgtctagttattttatcatccattaattcttctcttccggcagctctgaggaccgtagactaaactttattgttgcttgtgttggaaggcgactgttcagaggtagggaggggcaagatgagttgggaggagagcagaaaa

SEQ ID NO: 307215 - DNA, 430 bp, Homo Sapiens
agaaggattctctgcttttatttgaatgcatgttttcttattgcttctacatccagaatgagtttttgtaggctagctggctcttcagttctccagtaatgaaagtgagatggaatactagccagttcaattaatcattgattttaatgaatgttcattgtgcaccttttatgtgctaggctcttccaggagctgggaaacagcggtgaacaagacgagaagctcctcttctggggtagggtgggaggataaacattccaataggcagcatcctgatcatctcgatatgcccttgaccgatatattcaatattttatttgttggtgtattcttggcctcccatccatatactctacttatataggacatgacaataggccacttattctcaactccctggacacttagtctcagccatgttgtacttgct

SEQ ID NO: 307216 - DNA, 129 bp, Homo Sapiens
  misc_feature (29)..(29): n is a, c, g, or t
  misc_feature (43)..(43): n is a, c, g, or t
ggttttcttactattttgggggtaggagntggtggaggtttangaagacgtttcttgtaagcgtagggacacaggctggtacctttcccccctaccgccccccttgtttcctttctcttaaatggggga

SEQ ID NO: 307217 - DNA, 106 bp, Homo Sapiens
tcatatccaagtggtgcctgtaataccattgggacagaaccgttcactctcctggaaaggggctgtagcagtggagccaagtgatctagcttagtagatctcaccc

SEQ ID NO: 307218 - DNA, 206 bp, Homo Sapiens
ttggtatatgaatacgtgagacttcatcaaagacaaaatttgaagttacttacatgataaaataagataccatatattcgttgaaggaataccaacaattctgagagtcctgagatatgtgatcaaaataataaggtgatatggtctattttgcaagaagagcctgttaataaagtaaaaattgaacaggaacagaggtggcttag

SEQ ID NO: 307219 - DNA, 287 bp, Homo Sapiens
tttagttgcattgtatagctagttttctctttttctactattaaaatataatcatgctgtctcccccattctcctgccttcagtataaataagtgaataactttacacaacattaaagatgtaattcactggttattgtagtttttattgcacccaagctattaaagatacttagagagactaatatgacgctttgcagatctgcttataagatcgcttagggctcacgtcatgatggcgcatggaattctgtaaaactttaaagcttggatttgcctttgtttgtg

SEQ ID NO: 307220 - DNA, 150 bp, Homo Sapiens
ttacatagtttgttgtgtcacccagtctacagttttttcccattattatgtctcactgcattcttgacttcccagactctagttatcatcccacctcaatctcttttgttacctgggactatatgtgtctgccacctaagcgtggcttaa

SEQ ID NO: 307221 - DNA, 178 bp, Homo Sapiens
ttttccctctaataggtcgtagagcagcctggtactcgggattagtattgccgaatgctattaaccgcaacgctatatcctgtgtagctgaatctgcatttcaccttttatgagacttctgtaaccgaggctataatatcttgtacagttcttttgtgtcccgtgtataagcactgaa

SEQ ID NO: 307222 - DNA, 109 bp, Homo Sapiens
gatcaaatgccacaagggcgtctttacgcggttatgacggcataggatccactaagagcagtagcgccggaagatgggggcacagctggaaaaatacgcctagcacagt

SEQ ID NO: 307223 - DNA, 340 bp, Homo Sapiens
  misc_feature (223)..(223): n is a, c, g, or t
  misc_feature (225)..(225): n is a, c, g, or t
cgacccgccagatcgctctgggcgaagtattgccagccggctccatgcggccaggtggcgtggaagtcaccggctcgccggcactccggagcgccttcggagtgcgccccgtgcgtgggcaggcgggcagggctcgggtcgcggaaacccgtacctgccacactctctcctcgcgttcgtgttacacccgctcccggtacacaccctcggcatctcgcgctgncnccaatttcagcatgttgcactcacagacgctactataggacgaagcccggccgcggacgacgtttgccaagagttgacgtaggcaaccctagtcgcgctcgtcgtccaaccgcag

SEQ ID NO: 307224 - DNA, 140 bp, Homo Sapiens
agttaagaggaggacgaggttgtgtgagtgcagcacgcaagaaataatgaaaaaagtatgagagacgtgtcagatgcattttcttaacaaggaattagatgactttgtagtgtttaagagaagtcttaattttcctggga

SEQ ID NO: 307225 - DNA, 283 bp, Homo Sapiens
gtagatatttacatctatttagaaaagtatctagataatgagtaaaaataatttagtgataacaaaagcctgcagttacttatataactaagtcgatgatagcgaaaactaatggttgtcctttcgttagtgggtatctcctcttaaagtagctcgttgaagttacacttggaagagttgttgaaccattgtactattgaaatgagaaatcagacggctctttagtctttaaaacaatctagttacgctgttgtctccatgttgtgctaggaatgaatcggag

SEQ ID NO: 307226 - DNA, 339 bp, Homo Sapiens
  misc_feature (199)..(207): n is a, c, g, or t
aaagcagatttttttattatgaggttcgtggatatttgggattgctgtaaatgggtaagatttagtggcacatctcgtataaatgtgtgcgtttggtaataccagcagaggaaactttaaaggaacaaaataaaagttaaacatttgcagagaaggtttctagagtcctgagatttcagtgcgtaggtaaaaagagagnnnnnnnnnaagtagagatctacttattcaggatgaatacaaaagtacaagttttatttttaaagaggagtgcctggttttaatttttagagatcctaaaagtagcgtgatacaaaatggtgaaccagggtcttaagaatg

SEQ ID NO: 307227 - DNA, 453 bp, Homo Sapiens
ccccacagtcccatcagctatcaagtttctttatttgtagggagaaggaaaaagctccccattcaccacaattctgtacatgcctcatcctgtcacccacagcagtcaacaaagagtgcaaggcagattattccaaaaagaatagcagttgacatccaatagtgccaaaactgtttttagtcaaagagactttactgagagccctcatttataaatgtacttggcattgttgtttaaatgcattggcattgttgttcatttggaatgttccactctaagtatctttagtaatgttttgccatttctgtaagacttggtatacagtcctaatgtataagccagaaggaactcagttttacagaaattaaggatcccatttttatctaaaatattgtctttattcttaggttctcttgatgaacttagccagtgattttttttctaaaggcgcac

SEQ ID NO: 307228 - DNA, 323 bp, Homo Sapiens
cagttttcccctcctgggtcctttctgaccccaagactggtggggaggaggtcctgagtctcagacctcagggacccctgagtgggcctagggtccacagtgcagcatgcgcaggctcactctccggccgacacgaccggacgtgacgctagtgaccctcgtcaaggcgtcacaccgcgggtgcaaattctggggggcgacgaccgacgaggtgtgtactcagacagggctcaccagaagcgccgtctgcagggtcttctggaagtgctcatgtctacactgcaggatgatagcggtttccttgctggccttcggcgccccgt

SEQ ID NO: 307229 - DNA, 437 bp, Homo Sapiens
aaattctccaaatccatacatataactgcctgcttggtgcctcctcttggatatttatgaggcaactccaaaatcaaactcatatttcccataaaccctattcaaaataacaccactatcactgctattattaatcatcacagctccagagatacactgttgcttttatcccccaattttgcagctcagtaagaggttagagtgagtagataattcgttcagtcatatagacagaatggtagaactagaatttgaacgcatacagggtttatccagagtccacgttgttaaccaccatctccttaccacagttcatggcttcagcctcactgagttacttaagtcaaaactgcagcatcactctctctacctctatctcctttacccatcccctccataaccaatgtggctacatgccctgtccatctcctgaattc

SEQ ID NO: 307230 - DNA, 242 bp, Homo Sapiens
ggagtgaccgaatgggacttctcagaaagcaatacttttaaccttctgctcaagtaaaagtgagagggtacaaaagcaggaaggagttccacatgactagttattccagcccacagtgttgaatttccatagcacagaaagtccaatgataacaaagcgtcctggaatcttttctaagtaccatgcctctgtgctgtccagacacctcaacataaaggtcgaggtaggtggttactctatca

SEQ ID NO: 307231 - DNA, 487 bp, Homo Sapiens
aactgacttctgttccctaagttatatctgtcggccttgcgggataccagtcattactgggtgtatgctgataggtatgtatatacattcatatcagttctctaggtcatgttcctggactccagatttatatctttaattgcctagtgaacaagttgctttgacatcccaaaggcatttcaaatgaaactcatagatccctccaggcttgtttttttaatctcggtaaacgacactaccacctactcagttacctaagacccatcggtaattcttgactggcgctatttttcctcaactatatctaatacatttattcctagtgaatctagctccttaatatcactggatattatctcaatgtttcccactttattgaagaaacacaggtggtgtaaatcctggaatatgtccacatacttaaccattctatctcagggaaggtggaatgacctatgatttgtaaatttggaaaggacaaactggg

SEQ ID NO: 307232 - DNA, 449 bp, Homo Sapiens
cattgtttgtttcaagcatacctgcaattgcttattgaagcaattttatgaggacttctttaaaatctaacatctctatcatctcagttttgacatctgttgatttgattctcttttttcattcagtttgagatcttcctcattcttagtataacaagtgatttttcattaaaatctgcacatttggggcattatgttttaagaccctggatcttattcaaaccctttgtttaagctggctttctctgacactgctccaacagaagaggagcactacttcattacttctaggtaggggtaggagtccaggttccgtactcagcctccactgacactgcagagtggagggctcctcgttactgctgagcaagggtgagagttctagctcccagctaggcttccacagaaacctccctggctgagagaaaaaggggtgcctcattgttgcc

SEQ ID NO: 307233 - DNA, 445 bp, Homo Sapiens
aatggaaatgaacaagttggttggtcttctggagaataaatgctgttagatttttagttttaaaaaaggagtggtacttaaatacacaatataaagagtgatgagatatatggttatataaataaggccacagaaatcactgcaaccaaggtgtgagctggttgtaatgaaatcagccagcttagttaggagtcaacacaagctgttagaagacaacatgcatgggaggcataccctggtccccaaagagactcctctggggaaaaggttcatcaggagggttggcgtaagggggaaagggatggattagagaggaagggagcagcatcgtcaaggaaactagtcttcacaggttacacagaggggcccctctcctcaaaagatagaatgaaaaggaaaacactgtatcctttggcaactgtctcgtttgatgatgaaggattgt

SEQ ID NO: 307234 - DNA, 463 bp, Homo Sapiens
  misc_feature (420)..(420): n is a, c, g, or t
gaaggcaatttaataagatttgagcatagatattaaacttagcatggacagagaaacttatttcttgggggactggagtagtgaaagaacagaatcaatatgactagaaagagcagaaaaacttacaacagctaatactacttgctacattgctgtagctttaagactgagggaggaggactagagccagcctgagatcttctgggtcagtttgatctaggcattcttcttcttcttctagatctgcactttaaatacttttggtgtctttataacttaaacgcaaatagcttaaacttagctttttctcttaagggtttaaggagtgagagcagagccaagtcctggagacggtaaacttgctgtggcaccggaaaacgagatgtgcgggatacggggaagggacaaggtggaaaaggnactactcggatctttttaagatggaagagtagccacagatgaa

SEQ ID NO: 307235 - DNA, 557 bp, Homo Sapiens
gctttatagatctgtgtgatttatgttttaaagaggttctgttttgatgtatttccagaatttgtttcaagatttagagctccttttagcagttcttttagtgatagcttggtggtggcaaattctctcagcatttgtttgtctgaaaatggctgtatctttccttcatatgtgatacttagtttcactggatacaaaatttttggctgataactgttttgtttgaggaggctgaagataggtccctaatcccttctagctttgagggtttctgctgagaaatctgctgttaatctgataggttttcctttataggttacctggtgcttctgtctcacagctcttaagattctttcctttgtcttaactttggataacctgatgacaatgtgcctaggcgatgatctttctgtgatgaatttcctgggtgttctttgtgcttcttatatttggatgttgaagtctcctgcaagaccggggaagtttttctcgattattcccccaaatatgctttccaggcttttagaattctcttcttcctcaagtacaccgattat

SEQ ID NO: 307236 - DNA, 226 bp, Homo Sapiens
aagagatggggtggatctcgctatgacgcccagactggtcttgaattcctggcctcaagggatcctcctgctttgtcctcccaaagtatgggattacaggtgtgagtcacagtacccagcctttttctaacaatttctttcagggtgatatgttaacaggatataggaaaaaggcttcactgtgcaagacctctaaataccaaaacagagtcgaaactgtgaaatc

SEQ ID NO: 307237 - DNA, 113 bp, Homo Sapiens
agaaaatgaaagagaacacccaggcacaagcaagaaaaatgacaggttaaggacagcagagaatcctagaataagtgtaccaactactggtggtcttcttgtcatcactatgt

SEQ ID NO: 307238 - DNA, 382 bp, Homo Sapiens
atggtaatgagttggaactgaatacacactaaaatgcagccaaatcactgcgatgagagctgaaaaatgctaatctctctccaacatcttcagtgccattctcctgaaattacctgctccagcaaggttcccgtgggttaattattgctgcagaggaaattgcactgatttgcatctgctttcatcggctggaaccagcgcatgtcagtcctgcaggaacagacctgggttaacctgttggctgcttcaggcaagagggacaccgagttgcaggctgcctctccaccccaccagtgctgtttcccagcctcagggcacctgcagaaataccaatctggttacctgttcacctgtactttgtgcatctgatactcccagagcc

SEQ ID NO: 307239 - DNA, 424 bp, Homo Sapiens
gatgctttaagtcagttgagtgtgggaagctgcaggttgaggcctcagttcatacctatagtggcccagtaacctttagattgccatctccaattgtgtttcttgaattacatccatagcgcctggcacaaagttgactagaatatagtttctacctcctcatttgcaaagagagaccgacatggcccttgtagttgccatttggaggtacgaacaaagtactgatgaagctccctagaggttagggtaacaatatttgtgctggttcttaaagaacaagttttctgaacaactagctcaggcagaggggacatcctttgcaaaggcaccaagtgtgctctttgggaaacaaaaggttcagcaggccttgtgcaggatctgtgagagcttggcagggcaagtctgggaaagggtggttggagac

SEQ ID NO: 307240 - DNA, 418 bp, Homo Sapiens
gttcctagaaagcaacttatttagaaaaatcagcttttcccgaatatggatttaatggcttgaaaccaacatttattgctctaaaactatcaattatctctcacaattaatgcaagactaaggaagcccttttccttcttcactacatcaggggttgatctgatacaatggggtctgctgggattttcttaccagcaatacatcaggaatattcagtagttaagaggaccacaattcaactgcggtctcagctggtcacgaagtctatccatgtagatttttaaaagttaaccttctataatctttattctgagaccgacatttcttccaattctttactccttttcatctccctaacccccaaatcccagaatgaagaaagacagaagatatgaggtgtgcctggaaagaaatggga

SEQ ID NO: 307241 - DNA, 133 bp, Homo Sapiens
tagccataaagacaagcggtccatggatctgtcgcagttctacagggcggccgtactctacaaccttcccgttgtcgatagccagtaccttgacgccggcctagatggtgtgcgaccagttgcgacgagtgac

SEQ ID NO: 307242 - DNA, 184 bp, Homo Sapiens
catccaccatccgaagaatgttgtggcaaggactcagtccgagggcaccgctgtgaagaggaggataatccttcaggaactccacaccaagccgtccaacctcaaaggaataagtcgaactcagcatcccgtgtaacctgggacgacagacgcgatcaaccacgcccggcaacttgtgttcgta

SEQ ID NO: 307243 - DNA, 329 bp, Homo Sapiens
caaggttacaaacacaagaagagcactgtattttcatgaagcggaaaatgtgctttacaatcgccagctactaagagccttaacggtgaagcgctctgcaagaaacaggaaatcgtcaacacactttctgcatgaattgcctggagagttgtgtccatagacaattcctggttagatgcttaattgtagcagactccataacggggtttagcgggtttccattcggcagaaagggctccacgttctttttcacagaaaggtttatttttcctcctcaggcggacgaagtgagcgtcgttccgtgaaggtatgaaacccttttccttcct

SEQ ID NO: 307244 - DNA, 529 bp, Homo Sapiens
tatttctctagttatctctcgggttaagaatacattcacttcaccatctagtactaaaccccaacacaaaaatggattaggattttatagaccactttcaatttcaaaatgctccaccactggtatttctagccatatgcatatatttgctatgtcttatttctcctttaccttacaaacatgctgaacaaggagcgcttctaggacacctaatacgtatacctaaatgttgagcctccagcggtgccatttgtaaagaggatgccatatattgagtgtacagatattgatgaaactggaaagatttgagtaaggaagacatgtttttatgacaatcactttacagttactaagatatttagaggagccttaagagaaataccactttctattctctccgtaattaatataattcgaagacaaagacagaccgagagcacttcctaagactttaaactgtttcagaagtttacacctttatatttcaaaagaaatatgctgttatcactactctacctcctgcaattga

SEQ ID NO: 307245 - DNA, 275 bp, Homo Sapiens
aagaataaattagaaacttcaatttaataatcatcatatgtaaattatttgataatttggatatccttcaaagttgcaaattgacacaaactctgaaggacattaatagtgccttcatgatcaaaaggtacacacatctgtacaaggagacaagggaactctgaagtttgtcaaggctgcagaccagaagatccacatgtctggaataaaactggcccagatacatgtagttcggtggttactgcctgccagtgggcctactctcttcccaccca

SEQ ID NO: 307246 - DNA, 474 bp, Homo Sapiens
aagcttctgaagggcagagaatatctctgtatcccttagggaatattggtttgtatcctcagtgcttatagatagtaggtaagtaataaactttctttgttcccctaatatcttacacatacttcaccaaagccctcgtcaccttgtattaaaagtgcctattcatatgtaatttcctgttattttccttatttatcattttattgttgctggcacctacagatggagcttcataaacatttgctgaaacactattaagttggtagcaataaagatgcccaggaagatcaaaacaccctacaagagatgtcctgtagtgtagatgggcagggcctggtgtcagctgtggaggggtggtaatctgatggctgtggaagggggcagacagcttcctggcagccgagaggtggcatgggttgcctagcaggtggttgctttctgagcattggctgtgtttaatcacaatgtgggcaa

SEQ ID NO: 307247 - DNA, 151 bp, Homo Sapiens
tgccatggatgtaatgtccccagtccagtctcggccgtcactcggtggcctctgccaacgccacggcgcccagagagcccattgtgtaggccgtcgggacccagttgttgactgtctcacggcagcgtgggcccaggaaccaggtcatcat

SEQ ID NO: 307248 - DNA, 494 bp, Homo Sapiens
gaaagaagctttttttaattctcttcacagttgactgagttatttttctccattttgtcttgccactcttaatgcacacatgagaggccctaagatcacttctgagagcatgggactctttgggaaaaacagaaaagtcaccaaggaccctattttgggagaaaaaccctgttttcctcagaaccccaagaattaaaagtgctatgatagatccctctcaaaatctattcttgtcttccagctatatctgcttattaagtcatagaaactgcatgttttcctggccctgttgcgtgaagagctccaccctgaggccagtaatccaattagcagattggcaaatgaaaaatcttacaactactgcacgttttgtctatctgtgtagttatatatgtgttatgcgtgtgatgtttatataaaaaagacatgcaaggtgtgtaaagaaagtaaaatatgtttttggtaaaagattataagaagccatgggaatgtaa

SEQ ID NO: 307249 - DNA, 443 bp, Homo Sapiens
tttttttgagacagaatatgtttctccttctgccaactgcattcctccagaaaactgatgtggattttttaagtgtgcatcttagattttattaatgcacataaaaatatataatatattgatatctgtctacttctttatatccttctttaggactctacagtaacatgtaaattggaatcaaaatatatttcttcagggaagaaatggcatccaacatgacaccattcccaggccagcccccttactctatgtattcgcagaggagtcagaaaacaatggagtaagaggcaaaggtggtgagtaacccgcgatgggtgtatcttggagcatttgctcccccttatgaatcccaggaacattgctccaacctctcagtattctcgcattcatgacctgtggctgtctgtgaaaacgggaaatgtattatgtgccatggggat

SEQ ID NO: 307250 - DNA, 160 bp, Homo Sapiens
aagccatgtaggttagtacctacaaatatataattttttaaaccaaggaatctagagtagaaagatgggctgcaaatggataattattacatcaagcagacagttataaaggcagaaacgaagaactacaaggaacaatacaaggctgattacttttgac

SEQ ID NO: 307251 - DNA, 160 bp, Homo Sapiens
cagcggtccgcatctgccgcctctgattgtcacacttgagcacagccagggttctcttatctcgtaacgcatcagtcagtgccagactaccaactcgcgcgacagaggtggactccacatttaagctctgacaagtattgtgcacttgcagcatttctgc

SEQ ID NO: 307252 - DNA, 436 bp, Homo Sapiens
caaagcaaatagttccataaaacactaggtcaaagggcctcagtgtgtgtgtactgagtttgaagggccaagcaataatctataagagtgacctattagcaatatatttgcaaaactaaaccaaaatctgtacaggatattatcaaagccttaggaacaacagaacatacatattttatggagtggttggagaaccatctcccctttagtagttaacgtactgatgagtgtccccattttcataagcaaggacatactaacactaagcagttgaaaggcctgtctcagaagcatcctgccccaggtagctgatcacggtggccccataccacgacacagcttttcttttggttggtcttgctgagtgccttctctagatttgggctgtcattcaagcctcttcatttacaatgttcattaaaaattcagtaccata

SEQ ID NO: 307253 - DNA, 446 bp, Homo Sapiens
gatttgtagtgctttttggatattaattatttatcaattacatgcactggaaatatcttttcccactctaactttgtttatattaatgatgctagattgaaatgtcagtttggttacggctagcacctgtatttcacagaaatctccttctctggatggttctgaggtagagtcaaccaaaagagaaacttgtacaagatttggaagtgaagaagtcattattcttggacctggccagacttggtaacagacacagacctgcccagcagtccgcagctgttctctctctggtgctctgtgctcagcttgttttcccaactgttggccctgctgaccaacagcaacctgccactggtccactcggaggcagcagtttccacaggcctctccagagactccctcttccagttcccttttcatagtcacatgtgcctggctttttggaa

SEQ ID NO: 307254 - DNA, 482 bp, Homo Sapiens
  misc_feature (291)..(291): n is a, c, g, or t
  misc_feature (429)..(429): n is a, c, g, or t
gacaccagaactctagctagagccccctgtgatcactactaagggtctgaaaagagtgacattttgcccaggaaaccagaagcaatgcttttccagtaacaccaacaagtaagtcaagactgtcatctgttggctgtcttgcttaggctaagacacatccctgataggccttgttagtgggggatggggtccagaaaccaagaaggtgtgaaagacattctttccctggagtaggagctgctgctgcagtgatccacagccagctgagggtccaggtgggaggcagggcantggagagcccaggtaactgcatcacggcgatcaccagcagccggaaaggactgttgcacacttacctgatgtgaagtacaccctgatccttgctgatgggaagacaaatgaatcaagattcctgtcctctaaaaattncactgtcagttgaaatcacaggtagacctcctctaagtctgagcatttagagt

SEQ ID NO: 307255 - DNA, 414 bp, Homo Sapiens
taaaggaaacttaacaaaggtctaataattagaccgtttaagtttcatatatccaaacaataggataagtcattaacaactgggttgtagatgggaatttattgacactaagagatgttcatcgtattctaataaaaaagaatattacaaaggtaatttttacttactatttattattttttagagaagtaaggtctcactctgtccttctttcttgatcccctttaatttttccctaacgccccttttctcttcccaagatcctatccaggataccatatcacattttgtcatcatgtctccttagccttttctggactgtcagcttctcagacttctcttgacagttttaataagactctggtcagatattttacagaatgtccctcaatttgaatttgtcagatgtttttc

SEQ ID NO: 307256 - DNA, 210 bp, Homo Sapiens
  misc_feature (157)..(168): n is a, c, g, or t
agtgtcagccatggcactcggcctaattcacttatttaacgatatttatggaatggctaagtggcaggtagtgtgctgggtatacagcagagaccaatattagatcacgagcctccacaagccaaaaggtgccaacgagactcatcaatgcccccannnnnnnnnnnnaaattttaaagcccaaaactcatcctattaggggacactgtt

SEQ ID NO: 307257 - DNA, 456 bp, Homo Sapiens
gcagctagaaaagatggtttaatatggttttacatgacattagaacatttgtctgagtggttacttttggggatggaattctagaggatttgtatttatttctgtagacttctcacacaatccaagttttaccaatgagccaatgttacttttataatcagaacaaaaatagttgtttcagaaaatggatcttgttgacacaagtctaaagggaccttcatgtgggtcatgagcatgtgatgccatgctgcttcctgactggcccctcgccaggcctcccttcttggcacagaagcagtgaccagctgagatggtttgctttgggcattctgcattctcttcctgggtgatcatctgcagcctgttgagaaagaggctttaacttcatagcacgagagctgggacatcaccatatggcagacccggctacagaggaaacacccaaaaatgacagac

SEQ ID NO: 307258 - DNA, 114 bp, Homo Sapiens
ttaccccaacaaatcccatatcattaaaaaccaattcaaccccaacactgcattcgtgaccagaccatcaataattcctcaactttcaccagtccacaatgcagcatttttcat

SEQ ID NO: 307259 - DNA, 323 bp, Homo Sapiens
cactgtttgtataccctacctctggtatatgtttatttgggaaggctttataggtgattttgatattccgtgttgagaaccgttgtggttgataatggaatgattagcatttctttttgtttggggaattttatagtaacaaaagaaagtttaagaaacaatccaagaaaaaagattatataggtaggaaatggaggacctgagagtcaaacctgtcaagtatttctgactaataagcttgtgctttgaagtattatattgcttccctgtaatatttaggtgttagagtcagaagtccaggacttgtatcccatttctataac

SEQ ID NO: 307260 - DNA, 468 bp, Homo Sapiens
ccaaagtatgcatcatttctatactccatttaatgccatgtctgtggcagatttttaaaaaatgtgcagaatcaatctttggttcttacagtcttctctgatgggaataagtaaccatgtcccaaagactgaaaactacagcttttagccagaaaagccatgaagtagttgtaataaaaattctgctattacctcattaatttattattacatcactactactttgaagtgaatttgcagtaagataaagacagtggtcatacatcagcagaggaaagggtatgcttaaaatatagccaaaaatcctattgtctttgatctcatttattttatacccttcatgtcttttattattctgcacatactttacattttaaaggaggatctacgtgtcaactaatctggacagaccccctgccctcttcaacaaagtacttcatatcttgaaaacttaacaggagagtaaca

SEQ ID NO: 307261 - DNA, 283 bp, Homo Sapiens
gtgtcagccacaatacctggcaagagtccgttttttaaataagcatcactactgtccccccgaccccagttttatttctccatggtcagagtttattgttttggattgcagaatctttttctgcactgctcttgccaagggtgggctggctgggaaggatggcaatgccattgctgacatccgccggggcccagagccatttccccatttcccttggaactgctgccttcctttagatatgatctctgctgaggaatgcacttcctgcccaacctggtctcac

SEQ ID NO: 307262 - DNA, 437 bp, Homo Sapiens
taatatgggaggtatatgaaaaaacatattttattccctctggtcccaaatgaatcatactttctggtcacaacttttagaggcaggctattatttcagcaggccactctctcactttttctgttccctctctgactccttcatcctttaccaaagtacagagaaacgttatctctagcccccttccgtcacccacaaatcagcgtatgatagtcaacaaaaactgaggaaagacttctagccaagaaaaagacccattaaagagtggtgtttttgttctgatcattctaaactgatcattctgatcattgttgtgtgacaatacaaatggtgcccctctgtacctttttttggtacaccacagttgttctatgtccccatcatttccttttgagaccttgaagtttcaacaacattcttgaccttcttaatttatc

SEQ ID NO: 307263 - DNA, 326 bp, Homo Sapiens
  misc_feature (79)..(195): n is a, c, g, or t
aatgtacaaggctcaagagatcctctggcctaagtctccaaagtggctgggacaacaagcacatgccatcacgctcagnnnnnnnnnnnnnnnnnnnnnnnnnnnnnnnnnnnnnnnnnnnnnnnnnnnnnnnnnnnnnnnnnnnnnnnnnnnnnnnnnnnnnnnnnnnnnnnnnnnnnnnnnnnnnnnnnnnnnatgagccactgcacttgaggctacctataatatcataaacagaaatttcatttgctattatctttcccctagataaaagacctcattcacattttacaataggaaagcatccaagaatgtaacatgtaata

SEQ ID NO: 307264 - DNA, 413 bp, Homo Sapiens
agtgctgaataatagtccattgtctttatgtaccacagtttatccactcacctactgaaggacatcttagttgcttcaatgttttggaggttacagataatgctactataaacatccatgtgcaggtttttgtgtgaatgtaaagtttccaattcatttgagtaaataccaaagcatgcaattgctacatcatataaaagtatgtttggtactataagaaactgccaaactgtcctcttaagtggctatgcatattttcacttccaccagcaataaatggagttcctgttgctccacatgctcactagcatttggtgttgtcagtgttctggattttggtcattctaataagtacatagtcatatctcgttgttttaatttacaattccctaatgacatatgatgttgaacat

SEQ ID NO: 307265 - DNA, 494 bp, Homo Sapiens
ccacgcaagctgttaaaaacatgctgctctcttgtttttgtgtttcttttcagtttggtactggaatggtgccttctgttgtattttcttcctcccattttttagctctttagcatgctagaagtacaacaatgaagcaaaactaggacaagctttaatccttccaaattgggtggggtggctactttcttgagcaagaaaacccaaactggcctccctagacctccaagagtcctcagaggcagcaaggggaagaggtggaggtctgggagctcgttcttacaaacctgaatggaaagttttcacttacccctgtcaggtagcacagaataattagaatgttttgtttgttttagactggaatttaagcagcttggagtgataactacatatggtgatcacaagctccgaaatggtaattctatgtgcctgattaataaaactataaatgcagtgtaggagacaaacttttttaaaacatgggattctgaggc

SEQ ID NO: 307266 - DNA, 464 bp, Homo Sapiens
ccccgtggatgagctagtcaggttcaagggaatcatattccagacaaataagctcaggacaagaggcaccggctgctttccaagcattgatggcatcttagctgcttaatctgtgcctgcagagctgcaacatcacacactcagtgtgcaggccctggtgtcgaaccaccccctcctcccttttctcaggcggtcttgtaaagtgttggatctttgctaccattctctcattttttgtcttgccttggcttttaaatctgatgctctacccagggtacagggaagaaactcagagatcagcatcagcaggaagcttcttcacccatcagctaaaaggacaaaggaagaaggcagggctaaagctcgagacccaggaccaaccagccgatgacagagccatggaggacccaacctgcaggtgggatagctgtagaggggccactgccagagatgctgcccaaggc

SEQ ID NO: 307267 - DNA, 136 bp, Homo Sapiens
gatacactaccatgcgttgcacccgatgtctgctctcggcgtgtcgaaacgtggtttgactcaccatatggatcgagtcctgcagatccttcggctcggcgaactgctggatgaagctatggtcagaaaccgggct

SEQ ID NO: 307268 - DNA, 231 bp, Homo Sapiens
ccttgaactccaggctcaaacaatcctccaacctcagcctcccaagtagttgggactacagacatgcaccagaagcctggctaattttttctattttttgtagagatagggtcttgccgtgttgcccaggctgtactgcaaagtttattttaatctagggtgttctcaccttttgttttgtttccttgcaatttatttgttgcagaaaccgagttgtttgttcttgtagac

SEQ ID NO: 307269 - DNA, 219 bp, Homo Sapiens
gaaaatatcagaggatacatgattatatttgtaatcttgctttttctcacacaaaatagtgtactatatactcttctgcactttacgatttttacttaataatgacatctttttaaataatcatgcaaagcatcttcctggcatcattcttcctagacttttcagtctgtataagagctatgtgaaagaataagtgttttcttttgtaacattaactac

SEQ ID NO: 307270 - DNA, 417 bp, Homo Sapiens
  misc_feature (101)..(293): n is a, c, g, or t
ttttaaaagaattaagattttatttacatgattgattaaaaggggtatgggaatgtagttaaaactagtaagaagccttgaacttgggcttaaagtcacannnnnnnnnnnnnnnnnnnnnnnnnnnnnnnnnnnnnnnnnnnnnnnnnnnnnnnnnnnnnnnnnnnnnnnnnnnnnnnnnnnnnnnnnnnnnnnnnnnnnnnnnnnnnnnnnnnnnnnnnnnnnnnnnnnnnnnnnnnnnnnnnnnnnnnnnnnnnnnnnnnnnnnnnnnnnnnnnnnnnnnnnnnnnnnnngcaaacttgtcatctgcaactttgcaaactccttgaatactggactcggaatggccccataatatctcatctataataactaacttcagtcttccattcattcacacatacaaaaaccatttac

SEQ ID NO: 307271 - DNA, 171 bp, Homo Sapiens
caatattgtcttaaaagtagcatcttataatgcatacaaacatttttctaaagataaaagctttactaaacccatatccctgataataaaagtcagccagaaatctcctaaaattactcccaaatatatccaagtgtgcaagtacaaggttaatattattttgatgaattc

SEQ ID NO: 307272 - DNA, 184 bp, Homo Sapiens
aagcaccgtctgtgggaatcagtaggattacccctaatcgacggcctactcgtacagctagaccctggcggcctagaggggtgctagcacgtggaccagctcgcaagcagagctataaggttacgacgtaagtcactagcaccaggaagcctatccttaacgtgtggaagttaaatcttctggc

SEQ ID NO: 307273 - DNA, 329 bp, Homo Sapiens
ttagctcaccagaaactcagagagtaaagaaatactgttaaaggaagttcctaaactaggcagacagtataaccctgtgtggttttcttggtgcaagtgttagaaacaaaaccgataccaagcaaggaaggaggccagccaacgtcattggtcaacaggttggccaattctttccttcatttatccctctgaatgcctaggtgccagcctgagataggcactggattaccacaggggtaaacaagagcagggctcctgcggtcacaaagacagcctagtgggaaagtttgtcattaaccgaggaaacatgctattaaagggataactaa

SEQ ID NO: 307274 - DNA, 507 bp, Homo Sapiens
tcttctttgcttgtttgtttctggaagctaaagacctagagatgcccttggcctcctacatccacattccaaacaaatgtaagaataaacagccattaaggagaatttcctgtagctccctctgagcatgggtaatacatctagtttaaacggttttaattttgtctttgtcattcgtatatgttttaatccaggaatgaacataaactggtggacatttccttttccctatgtgactacagctaaatatatattttttaatatgttgcaatgttatgcatagggaatattcacagtatacttttcattgaattctaaactctcatttccagaatttttaatgccacgtgcttcttcagaaaacaagaataaacaaccttgtaatacatgatggttcagtacagtggaaagggctctaggctatttatagcaattaggccataaagaggggaacagaccatatgcacatttattatgtcagtaaaataaaacatatggaaataaatt

SEQ ID NO: 307275 - DNA, 187 bp, Homo Sapiens
gccgtgtgtcacagacaaaagccaggagggtggtcctggcttcatcactgttcggccggaagtatgtcgggaggatggtcagcgtctcctgggtctcgcgttccacttacaggcagcgatggccacgggatcgcatggtgggagtggcgcgggacttggattctggcggccgctgcaggggggactg

SEQ ID NO: 307276 - DNA, 563 bp, Homo Sapiens
gagatgaataaatacatgtgaagggctcagaacagctacatccttcatgtgtattgacttatttagcacacagtaagtgcccaagaagtgttagcttttattagataccatctaaattaagaatgagtgaaaagataaattactaaatcttaggattatgaccatttacaatatacttgtcctaactcttctgagattcttggtggaatcagaacaagggagtggaagaccatcatttgcaaggagtactaccaaggaactgccagcttaacatcagttcctctgagtctaaatttcatttgggagaaaggataacaaaaagtaggcttggagtaaagaaatgaggaaaaataatgttaagtgatctcatctagagaatatgtgtgtgtgtttattgaacctatctgttcttcctttaacaggggtggctatactttaaactgcttcatgtaataggagaaatcacagaaagagaagagtgtcacagttagactcctagagggcatatacctatatctcagagccagtaagagaaactggataataagcgatcagacataaag

SEQ ID NO: 307277 - DNA, 369 bp, Homo Sapiens
gagcaagaaagtgcgtctgcgttgagtgggaagggaagcaattatgtgtccatcaaaccccgccatgagcactggtgccgttaaagaggggaaccgtagaacagatgttgatcccaatcgtagtctgcaagcgagatgcacttgaggggcactgagcacgcagggctgtcaaaaacccatagggatctcgcaggtgctctcccaaaagtcattgctcccagaaggatcattacatggggacaatggacatctatctgcccacgattgggacgacggtgcgcacgaagaagcccaccaggcagttgcacaacccatcgcacagaccacagtctccatgccatctcgtggtggcatacacacctcgggctc

SEQ ID NO: 307278 - DNA, 408 bp, Homo Sapiens
ccactgattctgtttattggaacaatcaacaaagcaaaaatgcattcataattatgtatcaagagttacaaagtctcagaactgactttagagcactgttaagcctgtggtttacaggctagccaaacttcaaaatttcctatgaactgtttctatttctctcagacttttcagaacagagttcaaactctgtagaaggtaattcctacagcaaatagccttaaatacgaataccctccttaaaaaccaataccttgtgattttcccttcaatagtaatcttgaacggcacatacagtgtgaatgtagcaaggcaatcaataccctgaaaattcgctcgtctctcatgggcctgcctctgaagctgctatgaaagccggcaaccacacagaatttgcctccagtaaga

SEQ ID NO: 307279 - DNA, 458 bp, Homo Sapiens
ctgctatcaaagccgggaagaagggagcctggagcttccaactgccatgttgctgcctgcatggggaaatctggtttgggttatagagaatcaaatacccatgcggggggagacacagtccaggcagcatcctgcccccagcccaggaatacccctgactgttacagttatgggtggcaacatatctcttgttgcctatgcaaatttgaaatgggattctgaagcttacaaccaaaatatcctaacttatcacaatcccctttccaaagaataaccctacatttcttggctggagaaattgagtgaaacatgctagaagagaccctaatgcctggcagaagacaggactgaatgtccttaacagatctacccaattccacttgcaaaatatccagtgctgttaaacataatggacaattatgactacaaagatctaaaaacaacaagaacagcgattt

SEQ ID NO: 307280 - DNA, 488 bp, Homo Sapiens
  misc_feature (80)..(180): n is a, c, g, or t
aattttacaggaataaatacagactgctttcatttattatatgttatgtgtttttttggagaaaaaaaggcactccaatnnnnnnnnnnnnnnnnnnnnnnnnnnnnnnnnnnnnnnnnnnnnnnnnnnnnnnnnnnnnnnnnnnnnnnnnnnnnnnnnnnnnnnnnnnnnnnnnnnnnngggttgaatgagacgacgtctgaaggctcctttcagctcagacattccatgattccatggtgcatttaaaaagtattagcaattaaagtcatagcatgactttttaataaccagaatctgccatgctcctaaatcaggccaaaaaggcttgaattaggcaagcaggaaaacagggcccagattatacatgtgtcgagatgacaggagacccaggtagcacttaagcctgtgcgtcggagctgggctcatgggccagcacatatactttgcctgcttttacgaggggataataacactcatttgtggtc

SEQ ID NO: 307281 - DNA, 296 bp, Homo Sapiens
attattcatgagctggcaagagtccctgagtgtaacctgcaggctctggatgtggatgacaggtatccatggtaaccagaaagtgctgggaaactagtcatttccccctaactgaatcttaaaataaagaagatgtttaaggaggtgtcctatacagctatatcccttattgccagtaatacacatgggcttgtgacaataaaaattgctctattttagtgagaggagaagatattattgttatggagaggaagactgcgactgtacagtgttgtcagattttccactttttgcta

SEQ ID NO: 307282 - DNA, 175 bp, Homo Sapiens
tggcgctatctgagaagaggaggatctgagggagatccagggatcaggcaggatagggaaggggcaggacaagaggctgtgggacgcggaaggaaggatgtagaagctaacgggggaagaatgaggcgggagggggagtgagaaatagagcaaggagagaagagagaattggggg

SEQ ID NO: 307283 - DNA, 306 bp, Homo Sapiens
cgtgttctcacatgccagctcatggcagcccacaggacctaaaactctaagaggggagcctggctgtgtagctggaagtgctgtggtcctagaaaggtggagtgaaaccccattgctctttcctcttttggtcctcccaggagtgtagttgcaggaagtgtgcaagacagcagggtcaataaagccccagctttctggccagagagatttaacaaggagccgcagaaactggacagggctaggaagatggcagagacagcagagcttggggaactggcatcagaaagttggttagaaactcctggg

SEQ ID NO: 307284 - DNA, 470 bp, Homo Sapiens
gcatgagactcaggattctatttattcagaggcagaattccttcttaactttgaacctgtgagaccatacaagttatgtgcttccagaatagtatagtgggatgaatgtagggtggatattactattccggaagggagaaggataggacgagaaacagtcatgggactcaagcgagtacaagtcatagcgaaggaaacgtcctagaatcttcaggctggagaataatgcctgtaagatggtcatggcccactgtggcagtcaccgcctccctgagcccgttaggttgaggatccattaaaagtggcagcatgaacctcacaggcagggaaggcactgcccatgctgtgatctctctgattaggccctgcccaggaggcaattatccgtggaggggtggtgttgcactctcagtgatcgagtggccttgagctggctccctgatcccatgtatagttgatcctacctttag

SEQ ID NO: 307285 - DNA, 414 bp, Homo Sapiens
agagtcagacttaagttcataccattccttatttttagacaccaatgttttccctttcttttttctaccccaatatagaagcgtaataagtcttttgaggcagcattttattgatttgtcattgtaacagaatttaccttcttcaataccggcagattttaactagagaaatttgaaattttcctaacctctttatactttgtccagaaggagcgtttcctttcctccggactctgagctgtgtggagttggccctttgcagtcgcctttgctagacctttacaagttctgctttcttgtctgaactcatgaggaaggcaaagcttctttcccaaagagattgacttgaagccttctaaccagacacacaggaccttccggcttccgcatacttgaaacttattctctgtatgt

SEQ ID NO: 307286 - DNA, 464 bp, Homo Sapiens
ttcaaactccgtattatgctatgtgcttaattcatggcatgggcagtactgttctgaccactgctggataacagctataacagagtgagggctggctttgtcagctcctggatgaagacttatccacattccaccaattagcactcacacaaaagctacaagataatacgcatttcatagtgaagttactgaggctcagagagatgaagagacttacctgaagtcacacagctaggagctgcagacagcagatgcaaggcccatgcttcccagtccttataagattaggaaatggactggagacctcactaagtagctgggggtgaaggaggtgctcttcaagactgaagtcaccgccggaatgtctcttaccctagaaatggccccgggaaggcagaccccaaatatcaagagaatgcactccatttctttcttggtgtggcaaacggtgagtgaaaaggtta

SEQ ID NO: 307287 - DNA, 410 bp, Homo Sapiens
ttaaaaaaagatatatggcattactttggtctccaaaacagttgccagtttgaactttattctgccagcaagtatttggtttggctcagcagggctcaagttgaaaaaatatttgcccattccaaaaagatttaacgagctttgctgcaaatgctggtgccatttggcacatcacagggactgtggcacagcaaagagaactctctcaaccacagattttatttgcccaaggtagccagcactgggagctcagttgattcctcgggtcaagaagctgcaagtcaaatgcgtgaagtttccaagagaaagtgaccaaagcaggcatgagaaaactcttgctgacattgaaaaggaagtcactgggtctgactccaccctgcacaggaattgatggctaactttcagaactg

SEQ ID NO: 307288 - DNA, 134 bp, Homo Sapiens
gcatgtgctgtttaatcacatgctgattagcattttaatagttcaaagtcaggctcatgcttccagttcaagatagttgactagtatgggcatttatctctcttccataccaaaatttgattaaaataaaattt

SEQ ID NO: 307289 - DNA, 420 bp, Homo Sapiens
gggtttgtcatcttgaaaaaaatgtttatttatttcaacttccattttattaactgtacaatgcattttattggtagagtttgaaagataggagaatattctcaaagaggcataaatatgtaaacttaaaaaatgtctaatggtatatttgttaaaaattctttcgttttcccttgacacgtgtaataagtttttcagatctgtatattttgggagtggtttcaaacagaacctcagggcctagttatggtaatattactgggttaaaaaaagtaggaaacatttctcttcctctatggctgcagagaactgaatgcatttttagaagaaattttggtagataaattggtgatttggagatgtgccaaaatatcagtttctcttttctgcgtggtggggaatttgtagtaatgaatgagt

SEQ ID NO: 307290 - DNA, 377 bp, Homo Sapiens
atgagcaccgcgcctggcccaacccaagggactcttaaccaaaagccaggtgataaggcaaaaagaagacttcagagcacaaagccaagaccatacctgttcccaccttgacttcccaggatacacacacaggggtaccacagaagagggccaaaccctcgaatatacgaatacctggttttatatgccaaaaacgggtctcttattagagacgttttagttttatatgtcaaaaatgtctctgataaaatcctatttggaaacaaattttccaaccttcactgattcatacttgaatttcagaaacatcttacattttctgacatttatagctcaaacctgtttgacaaaactatactacatgggggagctactgc

SEQ ID NO: 307291 - DNA, 112 bp, Homo Sapiens
ctttgactattccatcgctagggcctccagtgcagtcatcctcaagatcatcgcagtcagtactttggaaaccttcatcattcagattttaagtcagaacgctacgtttggg

SEQ ID NO: 307292 - DNA, 496 bp, Homo Sapiens
gtaaaggatgtctgtgattccttctaactggtctttgtccttgacagagacagaacaggggtcccttgggtcctgaaggaggggccccaggctcactcaggtacctgtagaggttctggttgaggttcattcattcaacagatatatatgaaaaatgtaatttatgcagtcactttccagtggcttggcataatttagtaaagaaagcagatgacaatgcctgggcctcaattctacttgaagtgtcagatacttccagtagagcgcataagcaggtcatatccacagaatgttagatgtgacagcctcatggcctcctctaggtatggtggcatcttcccaggttctgggactaggatgacatagcccaggaacaagtataaactgggtggatttagggttctgaagggtcttttgacttccaaacatatgtggaggaaatatgtggactgtagctgggaagagactgaaaaaaaccctgggtctcatctctctt

SEQ ID NO: 307293 - DNA, 112 bp, Homo Sapiens
tctcttcgacttcagaatcccgatggattaagtcaaaacaccacagtttgaggcccagtgccaggttgcgcgagaaggtcgcaacaagtccgcaaaagtcggaaggcaatag

SEQ ID NO: 307294 - DNA, 103 bp, Homo Sapiens
agtgtggaaggacctcttcaacgtttactctgttcaggctggacttcatgatttgtcctactgccgagatgcaggtcttcgtagcattgacatttttcttggt

SEQ ID NO: 307295 - DNA, 240 bp, Homo Sapiens
gaacagtctcatatcgagacaaacaatatacaattggttctttattcgcggacactgggtcaaatgctgaaattcgtaggcaatactccataagactatggaatggtgctttggcgcctccgcagaagacagatttaaagtactttatttaaaactagcaggtgggtttgtcactaggcagcctgactttggcctggtgtgaacaaatcacttgagggataatggccaagatataaaaat

SEQ ID NO: 307296 - DNA, 300 bp, Homo Sapiens
aacttttaatccatctttattaaagtgaaactactacttcaatatatgcagaaaacaacatattggatattttcacgtctgggataaaggttcaaaaggaagagaacgtcctgtttttaagattttataaaagaaatctatctctagtaccaaataccatattgagattataatattcttgcagtctaaatttaagctattgtttaaacttttgcattgtaaaaagaaaagttcatgtgtgtgtgtgagatgtcaaagtgtatcatagataatcccaaaacaatataacaatcatttaac

SEQ ID NO: 307297 - DNA, 314 bp, Homo Sapiens
  misc_feature (46)..(54): n is a, c, g, or t
catgcccaaaggatttttattggaatttgaagtgcagcatgcgaannnnnnnnnctacatcagacacagggccctagtaatacttaacccaggctatgactgaattattttgtattacgtgatgaccacagataagttgcagtacctgggtctacaggcaacacaatgtgtgtgctgcacaggctaatggctgaggcatttatcgacaaacggtggaagaagctcctccagaataaactttggccagcgtcaggtcatattgagacagaacaggtattgagtgtgcgttattcacatgcaagggtcgaatgctg

SEQ ID NO: 307298 - DNA, 396 bp, Homo Sapiens
  misc_feature (323)..(323): n is a, c, g, or t
  misc_feature (384)..(384): n is a, c, g, or t
tttatttctgtaataaggagatctctcataaaagtctatatcgtttacataatactcacggagtgttagataagtacacattatagagaaaagttcaaaacgtaagaaagactcgttatgtctacacataccctggagtattatagactccagaagcagcacaggtaattgaaatcagtaattgtcaccacttcagcaaagcagacattcctgatacctggccttggcgacatattctaccagcaggactgtggatatctgagtggcacactcaagatgttcctctagatatagtggcttttgcatcacgaggttagtgagancactcatgctttctcgtttgcagagcaacaccctgggcttggaacagatccttgtggaaanatggactatgtc

SEQ ID NO: 307299 - DNA, 493 bp, Homo Sapiens
gacatagatctcttaaagggaatttattgcttccatgggagatttagatagatgttactgagggattaagtagctgggcggcttaacccaggcatcctcttaatagggaaaaacctccttttcaggaagggaatcacaaggggccttggtgtctggaagccacaactggaagcaggcctcggatgagtaagaaggttcccaccaaaatggccaagagggccacagaaaaccccagggggcaggacacagtttttgtgaggtctggaataagtgttggaatcttagggtcccagtgttttagaagaaggtcatacaaggcccagtggtccaccttggagttcttaatttcatctatcgaaaggaggaaggtgaggtgactggtctttaagaaggaatgattaatcctggagaggaagctgggttcagaaacaccctctgtgactgagtggccattgtctcgccaggtgatgttggacccaagagagaagaagtt

SEQ ID NO: 307300 - DNA, 142 bp, Homo Sapiens
agggtgaatcccaggtctttaaattccaaatacacatggcggcatccatgacagtggtgcaaaactgcgagcaattggacttgacgccgcaaagcaacgaaatcttgatgaagcaggtcttgtgcagcgagtctagggccgc

SEQ ID NO: 307301 - DNA, 150 bp, Homo Sapiens
aaggagaccccccatcctacgagtgctgtcagaaggaatgggggtagacatactaaatacgcccgatcttcttaacacagggcgggcaaaaagcactaagggccaactgggccccaggaccaggggtattggtcatatttactccagtgg

SEQ ID NO: 307302 - DNA, 103 bp, Homo Sapiens
  misc_feature (57)..(57): n is a, c, g, or t
caactggggtggcaaccataattactgcagacagctggaaggaaatgaataccctgngaatctcatcagtgttaaagcaagaggtagctaggtagaggatagt

SEQ ID NO: 307303 - DNA, 328 bp, Homo Sapiens
tttgggatgggttggagggagttggtgctgtgcaaggcgtcaccaagattaaattccgggccatcgtccagcaggcgtgcgggagttggggatctgcagcctcgagcttgaccttgattttcagcgggggctcatactcctgggcctggcggtgtccctctgggcgggtcggtgccagctctgactcgaggtgcagcaggagccggttgaggtgctccatgtgtagggcgtaggggacctgccaggtgcctcaggctgttctgcaggcttgccttcaaagttgtcagggaaggcaggtggatctccaaggacttgactgtacgtctca

SEQ ID NO: 307304 - DNA, 363 bp, Homo Sapiens
acaacattttattagcaaaagagtagtgagctgggaaaaaaggggtccccctccccccaaaggattattgccctttccccaagggtggagccaagcagggaaaaaaatggacccagggttgcagcaggttggattaagaaaaaattattccgttgttcgggaaggattgacttgcagaaatgagctcccaatatttatccagaagcgccttgaaattggggggttgtgaacccacaagattaacaaggctgctcttgctcaaaaaaacggacacttccggccccttggagacaatttaagggagggtgggaaaatattacattctgcgggtctctaagtctaagtgttctgccctttttctct

SEQ ID NO: 307305 - DNA, 250 bp, Homo Sapiens
tttgtcttaattctacgtaggcagggcacccagaaacttcccagggggaaatgcttggtttcaaatacacagcacgcagaagatgcacttctaccggcctccgctggttgctgaacccgaatcctctcttgggctgaaggataggctgcttgttctccttgtacttaacgttgctttaagtccgggaatcagccagtacctcccagaggagaactcgcccagctgccaccaccaccaatgtatggaatgg

SEQ ID NO: 307306 - DNA, 203 bp, Homo Sapiens
attttttttgtactatttttaaagaaaggaatgagaagaaattatccccggaccattcctcccggtgaaaaacatgaaatgtgactatccggaaatggagtgtgatcacaggggcacgtacggctgagtcatccaaaacgctgactgtcgtgtagggctccgtggttttggtggttttcttaacttctctgtgccctggttac

SEQ ID NO: 307307 - DNA, 314 bp, Homo Sapiens
caacaaagcctactccataagcatcctggttgccaaacatacccaatttaccatttctaatctcttttttaaatgtataataattaaatttccctcttacatagaactgcaagtggtgggctgacattattttgtaaaatcctgtgtaaagtgcattttgcatttaagcagaaggtcttctgaattacttaacatattctgtttttccctagccctactgttgttattattaaattaggaagcattttaaaataactcagagatttatgttttgcttagatctgttctatcatcttttattgatatgatcctaa

SEQ ID NO: 307308 - DNA, 416 bp, Homo Sapiens
gttgcttctgtgattgaatattaaagacacagttcatgtttctattagctgagatgttcacctaaaaatactatcatcttcaaaaataacctctccattcccacaagagcaccaatacaggacagaaatgtcgaaaggcatacactgggttatattttgctttagtgcatcagcgctggaagaggcaagagtggtgaatggactgaatcatagaaacctaatacttcagctggcagttcacagttgaggatgggtgtgggaaacatgcatccaatctgtgcactaacgaagcaccaataaacaaggaaatgcaatgcagatgtgacagccgggtgtctttcaggagaagctgcaagggtgactgtgactctaacatggtgttaaactccaggatggctaaatgatcagtgcctaat

SEQ ID NO: 307309 - DNA, 408 bp, Homo Sapiens
  misc_feature (204)..(285): n is a, c, g, or t
tggtcacctgatttcctaagcacctgattaggagcccctcccccagacccatgggatgaatcccacaggtctgaagtaatcctgaaaatcccattctcctttgccagtgattggtttaaaccaacgaaacatacaggaaagtcatctgggaagcttcttgaaagactttcctcaatgataagatgagagatctgatgcggggtnnnnnnnnnnnnnnnnnnnnnnnnnnnnnnnnnnnnnnnnnnnnnnnnnnnnnnnnnnnnnnnnnnnnnnnnnnnnnnnnnngtagtggatgtggaggtgcaccactcacatccagaagactcactggcaggtgtgagaaggattggtaaactgagagctctagctgttagctttatttatgttggcattagttttcaaaagact

SEQ ID NO: 307310 - DNA, 284 bp, Homo Sapiens
caggtgagccgccgctcccggcccaaatcagttgatttctatgttgcatttcactctcttaagtttttaggtcatggaaatgtctgtgtattactcttaggctactgacaattgtgtagcaagacacaccagcatctgctttgcaagtgtgttcctcgaacaccgtctcctcccggcctctgcttctttgctcctgggtattattactttgaccccttcgttgcacccttttcccatgtttctggagccaagagcatatttactctaataatatggtaaaaggc

SEQ ID NO: 307311 - DNA, 213 bp, Homo Sapiens
agatccaggacatgttctcatctggtcactacaaccacttaagtggctctctcagtggagttaaaattttacttttgctttgttacatgtagaaatgagactgttaacccactcttaataatagacatgttttgggttgtttttctagtaatgaggtgtgcttttactgagccatctctatctctttagaaaagtcctctttgggtccaagag

SEQ ID NO: 307312 - DNA, 321 bp, Homo Sapiens
cagccttctcctctctttatctgattaaaattctgtaaatgatttgttttctttgaagatgtggagtggtgtcagagacttgatttttaatgcccatgggaggtagctcacacaggaaagaaagaaatcagatgctagaggtgagaattccagtaaccatgaacagaaagaacttggcacagacttccctgcctctcaaacacagacaacctggggcatgcctctcccattgttcgagctcctgaagagtcggagtcatgtctctgattcaccaaaatgctgaatgtcacatctttcataaagtaagagcactgtaagtag

SEQ ID NO: 307313 - DNA, 440 bp, Homo Sapiens
ttttgccattccctgcaccaggcatcatcctgaaggccagagtttatagcccccattttgccccacactagagaaacagaaagagcaggtgtttttcttccttcctgaccaaacctcaatagctggataaaagatgattaattctgagtagtgctgggattgcaacaatactgtttcactcataacaaacaggaaaaggatgcagacaaaagaagaaactgggtctcttgaaacatccagaagacaagtgaggaccactggcccaataaaggagaaggggcagggctggcactcccacctgctccctgggctcaggaccctccaccttgacaagcagcagccaggctgaaggaactctgagctcagcctagaccagtaacagccattaacgatgacatgagtaacgatggccagtctttcgaggagacataaagcctgct

SEQ ID NO: 307314 - DNA, 417 bp, Homo Sapiens
atcagtgtggtctatatttcatctagctactccagcagccacatttctggtcatattttaaacaggctgtggtagatccttgcattactactgtcaactacaatgccctgaagacataccacacaggtcagatgtcttcactgaaacgcatcctagcagcggactgagtcctggtttatctggcaggggagtacgctgactgatattactcagtatacaatcacctctctggcagatttaaaaatcatatgcctgaaattgtaacatataaaaaccaatccaatcttctaacaggttatcttattccttgttacttgtattatgaaatgatttctgatacccaagatttctgagataccaaaaggagagaacagaagggctgtgagggagttaggggtaagagagggactgggaact

SEQ ID NO: 307315 - DNA, 348 bp, Homo Sapiens
cagccaacgtatgctttttcttgaggaagggtatttcatatactgagggcgcacaaaagccaaacatcaacaaccactagtcatatataggccccacattttctcctctaagagaagaaaggaatgctcatttcagtccaacagtaggcggatgctgcttcaacactgcattgtgcttaatccagcccttccatttggataaaaccctccttctctgtgaacgttaatgcataagaaacaacacaatacctagaatatctagtttagcatcctaacataaaagctggagttctaacctcctggaaaactggtaacacagcttttcataacaacatttaacatatgggt

SEQ ID NO: 307316 - DNA, 449 bp, Homo Sapiens
gcaggatagagagtgtgcttataatttgacagaagtctatggcgtccaaggcagtaatgtacacaggtcttttaaagttgcaagatgggtatacaaagttggaagcagaggaataaacttgcctgcttggggataataatactggaggttggaacatgaggacattttaaggaggagatgcactcaaatctggtgactatagcatccctgatggtcaaactgcagtgagttctaaataactagagaagtggcagtaccacgtgtggcaccaacaccaactatcctgctcttttaagcacggaacttaaaggaagagaacccaagtaccctgcaaaagcatatggctcagctacccgtggtttcagggaggacaaacatgtagcctcctaggcagcagtcatggggatgggaggcaacgggacctcatatcatgcctcttgtgggagatg

SEQ ID NO: 307317 - DNA, 470 bp, Homo Sapiens
ataacatgaagttgtcagggacgctcctatgagaactgtttggaattgctgcacttctctggctaggagggaagtgagtaaatcaccaggcgcccctcccagctgcccgtgtccctgcgccgctcagctcctgccgcaggctggccgcgcaagcgcgtcctacccaaagccaccagccccgcggggaagggactcgggctgtggggcgcgaggccccaggactcggggacccctctacctcggcggcacgtgcgaccctctttctaacgcggccgtggatgtttcttcccgggccgcagccaagcgcggttcttcctgggcggtggctttgggcttttcgtacccacagtaaagtcagttcacgtcgcctcccgcacacacgcgttcataaaacgaaactggagtttcacgaagcaattcttaggcttagcgtccaggaacgctgtagacggtctattctattctacccc

SEQ ID NO: 307318 - DNA, 188 bp, Homo Sapiens
gacttgagtagagagagtaacagggaagaacagtgtccctctggccgccaaaggatggctgagcccaagactggaaggcattcctgagagaaggaactaagtgctacaacaccacaatcagccttcccaacctcttgcacctttctttaaaagagcaattcagccgagaacagtgtcatcctgtgctc

SEQ ID NO: 307319 - DNA, 564 bp, Homo Sapiens
aagcagtttcaagcttacagaaaagctgtaaggcaagaactgagaactcttcatgtgcaggcctccatagaccccagtcacgcgctgcccatgtctgagtgacggtgtcttcctagcacaccacacttgccatagcctggtactgcttatagctctgaagtttgcttgccacggtacagatgaaactgtctcccaggagacctgaaagctgcccaacctgtgtggcggggacatgatcttaagggcttttgcacaacctgtggtaaagcaggcaggcaggcgctgacccctggtgagctaacagcctggccaccacgttggaaggtagattccgactcaggatcatctctagttttcacatgaactttaaatcagaagcgggaacttagctgagaggtggaggggccctggctggtgctggcggtagtggaaggagtcactgttttatggatgccctcgagtcttgacctgttagtgagctccaggaacttgtaagattctggagctggataaacaagccatttcccggtggtgggaagtcgaggtgaggggctgtagaaggag

SEQ ID NO: 307320 - DNA, 398 bp, Homo Sapiens
  misc_feature (140)..(189): n is a, c, g, or t
agaatttctaggtttagcttttgtttaggtctatcatccattttaaaatctaaatttttcactaaaattatgtatgtgatgtaaaagtcgaggttcatttctcatatgaatatatacttattccatttgttgaaaagatnnnnnnnnnnnnnnnnnnnnnnnnnnnnnnnnnnnnnnnnnnnnnnnnnnagacagggtctcacccttttgcccagactggagtgcaatcacagctcagtgcagcctcaacctctccaggctcaggtgatcctcccatctcagtctcccaagcacgtgggaccacaggcacacaccaccacacacagctcattgtgcctttgtcaaaaatcaattgtccatatatgcatgggtccatttttgaactctattctgtccat

SEQ ID NO: 307321 - DNA, 133 bp, Homo Sapiens
gggtcgtagactcaggattcgggcacacaatttggttgttatggacccctatgatatcgattaggcaggtaatgccttttgggaataatccgccattctggataaaaatgtcctgggtacagcatcgcgagat

SEQ ID NO: 307322 - DNA, 402 bp, Homo Sapiens
atgcattacacacatctaggctattcacaatcacccccaagcccaccctgtgtgcgtacagtggaaacaaattattaggaaaatgagagtcaaaggggctatgggcaatcccccaaatcatgccagctctcagcaggccggcccactttctcaggttccacacaaccaccccagtgtctgccttctccatctgccatctagacacggacatgaggcctggaccactacatcaggcccctcattagtttattagccttaatctacttctttctccaaacagatcaaacccagatcgctcacacggcaggctcacaacctgaggattttctgctccttgccacacaccagctcagccgaggccttcaggacctggcctgaaccaaccctcattcccagctccac

SEQ ID NO: 307323 - DNA, 340 bp, Homo Sapiens
aatgatgtattttcattcttatgactgttaaaaagttaatataagggtattcggaatcatctggctgatcaccttcatatctagtactgcatcatgtttggttttcacattcctgtttaggggtgtactagtgtcaagtagttataatttaatcgttgaggactaaataaaaaggagcagaggtgaacctaatatgtaaatgacgcatcctaccaagtgaaagcgaaattacattatcagtgagtttctcagtgccttgaatgcagaaaaatggtgagaaaattgagtcatcacatggcataccagcagtcctgatataatgaactaaaaaagaacttac

SEQ ID NO: 307324 - DNA, 347 bp, Homo Sapiens
aggaaaagtgcctaagtgaaattattgggttaaagagtacgaacacatgcttttaactccagaaaggattttactgtttactagcatagatttctttcaaatttttgccatttaaaatttttcattgtatatttaatgtctgcttatttgaataccctttagattggcatcctgctttttttcccagaagctttttggtaaattatttttcctaagtgagttgttcatatcctttgccatttttctattgggaagccagatccttttccatactgaatttttaagagcgccttatggattcactatatatagtgtccatttacaaactattacaaaattttagtttg

SEQ ID NO: 307325 - DNA, 514 bp, Homo Sapiens
catgattaatgttatgaataaaattcaatcaacagataaaactgacaatggttggctgttatcaaataacaggtaaaccccagagccatgattggaaataccagttagctaggcaaattctctataaaaagataatcttcaaaaatagctcattaatcaaaatgtctgctatttaatgcagaaggtagttaatctgcctaataatggtgcttctaactatgaccatatagttttgtgtaagtacacatttgaggtttcaagataattagacataatcagttgcttcatcagtttttctttttccccacatgggttttggccagtattaatgctaatggttatttttcaatcagcttactgcttaggctacagctataaaacatttaattttgttacttttttctcaaagaaagtaggcttatttactttagattttggcttgtaagaaaactcgtggaagaattataagagatcctatattacctagccaaattaatggagtctacaggaaatt

SEQ ID NO: 307326 - DNA, 152 bp, Homo Sapiens
accatcatatatgccctactgtgtttttctctcatatctagccaacatcattgaccccatgtcaccaataaaagaagagtgtccctgtaagttggaagaaccactcagttctgtcacagtgatccaggagtagtgccagaaacctgaactga

SEQ ID NO: 307327 - DNA, 295 bp, Homo Sapiens
cagcacgcatctccacaggcggtgagtcagactgagcaagcgtggcttacagttttttatttacaactgcaataggcacatactaccctctcactccggccagtgctaggggaagagcctcaaagtctggagtatctggtgtagcagctcctaagtgaaggtgtaaaaaatcaatagcactgtcatgtttctcggggtctacagatgaggcgacgaacaccgtggtcagcgcgtgcagcacccccgggttctccaagtacatgcggatctgctcacgcttggagtcggcggattt

SEQ ID NO: 307328 - DNA, 139 bp, Homo Sapiens
tggcggcaagaagagggtatagtgtgaactgggctgatcaggcttcatacgtccgtggcatgcagtcatagatttcaaggtcgccctcagtcagcacaaccagggctggtctccactgatacttgctctcccctggcag

SEQ ID NO: 307329 - DNA, 468 bp, Homo Sapiens
aattatgaatctttatatttttatgatagttgatagtttacaaagctagtttcacttgatctttacaaaaaaccctatgggtgatatttttattacccacattttattgataaggaattaaatctcacaaaggtttgaagactttcccaaaagtgtcacaggacaactaaaactagttaaccccaaggccctgtatcagaatgatcacctgcctttcccccaccaacccacactcaccaggcacagtgtccaagaggctctgctcttatctcaatgccatctttgggttgcctcatcctacctgcaatgcttaccttcaaagcagatgctgacaatgtgtttggattttggaggcttgactatgagataaaactgaatagtgctggacacatgttgagtttcagttttctgacccttctcttttgagactccaggtccaaccctcatctgtaccttcagattcatgga

SEQ ID NO: 307330 - DNA, 124 bp, Homo Sapiens
acatgtgaggcaagtaagcggtgtcacgagtaggttcaagggtaggtagtatgtctaggtgttgcagtaggccatatgtaggcttcgcgtgaccgaaacattgcaatggagtaaataggaagag

SEQ ID NO: 307331 - DNA, 183 bp, Homo Sapiens
taccaatcaggggttatgatctgccatgtgttcatttacagagtacatacataaaagaagcacagtacacaaattaatgccctgtgtgtatgtgcgtgtgtatgtgcgcgcgtgcgcaattgctggggatactgactggtacgataggctttgaaccagatgtgcatcgaaccaacacagtgg

SEQ ID NO: 307332 - DNA, 472 bp, Homo Sapiens
aaaaaaatcctgttgatgattacttaaacagaaaaaaagaaagatttcaagtcagtctttaaaaatagaggcctctcttaactgtttcaaaaataagactgtttctgatagggtggcctgaaaaaggtactggcactagagacaaacaagctgcgctctccatcccaggtgaagggacctttcaacaaatcagcactgacatttatatgaccacagagttgcatgagtaaccagggggctggtaccacttctctcccagaggaggcggacttcaggggctgtggtaaacaaataccttccatcctacagtaattctctcctggcagctggggtgatctataagacaggaccctcagtcctcagcctccctaagaaactgtttcttttggcagatttcctggtgtcctattagaaatatttctcatgtggtttagcagtggtgggatgcggtaggagaaagccactccatcat

SEQ ID NO: 307333 - DNA, 463 bp, Homo Sapiens
acaataaatgcatggttttatttaaacaaaaaacacatttttattatttaattttctagataagtctttgaagatgatgcatgcaataaagattatttgcaatacccatatttgatgcatcgttttcacaaccacatggtttagcatgaaatttaaattcagccaataattccaaggtgacagttttatctacaaagcctccatttctagttcaaccaatttatttaatggaacaatttagagcacttgtttaaactgatccaaataacattcaaaataaagtaaagggaaataactttcaaatgcaatttaataatagaaactattgctgtttttaaagcaatgaatctaagcctcaaatgtaagtgttaattgtacaagttcttattaaagagattcaaggaagatagcaaagtaatcattataaaaacgttaacttagataaaatcaccactttcccata

SEQ ID NO: 307334 - DNA, 411 bp, Homo Sapiens
aagttgggagcatccaatcacactcatctctgaggttagaacaatttaccttgtggaaatccccttcgtcattgaagatgaatcttgctcagctaactacttcccagctgctgggcacaggaatattcagggccaccattaagcctacccctcagcaaaatctccccatggctgaaggcaggacagttcaacaggaatcctacggagcaaccactgcaaagctcactgagtggacttccaggcattttcacacccacaggaaaaattgcaagaacccataaagccatgctgaggagtataggacgtcaggcacaggtcagtgctgatttcatcagagcgctgttcagatcgcttgtgctgccattcctgtgaaaacactgttccagtcatgtggctgagcagtgtgtagac

SEQ ID NO: 307335 - DNA, 172 bp, Homo Sapiens
acataacaaaccagtttgttttccgatctgattgttctcaaaggaatgtcctttccttctccgttactctcggtttaattggaatagtcctctgactcaggaatgacctacttttggctaataaagaaacctctccacccccacaaacgctgtcctgtgagtccccttcctc

SEQ ID NO: 307336 - DNA, 413 bp, Homo Sapiens
taggaaaacaggttttagctttacctgttgaggcaaatatttgagctgtacattgtagattaatgaatgctactggagaagtaaagaagtctggacaggagggaaccaccacccattgtcctaacaatgcacatttctattgctttcttgtcttgaaggcatatatatcacccaaatggactaggttcccacaaaatttctactttaggctaggcactgcactagctcccacttctctaagctgttatatctgtggaatttgtatgggacacccagtacacaaagtaataaaaatcataatgtataacaagtctctttacaattaccttactgcgtcttgtttcagtttcatatatataataaacaggcagctctgcttcagagatgttacgtatcagcaactaacctactaa

SEQ ID NO: 307337 - DNA, 267 bp, Homo Sapiens
gagtattcttaacttatggcaatataattgtttgcataagtgcaataagaatgttttcttttgaacaggacacagttgaagaaactggttattttaccaaggctttgactggaatggcatgctttcctttaaggaatcaaacttgacttgtaaagtcactaatagccccttaagaaaacttgcctcaaaccttgcctacgtacctcctctacagggttcctgacctgtgctaagtgaagactgtcactttctgacaggcctaggagc

SEQ ID NO: 307338 - DNA, 350 bp, Homo Sapiens
gggtagactattactgcctcaatttcagaagtcgttattggtctattcaaggattcaatttcttccaggttcagccttaggagggtgtatgtttccagaaatttattctctttttctagattttctagtttatgtgcagagaggtgtttataatattctctgatggttgcttgtatttctgtggggtcagtggtgatatcccctttatcatttctgattgtgttggattcttctctcttttcttctttattagtctagttagcagtctattaatttatttcaaaaaaccagctcctggatttgttaatttttgaaagattttttgtgtctctgtctccttgagttctgct

SEQ ID NO: 307339 - DNA, 522 bp, Homo Sapiens
  misc_feature (360)..(368): n is a, c, g, or t
gagatggacttgaaaagacaattctgctgtgaactgtagaatgtgaagacgggagggaagaccatgaaaaatggcacatattcctacaccacatacccccaaagtgtgttttaataggaaactatggatggacatatgctaagtgtttgtgagagttatcagcagagggggaaagctctgtattatatgaggctctttacttttcaacaaaaatacctccacctggggagggaaaagaggacacttaagtatcaccaggtactacaaatcagtgaaaaacagagtcacaaaatttattttctctgctgtgctattctcattacaattgccacgttatctgcaagacgtctgaattaaaannnnnnnnngttaatttccttttgaggaagtggtgatgactttacatgaacctattcaagccttggaaactgagaacaagatacataagagctgtctttaccatgtggagagcatttaaagggggactgagttctgtccagttgcctgcacaaccaagaacaa

SEQ ID NO: 307340 - DNA, 151 bp, Homo Sapiens
actcctcataaacccttcttgcatgtaagctgcacaagagctggggcctggccacccacattgaccaccatgtctctagggctttgaagatacctggcacatgggaagcttcattaaatacacattagaaaacatagaagcacatgtacaa

SEQ ID NO: 307341 - DNA, 106 bp, Homo Sapiens
gatcatgtgaactggaaccaggattttgaacgactaaagcctttacgacctcccctctggtagggtctgggcagttgacaatagttgatgcttcaacagaagggtg

SEQ ID NO: 307342 - DNA, 114 bp, Homo Sapiens
aacaatggatagaaacaaaagaaaggacaaataattccaaggaatgtaaaaaaggacaaataaggggacaaaacaacatggaaagaaaggaaacatagggacaaaaaatagtac

SEQ ID NO: 307343 - DNA, 705 bp, Homo Sapiens
accgcatttctccttgacttcactacaagttaaatgaacgtgccacgcgccccggctggctaaaagctgcagggggtgacgggtcacccatggccttttcctgaatcccagggtagaagcggtacactgaaggccaagttctcactcaccggcccagggaagtgggatcatgcttttactgggttcaaaggatcccttttccctcctggcagtgctcaggacccaagattcctcatggtggttgttaactgccctcaactaggcaggcccccagccttctgattgttagtcttgtacaaaaaggtaacccctgtggccagggggaacatcttttttatcatggggagcataatttggacaattccccggccctgctcaagtgtttggggcatagtctccctgtgaggtcaggtactactgcccctaacaagggtgagggtctgtatggggctcgatgaagtatgagctccccatcaggaaccgaaatttggataagttgcgaaggatccagaggagttatgtggacttcccagccctgaaatagctctctccgtaaagtaaggagtgcaggctggctcagaatgcatgtctgctctttggaagaaacaccaggaaagcccgacgttctggtgtcacggtagagcgaatccgcttgggatgggaattcaagagataccctcctgccttccctggttaggttacggc

SEQ ID NO: 307344 - DNA, 166 bp, Homo Sapiens
ggttggagactccatagaagtggacaggggctacttccatcagcaagccgttgatcatctggtgaacctggaaccatgtgtcaagttttccaggacagtactgctcaggaattcgaacttcatataggccggctcctgtgatgtaagtctcagccatgaagtagag

SEQ ID NO: 307345 - DNA, 290 bp, Homo Sapiens
tgagcaccgcgcccggcccattaaacatattttatatcaccacctagtgtacacaagcatatactcacataacatacatttatatacaacatttatacaacaaactaaaatgtcataaaaaacaatcctctaactacatgtgatacactctcatagcttccattctattctacttttttaccatgctgtatgagatctaaagtgttttctcaacccactaattggtaatgaccagcagtttgaaacatgaggaaagttatctatggtaaattacattactaatacaagcc

SEQ ID NO: 307346 - DNA, 145 bp, Homo Sapiens
gactgttctccaaagtctgcttttgggtaagccagtccttggggtcggtgctaggtatatatggagcttgattaggactgagcgctttgcttccaaggtgctattcgctgagatggatggcgactataccggatgctgacttccg

SEQ ID NO: 307347 - DNA, 313 bp, Homo Sapiens
ttttttcccaataagggatatttagaccatggaaaacccccttggaacaggttcaggaccaggaacaaaaaggggccacggctggtggtggggagcccacccacccttagtgaagctctctttgctgaaaaaaattgacccagggggcccccagcttctaggggtaaaagggctatttctaatggggtgtctgaacctactccggggctcatgggggcctcgggtccccctttgtaagtcctcacccaccgtgggaaaaaggcatttaggaggatctagcccccttatctctgaaactcggttacctggtgtg

SEQ ID NO: 307348 - DNA, 139 bp, Homo Sapiens
actttgtcaactgtaacctcgtgcccattgctttaatttttcccaaggcaccagaaaacatttttgcggccgttttcccttccgcattctgaatggaaacgcggccgccctcatgcataacacaaaggtcttccggggc

SEQ ID NO: 307349 - DNA, 170 bp, Homo Sapiens
tggagaagttggaaatgaatgcgcctctgggggtctgaacatcaaacacgacattactgaggctgcggggaatggtctcccacattgctctggatcatggtggtgggcaacgagaagtaatagtagacgggacttaagggctagacagagctacttgatcaacctcttcc

SEQ ID NO: 307350 - DNA, 328 bp, Homo Sapiens
agatcccttgcacaggtcattgctgatcccacataggctattcatgttgtcatgactgatgtctgaaaacacaatttttcgatgctacctattataggacagtaagactttacttaggcccatcattccaggtacggggcacccagcaatagtgacttgtagtaggggagagaggctggcctcatctctgcataccccaatgcatactggggatttatagacagggcactgggtcagctgcgatgaatagaaaattacgaagaggtaatatcggggagcattcatctcaaccgcccaaacaggattccagctgtatgtaggccagttg

SEQ ID NO: 307351 - DNA, 490 bp, Homo Sapiens
gcttgcttccctacttccagctgccagcaagtcagataattaaatgccaaagtagtgacacttggcatttcaatgagcgttctgtatttactacacggtttctctcgacagccctcctgctcagcatgcgtgaagctctacgctgctctgctgactgaagcgctcttttgttgcagggctggacgaactgaagaaagatgaactcgggcagcagcaagaactgagaggagggagtcagcagattccctaacttctctcctccgctacctcttggagtttatgtcctcatttcaattaaacaagcctttgttaaaaccttagccctctgtgctcagccctctactgggacatctttaaaatgaattttgtattaaaggagacaggactttaggtcttttcacttcaaccaggtactgccagaatattgcactatacatgaatcagaaagtgagttcaccttaataagctcacccaattttatacaaaagct

SEQ ID NO: 307352 - DNA, 420 bp, Homo Sapiens
  misc_feature (281)..(375): n is a, c, g, or t
acaaacagcaatgtctcagctgaacattgggcgaggcattccttaatttggtaggcgccggggagtgctgcagatcagcaggggatgtgaaacaatgacagttacattttgggaagcttatattataatggcagtggcgactaataagtactaaaactgaaaagaacaaaaacttgaaaaccagttattggaaccaaattttctataaagtaacggatcatggttataaaaaaatcttttttcacccctagaattacgtttcacatcatttttttatgacnnnnnnnnnnnnnnnnnnnnnnnnnnnnnnnnnnnnnnnnnnnnnnnnnnnnnnnnnnnnnnnnnnnnnnnnnnnnnnnnnnnnnnnnnnnnnnnatatttcacttcattttaaccacaaataatgaattctatttttcc

SEQ ID NO: 307353 - DNA, 125 bp, Homo Sapiens
ggaaaagcaagagatgggatgccataatagtaaacagcccttgtgttggatgtaacccaatcccagatttgagtgtgtgttgattatttgtttgtcttccacttttctattatgtgtaaatcact

SEQ ID NO: 307354 - DNA, 175 bp, Homo Sapiens
atttatgaaagttatacttgggtaaagtaatagatgtgactttattaaaatttcttcaattttccctacctgtattcctctactcctttttataaatgaggaagcaggcctacaaagataacatgagtcacccaaggagaagaccgacaaatcattcaagcctcacctcctctgt

SEQ ID NO: 307355 - DNA, 217 bp, Homo Sapiens
ggtggggagatggagtgggagttagagactgaagatgatgttttcttccaagtccattgttaacacagtgcagggggaagaacaggggccaggagtaggagacttagtttccaggctcctggtctgtgagtggtctccacattgtccatggctcccaaatccactatttctgtgttcatagatacacctaagatggtgtatcaccaaataccactgt

SEQ ID NO: 307356 - DNA, 512 bp, Homo Sapiens
agggaaataattttcaacctaaaattctatcctcagcctaattatcaagaaagaataaaagacaaaaaaatcattttaaggcatttaagcattcaaacaaattacttttcttaggcagttactttctttacttaggcagttagcgggggcagggaggacaaagaaaaaggaaaccatgggaggaccacgcaggaccctagctgagaacacaggaaagggaagtctcaagataaaagctggaaagcaacctgtgcagcaaacagttccacagggaacagaaggaccatttaatgtaacccttgataacttaaaaaagcttgaggagaagacaaaggcaggtaatttaaagggatgtgtggggtatgtgagatggggaagccaagaactctagaacaaaaacaaatagctaaaaagaaaggaaatgtaataccagttgtgagttcaggacttcgagctgatcaagaaatgtaccacagaacaggcttttcgagcagtgttggaagggtgctgat

SEQ ID NO: 307357 - DNA, 154 bp, Homo Sapiens
caaatatttctagttcttcataccacatttggctgatcctttcttggccctgacccaatctactcagtcataccttttaatataaaaataggtcttgtaaaagtaataaagttaattctttgcttagttttccttcttctcataaaactgggat

SEQ ID NO: 307358 - DNA, 533 bp, Homo Sapiens
  misc_feature (74)..(208): n is a, c, g, or t
  misc_feature (317)..(327): n is a, c, g, or t
  misc_feature (437)..(437): n is a, c, g, or t
ctctaagctcttagagtgtcatgatttgtattttaaaggtactcttttggtactatagaactggcaaagtttannnnnnnnnnnnnnnnnnnnnnnnnnnnnnnnnnnnnnnnnnnnnnnnnnnnnnnnnnnnnnnnnnnnnnnnnnnnnnnnnnnnnnnnnnnnnnnnnnnnnnnnnnnnnnnnnnnnnnnnnnnnnnnnnnnnnnnctagattttacaggttttttttagtactaacattggaagaacacatgtcagggacataaaatcaaatatcctgtgtccagcaagagattacatattttcagtaaaaacnnnnnnnnnnnaactttgcctttgcttcctagactaggtcatgacagctacaaaaatctctagcattagcaccactttttcacaggcagtgtttctatcattgcatggggagaagagttanaaatagtaggagaggagatggatctctaagcttaaccctacatttagggaatggaaagccattttctttacattacagtgttatgccattgcacat

SEQ ID NO: 307359 - DNA, 450 bp, Homo Sapiens
catgaaaaggcatcaatttagggtttaagactgaggaatactgcatcagagaatcttgctccctaatttgatgataaaagatatctgcatgttatttctgcttaacaccctatttcactttatcacaaggtgaatgaatctgctgcataatattcataatatgcattttagaataaatgtatccctactcattatttagaggatgaaaaattacaatcattccactgaactggaagttaagacagccacccagccactttgggctcctcacacctctgaatcaataggcaaagaagggagttacagtgttggctggggtaattgatcctgcccaagaggaactggaactgctacacaatggaggtaaggaggagtatgtctggcttaaggagatctcttaggacatctctgtaccctgccctgtgattacagtcgataaaaatgacaaca

SEQ ID NO: 307360 - DNA, 214 bp, Homo Sapiens
ttagaataactttaatttatcttgaattttacagaattctacgcatcgattttaaaaaagcacctctttaccccatatcacgtttcttcgacaggtgttaacgtaggctattatgtatgtcaacagcttcaggcatcagctccttgcaaggacttcagaccatccactcgccagaaagcctcgcagctttttgatcttctttttaacaccacgg

SEQ ID NO: 307361 - DNA, 157 bp, Homo Sapiens
tctcctcatgtagagagggagagacggcggtattatcgtcgcacacattgaagaagacaaagggtttgtagaccctgacctcgggggggagatacataggtatggggtcgataaaaatggccccagatgctccagtcccattctcgtcaaaggtcag

SEQ ID NO: 307362 - DNA, 497 bp, Homo Sapiens
ggtctcattcggttgcccagaccagtccagactcccctccgaccctaccccacttccactgccaggatctgatgtgtccttaggtggcccacacagtccttcccagctatctgcagctgctgctggaacctccttcacgcaggcagaaatggggtttttggccctgacacggtgtcctcttacattccccctgagctggctgctagaactgggccatgtctctaaatgcccttcagtctttcacaaagcagggcgcgcggggtgtgtgaaagttcaggctgtgctgatgggaacaacccatcccgtcctttcccattgctcctccccagcgttggctgaagcactcctttattcactggacaggttatctcgtaaagaaggcgctacgttatgaactcagtcagcacgtcggtgaaacagcccgagatcatttgaagctggttgcagggctttgtttattctttcagtttttctatagttactgaaggaggcgcgta

SEQ ID NO: 307363 - DNA, 266 bp, Homo Sapiens
gatctctattaagatagtgagttcctattcagtgaagctacaataggtaaattactaggaatcaggagaaatacagaggggagtagttcatatatcataaacgggaagaattatcttctttccaagatttttcaaaactaggttcctaggaaaatggcaaaccagcaattcttattgagctagtgtgtagagaaagttatgaatcaaagaatcacagttgtagatggctcaggttcggcaaaatacagttccagctgtgtacatgg

SEQ ID NO: 307364 - DNA, 166 bp, Homo Sapiens
aaacaagttgcttgaagtttatatagccagtaagtagagccaggtttcaacccatagagtcttgattctcaccgatttctctagccaactgcatttttccttatttggtctcctcttgggatctccccaactgcctttgtcctcagaagctttcttcatagtggtc

SEQ ID NO: 307365 - DNA, 476 bp, Homo Sapiens
ggataacctgaaatactttatggctcattcaccatttcaacatcaacaagaggagaacaccacaaatacggcaaactgtctagctgctcaagaaaatggtgcccccttcctcccaggcacacagctggacacatttcccaaaatctctctaggtgggccatgtgacggattctgtccaaaggaacatgggcggaagagatatgcaccacttccaggcctgacccagaaacattttccacacagacttttccttcttttcctatgtgctctttcaacaaagagggctctatggactgagagaaaggcagagcccatagaggaaggagcctgggtcgcagaaagactaggtggaaagctgtccactgaccacaaacatccacatgggacatcatatgagagagaaataaacctgggaatagttacttaacttctttgggtcctagtctctgggcaaagaggaaaagctcaataaatat

SEQ ID NO: 307366 - DNA, 365 bp, Homo Sapiens
cccagcacacctttattgaactctacttagctccagatttgggaacactaggaccttgcccctgcagtgcacagtgtgggtgtggaagagggggcagcttccaccgtgggtgagcttgctactccagccgttacgcacagagcctgcaagcgtacgaacggagctggcaacggtgcaggcagactggggcgatggctcgtcctgcagaacatctgtcggagaagtttggctgcatttaagagagttgccatccaaaatgcccgagattttaagtttggacccagaatgcagaaagtgtctattctctgagaaacatgtatgcttcattctcccacgtcagacatcagacaggcctggggttggat

SEQ ID NO: 307367 - DNA, 207 bp, Homo Sapiens
ttttagtagttttacagtttaagtctttaatcgattttcagttggtttttatatatggtaggaggtaagggtccaattttattcttctgcatgtggatatacaattttcccaccaccattcattgaagacttttttttccccattgtgtattcaacatttagggactggggctggggaatagagagatgttccccacatgtcacagg

SEQ ID NO: 307368 - DNA, 317 bp, Homo Sapiens
ccattatccatctccattaggttctctcccacagcagaaatcaaatttatccatcatcatcatctgatccatccaaagagtatatcttaaactgttgcagtcagcgtctcgtacgtttttgtaagggctcgttctgactatatagatgattcctcttacagctgcattcggctgtctaacatttgcacgctggtgctgttttgagtgctacctccagctggtgaggcttcaaactgacacagagatgagagtcatcctctccaattctgtaggatcacgtcataggggtcaacacagacgttctgtagcttcacttg

SEQ ID NO: 307369 - DNA, 159 bp, Homo Sapiens
atcaacaatgaggaagatttaaatctgccatgactgaggatcctcagtggcacatgaactaggtccaaagctaggtccaaaggcaagtcccagaagggaactggcagctgttaaaggcacagctatttaatccactgtgattaagaacaggtgctttgg

SEQ ID NO: 307370 - DNA, 324 bp, Homo Sapiens
ggatgggtgccatggaagcccattcatattgaagggtgttcacggaggagttaacacagaaccaaaaaagttaggtagcctgatctttcttccttctttctgtgtgcagaaatctacataggtcttctaacactacttcttctctctgcctactctggctgtaactgacttctgacaggttgcacaagttgtactatcagatttctataaaaactccaagactctctcagccaaattaaagatctctggactttgtaagatggtagcactttaaataataaggcgggtgagcttcaaaattagataaactgtagctgaagattg

SEQ ID NO: 307371 - DNA, 110 bp, Homo Sapiens
agcagctttatacatattgtccaacactggacacaaatcaaatgtccatgaaaagataacagataaagaaacacttgcaaattcatacactagaataacacaaagcaatg

SEQ ID NO: 307372 - DNA, 340 bp, Homo Sapiens
tgcattcagttgcagatgtgccccgcatcaccaccattaaagtcctcgccatcctccagcacgcgccggcaggtggcgatctcaaccaccagcttgaccttcatgtccagcacggccacacactcctgggcctggcgccgtccccatgaccgggtatgtgccatctcagactcgaggcctaccaggatcccgttgattcgctccatcagatagggcgtaggggacctccacctacctcaggctgtccaccgagcagggcatcgcatttctcacagagtccacgtcgatcgccaggacaggaccgtacgtctcagctctatcaggtacgtgtcagcacctc

SEQ ID NO: 307373 - DNA, 296 bp, Homo Sapiens
  misc_feature (158)..(253): n is a, c, g, or t
ttttactttttatagagatggattcttgctgttttccaggctggtttcaagctcctggcctggcctgaagtgatcctcccacttacggccttccaaagcactgggattagagacatgagccactgcaccggcctgggagaacactcttaaacacattnnnnnnnnnnnnnnnnnnnnnnnnnnnnnnnnnnnnnnnnnnnnnnnnnnnnnnnnnnnnnnnnnnnnnnnnnnnnnnnnnnnnnnnnnnnnnnnnagagaccctggttatggtcaattgatttttgacgatggtgcaa

SEQ ID NO: 307374 - DNA, 328 bp, Homo Sapiens
aacataatgtaaaacacttcatagtgagagacaaaatgaatgcacgattctctagcaaggccagtattcttcaatcagctttgagaacctacatttcttattttggtaaactactgtcatgtttcctcaattgtgttaattgatctaccaggaagaagacaaaaatagagtttctagtagctttattaagagaccctgttaagattggaaggctgatggaacctgggtctggaccagatccgtgagatcagagtggtttaacagcttttatggtctgtttttgctgattcttacttttctgtttgtgcctagaagtctggaacgtttt

SEQ ID NO: 307375 - DNA, 385 bp, Homo Sapiens
ctagagaaaaacgtttagttttatactaagaagaatactttaaaactctacccccatcttttctcggtaacagagtttaagctttgagaaagtgaactttaatgttatttggcctgattcattcaaacgctatgcctggaaagctgctgttaaattagagaagttacatcaaggaaccaaacaaaagcagtaagtaaacgtcaatttggtttacatgcccgtaaaaaagagcaagactgctgtaaaggaaagaaagtcagaattggatggggatgtcttcaatggctgaaaggactgctaatgggatgtgtgaagcctttcttttctgggtcagcagtctgaatccaggccgggtcagtagaacccaaaaaagtcattattattt

SEQ ID NO: 307376 - DNA, 383 bp, Homo Sapiens
gtagaaatggaggtcttgctatgttgcccagagtagtctcaaactccaagcctcaagtaatcctcccacctcttctcccaaagtgttgggatcacaggcatgagcgactgtgcctagattaattcattccaatgaacaataagctatttgaaaggaagacttctctttcctgttcttagcaaatattcactgatatgatgtatacttttgttttgtgaaataaaaattataggaggccactaaactcctatactaggccccaacagggcagactaaaaataaaaatggagtcattcaccttaaggtctacatcgctaaacctaaactaagctatgttatcttctaagaaatcaggagagagaggacacctaatttcccaaaca

SEQ ID NO: 307377 - DNA, 184 bp, Homo Sapiens
aatctataaaagggagatgaagcaagatggctgaatagaagcctcaaccaatcgctgcccccaccacaggaacaccaaatttaacaactatctacacaaaaaagcaccttcacaagaaccaaaaatcaggtaagtgatcacagtacctgattttaacttcatattgctgaaagagacactgaag

SEQ ID NO: 307378 - DNA, 153 bp, Homo Sapiens
aaatacttttactgggatactcagtggtagaaaatggtacttggacagttgaactgatttttagcagtaaccaagatctgtcagctctgagcttggggaacatcattctgtttggtacccaaagcaacaagtgactattgagcaggggttacc

SEQ ID NO: 307379 - DNA, 149 bp, Homo Sapiens
gagtgagaaaaggggcacgtaacactattacgttttcatttgtatttttaaaagaatggggtggagtaagaaatatattaacacacgtctatataaatctactcgaatatgtgtggaacacttctgaaaggagacagaaatagaagggt

SEQ ID NO: 307380 - DNA, 420 bp, Homo Sapiens
  misc_feature (122)..(122): n is a, c, g, or t
agggctcggcgtgggaagaattcagtggcaggttagaatgccaggagacgggagagccacaggatggggtagagaggggacagtcaggactgggacaccgcagcaagttccctgagaagganatgaaccttcctcctcattgctccagaaaggaacatggaggagcctggaaaggtgggacttctggctccggggtaagcgggatcagatattagacaatcttactttgattggattattttcccattcctaaaccaatcgctgcagctgtggggatgaggcactgcatagcttagatgtggagggtgtattctggggccaaggagcaggatcagaacacacaaaccatgaagacagaggtgggtcctggagggattgctgccagaagttgggtggatagatacggggcaggcacaaagc

SEQ ID NO: 307381 - DNA, 371 bp, Homo Sapiens
ttaagaggatgcaaacatcaccatctttattaagcatcttacatgatgaaccatttgcacaattttcaccagattcatagtccagaactaaacagaaccaccgtggcagccaaacattttctaacattgcaaagtatgaacaatccatgcccctgggagttgctattctctcatcttttctgttggtcttccccaggttttacagcacctatttcagttactttcccagctcccatttgacttctacctccttttaattatttctctcaaggagaataaatcttttatcaatagtttgctattaaggcaagcatgatttttttctttgtcaaggttatgaggtttctatgggggtttgttttaccctgtgc

SEQ ID NO: 307382 - DNA, 135 bp, Homo Sapiens
tcaaagtccagaaacatacccaattattaatagatatttagtctaagataaagacagcattttatggtttttggaacacgatggaattattcagtaaacgatgtgacaaccagccagccatttaataaaaactgt

SEQ ID NO: 307383 - DNA, 418 bp, Homo Sapiens
tctctacgttatcttttgtaacctcaatcccaaggtggaactagaaagacaaccactagctccacatgtaattactatttacttcctttggatgtgttttttcccattatcagatggggaagttcaggtcttaaccaaggaagcctaagtgggcttgtgttcaggctctgtgggactccctaccccactgggtcacattccagctgtgttcttggctcagttcacttttgtggtttcaagaatgtaaataatttgcacttttaccctcttctttttatctatttctgcacaaggtattggtgacctgaatatatttccttgaattcatcgacttcaaatattccatttctgtaactgacctcaatatgttttcctcctttgaaacaataaactcgctaacagatcaacacagtctact

SEQ ID NO: 307384 - DNA, 289 bp, Homo Sapiens
acgttgacaattagtttagtagagcagaagtacagtttaaaatcagtacagttttaaaaggcagataggaaagagttcagaagagagcaggacaggcttccagttgtcccatctgacaggagatgcatgcacagcacttaatcctctctgaatgagtgtgggtcatttatgaaatattatcaaccagggaagctgagacttggtgtccaaggtttttattgggtgttagcacataggcatggagaacagaaatggcagatgttattcagtttccacctcccccggcgat

SEQ ID NO: 307385 - DNA, 448 bp, Homo Sapiens
gagctaaatactttagtgtaatataatgtgaattgcataactcttaaatggctaatctgttcttcagtttcgtgcgattaaagactagaagtgcaagtcaaatgccctaataaaagataatctacccatcaggtacccaacttacagtattttagaggctaggtaatctctagatgaaagaataagtttctaaatcatttggaattaggaacacagttttttctcatacatgcatattgcctcaaaagaaggagactcccaggctagctcatggttttctaacctcattaattgagcttacaacattcttatttcctctctcccagtatttcaaagcttctgtagaccaaggggttctgggtcatgacagcagaagtcaggaacagctcccccaaccccatggtcacaccccactgtggcctcagagatgagaaggtgaagctctgag

SEQ ID NO: 307386 - DNA, 101 bp, Homo Sapiens
gctcctggtggacgcggatttactcttgctgaataaggtgcctctggtgactttgcttcctcaagttctgccagcagtatctgtggaggagatctgctgct

SEQ ID NO: 307387 - DNA, 355 bp, Homo Sapiens
  misc_feature (102)..(128): n is a, c, g, or t
ttcaactgtgtatagtgtatgatgttaaccgaagaaggaaggtgatggagtgcttagattagatgaagcctgcctttccagattaataatatcttgttagtnnnnnnnnnnnnnnnnnnnnnnnnnnntctgaagtcacagagagaaggtgccatgggagaaaggttagaatctcaagctcaagtacagctaaagatgctgaatggggatttattctctacatttaactgtcctctttcagcctaacttgtcatttaaactgcaggaaacaccttaattatatctgggaattttactggaatttggagtacacttggttaataagacatgatttcctccgtgctcctgctgttgt

SEQ ID NO: 307388 - DNA, 375 bp, Homo Sapiens
ccaaacatttgtggcagtcaagcttaatgaattccttttgattattcatctctgaagaagtgctggttgtccagaacctgatatttgtaggaggtttatgcagaaggccagagtgcctccagttctggactgacaactttttcgtgattcagagatttacctaagagacagtttagcattttacttctcaacagccaatgcagacaggcagtctggaggtttttcacaatgcagtcatctcctccccaactgctatagagatagacacatattacttcctgcaaaaatggcttgtttatgtgactccttgtttggcttcatttccccgacttcttagaattaaaccaggtgcaggaaagctcctgccttgagctg

SEQ ID NO: 307389 - DNA, 233 bp, Homo Sapiens
ctaataaaaacttttgcaggtacaaattcctctctatatactgctttagctgcattccacaaatgtaacagactgtgtttacactttcattcattccaaaatgtttttctaatttcccttatttcgcctttgacctatgtgtaatttagatgttgcttaatttccaaatgtttgggggaatttttctagttatctttttgttaatgatttctattgcaattccacagaaactc

SEQ ID NO: 307390 - DNA, 318 bp, Homo Sapiens
atttatcaatgactatcacccaagatggccccctgagggtgaatttcttgacaaagaagttgctaacttccagttgccaaccacaaaaacaaagcagtagaaaagataagaggtgtaagtaaaaaatatatttaacctgtattaactgaatcaggtaattaatgcctcaattgagaggtttcattgtaacaaaaaagaaaataaatatgattctttatgtactttactatgaggatgcacatattaatgtataaaattcagcttgcttaaatgtgattttgaaattctattgatttattcaacatattcatagtattt

SEQ ID NO: 307391 - DNA, 457 bp, Homo Sapiens
aaacaaatcttagtatggaaggagaaccgtgactctctgaagctttaaaagagcactgaattatctgattcagaataaacaatgtattaaaatctaaaagatatgagaatttcttacaagcctgaaataggccattaagccatggatttaaacactgtggagcacacactgtgctaaccaagttgataaaggagagcacaaaattcaaggaaatagactataattttatatggcagaactgaagttttcatggaaaggaatctgtattttttaagagagagactgtgattgagagcgataagggtggcgaaggggaggtacagggagtgtctgaactgggttgaggtacagggagtgtctgaactgggttagaagcaggggttcagtcagtgcctctgggcagaaggcagcagcagcccacggccatctggctgtcactccaccgccccagcaccac

SEQ ID NO: 307392 - DNA, 231 bp, Homo Sapiens
atgacagtaccacagcaattagcagtggacttggggaagtaacaatctgttgaatgttagtcctgaattagttctaagtctcccctggattagtgggctgaggaacctatctgtcttcccggctcggagaaggttttctgattgaagggttgtcctgctgccatgtcggggtcctctagggtcatgggacagtctcaaatgatggccaagagcgaggacataacaggattt

SEQ ID NO: 307393 - DNA, 464 bp, Homo Sapiens
cttacgaagaggaactgagctgtggcctagggtttttgtgtggtggattgatgtgtgctgcctgtgcacaggactccacggtgtgtcaccactacatcatttccaccatcttacatgtttcagtttctctctctagaggtctgtgactcacgagagggctcaaaacagtgggtgatcagtccttatgagccatttttaaaattaatttttgttggagatttacctgcaggattgtggcatgtcatggcggggtcaacctcctagacactcccacgaggtcccccatcacccaggggcacctttcagctgggaggagtaaatgctgtttctctttggagctgagaaaattcagtctctcattaatatatgaagacaacagttcagttccttatgcaaatgcacacagacaaactgaattaagattaaatgtgagagaaagagcagtagagaagatcctttagaat

SEQ ID NO: 307394 - DNA, 442 bp, Homo Sapiens
ccatattcatcatattgagacagaggaaaacagaagggctagcttggctcgggaggcagaggggagaatggatgttaccgtacaaaaccagacaagaccttttcaattgatgtactgtactagacagcccattcttctcactaatgctcacaatccaagagaaatgaaaagatttcctgtggctgggatgggaagaagcctggacaagagagcaataccatatgacagtaactagcttaaaagtctaaagacttgctctcaagatgggattcagatcattctggaaagggccaataaaatgaaaatctgtagctgagacctgattaagctatgatttatatctatttatagctttaaaaaacttttgaaagtaccttttgataccagacagcattagcctgtacagtactttatcatatattaatacatagcaaacttactc

SEQ ID NO: 307395 - DNA, 214 bp, Homo Sapiens
gcggctactgagactgagtttttcaatattagaaagtccggtgacctccttactatgtgaattccctgtgaacacaagaaagaaatctcagcctggagtatgtgcttataattggagcagggggcccagagcccagggaagggagtgcttagcagtttattcttcaacaattcctatcgtttcatctgtggaagcagtactcatcaataaatca

SEQ ID NO: 307396 - DNA, 358 bp, Homo Sapiens
atttttaatttatttggttgatacataattgtacctatttatggggtacatgtgatattttgacacattcatataatgtgttaagatcaaatcaggataattaggatatccatcaactcaagcacttaccatttctttgtgttgggaacattccaaatcttctagctattttaaaatatacaataaattattaactatagtcatcctggctgggactacaggcgtgacaccggacccggcctcaaattactttttagaagtattttatttttaatttatttggttgatacataattgtacctatttatggggtacatgtgatattttgacacattcatataatgtgttaagatcaaat

SEQ ID NO: 307397 - DNA, 276 bp, Homo Sapiens
gcgaaggagtctacaggaagggatgtgaggagaaagtaaagcaggaagccctggggaagggatatggaggaactcgtgcaggcagaaactagggagcagggcattttgtgtacttacaagcgcatgtacaagtcaggagagctcagggctccgtctgctacagctgaagctaccagttgattttcagcgtgatggagcaagcagagaggagaatggctactgggccaaacatttgatttctttacaacgtcaagcaggctataataaaaattggaa

SEQ ID NO: 307398 - DNA, 413 bp, Homo Sapiens
gtggggcttattgtcatttccccattgccccttctgtgaccctctttctcctttgtccctgcctcaagcatccctgccctcctaacctccaagttgaatgacccaagcagtgctccttcgagacctagcggccatcctacttcgaaacaaacttgactttgacaacctaatttcctttcgttgtagactccttgaagggagggatgccattctcaccctggaggtcttaaaagtgccttgccatcggtaggtactcaattagtacatgttaattggatggaacagatgtaactatccaccttcctaaggagccagagtatccctctcagggaacacatctgaataaaggcctatggaaatataatacattactcaaaggaggtatgtcttttgagagaggaaatttaggagcc

SEQ ID NO: 307399 - DNA, 443 bp, Homo Sapiens
gatttgacatggacatatctttgtgagggccacagtttagcccactagagtcctctttccccttttacgattcattccacagcgtgtgacacattttccctgtcctgagtgtgtaatctgaaactgataggaattgggaaaaattcacagccactgtctctgtttcactggaggagggatgtcagacatagcgttgagcatctgatctgattataccccaagttatttggagactggttggtccggccatggtgtctgagggtaccccagatcgctatagatggttttgatctgaaatcccagcgtgattcctgactattttttccagagtttgctcttagtagccagttgacctccttgctgcctaaatgatcctggactgtttgatgcagctcacgcttgacaccggctttctttgaccccaactccaacttctcatctgg

SEQ ID NO: 307400 - DNA, 116 bp, Homo Sapiens
catatgccaaaggggaaactcaatttattttattcatttaaagacacattcaatgtacgatgttttggggaatgtgtacgtgtttgcccatgtggaaaagtaaggtggtgggggat

SEQ ID NO: 307401 - DNA, 234 bp, Homo Sapiens
gaagtgactgatgatttacttcctaatctgatgaagaccatagaggaattctctggatagagttaaattgatgagtgagggacatgatgtagacccagaaataaacacctggaaggaatatgcagccagcgccccagaactgttgcttccataagcatggagaggcttatgggtggtcattctctgtaataaacattggatggttccgtaactccagattccatgaaaatgaca

SEQ ID NO: 307402 - DNA, 448 bp, Homo Sapiens
accacaaccagccagaaaataaatttttcatagtacccatgctaaactttttaggtactaaatatttacccacaaagcctaaaatatgaattataagaattacaactacaatgacataatgtgccaaaaggcaaaaactgtgaccccagcacagcagaaactccccaaggccccaacaatgcaaaagtgatggcagacacagtacacaaggccccctccacgttcagcacccaccttctgctccctacattcagaacttcttgcccaacaatcctgctgttgattatctctaagaaacttcctccaatgtcactgaaatttgtgcaattctgatatagctcatttgcttcttaagctgtccacaactcactggtggaccaggagaccccttcagggctgctaacgcattatgcatttaggcacagatgtggctcgtgcgaattcttgg

SEQ ID NO: 307403 - DNA, 407 bp, Homo Sapiens
gtataagcatattctgaattatttgggtgaccaccttacaaccaagtattgccacacaatttcagcacccacatttacatgtgtgttttagtgctgcttttattgttctgggataatgagaaaagaacagaggtggttttaaaatgacaatgatactttcatgcacaaaatgaaagccaaatgcatcatgagattgcactatttggtagttgtaacagaaaaatggtgagaaaattaagatatcaggagtcacttggtggcataggcatgttgaacacaaaagaagctgagctatagcaggcaacaccatagtaacaatacgacggatgacagttttagcaaaatacatcatttgtcacgttaaattactataatatttttaattgaatagtattcattttgtggtt

SEQ ID NO: 307404 - DNA, 283 bp, Homo Sapiens
agttcgttggaatcaccattgtatctagtttaacgctagaaacctgaggtccattggcctcgatggagtgctccagaaaccatttggaatggcaaaatggggtacaatggccccaatgggagtctccagaaaatcactcaccatgggaacagatggtgccacaagtgccattggaagtctccagataagcattagccttgataagagagggtccaaaagttgctcttcaggtttcaagagtagtgatttcagtggtaacaagggttcaactcgacctacagga

SEQ ID NO: 307405 - DNA, 409 bp, Homo Sapiens
tatgcaagaaatacctattaactatagaaagattagaaaatacaaacagaagaagcaaacatcacctgtaacttcacatcctagatactttctatgaattttttgtagtcaactcttcactaaaaatgggattccacacatattgctttgatatgatcacaatatattgtgactatctttctacactgcatccccttttgactcccaaagtcagtattttgccctcctttcaacacacttcccttctttacagactcctgtctgttccaagttcaagagatgccctgtgtctgagaagacaacacaggccttctcccagccaatgaaaaaagctggaagcaccaagattcataggcacccttttccatagacaaagctttgaatgccactaagccccctagaacatgtg

SEQ ID NO: 307406 - DNA, 509 bp, Homo Sapiens
gtggtcattttgttcagttatttgaaaccaattaaactgtatttatttcaagctcagtccaaacttgccacactcttgaaacacagatgtcattataacttcatttaaaagagggaaacacaacaaatgccacccttcacctgcctcctacccccacctctctgccaatcctgtgtcctgcttgttagtgaaagtttctataaaaacatcctgaaacatttcccctgtggttaagacatgatccaccatcttctaatacctgcaatccttccatggaaatgtgatgcgtacactgtgaaggttgaggcttaagttaaattgttatataaacagaaacagagattcctgataaatgtacctgatgaaacactgtggcttcatcctgggaacaagggacaagaaaaaatggatttgcagctgaggctgaagaagtgctctaagccccaaggcctcctggtctgtccagaagttgccagacagggcactaaggaatactctcttcgtagggt

SEQ ID NO: 307407 - DNA, 190 bp, Homo Sapiens
tgcttcgttgctagatcttagtattgagtgctttctccagtgctatgtcgctccgcatgctcacgactacctcctgtcgcagtgccgtctggaagttcatcatcctgaggtccttgagctcaatggtcgctttggtgtcgcatgatcccggctacgttcgcgagaaggtgttcaagttctggaattcgtg

SEQ ID NO: 307408 - DNA, 106 bp, Homo Sapiens
cttggttctggacagcttgactgtacagcatgttgtttcctatcgctcctggcgtcagggcttcatgttccggtgactgattaccggaggtgagttgagtttttct

SEQ ID NO: 307409 - DNA, 141 bp, Homo Sapiens
aaagtaagggatcatgcctcatcaaacagtaatgaaacaaaggcctcgagccagcttctctaagaaatataaatcaaggtcctaaatcacttcactaatacttgggtgggaaagttgaaacgatatgtgcttcttggtagc

SEQ ID NO: 307410 - DNA, 411 bp, Homo Sapiens
ctttagacatgccttccacatcttatactgctggtaaatacaatgcccttcatgatatagctaaatcatcttacctctgagaatgcttccctgattctcccaagcagtcataccttctctactcttctaacactttgttcttccatattgtcttacaatacatctatctatggatctatctccagtccctccactttgccttgtcaaccactaaaaatcaaggcagaactatcttattcacatgtgtaactccagcattaatgctgtgtaatccatgataggaaaagctgtttttcgcacctcacttctgtgttgttaaacttccatagcagtgataatattttattgtgatttcctatttatttggtcattttaccctccaagtaacccctcactcccaactactctggc

SEQ ID NO: 307411 - DNA, 452 bp, Homo Sapiens
  misc_feature (248)..(402): n is a, c, g, or t
ttactgatcaaaatacctttatgagaagtacagaatccggttgagaagtgtggtaccccagacaagtagagagctgagaaaagctgcactgagatggatcctacattcctgggtctgggagtgggcctttcccagagataccatcctccagcagtaagagacctccaatagtcgggtctcagacaggttccagctaagagtaaaatcccagatcaatggtgaaaaggagtttaagaatggatgctgannnnnnnnnnnnnnnnnnnnnnnnnnnnnnnnnnnnnnnnnnnnnnnnnnnnnnnnnnnnnnnnnnnnnnnnnnnnnnnnnnnnnnnnnnnnnnnnnnnnnnnnnnnnnnnnnnnnnnnnnnnnnnnnnnnnnnnnnnnnnnnnnnnnnnnnnnnaaacgaagcctgtgcctagtcaacattgaagcaagaatgcagctcgtgcc

SEQ ID NO: 307412 - DNA, 495 bp, Homo Sapiens
  misc_feature (63)..(71): n is a, c, g, or t
gtatgtgggaatcgcctttgtgggatttccacatacaataaaaggggattcccttatacaatnnnnnnnnntcaggcacagtctgagcacctgccagggcaggatacataccaaagagaacagtgcaagactcctcatttcatccctgttaacaatgacacaggatttcacagcacaaccaactttccctggacagctttccatgcctctctcaaggccgtccccatggtgggctgtgcaggacaacccttgagcctattttacagtaaagagatggaccttgagaaatgaaggccccccacagctaacaaggacatgaagctgaaatgcaaatctagattcctactgatgccaagctgcatgccctctgggccttaccatttagccatgcagtggccatatgcaggagtgggacaggaccattctgcccaatacagataaggtgcacagacatctcagagacgccatttatcagtaccagtctgtgacaggact

SEQ ID NO: 307413 - DNA, 451 bp, Homo Sapiens
gctataaatataatgttaaaattaagaaccatatagagttaaataaatgtttctcatgttgactgcctttattcaacatggctctggactgaaaaacattcaattatatattttaatttatggtttcattgaatgtcaagtatatattttaatttacatttcactgaatgtcagagaagggcagattcaccataggaaagaattcaataaagaattactaccagatgattaataaaacatgaaaatttagcctcaatttaatcctaatcctctgcagagttgactcagttttctgtggcctgttcaacttcaaacactccccatattcaagtttgcaataaattgctcaagaaatgagatgtatgctgaagtttgtatgcggaattaagatgccaagtttttcaagatttgattgaaacaaaatcagaattttgaatacctagcccataga

SEQ ID NO: 307414 - DNA, 405 bp, Homo Sapiens
aacttgatctttaccagctttccctcctttgttgtcaacgggtccactgggtcattaaccagttaacaaatggtggtttggaggataaaagacagaccctttgcacaggcagtggaattccaaatgctagactcctggctccacaatgtctgattcagaaaaactgctgggagctattagtttagctcgcccacccaggcatattaagactcttccagttccttttacaccactcccatatgcctctcatttatgcctacacagttttgtgattgtgtgcttttgtttagcacaggaagagatcaggcccagtgtgaccacagaaattattaggaaggtctaaggataaggattccagaatgaaagtagtttcaaatgtgaaactgcaacagatctgaactgttt

SEQ ID NO: 307415 - DNA, 423 bp, Homo Sapiens
  misc_feature (363)..(364): n is a, c, g, or t
ccctgtcctctcttcacagataggtaactgtgtctccatactatgggacactccctttggatacatcttccaaactgagaagagttaatttcccaaaccttaaactgattggcttaggattgagctcaggggacaggaacccagaagtctgaaatgctagcaaaagggtaaaagtttttcttaccggtcaagcttttggtcccccttctccctgtacagactggtcaaaggacacgagatttttgagctgtcctcacctgccccttgtttcattttgatacaagttttctaataacctggtttctctcttgtcaccttcaggccatcaacctccaaacggtcatgcaactggaggcttggcgnntggtcccttttgttggggaccttagataggcctctgaaggagatgtgactgctgtttac

SEQ ID NO: 307416 - DNA, 157 bp, Homo Sapiens
  misc_feature (100)..(100): n is a, c, g, or t
gcagactggtcctgacatcatacagggcagaccactttctcttcaggatgtccaggcatatcttacactccgtgtccacgttggggtgatcgcagggctngaggaactccactgtgggaccattgtaagggcacgcactggggctctctagcgagag

SEQ ID NO: 307417 - DNA, 429 bp, Homo Sapiens
taacacgaagctgtacttggcaattttccaccttccaagttgggtaccaaaattctcccttgagagctctctcccgtcaaaccggcaccccaccccatcctctctcaccctcgcttctacgaacccacaggagccccttcactcacgtagccagcatcccatgacacctaccacagaggtgaccaaggtcttcagatcacaaccataatgcacctgaaagcctatacacccgggactgctgactctactctcggccacacatccccacgacaatcaaatataaagggatcctctccctcgcaaaaagagcatacattaaccttcacagactccctactcgcagagttaagagaatgatactgctcactcaattcctttgtcttgcctctggagttcagcttcttagtcacctccctcagagatactctg

SEQ ID NO: 307418 - DNA, 421 bp, Homo Sapiens
ttttccagttttttagaagttttaatcatacatcaagctcttattagtaacaaagaaaacaaagaagaaacctagctctcattttcaggaaggatgctttcagatggtcaacataaaaccaccaagggaggggccgcaatgccagtaccctgtgttaaacctgcagcagcaggaaaggctgtcaggtgagcagttagaggcaaggagatgttgggcactgtatggtgggtgacaacctcgagacaactcaccttactgtgcttattttatctctccacatcttgtataagtgacacaagcatttgagtccggggccctctgcttttttattatgcacagactcactcagggagtgggagctaaggaaaggttggaattaatcagatacttccccagactttcctacacctcttgcccaaca

SEQ ID NO: 307419 - DNA, 346 bp, Homo Sapiens
  misc_feature (197)..(259): n is a, c, g, or t
ttgccacaacagacattttctgagcccacttaacaaccaaactcttccagtctctcattaaagaatgtctcactttcctacacattgagattcctcactcaggtggctctcacaggagatcagcatttaccaaaaacattttaggagaaggatcaaaatcttacaggtcccatatgtaaaattagatatggtggggnnnnnnnnnnnnnnnnnnnnnnnnnnnnnnnnnnnnnnnnnnnnnnnnnnnnnnnnnnnnnnntttattcttcaagaagctggcaacctaacaggagagacagatatgcattcaaacaactataacaaaagccaaaacatacacagaact

SEQ ID NO: 307420 - DNA, 491 bp, Homo Sapiens
ggtcattagttattaattttacacagttaacactgaaaaatgaatgatatttaatcattgtcacttactgagaagcaagaacaatgagtgagcccaaaggagtctactaccatacctattaagtgtagggaagggtttaagtattttttacatacttttcttctgtcattggaaaaacaccacccatctgaaatggacagaagaaaattttcccaggtgttctactctcatcagaacagcttggtgccagtgacctccacactgttagctggctcccatactgcttgaagggcaccagtcaagagctgtcaaagggagtctcctcagaaatcagcatttgtgggagatcccacttccaaaaaggtagtgcagcagtgctgtttccgagcagcagtgaatgtgggggctgaagacgacgctttacagggccttgcttaggccctggggatgggagtaaacagagtcatgataagaggatgtagtgaaatgag

SEQ ID NO: 307421 - DNA, 187 bp, Homo Sapiens
ggataccactgtggctgtatatgaagtcacactgacagaatttggtctgacgtatgtgtaacatccctcgctgggagggttggagtcgtcagggggcacctgactagaattggctcaaggatcgcacccctgcactgaatgtggccgcgcctgatgctggcgcgaggcaaggtacggctggcgaata

SEQ ID NO: 307422 - DNA, 391 bp, Homo Sapiens
taaaaattacatacatagaaaaaccagaaaagataaaatcaaggccagctttaattcaaaataactctgtttttcttatttctaaaaatgtataagacgaatacccaagtgaaagagaccacagctattttgtcaatacgttaatctccttgtattaaattttgagatgcatgctaggtaaagctgttatttgtcactccaaaagatcaatccttgtggaactatactagggagcccattgtccagtctttagctaaataattcataatcgcataaatcgatggtgtagttcaactacctatgtgaaaattattggctttatagattctgtataatccagagaactttaaaaattctatgtaaaatgtatataactacctcactggtggtg

SEQ ID NO: 307423 - DNA, 102 bp, Homo Sapiens
  misc_feature (28)..(28): n is a, c, g, or t
gtgtttttttatatggtttcccactcancttgactcagattgcttttagttttgctttcttcctgaaggaacatttttctgtttgccttgctttttctcctt

SEQ ID NO: 307424 - DNA, 262 bp, Homo Sapiens
  misc_feature (97)..(111): n is a, c, g, or t
atgagcaccgcactgggcgtgactggtctttttgacattatggtcatcgtattctttttacaaagtaactttgaatttgttaacattaaagttggannnnnnnnnnnnnnnaccattgaaagtaaaaaattctatactaccaaaaaaatagctattgtcttgtttttccccaagaaacttaatatgactattgataaatacaataaaacagattactgaaggaatgtttctgcaaaatggtgctatgtcatgagacagggac

SEQ ID NO: 307425 - DNA, 139 bp, Homo Sapiens
cagcctgctgcttttcttttgataaaacattgataaactttaacctgttgtctttgatttttaagttaaggatggtctttgccaaggtgttgaatttaaatcaatcttactaaataaagctgctagcgtagattttatt

SEQ ID NO: 307426 - DNA, 387 bp, Homo Sapiens
tggtgttttcttgttgttgttgccttttttgtagaacagaaaaccttgcttagcatctggttcacagccttaatcacagggagaaatggctgagctggatgcaggatgtctttctgggggttttgaaggctgcacctacatttctagggttggctcctgtggtggctgggccaatgaagttccttagctctagtgtttcagaagtctacaaagtccccctgagacagatgattcctgtggaatcttagaacagttatttttaactttttttggtcacaaactcttttgagaatctaagaaatgatataataactctcaaaaaattaacaaatgtagatagcccacatttttgtatacagttttaggggtccacagttcatctgaagt

SEQ ID NO: 307427 - DNA, 175 bp, Homo Sapiens
ccacaaaatttaaatcttctacacctccacgtccccttttcttcctcaactcccttctatgatcacagaccccactctcctgaccccagaggcagctgtctgacctacactagataagctctagtattctgtcacctagagcacagtaatcattcctggaatagaattgtaacct

SEQ ID NO: 307428 - DNA, 458 bp, Homo Sapiens
accagtacaaagaaatcacaatgacgtatgtccaaaaagcagtccgttctgtttgctgagaggtaacaaagaatgtggcagttggattttggctggagaacactgacatggctctcctatctctgttagttggtaacttcattattgatgagtggctcgcaaattccacagtattaataatatgaaaacatgttttgaaaatgatttagtaatacaaaataaaaaccggttttgaagccaatgaactggaagtaaaattcttcttagacatgcacctgttgtgcaaatttgggtagtttattatacctgggaacctccgattccttgttaaaatataaactagacctgtcaaacaaacagcacatagcaaattcagaaacaaaggtcagaaatcgctttgctgagccgaaggaagctcacagaatcagctgagagtctggagacccatatttggaaac

SEQ ID NO: 307429 - DNA, 389 bp, Homo Sapiens
gaatttagagaaacatttattcagaaaaatcaactgagcctttctgagaacagtgagagtctgtaacatttgacacacaaactgctaccctccccacccccattttggtccactctgagagaaactccactgtgggctgtgaaaatcacaagatggaaccctgtccctctccagttctcagtctatggtgacagcttttccctgagagaggcacgatgccactattcttaacttctctccccctgccagtcctgtgttcctgaagctggtttcatgtaagtatagttgagaagtgtgtttgggtgtggacctccttgaatttattcttggagtttgttgagtgtgctggccttgtagattcatgtctgtcttcaaattttgaagttttg

SEQ ID NO: 307430 - DNA, 260 bp, Homo Sapiens
ttaatactagaagtaatgacatttggagagtcgacagtacatacaaaagcccataggattaagtaaagtattgccaaaagcaaaggactaacacgcttgggaaaatagaccggatgcgggtccagggcccacggaggggcgacaggaccgaacgggagacctgacaggggaaggattcgctcagagcccgatctgcccaagacaccgggcgtcaatttccaggacgggagctgcccgctggggagggacgcaacaggagg

SEQ ID NO: 307431 - DNA, 103 bp, Homo Sapiens
tagaggcactttttagggatgggtaaatgtttctcccactaccatcattgcatttttctttattcctgctctttgatgatgctgtattaatgcaattgtatac

SEQ ID NO: 307432 - DNA, 124 bp, Homo Sapiens
ctgcgacctccccctccttggttcaagttattctcccgcctcagtctcagagtacccgggattacaagcgtgtgtcaccatgcgcgtctaaatatatgtaattttaggagagacacgggtttca

SEQ ID NO: 307433 - DNA, 389 bp, Homo Sapiens
ctcatttctgcctaattcagctgttgactttccattccacctgcaggccagtttggtaaatcagagctgcaattatttttgctgttaggaagatatctattgggtggagttaataatacaattttgtccagtggttctcaaaatgtatcaggcattgaaatcaccaggaacgcttttcaagactgaatgcactggattcacctcagtccaattacatcagcatctcaaggttggggtttgttctcaggtcttcagatggtcatttatatcattcaacaagaaacttaagctgaattaaggtagggaagttcagtagaaaaaatgtcagaaagaccagaatttgaatctccactgtgccaattctaaaaactgtaccaactttcttacac

SEQ ID NO: 307434 - DNA, 260 bp, Homo Sapiens
cagaacccggcctgcagggccactgtgcttaaaagaggacgctcctaccaggacaggctggaaagggctgcaacgaggcgtgaaagagggttgcatctggccaccagtagtaacgacgtgtacagaagacgggtaaacagggttaagggcagcaaggagcgttgtcgggagggaacatggatgcaggacgccctgaattgtgagaaaagccgtgtgggaaaagcccctgcaaaaaggcggaaaattgtgccccgctgtcc

SEQ ID NO: 307435 - DNA, 135 bp, Homo Sapiens
gaggaaatatctgcttgctcattcaatatttgagttacgtgttcttctaaactattagatatagtgtcctgcttagtatctgcttctaaagattctggtacaattataattggtggttctttcagagatctaact

SEQ ID NO: 307436 - DNA, 139 bp, Homo Sapiens
gtggacttggccagggcctcccggtgaccccgttgggcaaggcctcaatggggcaacaacgcaagtttaaggtcccccccggggttccaatgcccctttcggaacagggcaagaatgcctttggcgcaagtaaccggcc

SEQ ID NO: 307437 - DNA, 407 bp, Homo Sapiens
ccttcattttatagcgtgagatgtcattttaggttctctggaaacctaaagactgttgttcttatggaggatggagtttaagacttacgatattttagaaagtgctccctctctcgagactagaatcctggctccctgtaggtttgcttgatgaggccatgatagatggggcctgacctcagagtatgtcaggcttattgaccaggatgtgtgtgtcagcttcccagggctgggcaagtcacaggagcagggacagagtgttctactttctctgcatgcactcaagagtttctggtctagtgggaattcattaattagaacattcttttgggtactgtaaatacaaaaagggataaggtgtggttctgtcttcccaagctcacaagccatcagggggtaaggagtgc

SEQ ID NO: 307438 - DNA, 291 bp, Homo Sapiens
  misc_feature (106)..(197): n is a, c, g, or t
ttttaatttctgctgcattttatttcatgaaaaattctttgttaatcagatactcatttactgagaggtaagacagcatcatagttaagaatttaaaactctagannnnnnnnnnnnnnnnnnnnnnnnnnnnnnnnnnnnnnnnnnnnnnnnnnnnnnnnnnnnnnnnnnnnnnnnnnnnnnnnnnnnnnnnnnnntctagcatctaccttataaggttgtcatgaggatggaagggattaatacacagaatccatggctgacacatagtagtcatccaataaacagtaa

SEQ ID NO: 307439 - DNA, 359 bp, Homo Sapiens
ctctcatcttttctgactgtcttactttagcaagttagtcttaagctctgaaattctttcctccgcttggtgtattcagctattgatactggtggttgcactgtgaagttctcatgttgtatttttcagctccatcaggtcatttatgttcctctctaaactggtttttctggttaagggctcctgtaatgttttgtcatggttcttatcttctttgcattgggttagaacatgctccttcagctcagcgaagtttgttcttactcaccttctaaaggccacttctgtcagttcatccgtctcagcctcagcctagttctgagcccttgctggagaggtgttgcaatcatttgtaggag

SEQ ID NO: 307440 - DNA, 164 bp, Homo Sapiens
tgagaaactcagagagattcagtaattcgctcaagggcacatagttgataaaatgatgagactaggatttggattcaagtttatctggattttgacgtcaatagtcttaatttatgctctcctcacgtgtccagaatacttcaagattgatggcatctgctggc

SEQ ID NO: 307441 - DNA, 462 bp, Homo Sapiens
tcgggttatgacggaattccaggtctctgctgaaatatcacagcttgcattcacacctactgcctatgccaggcatctctcctgtctgctactggcccacttcccactgactccatagccccttcccctgaccccagaggtcttaggtgagcatggagtagatgaagatgctggatgttaatatgctcactgagacccatttcctgggaagtcctattttggggtgcacatctggcctcccaatcttttctttttcaagcaccaacctcttcccctccatctcccagtgcccttcagagaatggggtaaagttggcaagaagagccacccgtgcagagcctgtctgagaagccagcatcgaggcatgcaagccacagagcagtggacacatgatgatcttttcaccttgagggggaagtgccaatgctcttggcaactgaagtcaattcgaggttgctgtca

SEQ ID NO: 307442 - DNA, 177 bp, Homo Sapiens
cgctctttcaacaaacattaatgatcacctactataagtcagagatcatactaggcattggggatacagagatgaataagatttacaggaaagaattataacccaaacaagtctgcctgtggcaaatggttacactaacggccccagtgactcatacccccaggttccacacccttc

SEQ ID NO: 307443 - DNA, 341 bp, Homo Sapiens
  misc_feature (146)..(199): n is a, c, g, or t
tgttcctgcaggtcttgatatgcgaggacgctgtgtcttacctgccacattttcttcttctttcttgagacagacccttgctccatcacccaggccagagtgtggtggtgcgaacacggctcactgcagcctcgaccctcaggctnnnnnnnnnnnnnnnnnnnnnnnnnnnnnnnnnnnnnnnnnnnnnnnnnnnnnnaccatgctggcctgaatcttcagggtattttacggttgaagtgtcacttacttaaccatccctgtttcaagagtgtaggtggtcccctgtctctgtcgctgacctggcctggaccctcggctgtgagagggaggggtgggct

SEQ ID NO: 307444 - DNA, 166 bp, Homo Sapiens
ccatgaggcgcttgtatagtctcatctagatatgatcccacttcatagaaccatcaccacaacttgtagtgtttgtagagatactctaagtcttagtacgaattcgatcgcgtccgttcacttcgtaagtctatacattggcgcatcttatccgagagcagcacag

SEQ ID NO: 307445 - DNA, 200 bp, Homo Sapiens
  misc_feature (42)..(50): n is a, c, g, or t
ggggaccaaaggaaaaggaggaggaggaaaattaccaccccnnnnnnnnnaataaggctccccgggggcgtccgagagaggaaccccttaaggttacctcccactctggaaagattgtctcttaagaagagattgaaaagtcctttcccgtccggaggaaacccgctctcttgccggccggacccccttccaaacccctt

SEQ ID NO: 307446 - DNA, 236 bp, Homo Sapiens
atacagaagttgtttattagggaagaaaacatgtcagggagcagatgacttaaggaaatgatgcaagtgctttttgtgaaaggacaaatgaggtcatacaatattattatactttgagaagtgagcttaagtgccaactcaattcttagacaaacgtgtacaaaatcaggcagggctacagcaaccatttttgtcattttctcattaaaaaggaagacccagtagtaatttcaata

SEQ ID NO: 307447 - DNA, 265 bp, Homo Sapiens
ggaaaccattggtttttatgagtttcataactttgaaattccaggcgccattgaacagtcagttattcatattcaaccagggaagggattctggggactggccaagtagctttgatgtgctgcagtcgaaggattcctgcaggtcaggacccctgtgtgaatttccaggttgtgtggttgcctctgaaccctatgtacgcggatttactcagccatgagagatgattgggatcacagggctccgtttgcgtccattcagacgtag

SEQ ID NO: 307448 - DNA, 163 bp, Homo Sapiens
attctagagcaggaatgagtttcggccaaccaacaccaccaggatacagttgtttacttacagcttcctccttcatttctgttgagaagccgggatcctgcggaggcttgtagtacgcccgctggatcatcacgggatacaggaaatgctcaggcgtgtggtc

SEQ ID NO: 307449 - DNA, 100 bp, Homo Sapiens
ttgactcaatctcactcatctgcccacaattctcgtgtgcgcggaagatattacgcgctcacctctgcttcacacacgccatgggcagtgagtccttcag

SEQ ID NO: 307450 - DNA, 583 bp, Homo Sapiens
caaaagccttgtttataattatatagactccgaacaacgtgcggtggtacttaggagtgggagaggctcctttttcactccagggatctccatgatgtcggtttgttgtcacctcacacgcatgttcgtggcatcacggatctggtaaacgaccggcaatgtgtactcactctctgctagcacaccaaagggagcaacaatctctacctctgtaagagtcctgaatctaggattctcggcgtgtcactacaccaacttctatttctgaaaggctgagatcagttgattgaccagtagacaggcatgtagatgcggtctccactgactgttcagatgtccaatcacatgtcttctacaccagtttatcaaggaagcaggatgacacagtatgataaactcgcgcagcagtggcgttaaacccatagtagcaacctgcagtatcacacttatatacctgacggcctggctcttcatctctatcagtaaggatcatcaacgatcaagacgctacattcagcaatctgtgagtagcgctcagacctatcggcactcatcctacatgcatgtccgcagggtctcgtag

SEQ ID NO: 307451 - DNA, 316 bp, Homo Sapiens
ccaaactaaataagcaagagctgagagttctgtaaaactccttaacactagctgatcaagggcctaaaccattgtcaagccatgccgcctggggtgttcacacagggggcatttcacagcttcactggcctggcagcctttttatccccaaagtcatcttaagcaactgttcttcagcaaacagacctctgagcttcatctcttccattgtaaaattgtggcacaaaagagctaagcattaaagagaaaccagaatcagcctggtcaactaatttcaatcccatccttctctctgaatgcttttatttgcattagg

SEQ ID NO: 307452 - DNA, 410 bp, Homo Sapiens
  misc_feature (130)..(159): n is a, c, g, or t
gggttcagattattaatgattatcctcttcacgacccactaagaccttactaggtccctcttttgtctcatttaatttattttcccctttgttcttcatctctactcttcttccttccctagctatccannnnnnnnnnnnnnnnnnnnnnnnnnnnnngcgcgggccccttagttaaaaattgtattggtcattgagtcactagattcagtatgtttgtactcttcacttggcaatttgttagaatggctaacttagtaacttaatagttaaataagcaaatcagcttagtccgcttcctgtttgtttaaaaccatcctgcatgtcttcacaattaacttctttgtgcgtttcatggtttcctgtgttctcaaaaacaagttaatgatatacagtaacgtatatcattt

SEQ ID NO: 307453 - DNA, 339 bp, Homo Sapiens
tttaagcacctcacgatctggctcctgctctacttcatcatgtctgctggggcaacggttcctgcctgggaaagctaaaagataagggatgtcaccggcactgttaaaattagtggtttccatggcctccgtcagtttagctgggtttaggagacatgaggcgccaaggaattcacaacaggattgctgttaaccttgtatagaaagctcctgtggcaaaatcaaatgcgatgttatttctccaggaatagacaccaccctcacatgtccaaccctagcctaaggccactgaggtttactaggagagagacacttctcacgttgaggtggaagggccgg

SEQ ID NO: 307454 - DNA, 368 bp, Homo Sapiens
atctattatggaaagcttgtagtagttaataggtttggctatagtcctttgtggcttctccaatatacgcatttgaaacagttttcttctccactcaccaatgctattattatggtcacatttagggtcctttaagggcactattactctcccaattggataaggctcttccccttccctggcactgtatgagacacaaagttcatctccaaatttctttgctgcctacagggccaactgtttctcagcagcagttagggtttgatttaagagtaacctaacatccttccagcagagtttaaatactctatatgtgagtgaagttgggactttcctaaagcaaacttcagggtctgacgattaaaaga

SEQ ID NO: 307455 - DNA, 163 bp, Homo Sapiens
aggtctctcctcttgaggaaactgcaagcacgtgtctctgtcttcgccttttagtcaaggagataattgcgacgaaaatgggcaacagaaaaaccccacgggtcccgtcttgcaaaacggatgactgacggggaagggcgaccgttgttggtttttggggggt

SEQ ID NO: 307456 - DNA, 315 bp, Homo Sapiens
agagactttattccactaagcagtattgaaaatggggagatgtgacctgtggttacaaatgaaggttccttccagggagcaaaaggaggtttcagttttgacagcaaaagttcctgtccgggttcccactcaagtccatttatgcaaatgaaggattcaaacttgcttagttctaattacttgatgaagctaagttctgattggttggttcaggtgagttctgaaagtcccaaagttgaacagaggtatgggttttctgttgacacagagtacatctgtgatgtctagtcaataaatgaccactaggctcaatgt

SEQ ID NO: 307457 - DNA, 299 bp, Homo Sapiens
acaagctatattgaagagagaagtgactgagacatcttagctggggaggaggaattgaataaacaagggatacaagtgacagagtaaaatgggctgtgaaaggaaatcagagagctgatgaaacattgcatttcaaagtgtgtcagggaaagattgagaagaagcagaaccagaacatgaattaataaggcaacatttgtacttttcttggagaatatagcaattggtagcaaaaattagaagttggatatcagatcatttattagtttgattagatttctctacaaatagtagagatc

SEQ ID NO: 307458 - DNA, 123 bp, Homo Sapiens
cagatggctttcatccgttcatagtatgcaatcatatggtgcacaatctacttaggtaacagccgggcaacgtggctcatgggaatgcggtgccctgcatgcagctctgccacggtagtcagg

SEQ ID NO: 307459 - DNA, 318 bp, Homo Sapiens
catgcgttatctcatttactccttacagcaaacctaaggaagatcaaatggtgtgtagatgaagaagcagacagggaggttacggaactagcctaagaacacagcactccagggacaggtgggtattccaggtcaagtcaacattcttcaaagcctggactgcggccaggactctccccaagctccaggacatagacacactccacgctgtactagtcaggatggctgggacgctctgcagtaacaaccaccaccaaacccactacgggtctgggctagcccagcagcggccttgattcatgcaagcttgatgccaca

SEQ ID NO: 307460 - DNA, 460 bp, Homo Sapiens
ggtctatagttttattttagtaactggaaacactattttgcctgcattccaattgttataataaaggtgaagcaaaagtcctgagacagcctcaaggatctggtggctaattctttcaacagaaccaagggcagggtccgagatgacaaggtctgtttcagctgggtctcaggtgagtgtccagggtatacagaatggggttgaagactctttccacaagagcagcagaatagtatgcacatgaaagtaccccattaccaagaggccttgtgggatgaacctgtgtgcaatggagttacaccatccaggacttcctgagtagaggattttgggttattggtaggcaatcgagagccaatgagatttcaggttgtggatttacatatcacagtctctttttaggaagatgaactccagccaaagtgtaagctctaaactgaatcttacagagcctgttgtc

SEQ ID NO: 307461 - DNA, 103 bp, Homo Sapiens
ggaattgatgtctcaaaggggtttcatttaggtatggaggcttcgcttcaatcatgtcggatggcgatgatgccatggaccagatgtcaaccgtgggtccata

SEQ ID NO: 307462 - DNA, 121 bp, Homo Sapiens
agtatggtacaactgaccaccaaccagttaaatgtgctctaggggctccaggcataaactcaactgccaaacaaatacagttttcaacaggagatcccaatttaccaagagagtgtttttt

SEQ ID NO: 307463 - DNA, 470 bp, Homo Sapiens
ttcttgactgtagaaacccttccacatggtctcacttgctgaaacccaaactcagtacttagtctaactttgggggcacaccttccaattctgaccaacccacgtgatgtgcaaggagacaggatcctgtctgtgttcatccaggcatctcccaatgaagggaatgaagagttccagtaaccatctctctgtctgttttgtgcttctgttgttaaattctggaattagctcagcagtgagccctggactcctggtccagagtctccctgccctggtggatgctgcagcctcctgcagttggaaccatcaggccaacgcggactggccggtcaagcttcccagtcacactgccacccagagaccagagcactgcactgtgatgggtgctgattcagaatgactgcaaatgtgtacacgtacatgtgtacagattgttctccatcactttcatacagaaatttgagacactg

SEQ ID NO: 307464 - DNA, 164 bp, Homo Sapiens
actgctcttgacagtattacctgataaagtccccgaagtgcggtcaagtcacctgcctgaagttatccagtaaatcagatcaaacaaagacttgatgccaagcccctagctcaactgagaaccgggagttttgtgagatctggtcccttactgagaggacgtct

SEQ ID NO: 307465 - DNA, 315 bp, Homo Sapiens
ctcagtatagttgaagtcctttcacaaaattccacctaatccactcaccagcttaagggacactctttattccccctgataacacagtcaggctgcctgaagtacaggaactctcacaccaataagctattctagagcttttctagacgtttcctcaaatctatttatgttagtgtaatttgaaattataattacgtaatttaaatgttacaaaaagtgctgatatatgagtgcagataacatgagtcatttttctattaataaaatggtaagctgtgtaaaggttggatagacatgagctgttaaggttgctgc

SEQ ID NO: 307466 - DNA, 239 bp, Homo Sapiens
cactttcctgatgtgaaagtgtcaggttttgagccagtttgaaagatgagaactagaatatatttctctttctgatctagagaatcctagtggcttctagggcagtgtataaacaaagccctgtggctgcaaggtttcccgtgtgcagcaataaactgatacatgccggtgacaggaatctggctcatgggcttgaaaccatccattaactcattaattgaccagacatcatgggggtc

SEQ ID NO: 307467 - DNA, 411 bp, Homo Sapiens
tactgaggggccacctgggactcacacaggtttttagctaccagggttctggggctcctgaaatggactcaactctccttcagacacctacctgggctgtgttcccccaacggacagtggtggatgtgggttgggatgtcacaggtcactgcaccacctaccacctccctggagtggcatttcccagaacaccaggacacactgccgggtgggaacaatgacgctggtttccaggagagcagtgggggtaggagaggaagcatgcctacctgtcttccatacctgatctggacccagcaaacatggccctgaggtgctccacgccccatacctctctgctgtgggctccaccacagcccttctgctgagatggtctcgggcctaaccaggacctcgctggcccatttgctc

SEQ ID NO: 307468 - DNA, 301 bp, Homo Sapiens
gcagttttgattttggctttattgctgaatttggtaatcttaacattaggagtactatgtagctacagaagatgactagatcatcacaggttatgggaattaatcctggattcatgccattaaacttttgacaatttcagagtatcacttggatttttaaagctttatttcaatcagtatacactgatacatatcctttatttctgctttgcttagagaataaatgcctaaggtaaaagattattatcaaatgttgaatttttcccatgcccttgttgatagttattaaatcatcaataag

SEQ ID NO: 307469 - DNA, 442 bp, Homo Sapiens
ctaaatatcacttttaaagaatggcattttagactaatgctccatgtcctttcttcttaagatctttatgagatggatagcccttactaaggaaatggggacagagagtagttgaggggcttgtctgaagttgtcgattatgatggaacttgagagaacagttctcagtctttcatgttccacgtagttgtgtctgaacagaatatagacaattaattcactcattcagcagactttgaatgaattccgattatgcagcagacaccgggctatgctcacttctccagttttggtatgatgcatttattgctgcaggccagaagtcatgtcactgtcatggcatacattttcccatgaaaataatgctgcaatcttgaccagagattaggctccaagtatatcacagatacgactatgcatgtaacataaaggcaatcacaac

SEQ ID NO: 307470 - DNA, 278 bp, Homo Sapiens
aaatatgggccgtatcacgaagtttctacgagagaaattggtcgtgtgtttcaaacttatttggaaagcgctataaaccagtgtgatatttgataacaactggggactgcatgccaggttctgttccagccgtggtcgtcccaaacaggttcagatggagagctacacatattgcccgtaaagtctgttgatatggacttggttcctgggaggtgaccctcctgtgggtggagtggcacgtatttatcatgggctgacaggcgttcagctgatagagg

SEQ ID NO: 307471 - DNA, 508 bp, Homo Sapiens
acatttttagtggacaggatctaggtgggtgctggtaggctctcctctgggttggggaatggtcctgataggtaggaagcagagaaaacagccctccacctcccccgcccctctttcagcctttgcagctggccacctagtggtgggacacggttgtgtatctcaggattcggaggctgggaaagttttcactctcgctccattctgaaattatttcttgggaaatcactgggtctgatggtactggagccttgcaagtttcgctggttcctcctgttgcccagggaatctgcccccgacatttgctgctgtagatatttgtttgcctgatagatgctttttttcttccctgagcatttggttgcttcttttataatgctttgcttagagtgggcaaagtgatatcaattccacccgccgcctccaaattgttctctccagtattttttcaccaacgtgaatttactgtctgatattgttgttcgttaggccaacaaattgggttttt

SEQ ID NO: 307472 - DNA, 495 bp, Homo Sapiens
tgaattatggtaagtaaattgttttactagtttatatattttgttcagctttattaaggcataattaatcaattaaaattatatatatttacagaatacaatacgttttgatataggtatacattgtcaaatgattaaatcaaacaaaattaacatagccattacctcacatatcttttttgtgtgtgtggtgagaacgtttgagatctaatctctgcagtttttaagtatacattacattattaactatactctaatgtaactagacttacattagatctctagaatttattcatccagtctaaaagaaactttgtatcctttaaccaacatctcccccagtgcctcccaccacccttcagctgctggcaacctaggcccactctcctcttctatgagttcaaccttttaatattccacatataagtgagatcatgcaatatttgtctttctgtccctgactgatttcaaatagcatgatgtcctccaggttca

SEQ ID NO: 307473 - DNA, 529 bp, Homo Sapiens
ctttgctaactaacatcaagaaagacaggaacataatctttttccttcttacccatttcctcccaacattgatagcgcttggatctaaacacatttagacagattttcttttgtgtgtttgagagggctagtatcccttgctattataatatttgctatctgctaaccaacacatagaatcaaaagaggattccaataactcaacatgccttattatctaactttttactagtcacactcaggaaataaacatatttgaatagcaaaaactattatatacattttataatgtgtctcccagtctctcatcataccagaagtgacggggtaattttcccagagtctgacatgtgtaatcttgtcagactgctttatactgccccagaaggaagaggacaatggagtacctacacacttgcccagggagcccctctctgtgagttttcctcagggtacactaccccagcacttctgtgggctgtgcgtcctgaccagtgtttacatggcaggtgtaaatcctgatttttag

SEQ ID NO: 307474 - DNA, 643 bp, Homo Sapiens
agatcaagctgttagtctccaaaaacgaaggaaatatgagtgatgtgagtgaaagtgtttcaatttagaaacctgctgtatagataaccaacataatacgaaagctgaaggaatcaaaaggagtcccattgctacaggcccaatttgaatgtcagaaattgctgtggtaggacattgtaaccaactctgcgctactaccacaaatgttctatggattctgtttcttaaataataagagttgaaactacttgatcagtggcagcataatggatgttgtcttagcaggcatgaaaacattcatttctttctacatctccatcagagctcttgggtgaccagctaaattgtcaatgaacagtaatattttaaaaggagtcgtttatttctgagcagtaggtctcaatggtgagcttaaaatacttagtaagccatcccgtaaagaggatgtgctgacatccaggctttgttgttccactgacagagcacagacagagttgaataagcacaattcttaagagccctaggattttcaaaatgggaaaatgagcaatggcctcaacttaagttactggttggtataggcccttaccagaagagtcagcctatcctgtgaagccttgaagccaggcaccgactgtctctc

SEQ ID NO: 307475 - DNA, 349 bp, Homo Sapiens
gaacccaaaaaacaacaacttgttttgctgtgcggttttgtcatctggcattgggcagaaattttgacccgccgggcaggtgggagaagcatctgagtcagaggtcacttacctgcttgcataggccgctgacctataccaagccttagtttcttcatcactaaagtcaggagaaagaacccactccacctgcctctgggacagctcagaacgtgttaaccctttcagcagtgggtccttcttcatcttcgtggcgctgtttggatccctgtagcgtgacacataaaaaagcacacatccggccttaggatatgggtaggctctggtttgggcacttgagaactctcac

SEQ ID NO: 307476 - DNA, 405 bp, Homo Sapiens
aaactaaataacacaagtccctaagagatgctgtcatggtccctccaaacacatttctgaggcttgtttgtggggcctgtaagtggggaaagtggaatatttactctgcagcctcccccagacagactttatgattcaagtgagtgcttcatgatctccctcatcatgtatatgacagaatttacacagctcctgaggctgctagaggtgaggtgacaggcactggagctctggacacccaggagcgaagggagcaatatctctgctacccatacccatcctcaggtcctgtcttgggaggcacagcctaagctgaccacacggtgcagagacggccagagacccttgctggagagcacagtttctcaccagggccgtgaggctgggatgcagctcctgagggta

SEQ ID NO: 307477 - DNA, 130 bp, Homo Sapiens
taacagtttacacagactttactttttcacccattgaggtgagcacacaaaaatctgggcaggcagagttctatgagatgcagtgtcacaattacctgccctggttcacagacacagaccacgaaactcg

SEQ ID NO: 307478 - DNA, 372 bp, Homo Sapiens
aaactcatgagcaatcgttagtattagcgtatcttatgtgcggcccaagacaagtcttcttccaatgtggccctgggaagccaaaagattggacacccctcttctatagtagggactcttgagatggttgagtgtgatcttgattcagataaaataacatagaataaaacttctctgtacagagcctgttgtttggactggagactacataccataattactggaaaccaagccttaaaaaagtctaacaattgacaaacataattatatttaaaggttaaagaaagatgtaagttcattaatcctcaggaaataggatgtcctccttgacacctcagtctcaaaaaccacaccttttccaaagagttatac

SEQ ID NO: 307479 - DNA, 196 bp, Homo Sapiens
gatacgctaactgctgtactcagatgagacccctcggagtacagcttctttagatacccacgtagtgcacttagaggagagcagtagaaggctgcaaatctgcatgatgtctcaatcagggtgctgtatagaaacgctcctggcaggccatctcggatcagtctgaaatgctttctgcatagccaacgaacttggt

SEQ ID NO: 307480 - DNA, 349 bp, Homo Sapiens
agctagtataaaacccctgtgactaaagctgaagtcttttcaagcaggcctctggaggttgagaacagactgggctttcaccaggggtacaaggaaaggaaggctggtaagataaactcaagaggcatcctttccattgtggctgaaccactaaataagtctgaactggcaagtgctttacgtaaatgtgctccagagtaaagaaaaagggacagtaattcattctacgttaagtaaaaaatctacacaggcacgcacgtcgacttactaaatataaccagtgaaaaattgtttcaaggcttgttttgtctataagaggaggcgacaaacacccccattaacatatagg

SEQ ID NO: 307481 - DNA, 438 bp, Homo Sapiens
  misc_feature (341)..(341): n is a, c, g, or t
actaacatcctaaaaatctatactggaaaaatcccaagccagtttttggttgaaagtaaaaattcagagcctaaacagaaaatctgattaacaataaatggggtagggagagaaagagctaaggagaaagaacattcaaagcccaacaccagctcatggtagtctttggcaagataggttccatgataagctgagatacagcccacctccaaacagtgggctcaggataagaacaaattacaaaccagaggatagtctcagggtaagaacaaactacagaaaggtcagattacaggagtctcttaaaaaggtgattgcagattcagctgctcaggacgtangtgttgtggttattagttttcgacaatgccaatcctgagtgccaagccactctgtgacctattaggggaaaagcacatttggttgactatattaaag

SEQ ID NO: 307482 - DNA, 355 bp, Homo Sapiens
  misc_feature (146)..(178): n is a, c, g, or t
cctttacttgtgtttttcttcctttagaccatgaaacattatgttttaggtagtaaaacataaatttaaaaagaaaagtatttgaacaccatgctgttacaaatttaatgagaaatctctggcattgggaagcaatcatcgaatannnnnnnnnnnnnnnnnnnnnnnnnnnnnnnnnctacatgcacacatacgtgtaaatgacatatgttgatggctgcccagtgtctgaacacattccttattttgggaaatctcaaaaagtctgggatagtccctttcctagttatttgattattgatcatcagtcatgtgacctttgttaaccaaactaatgctcccacccaggactttg

SEQ ID NO: 307483 - DNA, 114 bp, Homo Sapiens
ttttatttctctctcatgggtctggagtttggctggattcagcttggtagttcttgctgagggtcattcatggggttgtcatcggatggtggctggtgacggaagcatctgaag

SEQ ID NO: 307484 - DNA, 299 bp, Homo Sapiens
gctcaagcaatcctcctgcctcagcaccctcaataactgggaccacaattgcatgccaccaaactcaggtaatttttctattttttgtagagatggggttttgccatgttgcctaggctgttcttgaactcaccaggctcaagcaatctgcatgcttcaacctcccaaagtactgagataacaggcatgagccactgcaccggcaatactgaccatttaaaaggaaatccagtgtctgtatgtgttctggatgcaatatacttctttatcccataaatttctgctcttgaagtaaatat

SEQ ID NO: 307485 - DNA, 520 bp, Homo Sapiens
tgccgatctttctgtatccagtgtagttaatttgttaaaaaatcaacatatacaaatactctcacaaatactctcatgaagctcagtttctttctatgaagaaaaattcagacctaactaagctaaacataacatgaacactgtgagtcatacagatctgtgatcaatgccaattcttccgtttattagccttgtgaccttgcttaggtttgtttccatgtttactaggtggggcaggaggaggtaatgtctaattcgtacgatcgttatggaggggtggaaaccacagagcacacgtcaagcagtttatgcactacctggcacacacgtggcgggtgctctgtaagtagcgatcacgattgggtgaaatcaagcatgtactgcatgttgaatagagatgtagtacaaaaagaaaagagcaggttgatgttgatattgcccacgtggaggctttttctcagttccaggtgcttccttgcaaatatagcactggaaaactgtagttgtgacttgccaggat

SEQ ID NO: 307486 - DNA, 342 bp, Homo Sapiens
aaaacaaaacaactgaacagccatgcagactacacatagaaagtataaatataaagcaatagactcatctgtggaaccagttataacaccttaaacgtcatctgacttacacgtctttacagatgaaatcaaattttttccaagtatgcattttgatcatcttcatgtatagcttttatgacacattataattaggcataagtgatgagcagttcacatagctaatcagtagaactttacatgttatccttttttttcatcttttcaatttgtagtttctcagatacctctgctttttcactgacaaaacaattaaaaatgaatttgtggggctcatctctt

SEQ ID NO: 307487 - DNA, 391 bp, Homo Sapiens
aaattagagactgggtttcaccatgttggccaggaatgtctcgaatctcctgaccttatgatctgcccgccttggactcccaaagaagttgggatgacaggtgtgagccaccacacccggcctgaacttttttttgacatgaactaaaaattgtaaattagactctaatgttaactgaaaagaaaaagaaacgagtctgttgaataccaaaatttgagagcaacaaatgaaacactgaaatatccaaaagacgcttacaaagttaagaaactaaaaccaggttcaaatgaaaacttagaataagatttatgatgtaaagttaaaactcttcagtcctgtatcagctccaagacctggtcccagcatactcaaacttaaattctaacaaagc

SEQ ID NO: 307488 - DNA, 214 bp, Homo Sapiens
aactggtattctatctttggttctccttcagtcctcacacctggttctcacctttcgtgatgaacatcttttcttgcctctgtcacattctctcatctgttagctcccctcgtaccattgaggcagtggtgtggagaagaccccccctggagattttatctgctctccttcctgagaggcagaggagctcagtagaaggtcgtggtgtctgcaa

SEQ ID NO: 307489 - DNA, 468 bp, Homo Sapiens
gcagattgaaagaaatcaggctatgtgcaaataagcttcttattgccaaacagaaaagaagccaaatcattgcatcttattttctgcacgctattggcactaactgctggcagggagatttttcagaagcatccacactttacacagtgttttctaacatgtagcacccgggggtagcgggtaagtggtaggtagaaaaagaaaaggcagcaaataattcttcaatacctccaggcactgtgcaggcatctcacacacatcattatcacatttaaccttccacccacacagcaggataggtattattatgcctagtttatccaggaacaagccagtgctcaaggacagaagacaaaacaaaagtgtgctgcgtggccacactgacattctggtctcctcacccagtccccctccattcccggctgagctgtcctcatccagaggtacagagacagttactaaacattt

SEQ ID NO: 307490 - DNA, 287 bp, Homo Sapiens
actaaaaacataataacacactttatgtcagggcagaatctgcatagtgcttttaaacataatcaccaatgaagagtagccaaatcccagaacttcacacagcactcattagcaaacaacgtcaaagtgtaaatgataagcaggaaaaaaaccaagtaacacgaatgccatttttctttgatgcaatcacgaagaaaagtggaaatgcaggacgaaaagtggaatccaagctttggccacgtactgaaacttcattacttcaatgaaacagagcaaatctccatgga

SEQ ID NO: 307491 - DNA, 315 bp, Homo Sapiens
ctggctacaaattttattccgttacaaatagcaccgagcccttattcaaaatgtagtcgctctggtttgaatgcttcttacatatttcccccttcccttttacaaaaggacctttaatcctaagggctgcagaaggatgaaggtccatcttctgcaacttcttcatgctgaacaggggcgatgatattcctgcctattagggtctcttgtattcagggtagagaggagctcagtcagaaagcattggtccattaagcatctgttgtgcccctgagttcctgcaaagggtaaaaccctggcgctgcagcagtttct

SEQ ID NO: 307492 - DNA, 500 bp, Homo Sapiens
ctttcaaactttaatggatcttttaaccaacctatgggagggattggaagtttaaaaggaagggaaaccctttcccatttaagggtagaaagggggcccaagaagtcaaaaggacccccaggttaaaggagccccaaaatggttcggaaccggctacggagattgggtaacggaaacccaaagggccttcccccgggaaaaggtttgggccggaaaccttcttgtggggcaaatgatggcccgggttttgaggacatggggaatccaaaaagtgggccattgtttgaaaggggggcaccagacccggaccttgtgccctggcaattttcggaaggagcccagaagggtggacctgaaggaaatctcctaaaaaaacccaatggcaaatcccggtaacccttaaaccacggggcctgggattccaggtcccccttgtgcgggtccaaaggggacccaacccattcaacggttttcggctgggcttcccccaagcggaagag

SEQ ID NO: 307493 - DNA, 503 bp, Homo Sapiens
gtctttggagccagccatgatgttaaaaagctccacgtggtctctcatcactgggaagtgatgagacaccactaaacagggagaggcttgaccacctgcagccattctggccacctcagctacgttgccagacatgtacgtgtcttagtccattcaggctcctggaacaaaatactttagactgagtaatttataagcaacagaaatctattgttcacagttctgaaggcagggaagctcaagatcatggcaccagcagatttagtgtctggtgaaggctctgcttcataaatggagccttcctgctgcatgttcacgtggcagaaggggcaaacaggctccctcaagcctctcctataagggcactaattccattcatgagggcagagctctctaaaggtctcacctctcacattgagtcttcagttccaacatttgaattttgagaggacaccaacattcagaccacagcaatgaataaagctattttggtccttccagcc

SEQ ID NO: 307494 - DNA, 252 bp, Homo Sapiens
ggtctcgcgagcctttgccctgggtgttgcagctattgttcaaccgccgccgtcactgtcgtaaccgcctgctctgctgggacatggtatgacgtccgcatcttcaccggtctctggactcaccgctcgtacttctctgacttgtcatgcgatctgtgagcatcttctgcattcgatcttaatcattacagattcggaaatgctacgtgcatttatggtcaatagtatatgacacttacagttcgtctatga

SEQ ID NO: 307495 - DNA, 301 bp, Homo Sapiens
cctgccaggtatgaagtgctgaggatttaggctagtcagctgcttagaacgcatctagggcactggctatgcatgcacacatctgtgcaggatcattcttgctgtggaatttgtggcccaagaagtggagagcgtctgctcactgatggtcattggggctcgactggttatgctttacaccccgaccggtcatccagttgatgcggaccttgtggtcgagctgcatccaccagtgcacgaagagaaagggtttggccgctgtgttctggtacatgtgtgtctcgctgaaggctcggggacc

SEQ ID NO: 307496 - DNA, 352 bp, Homo Sapiens
gggtgacagcatatcacttagccggtaccttgacaggctgttctccacagtccgaacaggccaggaagacacgggtagggacagagctcaggctgagaagaacagccggcgttctgtcagggttgtcagaacggatgggcacacaggatgggcccgcggctgtcgtctgttggtccggcacctctagcagcggcatatagcaaagttgtgaatgggtgtgtcaccgatgaggttgaagtagaagagatgttccaggtatttgagtaccgtggatcgcaatgcgtccagtctgcaaggagcttagcgaaccttcacaggttgtactgagtacttatgctttgagtgggcctcc

SEQ ID NO: 307497 - DNA, 140 bp, Homo Sapiens
gagaattaaaatggcattttaatagaaaaagcaaatagtaaccaaatgttaaatatttcacctcaagaactatttggagaattaaatttccatgtattatttactgggatctctttaataatacccttctgctctgacat

SEQ ID NO: 307498 - DNA, 113 bp, Homo Sapiens
gaaggttaactcaatgcaacagggaaaatgtagtaattaaatacaacaataccaactgacaacatataccgatacagttcaaaataagttagaaaattattattaaaaatggt

SEQ ID NO: 307499 - DNA, 134 bp, Homo Sapiens
acttgtgtgggagtcacagggtgtccctagagcagttttgtaataaaggcctctagggtgcattctctcaacagggtactccagctcaaggagcctggagaaaaatggccaaaactctcagaaggtttttaaac

SEQ ID NO: 307500 - DNA, 295 bp, Homo Sapiens
ggatcacataccccccaggagaatctgtttgtttaatgcatggactcctcttcccagaagtgaccatatgtccatgtatattttacacggagtataaagtactgtcatgaacaccctaaagccattaaatagacctcgggttaagagctgttgacacctaatcatgatctttctcttattctcgtttatattcccagcttgaactgtgctaggccagtaaaagaagtagggggataggactgatacagttgtcaagatgatcagtgggggaaatgttaaaaataaagtgggcatt

SEQ ID NO: 307501 - DNA, 398 bp, Homo Sapiens
tgtgttcaagcaatccttccactttatactcccaagtagctgggactacaggcccatgcaaccacacccagccaatgtttttattttttgtagagaagggggtctcagtatattgcacaggctggtcttgaattcccgagctcatgatcctcctatctcaagcctcccaaagttctggtattacgggaatgaacccagtcatcctctaactattaaagaacataaaacaaactgtccttgctaagaaagaccaaatttcaggacaactaaaatcactgagaggttaaatagttgactgaataggaaagagaagaaaacaggcactgaaactaaatttggatcaatattagcacaaaagccactacaaagaggccaaatctcttcagactgccaagttt

SEQ ID NO: 307502 - DNA, 568 bp, Homo Sapiens
gatgagtttcaaagttgcagacatcagtacctttttttataccaaattttaaccacccctaaattccttccacacacgcacactcaagacttgtccataacctccaagcaggatgttattcatttaaatatgaccccattttccacacctagatactgcttccagtccaaacatgtccaaaatcagctgcctacgcagaggacaaactttaccaaaccttatcctgactctttctacatacccagaactgtatactttaaagccaaagggaaactatctgaactgcatcaccaactccaatgttttcaggaacaaaataggtaacataaaaagcaggcttgtggaagataaatccagtgggtctattaatgaagaccaatccagtctcagtgtggaggatgcaacaagaagaaaagagctactcagagaacttgagaaaacagaatttactgtcaaggtaaggcttccacactcaaccagctagcttcaaggagccttgaattttaatcagtatctctcctttgtttccactgatgatctaggtcacttaaaggtccaaatgtattag

SEQ ID NO: 307503 - DNA, 178 bp, Homo Sapiens
caattggaaaaaacatcctgtagaggattacttttaccattaagttctcctcagtaagtatatgtgccaattaccattctctaaaattctaacatgggatgaacctctctttctggctacaatgtagaagattgaggacatttactcctgtaataacaagaaaaacccagaaaaaata

SEQ ID NO: 307504 - DNA, 288 bp, Homo Sapiens
agtcattattagggtcacttttcggagatagacatttctctaccttgttattttgggcagagactaaatcttagacttctaatttgtgttttcactgggtggctttgctcagtagatgctggttatcttgcatggctacttatgtcagtagaatggtttaagagctctttctaacctatatggcctatccacttgcctctggatattgaagtctgtgatatttcactttaaggttaaaggctcctcctcttaaatttaaagatttatgcccagaagtataacattttt

SEQ ID NO: 307505 - DNA, 505 bp, Homo Sapiens
aacaaataacacgtatggctttcctaactgttaacaaaccaattattttaaaaagaagtaaagtaaaatctatgtttgatgttccagcataaaagattgtgaatcatctttttagaaagaaagatctgtttgtaacgtgaaagatcatgatttgtttcaaaaattaagactttatagttctggattttcttaaaagttatgtatttacttgagatgcttgctgcaattaaagaattgtgtgagctgtcaagtcttggttaatcactttacatatccatactcaatttaactgtggaagcgttttccataactacatacagagacctgcactatgtcatgcacaattggcttcttcattaatactgcttgatgatggtgataaggaaataaaggccttgcaacaatggatgtatgcattttccatacagccatacctgctgttggaaaaaacttagaagtcaaacatctttctgatgactaatcatatgcatcttttcagttttca

SEQ ID NO: 307506 - DNA, 531 bp, Homo Sapiens
tgaaacatctaaaatgtaaacatcattcttagcctgcagaccatacacaaacagaggttaagcctgatttagcttcaggctatagtttcccacttccaggattaaatcaccaaaatggcagtatctgtgtcttctgtgtctcatggttgcatatcatcattgcattgctctgaagaagctgaaaatgcagagcaatgggatccctgacttgactgtgggcagagacagagtaggcaatgaaagtgctgcaaaggccttggggagagaggaaagtaggctaggacaatgggactagtcttggggaaaaaggacttctctgtgctttttagctccagagaaggaatgtaaagcaattttcacaccatcatctgggctgtagcggaacagtgagtatctctgatgaatgatgggctctatatgtggtgggctgcccttccagctggatcaggtgctgcagagcctagagacaggctaacccatcgtcccttaaccagcacagctcaaactgcgagtagacaatttttcagtaat

SEQ ID NO: 307507 - DNA, 112 bp, Homo Sapiens
ggaactgagcctgattatgcatgtcagatgtccaagggataatataggatcgaaatcggatgtatcggggaccttgcttccattggtctgtcacgaggaagtcggaagcgac

SEQ ID NO: 307508 - DNA, 441 bp, Homo Sapiens
  misc_feature (181)..(194): n is a, c, g, or t
cagtcctcgttaacggcttcctgattcctgctcccaggccacggttctgtgtctcacagcctttgactcccatccggctggggccaataggaaacagaaatgctcccaaaccatgccagtcctctgggagaagttctccttcccatcccatgcaggcacagggaagaagtcaaagcacacnnnnnnnnnnnnnnaagtcttttataaggcaggcacttttcctgcattgaaatccttccaaattacctgggagggaaagggtggtgtcatttccttgtaagtatcaaggagcaggaagcccagagaggttcagccactagccctaggtcacacagcttgcaaactattctgggtctcagatttgactctaagacctcagcttttctcatgaggtcatatctgtggctgggaaaaagaagggaattttgggatttccaaaac

SEQ ID NO: 307509 - DNA, 506 bp, Homo Sapiens
caaccagaaagaaaatactatctgaacactttcagacatttcttccccagcaaaccaaagcaagcaaatcaaggcttaaactttgtcgtctacattacttccttaacttgttcaaactgaaattgctgtcttttcacgctgtgcaacttcagaaaaggtaaaaaataaagaacagaagaatgcaataagatatgtactgacagcactacgtaatacctgctccaaagagggtttttacaccagtcaaaaattctaacagtttaaacaactgctcaacttggcacagcacagccctagatgatgccttcgcttcttccctaaatcctcagtctcaagccattcatacgtgtaaaaccatgaaacaagagacaaaaaggtcagccatggcaggagaagtaacgaaaggcagtgtttactactgtgatactccagggatactgtggggcctctcctctaccccatctgctgtcccactgaagcctaaaaacacctttatatgagcactg

SEQ ID NO: 307510 - DNA, 443 bp, Homo Sapiens
cattgcacctgacacgtgcaatgtcacacacctatgatcccagctattgtctcatctcactgaacctaatctatctttccaaatacaatttgaggtatagattaggaagtcaccagtatactcatgatagtagaagccatgggaatggataaggtaatccacgtacagtatgtattacagaatgagaataaaattcctaggatagaactctgaggagcaccaagatttaagagggaggcagaaaaagtagagtcagctaaggaaattgagaagaaatggtgacagcagaaatagcataaacatatgtgattaggagccagaggaggatagaaaggaaggaaaagctgtggccacctgtgccaaatgctgctgaaagagagaggccaattaacatgaggactggaaagagttgactggatttggcaattaagagatcataatct

SEQ ID NO: 307511 - DNA, 536 bp, Homo Sapiens
aaagaattgggactgttcagctgccagtgggaatttcttaaagttagaagctaaatagaacactagtcagagtctatatcaacaaatgttgctatagctcaaatctgtgattcaactggagatatcaaagctttcccatggaatttacttactttgagcagtactggatacaaacgaattctaagacaactaaagcatttgtacacccctcccccattagaattgtaacgtcgtttgtctttttattatttatgagactttatttctaatattaaaaatttagagcagtagtcacacaattaggggactaatgtggaaggcaatgcttgtagtagtgagggtgggcagggctggctgctgctatcatagcccagtgtctcagtgccttagcacaacgatgcttattttccacccacttcacagtcctttgttctccacagtcacctgtggcccaacctctgcctttaaagcatggctgccaggttcaccctgggtatgaacactaagcccactaatgggggtaagagagtgtgcaa

SEQ ID NO: 307512 - DNA, 436 bp, Homo Sapiens
cctagaaaaaataaacacttttaaagttttatttcttggttggccagacaaacttgatattcgtctcttttcccttcatgcatacagcataaataaatggtatattccttgttcaaagtttgaggagtcttagtcacttatcacacccaaagtcagctaatgggtaagagacacaaaagcatgacacaaactcatctgctacagaatgagagagagtaactattttaaaagacatttaaaaagtgaaaagcatgagacaaactcatctgctagagaacaagacagagtaactattttaaaagacgtttaaaaagttaaaagcatgaaacaaactcatctgctagagaacgagagagtaactactttaaaagacatttaaaaagttaagtccatgcaaacattaattcagaattgttttttcctcttcttcctaaaa

SEQ ID NO: 307513 - DNA, 133 bp, Homo Sapiens
tggggggctgtgcaggatccttggctgatggtggagatttcttgagcggggcccaaccctgggcctggaagtatgggaccagttgtgttgggacttctgcggagaaggtctgggccgattgcgctcggggggc

SEQ ID NO: 307514 - DNA, 144 bp, Homo Sapiens
tgtcgattttccaaacaattttattgaattttcccactgacacacgggcagcacaattctatgaacaggagaagaaaaaaatccccagtcataataattctttcaaagtgatggttaatctctgggagataccaattcccctct

SEQ ID NO: 307515 - DNA, 453 bp, Homo Sapiens
  misc_feature (49)..(57): n is a, c, g, or t
cagcctggaattacattcatctttataccaacatagtcataacattaannnnnnnnngaatggagcaagagctccgtgaaggctaaagtgcctagggcccctgaaattcatgatgtaactctgatcttccagcttctacaccagtcactccctcaccccaatgtcctctgggtttctcagacccactggggccacatgtcctctgtggctttgctcctgccaggctgctgcctgtgtaacaactctgcttattgagcccttcccatctgaggactcatcttccgaggtcttaggtcaaacattgccatctttgtgaggccttatctgattccctaagtggaaggaattgctccttctaactcatccagcacctcttggagcatctccaggcttgctatgatttgcttacatttagcgtgtgagttccacggggacaggacctcgtttgacgtc

SEQ ID NO: 307516 - DNA, 235 bp, Homo Sapiens
gtgtgcaccaccacacctggctggcaaacttactctgtaaatggccggagagtaaatatttcaggcttcgcaggccatgcagcctctgctacaactactccactctgccactgcagcaggacagcagcacagggaggatgcaagccagcaggtgtgggggcgcccagtaaaacttcatttacaaaagcaggcagcatccagatttgacccatgggctgccgttgctgacccctgt

SEQ ID NO: 307517 - DNA, 514 bp, Homo Sapiens
  misc_feature (42)..(50): n is a, c, g, or t
aataaatgagcattaaggttttaaatgtatcattactcagcnnnnnnnnngcacattagacagcaaaaaataccctctgaatatttttaattttgtcaatctcactttaatctcctgccccttcttactgtaatctcagaatataacccatttgattatgtatttgctttggtcttttcttcttcaggttcaacgtggttagaacaaaagacacaccagatttgaaatctgaagatgtgaatttgagtcccaatattgacatttatgcaatctatggtattcaaaaagtcatttaaactttttcagttctcagcttcctcctcctcaaaatggagaggcttatgcctgcctttcccacttcacaaggcagttgttgagtcacttaagttagacaatgctatgaaagtttattatcagattcacagtaattcaaaatgtgtctctgaatttcatttctattcgaaggcatagaaatgatatcaccacatcaggacttctgctccaggggcaccag

SEQ ID NO: 307518 - DNA, 529 bp, Homo Sapiens
tgtggtaattctccttgattaattccagctctaaaattctgttcctgcatctgcactgcagtctggctcttcacctctgagggctctgcaatgattgacttttgacttttcaaatccatctgtaagagacccagactccagagacccctggtacaccctctagtggctatcagcacaagtccacagaatcaaagaaactgggaggggaaaaggggccaccgtttacctacttttgtgaacagtggtgaaagtgaagaggaggaaattgatgttccacagcttgaaagatcaagggcatgaataacgtaaaatggtttttaaaatctggttacacaaaagtgtcccgaactaggacgatctgacagcacacacttgtgatcaaattccaacagattcttctctcccgagtcaggtgagatggtcaatgttagctggtccttacttcagcagaatctaagctctagccacagtggatgtgatggcatgagatggctgcagcaggctagatgagaccctctacttgttgact

SEQ ID NO: 307519 - DNA, 383 bp, Homo Sapiens
  misc_feature (120)..(129): n is a, c, g, or t
ccatagcctggccaggggaccaagcagacattacttattcactcttttccctcaggaaaagtaatgggatagccaaggtatcagaagaactttggaaggtttgataggagtcacagaacnnnnnnnnnnctcctaaagagagatactgggaaatgagtagaaaaataggctacttgatactgctaatactgaaagaggccaggatcagtcggcaactacagaataaaaagtgtagtagttaagggggtactgacaactcctccaagtgtttcactcatggcagcagaggaccagcaatatgccatagagcaaatggtaagctctcaagaatataataaataatagttattttttggtattctatctacaagtgcattgcagag

SEQ ID NO: 307520 - DNA, 479 bp, Homo Sapiens
aaagcaatgatgatcatttattatctttcacagtttctgtgggaccagaatttaggaatggctccaccgtgcaggtctggcttaggctttcacgaggttgcagtcaagtgataggaggtattggaatcatcttgaaggtttcttcacttatgagtctgggctaggaagactcaaatggctggggactagaatagctagggtttctgtagcacctctccatccctgatggtctctccagcgtggtgactttaggcaagccggactgtttaatctggcagctcagggcttcaaagacacgtgtccagagagggagagcccagcagaagctgtgttgctttgtatgatgtattcttagaagtcacctggtatcattctgtcacattctgttggtcaagacagttacaaaggtctacccaggctcaggaggagagaacagagagacccacctgtcaatgaaggagtgtcattatcacattgtt

SEQ ID NO: 307521 - DNA, 161 bp, Homo Sapiens
aaagagacagggtcttgctatattgaccaggctggtttcgaactcctggcctcaaggaatcctcctgcctcagcctcccagagttctaggtatacaggtgtgagccaccaggcctagtctcaaatttcatttggggtgagtagttaggatgcatgattaag

SEQ ID NO: 307522 - DNA, 487 bp, Homo Sapiens
ttttgtttttaatcaaaccaggcttgtaatagataaataacaatttcttattgctatacattaaaactgcacacttctgaatggagagatcagttatcagtgaattgcttttctatgacactggatggctgcataggagcagcgctgacctgaatttatacaaactctcaggagatgtgaactcaatgtgacgagtgacggcagcagtggtcaatacaggaatgcaaaccaggtgtcccgtcccctttctgggaagggcataaaatatgacatgatccctcttacagctccaatttaaacaaaacagccacaacaccttccctcacccctgtctgggatgaggttatttatgaaaatgagccaatgcccaacctggggtcctgggagggtaagggaagtagggggaagctagtgatgggtggggtacagagaggctcccattcatacatgttttttaaaaaaattatgtgtaatcgtaataaccaaa

SEQ ID NO: 307523 - DNA, 519 bp, Homo Sapiens
  misc_feature (108)..(159): n is a, c, g, or t
tgaggagctttttattattattatatacaaaaagatattcagagacctggatctcacttgtataaaagagttctgtgatcccaccatgatccttgagaaagaaaaatnnnnnnnnnnnnnnnnnnnnnnnnnnnnnnnnnnnnnnnnnnnnnnnnnnnnatgaaatgagagaaaagcgtgacttttctctcttcttttaccccagttgtggggggcaacctgtttcctaaaataagcactgatttttatggactctggggagtataccacgtccagagcagtgtctgcatccaaacgcttgctgggcagttggatctgaatgcaggtccatttctctatcacagacctgccttttcagattctttataaattctgtctgaaaatggtctatcaacgccactacctttaaggagttatgctgccaaatactttgatttcagacttctttcaaatcttagctttcagaagcactttataaaacataaaattcaatttgtttgatttggtttgactgagcat

SEQ ID NO: 307524 - DNA, 444 bp, Homo Sapiens
catggcgtagtttaagacagttgcttccgcagccccaggaaccagccaagctaatagaagaggacggcacaggtgtgctagaaccgggcctggactccttgtggcttgggaacagacctgtgaaagctcccacatctcctcgccagtcatcaccaactagtcaccaccaacaaggagatggcgcacgcctgcctaatcacagcaattaactgttacggtctttgtgcaggaagcacacgatatgctgagaaaaaccagcttttgtctaagcatgcacctctatggactaagttgggtctaagccccagtcacatgcagactgggaagatgtctgctaggtaagtgttgagggcaggtccaccactgactgactgtggcagacttggcaacagcagctgtcacccacagcagtggcaataccccgcacctccccccccgaaacta

SEQ ID NO: 307525 - DNA, 242 bp, Homo Sapiens
gaagagttaatcatttggttgcgatgagcaatatggacacaatgtgtgtgcttctgtaagttctgcaggaaccctgggtccttgttatcttccagcccacatactccttccggatccccttctctgctcagggctgacaccccatcaagcagatatgataccctagcttgtctccgcccctgggtatatgctctctcttgtcttgccccactctgcttcctgttctacaaggatcttctaat

SEQ ID NO: 307526 - DNA, 160 bp, Homo Sapiens
aaagctgaatatatttgtatgatatcatgcgtataataagtaaattacacatgaaggagccatcaaaagaatgtagatgactgcaaaggtgaacccgaaactttgagctgagatggacagttcttcacgatgtgtctctaatgtaggcagttaaagaaag

SEQ ID NO: 307527 - DNA, 475 bp, Homo Sapiens
aatagttacattgcactgtagtagaaatttaaaataggatagaatgccggtgtatatgttacatattatcttcatcttattcatcttcttccctcagagataccttaacaaatgtgtctgcttcttctcttatatctttcggaccaattccaagtcgtccactagccaagtcaccagtccacatgaggtctaggtcaaaagcttaatcctcaacttcgtgatgtaccaagtaaattattgacgcaacttctataacgatatcacgacaggtcaaacccatcatctgaagcgtcgctattaccgtcaatgcagtacgcctggctaatgccgatggtacagccccaatcaagcgtatgaaacaccaggtgggtcaatacagaagagtagcgcatggtcattgatactggaatatgctgacatgcaactggagctataaggtctactaggctgtaaagacgtatatgcatgcgcatac

SEQ ID NO: 307528 - DNA, 160 bp, Homo Sapiens
ccccaccaaccgacgcacagtaccgtacccaatcacgatggcccatatacacagacaaccccacggacagccggcaccaggcatcgcaaactaccatccgaccccaggcccgataaagccccacacgcatcttcaggcagccctcccggaccaagtccct

SEQ ID NO: 307529 - DNA, 204 bp, Homo Sapiens
ccttttcaatcaatttaggaagtttattttgccaaggttaaggatgggccagtgacacagcctcaggaggtcttgacatgtgcccaaggtggtcaggatacagcttgcttttatacattttagggagacatgatacagcaatcaatacatgtaagatttttacattggttcgatctagacgggcaggacaacttgaagctgggc

SEQ ID NO: 307530 - DNA, 410 bp, Homo Sapiens
aaatgaagtacactcattaagtgaagtaacgggaaaatatattattcaaatttaaatacttttaggtcatatgtgtgtcataccagaggagctcaagatagtcaagaatggttccaaactaatgcagtagggtcacctaacagcatacctaaaatctaggttttgagaaccacaagaaattacaaccacacatcaaatcttgtcattttactcagactattaaatacgttaagtaaaggttactggctgaatcaaagacacacgaccacgtagagctaatgcagaaaccaagaaccccaaatctctcagctggcccaatgcttctctgcaaggttccactgcacaatctgcagacagaaccgctgaacgacgacttctagagagctctgagcagctgctcacccgctttc

SEQ ID NO: 307531 - DNA, 441 bp, Homo Sapiens
gtgtgaaagacataattcattttattgtacaaatgattataattgattcttaaaagtgaaacaactgtgctctacatatgcttattcaatcatatttacgagacagatatgccccattttatgttattcctggggatctgaaaactggtctttagtaggtatgtgtgggcacagggcaagagggtcacagtgggcggtaaatcctgaggaatcagttaattgttttgttagagaaatagaccatttaactgctcacttttcgactaaggaacagaagatacaatattaattcattaactataacaaaaatatagtttaattttatatcatagctaactaaaaagtattttaagttgacctcatttcataaaggatttgaggtgagaagaccttttgttttaatcagggttctttgatttgaaaatttgagatactcacttc

SEQ ID NO: 307532 - DNA, 446 bp, Homo Sapiens
aaaagaacaaaacccctgaggcttagctgcccagtgagggcaatgtgtaattcagcaggtcctcctgttgctccttcccaatcaacatgtcatgttgcaacacactggctgcctcccacccgttagcaactgttttgaccactatggtaaaatcatcatgatggaggctggctggagtctgcatggaatgtagttaaaggatgttgaaagacagaagcagggccttgtagatgacaagaaggcaaagaatgatactgccatgacccccagcaagttcacaggtttatctgcctaaaaaactcacactcccattgaacaactgctgccgttaactcagaatggtctatctctatcagcagaaaggaacagacagaccaagatagaaaaccaagccccaaaacgctggaatctctcgcttcaagctaccccagcaagtaagtggaccg

SEQ ID NO: 307533 - DNA, 244 bp, Homo Sapiens
agactgcatagggtcggcgtggtttggggctcaccttcctgaggctatgtgtgctatgtctagataagaaaacgactgagctgcgatctttctagacctttccaaaagtaacttcaatcactgagtgatcccttccgctgccacaactggtgtggaaccaattcccagctcccagtcctatgagataaacatcctcatgatcttatgtagcataaacattggcctgaaatggagcaggctggca

SEQ ID NO: 307534 - DNA, 322 bp, Homo Sapiens
ggatttctcccatacgtggaagtatcaccagcaaaggccatgaaacagcaaagatggcagcctgtgccttcctctagaaactccatcctgtgggggtactaacctgttgccagcccacatgcaactgttggaggtggctggagaccctcattgggaggtctcgcccagtcaggaggaatgggatcagggaccttctcaaagaagcagcctggctgctttttggtagagcaggtgggctgcattgggtgggatccttcctcacctggatcacctgtattctgcaaagccagcaggttggagtggcagagtcaaccaaactgca

SEQ ID NO: 307535 - DNA, 488 bp, Homo Sapiens
  misc_feature (48)..(56): n is a, c, g, or t
tacattataaaggtaagaaatttatctttcctttaaaatatcttcaannnnnnnnnaaactgctcgagaccagttgttttccaatgttagagtacaaaagattcacccgggaaattgataagaaggcacattccttgatcttatattcagagattttgatttgatgcatatttttagtttcttattgctgttttaatgaattaccagaaacttagtggcttaaataacacaaatttattaccttacatttctgtagttagaagttcgaacgggtctcattgggttaaaatcacggtgtcaggaatgctgtgttcctttctgaaggctctagaggagaaccgcttttcttgcttccagagggcacccacattctttggctcatgggtctcgttctccttgaaagccaccacatggcatctctgtgcctttcttctgtagccacactttcctctgactgtttctcctcttctgcctcctattctacttta

SEQ ID NO: 307536 - DNA, 464 bp, Homo Sapiens
  misc_feature (93)..(134): n is a, c, g, or t
gtctcaggcacagtattgcttcatttcaattcattacatgagtatacccatttctctagcacatatgtgcagaaggatacagtcttactagtnnnnnnnnnnnnnnnnnnnnnnnnnnnnnnnnnnnnnnnnnnccacaaggtgtggataaatacttgtgcagataaatagatccacacaagtatgcattgttagttcatcttgcaatggatatactgtttttggagcagctctttggaacttcatttcagaggaaagcagttgctaagagttttggaggcatggtcaggaggggctgtcacaatcccttcaagaaccagccttgctcagtggccactgcgaaaagctgtgtggagatttgcagctctggccttgctctcctgcactcaccctggcaagctggctctccctggcatcagcaccgctagttccaggttagttattttcaccctggagtcttgggg

SEQ ID NO: 307537 - DNA, 141 bp, Homo Sapiens
cagcttcggcttgtaaacatcagcaactcattcgaatatcaaaacacagggcaggtcaaaatgcatgtcaggtcatacatagcctgtgaactcagcgtagacttccagtgggtgttagttaccccacatcagtgtcctggg

SEQ ID NO: 307538 - DNA, 444 bp, Homo Sapiens
atggccagctcttatacagaaataacagatacaccccattcttcttaagactcaccacagcgccccttgctgcctctagacccataaatacctagggtgaaatcagcttgctccaggtgaacaggtgccagctaggacctaggcgggacagcttttacactataagaatgacaaggcttcgcaaatatacagagtcagaaacttggggaatgtgtgcagaaggggattttaaggatgttacaccaatgagggtggatgtaacactagctcaggccaaatttactggcatgagtgcgctttctagagcttctggatttcatgggttaccttgtgcagctggacgtagttctaatagcttgcttgggtgcctaaccggaacttggatccaacagtggcctaaagttaatgaggcagagagaccagaactgccctagcataagatgg

SEQ ID NO: 307539 - DNA, 103 bp, Homo Sapiens
atgatgcatgtgaaaatattctgtaaatcctgtggcatatcgagtccagttgcgctacatatgggtcctttaggctagccctgctgaggaaaatattgtgtgc

SEQ ID NO: 307540 - DNA, 297 bp, Homo Sapiens
ataaggactgactcaatatttgtccactgcatcctctctgatgttttcagctttttctaaccttgaagggccactgctactctgaactaaaagtacagcaaagccaaaggaaatggaagatagccattctctccttcacagcatttgtggctgatagatctggacacttcatcaatggtgatctttgaaacaattacctggccattagcatcaagtttttaaatgaagcggccaaacactgccagactccagcagatgcatgagttcagaagcctaattaaatcacagtgttagaat

SEQ ID NO: 307541 - DNA, 370 bp, Homo Sapiens
ttgaaataaacacgtagaacacgacttggctctcttctagacatctggactctaggtctcagtatctggagtgtatcatcccatgggctccacgcaggtacgtcacggttccctctcacctccgtgattaaggaacgtaatcgtgctgccgattggttggatcgcaatgcccccttttctagagccttccccgtgtcagctacagtgtggatgcggctgggaaaaagataactggaatttctcgtggttataagccgcacgttgatgaatctacgtggttctcttggctcctctgggctaggtgtgtttgatggcggaggaggccgtcgcccattcagaatcacctttcttgagtctcgtctgtacagga

SEQ ID NO: 307542 - DNA, 230 bp, Homo Sapiens
agagttgggttcttttaaacagtaaacctgaaaacactcgctttaaggaagcgtatctatattgttcatatcgcggattatacatgtgcctacgctgtcaaatatataaaagttcctcttgcactttcgtcaagacggatcaacaagcagccccagttccatttttggttggatcctaactactgagtaaccccaagcttcttcttcagagactctggaatctcgggggg

SEQ ID NO: 307543 - DNA, 316 bp, Homo Sapiens
ccatgaaaaaagatttctgggtaaaacttttgtccacatctctggttatttccttgggacacattacttgttctgaagctagtatgtatgaaccatacttaggtttatcaatacatattgctaaattgtttttcaggaaaattttaccaacttttctcagccaactgaggtattttgaatatcacaaaaaagtaaattatggtaaatggccatactctctccctaaggaaaatggcagtgggacatagcaaggcagtcagattttccaaatcaaggggttgatcacaattgactagctattggctcctgcctttgg

SEQ ID NO: 307544 - DNA, 262 bp, Homo Sapiens
gaggctacacaagtactttgacatccaagacaagacaaagcactagtgaaacgagaaaggttcccttggccccctttcagggcatgtgatgggggtgtggctcgcttcttcagtgccccgctgctcaaacctctaggggagcatacagacaggaaggctgtggggtttcaaccccatggcagtgtctaggggtggatgtttacagctcctgaagccccagtgggcatgtgttacagggtgctctcttagtttgccgcctaca

SEQ ID NO: 307545 - DNA, 532 bp, Homo Sapiens
cagttaatttagaaagtttattttttcaaggttggggaatgcgcccgtgacacagcttcatgaaatcctgatgacacatgcccagggtagttggggcacagcttggttttatacgatttagggagacatgagtgagacatcaatcaatatacgtaagaagtacattggtttggtctggaaaggcaggacagcttgaaacaaaagcaggaagactcaagtggggagggagggagcttccaggtcacaggtaggtgataacaaactgtatcattcttttgagtttctggttagcttttccaaaggcggcaatcagatatgcatctagctcctcgagcagaggaataactttgaagagaatgggaggcagatttgtcctaagaagtttccagcttgaattttccttagtgattttggaggctcaagatattttcctttcacaatgggatccatttagtcagctgtggggggcttaagattttatttttatttttcactagaagtgaacataggatatggaaatgtaataaactcc

SEQ ID NO: 307546 - DNA, 305 bp, Homo Sapiens
aacagatgatccataccccagacttatcacaccaaaactgatacagtacatcacattgtagcttagggaagtgctcgtctctgcccacgtagcaatatcctccttacagctgactcggcagtctgcacattgcacgttggtgctgattttgcactgacttatccagatggagcggctactaaaagcatacagactggagtcatcctcttaaatatcgcaggacacatcatatgggtcaacccagagtgcgagctcatgtgggatctagcctgctcagacacctgactgctcagtccaatacgctg

SEQ ID NO: 307547 - DNA, 370 bp, Homo Sapiens
aactaaatagtgatcagggtggctctaaaacagtattcctatggtgacaccctcaagtcactccacaccaaaagggaaagaaggtcaagctggaaggggggtagatatacttcggaagttcctgtgaggaactttacataccttggagaggactaaaggaaggtgaacaggcagtgtccacacaaccggctagtcaggaaaacctttgcaatcagggtgcaggttaggttaagtaaaagccacaatcataagacactaattagaagaaaccagagatttatatgcatcttgaattactttattagatatccaaatatctctgagtctcagtctttcggagagtcatcgcacctttttaagctctcagtcg

SEQ ID NO: 307548 - DNA, 494 bp, Homo Sapiens
ttttcatattgaacttttatttctgtgcggtagtcagttaaattcttcatggcatatagtaattatcaggccatttgagaatattttacaagcaggttggaacagagaacaggtagtaggaaaccagatcttatctctttgagactcattttgaattaactacccctcacctctcattcgaaggcactatattttgcagagaaaaactcacacaacccaaatgtttaatcagaagccatgtaataactgaaacacatgttcagtttctcaataatgcttatttctaaagagaacattaaaaacttggtggcgccggggtggggcttaaaaccattgaatcactggtccccaacttttttggcaccaaggaccagtttcctggaagacaatttttccagactcgggggtggggatggtttcaggatgaaactgttgccagcgcgatcaggtattagattccataaggagtggcacacctagatcccttgcatgca

SEQ ID NO: 307549 - DNA, 488 bp, Homo Sapiens
ccacaaggaaaggaatttattggttcttgtaactgtcgaatccaagattgggactagcttcagaagtgctttgattctgaggctcaaacagtgccctcgggatctgctcactcacatgcactatctccttcaccttctgaagtttggttggaggaaggagtagctccagatctcaaaccctctcagcttcggtttcatgcctctcttctcacatgttctagtgatattgcacttcattggctctacctaggtcatgtgcccacccctaaaaaaatcaccgtgaccagggaaatgtgaaggcagtaaatggcccatgtcccatgctccacccaacctcctctcaaagcacagggcagagtgaccaagcagtggagtcccagagaaagtgggattcagttgtaaaacaagggtgagggaatacctggttggaaattatcctaattacatgagggagcccacaagagcaaaggcatagaagttggaatgtt

SEQ ID NO: 307550 - DNA, 346 bp, Homo Sapiens
aaattttgtaacaagagtggcctaggggattatgttgggaacgtatcccatataagaaacagattatccaccaaatgtccacagtaaccaccactatctttgtgaagtcatcagttgcccctgcatttgaagtgggagggtcttacaaggtgtaatacacaaaataagaaacccaggatagagaaggcaaagaaatcagctataggtgtgttactgggtgttccactctgcattttgtgttcactcactgaatatcagcctcattttctcccctctgcatgcaggtcacctcttcagtgaggttagcctgaccaccctataccaaatagcacatctgactacaact

SEQ ID NO: 307551 - DNA, 205 bp, Homo Sapiens
gtttctaactttttaaaaaatatggggtcttgttatgctgtccaggcaggagttcagtggctattcacaggcacaaatacagcacactacagccttcaactcctggcctcaaaacatcctcccaactcagcacccacccccgtccacctccccagtagctgaggctacaggtgcacgctaccacacccaccttaacacacagttc

SEQ ID NO: 307552 - DNA, 227 bp, Homo Sapiens
tgattgggaaatatatttggatagttagatagtgctaactatattattgagtacatggtatgctcatgtactcagtaataacatatgttacaggagtaacacaggaggaagtagtaaatatagaatcatttgttttttccagccagaaaggagtaataattaaacttgcctttgagggaatttagcctggcacaatcagaccgattggactgggatagagtggagcc

SEQ ID NO: 307553 - DNA, 403 bp, Homo Sapiens
  misc_feature (180)..(289): n is a, c, g, or t
gttgaagggaaatttaattataaattccaggccatttaataatatcaccggttaaatttctttggagtaattatggcattgtaattatgcagaagaaaatctttattcttagggtacatgctgggtactgagggatgaagtatatgcatattccaaatggttcaggaaaaatcctgtctnnnnnnnnnnnnnnnnnnnnnnnnnnnnnnnnnnnnnnnnnnnnnnnnnnnnnnnnnnnnnnnnnnnnnnnnnnnnnnnnnnnnnnnnnnnnnnnnnnnnnnnnnnnnnnaacttgggggaaaattatatattcggataataaaacagatgggaaacaaagagggcccataagacagtcactgattaagatgctttctacatggatgggcctcatccttttgtc

SEQ ID NO: 307554 - DNA, 342 bp, Homo Sapiens
aaagaactttggcttttaaacttgcttttcctctttgagatatatttccaataaaaggacaagaaggaagtggaaggatgagaaactcagtttagtcacgatgaacaggtctagtaagactgttgacaggaaagactaaaataggactttacaaaatcactggaattcaattttctcttctaatgttgtagataggatacctgtggccaattactcagctgctgggcctgtctggtctttaagaagaatgacatcattcctacaagatgtagagattcagtttaagaccttcctttaacctcccacctgaggcccaagagccaggagccattccatagacag

SEQ ID NO: 307555 - DNA, 427 bp, Homo Sapiens
aacaaaaatgaggactggagaaagagagaaattatgtttcaaaacttatcatacatttgtcattaaattctaaactcattagtagtttttaagtttttgcctacatttttaaactaacctgcttgttcttgtaaaccaaccagcaatctccagctgcagctcagaaggaacaaaagggatgaggcatttaaaaacctggatcgatattctagttctaagcaattctcctgctaatcctgccaggtgatggggataaataggatgcccattactcggaggtttcctttttgggaaaatgaaagcaagggagctaaccaaagccaagcaccgtgcacccaaatctcagcaagcattactgtagccaccagttacctgggcatgtcacaagacatccttttctatcccttgttggagaaggactaagttc

SEQ ID NO: 307556 - DNA, 391 bp, Homo Sapiens
  misc_feature (270)..(338): n is a, c, g, or t
cccagaaagccaacaaaagtccaaggaattgtctacatctacctggcccgtacactatacatgaaaccttgcaaaacattatttctatgtgaattattctttctatggcatgtcttcaaaaaaattacagatactgcttatctgtaattacaattactgctggcttttctccttcctaacaggaatttaaatttctaatttacagtattgtgataaacactgcaacccaatacaattctgaatcattacctatgccatgaaattaaggtnnnnnnnnnnnnnnnnnnnnnnnnnnnnnnnnnnnnnnnnnnnnnnnnnnnnnnnnnnnnnnnnnnnnnctgtaaagtcataccttggaaaattcttggcattaaaaaacaaactatttgca

SEQ ID NO: 307557 - DNA, 513 bp, Homo Sapiens
ttacggaaaccttgaagagagtccatctgcattttgagttagaactatgagtaaaggagtttctcgtttccagacaattgtccaggtgctgttatttttgaaggatatgtggggagggttggtggtaacagagatggctaatgtagaagagattcggagggtttccgtgtgacctagagttgccacatcattactagtcttttgtgaaagagacattttggaaaactttacaggaaattggttaagatccctacaaagcaaactatattgatttctttctccttcgttcgaggctgaaaggcaggaatcctcttaaccccacgtgctgcctccccgccctgcccaacacattgctctttgccccatgtttagcttctttccttctctctgttcttggttcctgccgtgactaagtggacagaaaagcaattccctggagaaagaacccacccttcccttcccatgtgcttgtcctggttgtagctcctccagtggggagggatggggcccagg

SEQ ID NO: 307558 - DNA, 210 bp, Homo Sapiens
tgcagactgaaatctggtttgttgtgagtgtaccagtattgtctgagcagataacagaagtactaccaagggttttcacagcgcgttggcttctgaacatggcattgttctgtgccatgctgctagttcctggagcctggcaggtggtgctcactgcaggcagaccttcagttctggctgctacagcctgcgccactgcaattttatagt

SEQ ID NO: 307559 - DNA, 139 bp, Homo Sapiens
agaatcggcgaaaatccaacccttcgactaaagcacccaatgcaagaggttccaaagtagtacggcctaggtcacaggtgacagcttaggattcaaattcccgatggtaggtagccccgatccgatgtggcatgacgtt

SEQ ID NO: 307560 - DNA, 282 bp, Homo Sapiens
aaggctggaacctactggaggtcatctcgtctactatattcaccgcagataaagaatgaaaagagaatacacaaccttgtgattgctagcagtgaaagctcagagttatgacataacaagtggttgatcatactgtaaaactcaaatgtgaagggaaggctggaacctactggaaactgaagatctaacgaaaagaaggaacttttaggaactagcagagacttcaaaatgttgagaactctcttttttcataagagaagataaaaactctgatgggtcaca

SEQ ID NO: 307561 - DNA, 286 bp, Homo Sapiens
  misc_feature (119)..(127): n is a, c, g, or t
  misc_feature (177)..(212): n is a, c, g, or t
tcggcacgagctgactcagtgagcacagctggggcagatcattaaacagaccactcctgccaaacagcctgcggtggtggacacgaagacttccttgcctcgccacatggagaaagaannnnnnnnnccggagacatgtatagtagaataattatacactatctgagtgccagttannnnnnnnnnnnnnnnnnnnnnnnnnnnnnnnnnnntgagagagtgagtaagctaggacactttgaatacttcataagttatacctatgctacttcttatttaaatcctt

SEQ ID NO: 307562 - DNA, 293 bp, Homo Sapiens
gaaggtcagttcacacgaggtataggaaggagtctaacatttatttttttcttaagcctcacctagccttttattcacaccaccaagtctaggttagaatgtatctgagcagtgaaaggaccagaatgcatagttatcaaagggcagtttttcccttgctaaaacctaaattcattttttagactctgctagcagttttagatataatgttacaacatgtgttttgttctccaggacctgatttaaataaatgtgataaaaataggctaagttttttgtcatccagggctgct

SEQ ID NO: 307563 - DNA, 283 bp, Homo Sapiens
aagatttttcaaggaattttcttctctataatataattaatgatctcctacttggacttctgtaaaagattacagtaaatcgtgaagtcttatggaggtttttgcgggagtgggtgggagtagttgtctattactgcgtctttgaatgtaaaacagtaccagggatgggccatagggcatctgggctcttcacggattatataggcttgaccttgttagtactgcatgctgtcagagcctcatccaaaaaccactgagatgtttttgtgcaggggaaataaaa

SEQ ID NO: 307564 - DNA, 214 bp, Homo Sapiens
aaaggtagccccacatgggcttcagcacccttagaagtgtacaacatcaagctcatttttgtttagactttctattgtggatttccacctttaaaaaatcttgctttaagatgctggggttggggggcatggggctgtctcagaggaatgcaattcaaatcttatgagaaatcagtatttgttaaatcctgtgactgagataaaaacgtctcct

SEQ ID NO: 307565 - DNA, 166 bp, Homo Sapiens
ttcagaaatatactcatttataatcaattaaatgatgagtcataatttgaaccctaattatcacattatgtagagatcacaattcaggttttttgtccccatttatatgttaaatagttcacatttaaaaaaacattttatcattacattatcaaatttgataaaa

SEQ ID NO: 307566 - DNA, 204 bp, Homo Sapiens
accatagattttattacaatactatacacaggaagataggaaacaaatattctccctgaataatattttttatagattttatctcaaagctagagtcagtattacgtttattgttaaaacactagaaaacactccatttgcaaagacagcagttacgttcaggattacttaacactttgaatgttcaaaccatttcattataca

SEQ ID NO: 307567 - DNA, 285 bp, Homo Sapiens
caccagtgtagtcccaacctccatcctctctcacctggatcacagtaagcctctgcccctgccaatccattctccacaaagcagagtgatctctaggaaagcaactcaggttgtgtcccactcttaggtaaaaccctccaacagtttctcatgcctcagaatgaaatctaatctccttatcctggactctaacaaccccctcgatttagcccctacctgccctatctcttgcactctttccttgctcactcaatttcagccactggtgtccttccatgctttcat

SEQ ID NO: 307568 - DNA, 206 bp, Homo Sapiens
  misc_feature (63)..(75): n is a, c, g, or t
tgcttgaaccatcatacgtggccatgaattaaaaatcttaagttttgaggcttaactgggagnnnnnnnnnnnnnagcagaacaacatgatcctatagatgataggtaaagttcactaaagattttttcatccaagcctaagtagaccgtattttactatcaagtgcagataaacaatcccacttaacagatgataacaattaagt

SEQ ID NO: 307569 - DNA, 322 bp, Homo Sapiens
aatatatgatggcctgaagtgttcctagagtcaactaaagactgagtttctctagttgacatgcaacagaagtttgtttaccggaagtattgcaaattttattgtcgcactccctctctccgagaaggaagagccaactgactattcccatcagcacggcctaaagcaatcctaatcaagttaatgccaccctaaattaaccaagaaaagccaaagggaagacagcagatgctttagggaccaagttgttaattcagagatgctcctgtttggttggttcttttccccttggactaactactttgaatattttgtccacttg

SEQ ID NO: 307570 - DNA, 314 bp, Homo Sapiens
  misc_feature (114)..(114): n is a, c, g, or t
  misc_feature (299)..(299): n is a, c, g, or t
atatacataccatattacaagcttgatattcctctaggtcagaagttacaactttatttccatttcctcatgatctagcatagtgcccagtactgctcatttgagtgaaaatancttatgtgacactctacatttgtacatatatcttaaatgatgtccatgaaagccctatgtgttagatgaactacccattctgcaaaaaaatactattctgggaagttttaaagttcatttttattggttgttcttttttgtgtgtgagcagcaaacatatttcttaggtactgctacattagggncaaagggtaaaagga

SEQ ID NO: 307571 - DNA, 166 bp, Homo Sapiens
  misc_feature (126)..(126): n is a, c, g, or t
  misc_feature (144)..(144): n is a, c, g, or t
attatatatttgcctgattatttcaagccaaaaaccagcctttgtgttatgaaattagagcaatttagggatttgttttctgcattttgggcaattcctgtgatgctgtaggcatcaagtttaccnggggcaggcagtagggtnaaggaaagttggggtcaggtcc

SEQ ID NO: 307572 - DNA, 445 bp, Homo Sapiens
  misc_feature (135)..(191): n is a, c, g, or t
  misc_feature (290)..(290): n is a, c, g, or t
  misc_feature (416)..(416): n is a, c, g, or t
  misc_feature (425)..(425): n is a, c, g, or t
aactgaacacatttattcaatttccaacaatcaccaattagaaatgggcttaaatgacaatacaaagaaagctataagcaaacattttgacagggggatgtgaagaattagaacaaactgcttaggaaactacannnnnnnnnnnnnnnnnnnnnnnnnnnnnnnnnnnnnnnnnnnnnnnnnnnnnnnnnctgtgatgttatcgttcttttcccctccttctaaaattagggaaaacatttcctaaagatacagagcaaggtaagatttcttcttcagggtaatttccngcagtgggttctcggggggttgatgaggaaaatcttagggagggaaaatgcacttcattttatttttaattttagggtattgcaggatgtaccctcccataattaaggaagtttttttccatcctnaatactttnttttccccgttataaaaggg

SEQ ID NO: 307573 - DNA, 195 bp, Homo Sapiens
  misc_feature (53)..(53): n is a, c, g, or t
  misc_feature (100)..(100): n is a, c, g, or t
  misc_feature (119)..(119): n is a, c, g, or t
  misc_feature (137)..(137): n is a, c, g, or t
  misc_feature (147)..(147): n is a, c, g, or t
ggatcctgaggaacttcagggctcctggggcaaacgtgctgggtcttgtgtgnctgggccccattcactttgggcaaagaatttcacccccaccagttgncagggttgccttattcagnaagtgggtgggctgggtntgggcttaantgccctgggggccccacaaagtattcaattaaggttcgtttttcttgt

SEQ ID NO: 307574 - DNA, 377 bp, Homo Sapiens
  misc_feature (230)..(314): n is a, c, g, or t
  misc_feature (328)..(328): n is a, c, g, or t
  misc_feature (334)..(334): n is a, c, g, or t
  misc_feature (349)..(349): n is a, c, g, or t
tatacatgacttcatgatcgtgagaagattgctctgagctctatctatatcattcgttaaagttagtggtaggccttggagaaccttcccaattataaaataaacaaaacaaacattgggtagttgatgagaatgacagaaaaaaactaggactcaaacgtttttgggaaggaatgagatctgatacagtgttaatttgttgtgcctttacactttaccctattccagtnnnnnnnnnnnnnnnnnnnnnnnnnnnnnnnnnnnnnnnnnnnnnnnnnnnnnnnnnnnnnnnnnnnnnnnnnnnnnnnnnnnnngggttaaaaagganaccacnttaagggagggaccncttttcttgagggagggaccttgtaccc

SEQ ID NO: 307575 - DNA, 412 bp, Homo Sapiens
  misc_feature (390)..(390): n is a, c, g, or t
ttccaagtttaaggttttcttaattagaaggcctgagagaagatgagtgaggacaaatccgagtttccctgtgtgtggctggccatggttggcggtcgcagcatcacagcgttggccggctgctgcttagctttattttacttgtgatttttctttgttatgcaccgaacagattcccctctctggtattcagtggggagcatatagccggagatagcaattagctatagctaggcctgctcctctttgcacagctcaagatgacgtgtacaattactttgggcaccttcaccagctctttcagaccttttccatggcatggatggggaagacaggtccattctctggaggagtccctcactccctccccctcccaaattcccccttacnggggtgaaatcctggatgttaa

SEQ ID NO: 307576 - DNA, 398 bp, Homo Sapiens
tttaatgctcacaactaccctgagagttgctattgttaccctcattagctagctaggaactggaagagtgggattgaaacccagagctgtgggattcaaaggcccacgctcttaaccacatcatgatattgccttgaaaacagaaataatatctgtaaactgaccagcacaatgccacatagaaagaaaatgttcattgtaaagttactggtttggggtttgtttattgctattgctgttattggatgttatcttgacctgcccaagggcaaggagttcaaactctcccaccgttaacaattagcttttgttctttcttgtttctgtgggcctttttacctgccactcttttttcaggctttcttcagttcatcacccagttaaaagtaatctttttt

SEQ ID NO: 307577 - DNA, 373 bp, Homo Sapiens
  misc_feature (237)..(237): n is a, c, g, or t
  misc_feature (321)..(321): n is a, c, g, or t
  misc_feature (349)..(349): n is a, c, g, or t
gtgtgagctgctgtgcccagtcccagttcaagttctaagggctctctgaagttctccccagtctcctcctcatcctagagctcgatcacttcttccactgggttcccccacatgctatagacttctgtgagagacttgccaaactgtgcacatgttaactggttagggagcctgcccctaggatcacaacctcctccatgggtaggggcctgcctctccatcctcctcctgcccccngggacccagcaggagcccccagccacacatggggagctcatgtatgtgggaatcaggggctctgtattttgaggcttaccacantcatcagtgtgtgtggatgcctcttgangctggtttattcaggtaccagata

SEQ ID NO: 307578 - DNA, 129 bp, Homo Sapiens
  misc_feature (27)..(27): n is a, c, g, or t
tatattgaaaacacacagtaagaacanaagaacatctcaaatcatttagaaggtaaaagggggttatcaaccaaaatctttggaaatttcataaaatttaaatatctgcaaacagtccaaccaaaaacg

SEQ ID NO: 307579 - DNA, 278 bp, Homo Sapiens
  misc_feature (72)..(72): n is a, c, g, or t
  misc_feature (119)..(119): n is a, c, g, or t
  misc_feature (146)..(146): n is a, c, g, or t
  misc_feature (158)..(158): n is a, c, g, or t
  misc_feature (191)..(191): n is a, c, g, or t
  misc_feature (228)..(228): n is a, c, g, or t
ttccattgtgtatatatggcatacttaaaaaaaccattcattcactgatgggcacttaggttatttctgcancttggctattgtacataatgctgcaatgaacatggcagcatggacanctgtttgatatactgatttcaattccnttgggtatatanctataaatgggattgctggaacatatggtaatnctagttttagttttttgagaaacctcccatattgttncccaaaatgggttgtacctaatttgcaatgcccaatagtgtataagggat

SEQ ID NO: 307580 - DNA, 367 bp, Homo Sapiens
  misc_feature (11)..(11): n is a, c, g, or t
  misc_feature (124)..(124): n is a, c, g, or t
  misc_feature (174)..(174): n is a, c, g, or t
  misc_feature (176)..(176): n is a, c, g, or t
  misc_feature (199)..(199): n is a, c, g, or t
  misc_feature (227)..(227): n is a, c, g, or t
  misc_feature (231)..(231): n is a, c, g, or t
  misc_feature (239)..(239): n is a, c, g, or t
  misc_feature (263)..(263): n is a, c, g, or t
  misc_feature (312)..(312): n is a, c, g, or t
  misc_feature (355)..(355): n is a, c, g, or t
gatgaaaacanaaaagtttaatagtcattgaatgggtaacaaccacttgtagtctacatttaaaaattttaatcatagctaagaaaaactaaaaacaaataattctattaagaaacaacaaaantgataaacatttaatacctaaatgtagatacttaaaatcctaaacaaaantnttaaagttaaaagggccttgaantttgtttctaacaaatcatcttatatantcanttcctaantagctcatatcctttgctttgggngttttatctgctatcatctaaacattaggtacagtaggaaaatcactcngggttcttttcaaatgcttgggcatttataatgtggatcctcnatatctttccct

SEQ ID NO: 307581 - DNA, 229 bp, Homo Sapiens
  misc_feature (41)..(41): n is a, c, g, or t
  misc_feature (54)..(54): n is a, c, g, or t
  misc_feature (66)..(66): n is a, c, g, or t
  misc_feature (77)..(77): n is a, c, g, or t
  misc_feature (81)..(81): n is a, c, g, or t
  misc_feature (91)..(91): n is a, c, g, or t
  misc_feature (95)..(95): n is a, c, g, or t
  misc_feature (143)..(143): n is a, c, g, or t
  misc_feature (157)..(157): n is a, c, g, or t
  misc_feature (167)..(167): n is a, c, g, or t
  misc_feature (215)..(215): n is a, c, g, or t
aggagggcttggaaacatctagggctgggaattttccaggnagtcgtttgggtnaacaatcatganactgaattganagancaggaagccnaganaggacttacagaggtggaaacagactacgccctaacacagagcaggtntaaaggaggagganttggttagangtgaatacttttattgagtgattttagaagttgttttcggatattccnagtatttaggatgt

SEQ ID NO: 307582 - DNA, 353 bp, Homo Sapiens
tttcatggaagtggtggggagcctgaacgtgcgctgcggatagggttttacttcctgctacccatcaaccatgggataatgcctgacaaagatgcaaatgaccccggaaatgtgagtgaaggccatgtaattatgtaggctttcactccttctttctcagccgattcagctcttagccagattctcttgttccatcaccagggttttatccctgcttaactttctttccccagggaatgattttcatttgagatcgtagtgtgtttcctccaaaagaagactagattgtaattggggtgtccttagatgtaggaacaactctcctgttttaggattttcaacatatatatctt

SEQ ID NO: 307583 - DNA, 269 bp, Homo Sapiens
  misc_feature (30)..(30): n is a, c, g, or t
  misc_feature (45)..(45): n is a, c, g, or t
  misc_feature (47)..(47): n is a, c, g, or t
  misc_feature (52)..(52): n is a, c, g, or t
  misc_feature (55)..(55): n is a, c, g, or t
  misc_feature (57)..(57): n is a, c, g, or t
  misc_feature (61)..(61): n is a, c, g, or t
  misc_feature (64)..(64): n is a, c, g, or t
  misc_feature (66)..(66): n is a, c, g, or t
  misc_feature (72)..(72): n is a, c, g, or t
  misc_feature (88)..(89): n is a, c, g, or t
  misc_feature (93)..(94): n is a, c, g, or t
  misc_feature (107)..(107): n is a, c, g, or t
  misc_feature (145)..(145): n is a, c, g, or t
  misc_feature (169)..(169): n is a, c, g, or t
  misc_feature (179)..(179): n is a, c, g, or t
  misc_feature (181)..(181): n is a, c, g, or t
  misc_feature (230)..(230): n is a, c, g, or t
  misc_feature (238)..(238): n is a, c, g, or t
ttagcaataaaaattacatatatgaagatntgtctacagcagatnancagancananatanaantngccttnagttacagttgatttnngcanntttattttttganggttgatattatgcaggttatacatgttaaaacagcancaccactatcctataaactagacngactagtatncnagcatggttgcccactgttctcatagctataagttaagactggcaaganggtaggcnggagaaaggttggattaattgcctgtatgtg

SEQ ID NO: 307584 - DNA, 361 bp, Homo Sapiens
cagaactgagcagacggtgaggttgcactgtgacttagtctcaatgggaactccagccaatcccatgggagttctggagctagtataacctttcagtgttgtcctaaggcaaggtgaggaagggaagggggtctttaccgtcacaggtggatcaggtatggatgtaggctgccctgggaaggagtgtgaccttggacaagacagctgtctttggctgaggcaatccccacagggtcctggtggtggagtgggacttctttgtccctgggaggaggatctttagctgcatattcagagtccaccacatggacttgcagcctcttgagagttgaggcagcatagcacagtcttcagggattca

SEQ ID NO: 307585 - DNA, 395 bp, Homo Sapiens
  misc_feature (310)..(310): n is a, c, g, or t
  misc_feature (333)..(345): n is a, c, g, or t
  misc_feature (350)..(350): n is a, c, g, or t
tagctgattatttaaggagtaaaacaatgtctttgtgtatactttattcgaaataatagatgaagggaacatcgctgcctggataaaatgaggaatgctaattctagtatttctagaggatttgtgtttgaattgactattattataatgattagagtttaaaggaatcttaaagatgatcagattcacccccttcctttcatctctcttgttgccctgagagattagctacttgtctgttacggtgctggtccattagggctgttagtccaggatctcggtcactaggccagctgcctgttctgctgtngtgatgctgatgcatttcagccnnnnnnnnnnnnnaaaanccctaattgggaagcattttattaaggggtttttaatatttagtt

SEQ ID NO: 307586 - DNA, 438 bp, Homo Sapiens
  misc_feature (378)..(378): n is a, c, g, or t
  misc_feature (413)..(413): n is a, c, g, or t
ttagctgaacgtgccctttgacaaggtcattagtaacatcaaagtgcctaaattcaacagtcagttcacagtcctcattttgtttgacctatgcccagcatttgacacaattattcattcctccgtaatacactttattcacttttggcttccaggatactgcatgttgtgtgcagctccccctgtcccccaaccccacacacacattttattggtcaatccttgtcagtttcctttgttatttactcctttctctcctgcctttaaaaattggcgtgtccattggagatctttatctaggacttacacatctttaagtacttatccttggaactgggctcccaagttggatatctcttaacctaggatcttcttctntttgtccttccgaggccatgtgtccagctgcctgnccaccggggtgttaggacattttat

SEQ ID NO: 307587 - DNA, 522 bp, Homo Sapiens
  misc_feature (370)..(370): n is a, c, g, or t
  misc_feature (473)..(473): n is a, c, g, or t
tcagcctcactgaattttcttttggaggaggaggtagggaggggaagccaaagccccgatttctcctgctccttttgctaattgtattggctaaatgagctttcacagaggggggtcctggctgctttttgctctcccccagaccacttgtaggttgcacacagggcttctataactctttctgagtcaggacaaagatatccgccgtgcacaccctgtgacataggtggatatttatttcatcccgggcaattctaaattttgtcatgatgactgaaagaggcaatcccctcctgagcattaagaggccaggggtgagagggtggcagcataggaaaagccaccacccagagacagcttgggagccatngatcctgggagggaaatgtttatttaataaacatcttttgggacatttggtagcccgtgggagcttgctccagctttaaaagcaatttaattcagggacactnacataaactcttccagatcttttgacagctttggggccgaaattaaaaa

SEQ ID NO: 307588 - DNA, 288 bp, Homo Sapiens
  misc_feature (227)..(227): n is a, c, g, or t
  misc_feature (276)..(276): n is a, c, g, or t
aaacattaatctgaaacttaagccttagaaattaatcgcaggtatgatagaatgaggcttggtggttccatagctttcttggtcctttgaaatgggaaataacctgaaccaaaaatcctagtttgaaagttacacttcagtgatttggcctataaacagtggtcctatgattatacattttttccttcactgatttgcataattttgttttcatggccacagcaaancaatgtgaaatatatttttgctatacccacttttttttatccaattccngagtctactctc

SEQ ID NO: 307589 - DNA, 110 bp, Homo Sapiens
atacatgtattatatacctataagacaattacaatctaaaacatatattcaatctgtagtatttactattgcagtcaagacttacactcttctatgaatgaatgtagtag

SEQ ID NO: 307590 - DNA, 383 bp, Homo Sapiens
  misc_feature (366)..(366): n is a, c, g, or t
tttggatggtggtgatttgggggtgggcatgggatgggtaggggcaggtggtgtactgcctacaggataaagctgctctcatttgtaattactgtggggaggtgaggcaaggggggaggctgttctggcttttctaatttcaaaagatgcctaaaggacataataggagctacatgcttttcattcacaaatagttacaccagagaatgctaactggggtttgctaccttaagtggcaaggaatctcttggagcagttggggggcatcattatcttgtttatgtgcaaaagaagatttaagtagatgaaaagatgatttttatctagacaaaatgttcctaccatcctggcatgtattaaccccanttgcctccatgtttaaa

SEQ ID NO: 307591 - DNA, 259 bp, Homo Sapiens
  misc_feature (63)..(63): n is a, c, g, or t
  misc_feature (65)..(65): n is a, c, g, or t
  misc_feature (104)..(104): n is a, c, g, or t
  misc_feature (164)..(164): n is a, c, g, or t
  misc_feature (190)..(190): n is a, c, g, or t
  misc_feature (206)..(206): n is a, c, g, or t
  misc_feature (214)..(214): n is a, c, g, or t
  misc_feature (227)..(227): n is a, c, g, or t
  misc_feature (249)..(249): n is a, c, g, or t
atatttgcatatataactttaaataatagttaacctcatactcataatgaaaacattgccatntntagaagtatttgccttcatgagcaatcagtcacattctnccagtggaatgttgttttcctgctctcatccatgttgttgttttccacactatgctgttnagtacgtgctgactcactgagcatcnctcggggatgctggcntgtgtgtnttgaaatttaagnggagaagattatagctaggggncacaattatt

SEQ ID NO: 307592 - DNA, 229 bp, Homo Sapiens
  misc_feature (96)..(96): n is a, c, g, or t
  misc_feature (145)..(145): n is a, c, g, or t
  misc_feature (151)..(151): n is a, c, g, or t
  misc_feature (157)..(157): n is a, c, g, or t
gaggtggccaggcctttattaaacattcccgggagctcatggctggggctgcagcctcatttggaaggactgggttttgcgccaagtggactgttncaggaggtgccactggagggaaaagggctgccctgggccagggaggctncctggnttttcntcccggttggtcaatagctttctgtcccagggctggaagaccttgcaaggtctgtttgctcctgatccctca

SEQ ID NO: 307593 - DNA, 484 bp, Homo Sapiens
  misc_feature (120)..(120): n is a, c, g, or t
  misc_feature (343)..(343): n is a, c, g, or t
aaaaacatagactcgcaacttgtctgtttcctgagacacccacaattggcctcgtggaagtggttgacttcttcccatagctgcctgtgtcttacttcatcgcctcctccaagcccaggncagccctgcctggctggggggatcatgacagtctttgttcccatatgggcaaagtcttttgaaaagagggaaagatcattagttagctgtcagcctccagcgtggttaggtcatgagtaattcttctaggagagccagagcactggccaattcatttgggtcgaggaacgttttatctacttggaacgggcgtaggagggaaaataaaatgggaacaagttantatccaaaatcttcttgttcaactggaacaattcctttacccattcccaacaagggagttttgacggacggtggccatttttccctaccttttgagaggtcatggcacaggacaccggcacattggaacacaccacttttt

SEQ ID NO: 307594 - DNA, 103 bp, Homo Sapiens
ttagtcatctttaaattatgaagacttaaagctatggcatagtaccttaaattctggtcagtattgatctgcagctaatgatgatgtcacctccacaaatcag

SEQ ID NO: 307595 - DNA, 255 bp, Homo Sapiens
  misc_feature (177)..(177): n is a, c, g, or t
  misc_feature (195)..(195): n is a, c, g, or t
  misc_feature (206)..(206): n is a, c, g, or t
tggtgcccagccatacccacaaagattttcattctaaaataccttactctttctacagcctcagaccccatgctctaccattccgttgagccccacataacctcatgctagagagaatctgtactatgttctacctcactcacctgttctaggtattttcaaatacaacagtctttncccaaacaacaattgggngggggaacagntttcaggggggactttccacaaggtattttttttgccatggttaccaaa

SEQ ID NO: 307596 - DNA, 384 bp, Homo Sapiens
  misc_feature (50)..(50): n is a, c, g, or t
  misc_feature (129)..(129): n is a, c, g, or t
  misc_feature (351)..(351): n is a, c, g, or t
  misc_feature (366)..(366): n is a, c, g, or t
tgtttggaatagctatggtgaaaattctgaccacgtcagcccaatggacngttggtagctgttctccaccctgaactaaactgcagttaagaccacctgcttggcatggggcagctcagcctgtggaanggacagggtcagggcttggttcatgagtgaggtcagggataattctggggaccagggaaaagggttccttctatggctggggtagaaccaagactgaagccaggggataggggctcagcctaggaaccagaatgggggtcccttcctgtggccagggactttcaggggttcagtttagggcccaaagttgggggttcccttctatgaccaagaaggcagaanttaaagtcttggggnaccagaaccttgggcctc

SEQ ID NO: 307597 - DNA, 291 bp, Homo Sapiens
  misc_feature (95)..(141): n is a, c, g, or t
acaaagagtgatcactgagccagagggtggaaaggtgcttaggagacatgagctgcttggaggcagagtcctgcttggaagctgttggttgattnnnnnnnnnnnnnnnnnnnnnnnnnnnnnnnnnnnnnnnnnnnnnnntgaaggcgtggatccagatctccctctaagactactccatgcctcacgtgccatttgttctctgagtttcccatgttctcgcctcctactacctagccctatgctaggactctcccctccagggacacagtagccagcctagctttcccc

SEQ ID NO: 307598 - DNA, 384 bp, Homo Sapiens
  misc_feature (191)..(191): n is a, c, g, or t
  misc_feature (341)..(341): n is a, c, g, or t
  misc_feature (362)..(362): n is a, c, g, or t
  misc_feature (374)..(374): n is a, c, g, or t
cccactgtccattttgtgagggttgatacagacagaacaaggtgcctgggctactcgtcggtgctggtcaggtctaaagataccgcatggaaatccggtgcccctgggatgagcaccccaccatggagggcaccgctctgggcctgcgtgctgtggaggcccccttttccggaagagggagccgaaggaanagttcgttcttgatcagttgggctgctctgttctccagtgattatgtccatttaaaggtgtttccctgtttggcctcttacagtaaactttcacagctcagaaagctcttgccacatgggacatttttccacatttttccagcagtttantatctttgattttcagaggcntaattcaggaantgttgcctgt

SEQ ID NO: 307599 - DNA, 405 bp, Homo Sapiens
tcatttatatataggatgtgttttggtcatagtttcacattagtgattcagtatctatacactgacccaatggttttgtgcacatgaacggtaatttacttaaaagtatgattctggtacaaaaacaaacaaaggctttagcaggcatacgtgtctgggatgccgatacatacattaactactactgcagaaattcataagagccaaaaccttaaaaaaatagacctgggtacttaagtgaaagtactaaagggaagaccagaccaaacatcacagcagttgctgcccacattgtttcagcccacttaggatttatctttccaaatgttacaattctgtattggaacatctcccagccatcttcagggaaatcggatccagtaaatccttttccaaccggaaacc

SEQ ID NO: 307600 - DNA, 432 bp, Homo Sapiens
  misc_feature (309)..(309): n is a, c, g, or t
  misc_feature (357)..(357): n is a, c, g, or t
  misc_feature (417)..(417): n is a, c, g, or t
aaggctggagaggcctcagaatcatggtggaaggcaaagaaggagcaaaaaggtatgtcttccatggcagcaggcaagagagcacgtgcagggaaactgccctttataaaaccatcagatttagtgagatgtattcactatcacgagaacagtatgggaaaaacctgcccccatgattcgattacctcctaccgggtccctcccacgacacatggggattatgggaactacaattcaagatgaaatttgggtggggacgcagccaaaccatatcgggtagcaacaacctagggtcagtttttgcaggtngtaaagccatttaccaagattagttgttagggtaaagaaggggccagntttttttaggaggaatttgttgaaaatatgtttgcagttgggcagcttccagccaggagnagggggcttacctaa

SEQ ID NO: 307601 - DNA, 136 bp, Homo Sapiens
  misc_feature (81)..(81): n is a, c, g, or t
  misc_feature (92)..(92): n is a, c, g, or t
  misc_feature (114)..(114): n is a, c, g, or t
tcggtgcctttagtgatggcctgggttcacctgggacaaccttcaagggcacctttttgccacacttgagtgagcttgcantgttgacaagntgcacgttggatccttgagaantttaaggttcctgggggcaact

SEQ ID NO: 307602 - DNA, 123 bp, Homo Sapiens
  misc_feature (85)..(85): n is a, c, g, or t
agtaattctcagacagagaagcatagattttattttacagttaccttttgtgttgtctcctaataagttgctctatctttaactncttaaagctacttctcgatcttacatcttctgtggcac

SEQ ID NO: 307603 - DNA, 309 bp, Homo Sapiens
  misc_feature (34)..(34): n is a, c, g, or t
  misc_feature (135)..(135): n is a, c, g, or t
  misc_feature (169)..(169): n is a, c, g, or t
  misc_feature (180)..(180): n is a, c, g, or t
  misc_feature (184)..(184): n is a, c, g, or t
  misc_feature (187)..(187): n is a, c, g, or t
  misc_feature (197)..(197): n is a, c, g, or t
  misc_feature (208)..(208): n is a, c, g, or t
  misc_feature (221)..(221): n is a, c, g, or t
  misc_feature (224)..(224): n is a, c, g, or t
  misc_feature (229)..(229): n is a, c, g, or t
  misc_feature (232)..(233): n is a, c, g, or t
  misc_feature (235)..(235): n is a, c, g, or t
  misc_feature (238)..(238): n is a, c, g, or t
  misc_feature (263)..(263): n is a, c, g, or t
aaagaaaatgttgaatctactcaagtagcctttnattccatgttagtgaacagcctttctcaagaactctcccagctggtcaaaagggcccgaacagaatgggaaactgtgcccacctctgatctagttaatttngcaaatcagcttgccagcacccttgaggacaatnctaaaaagaanaccnctnaaatccttantctccagttanggcagatggagantcncgganatnncnccntgaggagacctcctggggctatgcnactttctgtaagaagccagggactcgaaaaagagtgctgaaaaaga

SEQ ID NO: 307604 - DNA, 317 bp, Homo Sapiens
  misc_feature (141)..(141): n is a, c, g, or t
  misc_feature (279)..(279): n is a, c, g, or t
aattttcttccctactccccaactggcaaacaaatctttcttttttctctactcctttatttccataaaaatctcagctctctctccgtggaaaaatatgtcatgattattccttttgtctaacagtgtttattatatttnaatctgtactcatttaaaagctacacagtagtcctacatcatttcatgcaaataaatgtttaatccttaacagggaatgtcagctccttgagggacagagccctggatttccattttgtcttccttaaaaaatctgtnatgttgtgtgtctattgcgggtggaggatccaaggggg

SEQ ID NO: 307605 - DNA, 371 bp, Homo Sapiens
  misc_feature (315)..(315): n is a, c, g, or t
  misc_feature (331)..(331): n is a, c, g, or t
  misc_feature (350)..(350): n is a, c, g, or t
tggagctcgcgctgacgaaaggttctggaagccgccgtaaaaaccctttgaggaaccgtttgaggtgtggcacgatacagcaagtcagctgccaaagaggggcttagcacaggaagtgcgtgcccagaacgcatctcccgtgtccctcacagcagttctatgaggctggctgccctgtttgacaactgaggcccgcatcttccccggaatcaccgacgtgtggctctgagccctgtcccagggattttctccattcagagaagaggagcacttttgagctttgagaggagcagccctcttgcaaagttgaaagtnggaaaaaaagggaagncaggcgaaggaaggccccntcccagaacctttcccccaag

SEQ ID NO: 307606 - DNA, 387 bp, Homo Sapiens
  misc_feature (20)..(20): n is a, c, g, or t
  misc_feature (46)..(46): n is a, c, g, or t
  misc_feature (59)..(60): n is a, c, g, or t
  misc_feature (83)..(83): n is a, c, g, or t
  misc_feature (139)..(139): n is a, c, g, or t
  misc_feature (163)..(163): n is a, c, g, or t
  misc_feature (177)..(177): n is a, c, g, or t
  misc_feature (203)..(203): n is a, c, g, or t
  misc_feature (253)..(253): n is a, c, g, or t
  misc_feature (256)..(256): n is a, c, g, or t
  misc_feature (291)..(291): n is a, c, g, or t
  misc_feature (334)..(334): n is a, c, g, or t
  misc_feature (375)..(375): n is a, c, g, or t
tgtctgccaacctgggagtntgggtggcttctctctgggcatggangtggccctctcgnnttctttgtgctcacacattcagntttggctagactgaggaaaatgaatgacttggaggcctcactggttataggaactntctggaacatactttcgaaatgancaaggaagtaaaancatcatgcacttctcagtccctaganaaacaggcatagagggctgagggatgacattaacgtggaggtattcacancanctttcccaagaggccccaggtcagatttcaagggnctttctcacccgttttacaatatctgcacagcaaagcaagganctactggcaattacccagggaatttttggctgtgaaggcantattttcaacca

SEQ ID NO: 307607 - DNA, 305 bp, Homo Sapiens
taggtggccctctcttgtcctttttgccttaattctcagcttcttgcctagctccccagaatcagcagaatcctaagagaaaataatgtcagcttagctctccatgctttccctctgatagtatttgccacttagtttttggtggccttagcactctccagtatattcaaacaagtgtgtctgtgtatctggcttttctacttgttcttgatgggagcattagtctactataagctactgagttatatcaaaagcaaaaagctagattctaatgtattcatatctttttaaaaataatgcttctt

SEQ ID NO: 307608 - DNA, 262 bp, Homo Sapiens
  misc_feature (147)..(147): n is a, c, g, or t
gcgcccagccaaatctacctatttttaaaattgattttttctaattatttataaagcaattgttcattagaagcacttaatttcagcaaactgcccatctgaaaacagaaggccaaaaagtttttaaaaagcacggaattcttgggngacagcaagtgccacatacatggggcaatagccaaggaagagaaatgtccttagggcactctactgctatggtccacagatggcagggaagggggaggtcccatgggggagtggc

SEQ ID NO: 307609 - DNA, 316 bp, Homo Sapiens
  misc_feature (41)..(41): n is a, c, g, or t
  misc_feature (44)..(44): n is a, c, g, or t
  misc_feature (139)..(139): n is a, c, g, or t
  misc_feature (169)..(169): n is a, c, g, or t
  misc_feature (181)..(181): n is a, c, g, or t
  misc_feature (192)..(192): n is a, c, g, or t
ggcgttacttaccgtaaaatgttaggtaccaaagagggcgnaanagatacatgagaacatagaaaaaatgaaatcttggcacatcatcattcttcacggctgcggtcttcagttctcatagatgggagacagcaggatncagcaaatgaaaagatcagaattggcacanatagacagtctnaaagaaaacgnaaaatctactaatctgatgtacgactcatgctgtcacatttcgcagcatatattttatgtaacatcttagaatcaagcctagttcctttgtgtaatagctccattcttctaatctgttcatgag

SEQ ID NO: 307610 - DNA, 560 bp, Homo Sapiens
  misc_feature (100)..(100): n is a, c, g, or t
  misc_feature (118)..(118): n is a, c, g, or t
  misc_feature (132)..(132): n is a, c, g, or t
  misc_feature (226)..(226): n is a, c, g, or t
  misc_feature (266)..(266): n is a, c, g, or t
  misc_feature (354)..(354): n is a, c, g, or t
  misc_feature (366)..(366): n is a, c, g, or t
  misc_feature (461)..(461): n is a, c, g, or t
  misc_feature (479)..(479): n is a, c, g, or t
  misc_feature (487)..(487): n is a, c, g, or t
  misc_feature (521)..(521): n is a, c, g, or t
  misc_feature (532)..(532): n is a, c, g, or t
  misc_feature (547)..(547): n is a, c, g, or t
agcagggtacatggtatgtatcaaggagaatttcagaaagcccaccaactgcaatctattgctttaaggtcatcaaatagatctatctccagctgtgtgnagacatggtggtgaatancgttgggtttgtgncccaacaactactttccatacttctgacaacagtaatcccttcctttgggaaactttctcacattaaactccagagctcaccaattagagtttncatttccctaataatggtgactaatctagtaatgaaagtngtcaggctgagcaatcagattcctttccaaaatttgtcttgtggtagagaaagttcctcttcttggaggccatgggtccactacacgnaatagcctaggnaaataaaatcccagagagacacaaggagaaggctaatagatcatgatgacagtgagtcttatgtccacgtctaaaggttctcagagctacctagntcttgcagcttcccctcncttcatgngcttccccacatttccctcaatccctttcatttntgatgcttganccaattccttattgnttaaaatgcatct

SEQ ID NO: 307611 - DNA, 485 bp, Homo Sapiens
  misc_feature (353)..(353): n is a, c, g, or t
  misc_feature (419)..(419): n is a, c, g, or t
tttccatgaaattgcattaggcctctaagtggatttccataccttggttgtcctggtagaaggaaacttgacctaagtcagggttgttccagacttagcttagggaactgtatcttccctcgtcacctttgcactagatatcattccctttcctcttctggaacatcagggcatcaattactctgacccctctgtttattgcttcagtttctctttaaatgcttgatctttctactcaacatgtaaacataaatgagtctcatagaaaaagggaaagtaaccaatacctctcttcaggtgaaagcttctatgccatttctacctctctccctgtccactctcccattgggatnctttcctcctatccctggccattctgtgggagcatagcagtagagtgacctaagggacattttctnttcttggggctatttgccattgtatgtgggcatttgctgttcaccaaggattccgtggttttttta

SEQ ID NO: 307612 - DNA, 447 bp, Homo Sapiens
  misc_feature (334)..(334): n is a, c, g, or t
  misc_feature (384)..(384): n is a, c, g, or t
gagctgggtgccaggggagcttggatatgtaaagcttggttgatgtccttgataggtgcatggttctaagattgtgattttcatcctaagtttaggaagttacacacctgcgtggacaaggtgggtctaattatttttcattctggtttaatgttgacaagaaaacagacatggaagaggactttcctgcactcctggtcttccttttccttaagtagtgctacaagggtctgaccggaagatctttttactggtggcttgctgcttaatataatacaggttttgagtacaatcatttcttcgtattgtttttaaaagtaggagcaatgatatngactagtctggaagtggaacatagtctaggaagttcacttgcttggtttnggggattaggagtatttgccaaggtgaaccacccattctcttctgcttatttacactacactg

SEQ ID NO: 307613 - DNA, 299 bp, Homo Sapiens
  misc_feature (12)..(12): n is a, c, g, or t
  misc_feature (59)..(59): n is a, c, g, or t
  misc_feature (123)..(123): n is a, c, g, or t
  misc_feature (135)..(135): n is a, c, g, or t
  misc_feature (142)..(143): n is a, c, g, or t
  misc_feature (155)..(155): n is a, c, g, or t
  misc_feature (157)..(157): n is a, c, g, or t
  misc_feature (203)..(203): n is a, c, g, or t
  misc_feature (210)..(210): n is a, c, g, or t
  misc_feature (216)..(216): n is a, c, g, or t
  misc_feature (225)..(225): n is a, c, g, or t
  misc_feature (240)..(240): n is a, c, g, or t
  misc_feature (251)..(251): n is a, c, g, or t
gcagcacagcgntctgcgtggaattcatgagcggcccagttctgtaccaggagaagctnctgaagccggcagctttgctggacgaaagggtgccgaccaggaggaagacgaggccctgcggtnctgtccctgcgngccctcnnaacatggccctngngcccccaagaaggtgaagcagtaccggaagtcttgctggagaagtncctgggncccctnaggaagccntagagcaacagcgtnactgccgaggnatgggaggccctggaccaaagatcctggctgagctccgggaaggggat

SEQ ID NO: 307614 - DNA, 401 bp, Homo Sapiens
  misc_feature (326)..(326): n is a, c, g, or t
  misc_feature (357)..(357): n is a, c, g, or t
  misc_feature (390)..(390): n is a, c, g, or t
tgaaatgaaatgaaaaatgttatttatccactgtcacagtcattccatttgtcttccctatcccatgttttgcctcagctgactttaccaaaaattccctttcccttccctgctttaagtcatttcatgtaggttagtcttcatttattcttttgcctctctacagtagttattgctttgtgctgtacatttgggttaaaggagttgtatatgtgtatgggtgacagcataatgcctctgaagcccagggacctagctacttcttaggctcctaacgtaatttcatccatgtaactcacagaaataggatctgaaggattgagggnataggatggattctgtttattcccaaattanttcaaatttattctacttaaacttggcccttanctatccaaatg

SEQ ID NO: 307615 - DNA, 312 bp, Homo Sapiens
  misc_feature (96)..(96): n is a, c, g, or t
  misc_feature (154)..(154): n is a, c, g, or t
  misc_feature (243)..(243): n is a, c, g, or t
  misc_feature (260)..(260): n is a, c, g, or t
  misc_feature (279)..(279): n is a, c, g, or t
tgtgcattttatgaaaacgtttcctcattgaaatatttaataatatttgctaacgcatctggaaaaaaacttgttttaaaattttttagtttccancattagaaattacatgctaaagctgtaccaaagttggtgtacaatttttctgaaagtncttaaagataagattactggcttaacaaacaagctttgttccctgcattagtatcaagtctttgagaagcattttgtgttatgaatcanctggcagccttcccagngcaagtagtgggaccaaangttacactgttttatacccgacttcttacctga

SEQ ID NO: 307616 - DNA, 462 bp, Homo Sapiens
  misc_feature (30)..(30): n is a, c, g, or t
  misc_feature (38)..(38): n is a, c, g, or t
  misc_feature (99)..(229): n is a, c, g, or t
  misc_feature (232)..(232): n is a, c, g, or t
  misc_feature (237)..(237): n is a, c, g, or t
  misc_feature (341)..(341): n is a, c, g, or t
  misc_feature (354)..(363): n is a, c, g, or t
  misc_feature (418)..(418): n is a, c, g, or t
  misc_feature (425)..(425): n is a, c, g, or t
  misc_feature (444)..(444): n is a, c, g, or t
tggagtgcagtggcgcgatcccgcccactnaagctccncctccagattcacgtcattctcccgcctcagccctcgagtagctgggactacaggtgcccnnnnnnnnnnnnnnnnnnnnnnnnnnnnnnnnnnnnnnnnnnnnnnnnnnnnnnnnnnnnnnnnnnnnnnnnnnnnnnnnnnnnnnnnnnnnnnnnnnnnnnnnnnnnnnnnnnnnnnnnnnnnnnnnnnntgnacacngcgcccggcctgtctctacttttaaaaaattaaattaaattaaattaatatcaatgagtgaataaatgaaggaaacaaactttggggcaagccacttgcccctntctgggggtgacnnnnnnnnnncagttttggtaaaaaagtgacagtgtttaaaaattaggacatgggaggccagggnatgggtnggcttcatacctgttaatncccagcacttttggggga

SEQ ID NO: 307617 - DNA, 370 bp, Homo Sapiens
  misc_feature (21)..(21): n is a, c, g, or t
  misc_feature (128)..(128): n is a, c, g, or t
  misc_feature (238)..(238): n is a, c, g, or t
  misc_feature (338)..(338): n is a, c, g, or t
  misc_feature (343)..(343): n is a, c, g, or t
aaaacctcaagagatagcttngagggggtcagctgactctggccatggactaaatgtaaagtcggtgaattttggcctctgtacatttagtgcactctctggggaggtctgctatgtgtctgacagtntgcaagaaattggggatatgtccctaggattcctccacttagcgccactgggccctcccactcctgccatctcaagtgaccatcgaccttacccacggctgctgcacctnaccctgctctggtgcacattccccactgcagcatttgcacgtggacagctgttcccgggtggctgtttccagatcttcaccacagggttgcctcttggtngtttntggggcaacagagtggggacagggttt

SEQ ID NO: 307618 - DNA, 365 bp, Homo Sapiens
  misc_feature (68)..(128): n is a, c, g, or t
  misc_feature (292)..(292): n is a, c, g, or t
  misc_feature (308)..(308): n is a, c, g, or t
  misc_feature (313)..(313): n is a, c, g, or t
  misc_feature (326)..(326): n is a, c, g, or t
  misc_feature (334)..(334): n is a, c, g, or t
taaacataataaaaatatttttgttctaatttgctttcatgaatgaagattattgacatcgttggtannnnnnnnnnnnnnnnnnnnnnnnnnnnnnnnnnnnnnnnnnnnnnnnnnnnnnnnnnnnnccaagtggtctggcattttaagaattagtgctaataacgtaacttctaaatttgtcataattgggcatgtttaatagcatatcaaaaaacattttaagcctgtgggattcataggacaaagccaatgaggaaacattaggtaaaatattaaatgggatattccnggatgccatttagggnaggcncctccaattggtncctcttgncataggttccaggggattgtttttcccggaa

SEQ ID NO: 307619 - DNA, 396 bp, Homo Sapiens
  misc_feature (67)..(67): n is a, c, g, or t
  misc_feature (69)..(69): n is a, c, g, or t
  misc_feature (268)..(268): n is a, c, g, or t
  misc_feature (270)..(270): n is a, c, g, or t
ggttgtgagagatgcatctgttgcttgtgaagtgggacagggagcaggtgaaaggggaagcgggaangnaaacacagccgtgacctcctgtcagcaggcgctgtctttagatcagttttaggaaaggcagttcttgctttccttcagtctctcgtgcttgtgagcctcttgtgccccttgccctgatccaagggcccctgatgctgagggatgaccgtggacttccgaattccagccccactatttactgagcagctgtgtgctcgtngnacatgggggtgggtgacacctacctcgcaggggttctgagaagagtaaattgattaaaggacttcgtgtagcacaaagggcagcctgtacaaatccatgggcccttcgggaaaaccccctttccct

SEQ ID NO: 307620 - DNA, 420 bp, Homo Sapiens
  misc_feature (371)..(371): n is a, c, g, or t
  misc_feature (398)..(398): n is a, c, g, or t
gaggcctataagggatactttcgtttttcactagtggtgtcttagagagttgtttcatgcataatttattggatgagtatcatttgttccctaaaggatgctaggttatatttttgaattttgtcaacaaagcaatttttatgaagctgaagatcatatttttcacatttactttgacatatccgtgactcagattgcggaaacaggcctgaacccccagtgcttagctcagtaacagtggtgataattttgggtgcttgctctatgcctgatactgttccaagcactttccatgcctcagcctcacagcaaacccggagtaggttctattattagctccattttgccatcagagggggaaaactgccccnggtcaaatagctgggtgtttgggggtnggagcttgggtttgagcccagg

SEQ ID NO: 307621 - DNA, 111 bp, Homo Sapiens
  misc_feature (30)..(30): n is a, c, g, or t
  misc_feature (34)..(34): n is a, c, g, or t
  misc_feature (44)..(45): n is a, c, g, or t
  misc_feature (53)..(53): n is a, c, g, or t
  misc_feature (56)..(56): n is a, c, g, or t
  misc_feature (77)..(77): n is a, c, g, or t
  misc_feature (98)..(98): n is a, c, g, or t
gactcaactacctgttttaatgctaagggncctntactgaaganngaactatntantaacattaacaagggacaagnactaggtgcagattattcagntagtacatttact

SEQ ID NO: 307622 - DNA, 347 bp, Homo Sapiens
  misc_feature (63)..(98): n is a, c, g, or t
  misc_feature (311)..(311): n is a, c, g, or t
  misc_feature (335)..(335): n is a, c, g, or t
tatttttgcaatttcaacatgcctggttcaaactagctaaaaaacgtataatttactaacacnnnnnnnnnnnnnnnnnnnnnnnnnnnnnnnnnnnnctagagtttcccaataaggtttggataataagttattttgcaatgaatattaaagcaatctgtaccttttaaaattcaaagttacttctttcattaccgaatgtagcccaagagatggctggcaggttcagtcactttctaatgcaaaaactacttgataagggaatctttttcacagcgattccctgaatggcatctaaatgtgtccaaaanttaattagggttttgggcaggttnattcatttgcag

SEQ ID NO: 307623 - DNA, 386 bp, Homo Sapiens
  misc_feature (264)..(264): n is a, c, g, or t
  misc_feature (318)..(318): n is a, c, g, or t
  misc_feature (348)..(348): n is a, c, g, or t
tgatgtcatatttcacagatgtctcttagataccagctatatttcaatatccatttattgagaataatgacaagaagcttgggtaaagcttttaaacagatttgtagtatattcacagcagtgtctagtcatttgaaaagtagttacaatacattgggagatactttctcaatgtagaaaccatgctgtgtactccccacacagatccgcagacaactcaaagtggttgaggctcaaggcttgagagaacctgagtcagcgganaggccatcttagccttgtttaatgtcaaaaggtgtacatgtccatttatttccntgtttacaaaattacttctgtgtccagggnattgtgcctggattaaggttactgggaaaccataaagg

SEQ ID NO: 307624 - DNA, 134 bp, Homo Sapiens
  misc_feature (64)..(64): n is a, c, g, or t
ctttttctatgtctgcaccgcccccaaccccgcttcataatacagaacaggcacagggcgtggnctgaagtatacggggtaggtttactctatctcctctttctatacagtcagtgtaagaatacagcccggcc

SEQ ID NO: 307625 - DNA, 288 bp, Homo Sapiens
  misc_feature (91)..(101): n is a, c, g, or t
  misc_feature (112)..(112): n is a, c, g, or t
ctttataattattagatttaacttgttacctttctttttctagtaataatactggtaaccatattcaatacccttttatttccttctttcnnnnnnnnnnngagacagggtntcactccatcacccatgctagagtacagtggcacaatatggttcaccatagccttgacctctcaggctcaggtgatcctcccacttcagcctcctgagtagctggaactacaggcgtacacctccatgcatggcaaatttttgtattttttacagagacagggttttgcctcgtgc

SEQ ID NO: 307626 - DNA, 509 bp, Homo Sapiens
  misc_feature (335)..(335): n is a, c, g, or t
  misc_feature (373)..(373): n is a, c, g, or t
  misc_feature (459)..(459): n is a, c, g, or t
  misc_feature (475)..(475): n is a, c, g, or t
  misc_feature (483)..(483): n is a, c, g, or t
  misc_feature (494)..(494): n is a, c, g, or t
atatagagcgtaatttctgttaccggcgcatcttcatggatcacataacctttaaacgtcgtacccggattatccagcgccgctttaatgccagggatgtaaatgtaatcccccacttcaaaggttggtacttccgccatttgcagcggtaacatcccccagttgatgacgttagaacgatagcgtttagtcgcgtactcctcggcaatattcgccagaccgccaatcacacgctggcagctcgccgcctgttcacgcgcaggaaccatcgcctgggtttcaccgcataggaccatgcttgccaatttcagtttgcagcgggatcaatatggctnctggaccaggcaatctgctttaatgcggcggcaaacanctcttgttcagcttcggcttgacatttttccccggccaggacggttggattttttccagctttaggcaagttcggtttttactttnttggcttaaacataanccgggggntcggggggccnagacagggggttaaa

SEQ ID NO: 307627 - DNA, 416 bp, Homo Sapiens
  misc_feature (379)..(379): n is a, c, g, or t
  misc_feature (393)..(393): n is a, c, g, or t
gaaacctgaggcatggagcaacgtaacagtttgtaagtagtggtgccaggacttgaaggaggtagaagtgacgagttcaggttactcttcccagggggttgtcagtatactgagagagaaggatcatgtaagcagcactgttgactttcgctcagtgctcacccggtctcactccagcatgtgtgttccttaccagtactccccactgtctttccaaatgcaacatcggcaatgcagttcctgcatgggactcagcatctaacagcagaactgcaaaagcatcccactgcaaagatgcttcaggtaagggccaatggattcatcacttgaactggcaagatctccacctcacatatgggttcacaagttgaaagggtantagggaccaagganaagccaaggacacagttggaaaa

SEQ ID NO: 307628 - DNA, 238 bp, Homo Sapiens
  misc_feature (222)..(222): n is a, c, g, or t
agttcccagacatccactgagctgtttaactcattgacgcaatacgcatattgttcgtttggatggaataccatatgacgcgggccggccccttcaacggtggtcacttccgcaggtcctggccacgagatgaccatcatcgctgaccgtaaacaggcaaatgcgatcctgctttaatgccggaacccacagcgtacggttgtccggtgagatattggcggnaatggcaaaccgtccc

SEQ ID NO: 307629 - DNA, 114 bp, Homo Sapiens
  misc_feature (33)..(33): n is a, c, g, or t
  misc_feature (43)..(43): n is a, c, g, or t
  misc_feature (58)..(58): n is a, c, g, or t
  misc_feature (63)..(63): n is a, c, g, or t
  misc_feature (78)..(78): n is a, c, g, or t
  misc_feature (90)..(90): n is a, c, g, or t
  misc_feature (97)..(97): n is a, c, g, or t
tcagggcgggcacccatcagcggcaaaccacancggagcgcanccactccggtccacncccgnccacgttgcccgcgnccaggctgaaancttgctntcaggcaaggtctgccg

SEQ ID NO: 307630 - DNA, 339 bp, Homo Sapiens
  misc_feature (262)..(262): n is a, c, g, or t
  misc_feature (275)..(275): n is a, c, g, or t
  misc_feature (282)..(282): n is a, c, g, or t
  misc_feature (328)..(328): n is a, c, g, or t
gtgcacaccatcatgtccagctaattttggtactttttgtagagacagtcttgctacgttgtccagggctggtctcaaactcctgggcatcaagtgatctcactgacttcgtctctcaaagagttgaggttataaatataaacaattgcacctgggccgcaaatacttatttaaaaaggggaaccatggatgggtttcttttaaattgactggaatttccgttttctattaacttaaattttacctccagttgttcgtcctnccaaaggactttnttaaccngccacctggatatcttttaactggcatcttcattggtttagggggnaattaaggggg

SEQ ID NO: 307631 - DNA, 452 bp, Homo Sapiens
  misc_feature (48)..(48): n is a, c, g, or t
  misc_feature (50)..(50): n is a, c, g, or t
  misc_feature (52)..(52): n is a, c, g, or t
  misc_feature (55)..(55): n is a, c, g, or t
  misc_feature (313)..(313): n is a, c, g, or t
  misc_feature (336)..(336): n is a, c, g, or t
  misc_feature (341)..(341): n is a, c, g, or t
  misc_feature (362)..(362): n is a, c, g, or t
  misc_feature (371)..(371): n is a, c, g, or t
  misc_feature (381)..(381): n is a, c, g, or t
  misc_feature (393)..(393): n is a, c, g, or t
  misc_feature (404)..(404): n is a, c, g, or t
  misc_feature (417)..(417): n is a, c, g, or t
  misc_feature (423)..(423): n is a, c, g, or t
  misc_feature (441)..(441): n is a, c, g, or t
atggctgctgaggacgagggaaggctgccagggtctcccctcgaacgngngnggntgaggtgcggggacgttccaaaaaggggctaagcgagagcgacctgaaggagcaggcactcttcgggcaggctgcataggtaggggaaagatgaggacaccccaagcgccgagtaccagtttcagcaaaggtgcagactgtggtataggggtgaggcagcagatgaggctggagaagtgggtagggccacctaagctttgtaaaccctgccaaggagctctttcccaaagacgtttggagaacatagaaggatttttnaggaaaggaacttcttggtcttnagatnccaagaggcgagtttgggggnagcagcacncggggttttnagtttcaggcangagatcttttncatcttcagtttnccttcncagttcttcaccttcttncaggggcgtct

SEQ ID NO: 307632 - DNA, 251 bp, Homo Sapiens
  misc_feature (11)..(11): n is a, c, g, or t
  misc_feature (44)..(44): n is a, c, g, or t
  misc_feature (54)..(54): n is a, c, g, or t
  misc_feature (62)..(62): n is a, c, g, or t
  misc_feature (64)..(64): n is a, c, g, or t
  misc_feature (152)..(152): n is a, c, g, or t
  misc_feature (185)..(185): n is a, c, g, or t
  misc_feature (215)..(215): n is a, c, g, or t
ggccgagaatngccgttatgaggaccctaagaggtgagaccctntagccttctngggtgggngntccgtcctttcccccactgaggacagaggcccgcccagcgatctgagcatgtgtggacgtcaatcttgcagcccctcttccaggcccnctccccagccttgcagggctcaggttacccctngcctttcctaaaggtcactcattcctcttnacgtttgcaaaaggggaatgtaatcctggggttggg

SEQ ID NO: 307633 - DNA, 362 bp, Homo Sapiens
  misc_feature (14)..(14): n is a, c, g, or t
  misc_feature (60)..(243): n is a, c, g, or t
  misc_feature (249)..(249): n is a, c, g, or t
  misc_feature (296)..(296): n is a, c, g, or t
  misc_feature (326)..(326): n is a, c, g, or t
ggctgcagtgcagngcgcgattcacggcccactgcagcccgaaactcctaagctccagcnnnnnnnnnnnnnnnnnnnnnnnnnnnnnnnnnnnnnnnnnnnnnnnnnnnnnnnnnnnnnnnnnnnnnnnnnnnnnnnnnnnnnnnnnnnnnnnnnnnnnnnnnnnnnnnnnnnnnnnnnnnnnnnnnnnnnnnnnnnnnnnnnnnnnnnnnnnnnnnnnnnnnnnnnnnnnnnnnnnnnnnnatgagncaccattcctggggcttgaatggggtattttttaaaagcagggaaantcaggaaagggaaatttgaggatgggcagntcatcccatgaggtgacaacttaacttttattgcca

SEQ ID NO: 307634 - DNA, 351 bp, Homo Sapiens
  misc_feature (72)..(72): n is a, c, g, or t
  misc_feature (130)..(130): n is a, c, g, or t
  misc_feature (225)..(225): n is a, c, g, or t
  misc_feature (249)..(249): n is a, c, g, or t
  misc_feature (303)..(303): n is a, c, g, or t
aagtaattagaaaacccaaagccttgaaatgaactttttcaacaaaagctcttacagccagttagttcattncaagattaacagggagagtggtgctctaggtaacacctcaacctctgtctcaaaagantacacttactacatattgtgggtatactctaagttacacagagattctcaaacatctctagatctgtttcccctacctccaagactagggaagtntgtgaaatatgtacagttcaaganaaactcccaacttttccccctaagacttttataagatagggttaaacctgagantgtgtgactgaccagaccgtctttgggttctttattcctagagacttt

SEQ ID NO: 307635 - DNA, 438 bp, Homo Sapiens
  misc_feature (117)..(117): n is a, c, g, or t
  misc_feature (236)..(236): n is a, c, g, or t
  misc_feature (279)..(279): n is a, c, g, or t
  misc_feature (341)..(341): n is a, c, g, or t
  misc_feature (381)..(381): n is a, c, g, or t
  misc_feature (411)..(411): n is a, c, g, or t
gtgggaagaaggtggtgtcttcgcctgggtatcaaatactctggggccgagatggggatttgcagcgatctcatttggctatctgcaaatcgccattggttttattccgatgctctntttcgtgttaggggcactctcctacatcctgaaatggccagcgctgaatgaagaccccattaccaaaactattgcagcactcatcattctttgggcgctggcattaacgcattttggtngcacgaaatacacggcgcgaattgctaaagttggcttcttcgncggtatcctgttacctgcatttattttgatcgcattagcgctgatttatctgcactccggtncgcccgtttgctatccgaaatggattccgaagaccttgtntccccggacttgttgttaaaagtggggcancctgggtaagtattttgtttggccttc

SEQ ID NO: 307636 - DNA, 381 bp, Homo Sapiens
  misc_feature (287)..(287): n is a, c, g, or t
  misc_feature (300)..(300): n is a, c, g, or t
  misc_feature (333)..(333): n is a, c, g, or t
  misc_feature (340)..(340): n is a, c, g, or t
gtagaattgaacgtttatccctttaaaaggcagttgagtgacatgtttagcctctccaagcttatccttggtccagattctatttatgacgagtaatttggggctgccttcattatgtccaaagcataatttaggacattgtgatttaatgatgtgtattggtagttttgagtcatttatgtgaattaaggtagtttcatgctgtcatgagaattcttatgtaatataatgaatgaaatagcagccctctttgtgagtttcagcatccaagactcaagtcatagatntacttaaaataantgggaagttttctcttgtggcaaatgcaaaccngaaaatngtcttagacaaggggtagatggtgtacgcagggggtgtcct

SEQ ID NO: 307637 - DNA, 108 bp, Homo Sapiens
  misc_feature (33)..(33): n is a, c, g, or t
  misc_feature (53)..(53): n is a, c, g, or t
  misc_feature (63)..(63): n is a, c, g, or t
  misc_feature (67)..(67): n is a, c, g, or t
  misc_feature (70)..(70): n is a, c, g, or t
  misc_feature (74)..(74): n is a, c, g, or t
acacctgctatggcgatgcggacagtggttttncaattcacgaactggaggangacacctagnatgngantagnatcttaagctttaataagagctgtgctatggctg

SEQ ID NO: 307638 - DNA, 340 bp, Homo Sapiens
  misc_feature (311)..(311): n is a, c, g, or t
tctttgtatttggaaaattggttcaagctgggtatgagacataagtgtagtcagctctgggagaaggttgctcttaaggagaagcagggacctgtggtttagcagcaggaagtgcaaatgggactggcttgtgctctacctggcagacctggattggcttcaggcagccagtgcctgggaaaagcctgggagaattgggccgtactttgaccctgattctcattcaggcacagatgaatcacaggcaccttaagaatcggcacagaactttccttgaggcctcagtcagcattttttcacaaaatgagctngaggccattccaaggaggctaggaaagag

SEQ ID NO: 307639 - DNA, 341 bp, Homo Sapiens
  misc_feature (226)..(226): n is a, c, g, or t
  misc_feature (285)..(285): n is a, c, g, or t
gcatgagcacaaggagggcatttgtgtgaattcttaacttgcaaatcagtcctgtcctcggccccctaaactcccacaaaggcttcatcatagagccccagctcctagcagggcatgggaaggcctccatagtgaggtccccactgactcctccagcctcactcctccaattcctgccctcacttatcttgttaacacaacaagactcgtgggcacagcacgttangatggcagttttccaggccttccataatttggggcccagcttattcccccctcccttcngggggtaggggaagtttttcctggaacaccccaccaaggaccaccacaagttcagg

SEQ ID NO: 307640 - DNA, 394 bp, Homo Sapiens
  misc_feature (297)..(297): n is a, c, g, or t
  misc_feature (345)..(345): n is a, c, g, or t
  misc_feature (363)..(363): n is a, c, g, or t
  misc_feature (370)..(370): n is a, c, g, or t
ttttcagggtgacctaccctgtgagtgcctccaagtggaagccaagttagtgctcagagcaacaggggcactgatgaaactgggaaaagcaccttggcaaggacggagcccgagctcagtaatgggaaggctgtccagcctgctgccggtatccaggaaggtaaactctttcctaggagacttcaaaatcagcataaatgtccagttatctgtagtgtcgcggttatacccatccaaccactgattcaacaaccagcctccagtggggaatgcgggtcttgttcttgcatggggttnggaggctcctgggtatctcttaactgggcatcccaacaaccagttaantcaagttcattaagaggntagggtnggggagggattgccaggccagagt

SEQ ID NO: 307641 - DNA, 296 bp, Homo Sapiens
taccaagggcacagttaacatgcgtctgctggtcagggccacttgagcatcctacactgggcagaagggttgctgtttctctgataacttctcctcccttatcctcagtgattccttcctgtcttcaccactgtattcacatgtcccacgctcctgctgcagctgacactacttctgaatgtccctcttctctataccaccagggctctagatctgatcaccatgacttttagttttatttcctctaattcattgtccaagctatagcctgcatgatctttcaaaaatgggacagt

SEQ ID NO: 307642 - DNA, 502 bp, Homo Sapiens
  misc_feature (138)..(138): n is a, c, g, or t
  misc_feature (348)..(348): n is a, c, g, or t
  misc_feature (360)..(360): n is a, c, g, or t
  misc_feature (378)..(378): n is a, c, g, or t
  misc_feature (429)..(429): n is a, c, g, or t
  misc_feature (457)..(457): n is a, c, g, or t
  misc_feature (465)..(465): n is a, c, g, or t
  misc_feature (489)..(489): n is a, c, g, or t
gaaagcaggctcatttggggactgattcaagcagggttctgaagaaagagctagcccactgcgcagtggcccacctggagaggtagcagtctcctttcctgatgccagatccaagcagaggctaatgctggagaccangatgcccgtgggagaatccctgtagctagagggaattatctggaagtaatttatccctgtaccgccttgtggggttgggtgtttcttgcccactgcatgagttggtattactctaagagcgacagatacatgttttcacatgctttccatgtactagacactttctagggcatcagttctcaacatgacaaagagatccttctcaggganatcagatccctntttccactgcttgaaaanccccacagtgggcttcccattttaattgggcattaaacaccagtggccttncagtggctgccaaggtcaaaccatctgnctttctgntttcctggcttaaccttttccttncatcttcttatct

SEQ ID NO: 307643 - DNA, 435 bp, Homo Sapiens
  misc_feature (17)..(17): n is a, c, g, or t
  misc_feature (179)..(188): n is a, c, g, or t
  misc_feature (366)..(366): n is a, c, g, or t
  misc_feature (397)..(397): n is a, c, g, or t
ctcagcacggtcctggntttcctcatcctagaacaatctgcctggttcttcgtcccaagctctcattacctcactatttttagcacatcagataagtacaccagctgggtttagggaggacccacagaagtgccggctcaagttccttgtcacgttctactcttgtgtacttggtgcannnnnnnnnnaatcatgagcttatacttgataataaattgtttttaaatgtatgagtttagaatgctcacatgagttgccttgtcatcccacttcagagactttgtcttaaaaccagttctttgtcagaagttcagtggtgaagcttgatatcctgcccacggcctccccagtctgggccttggcccncacatcctgtttttagcttccaaggggactnggtcttctgtgtgggcactagttgaaagttacagtggg

SEQ ID NO: 307644 - DNA, 481 bp, Homo Sapiens
  misc_feature (350)..(350): n is a, c, g, or t
  misc_feature (396)..(396): n is a, c, g, or t
  misc_feature (425)..(425): n is a, c, g, or t
  misc_feature (439)..(439): n is a, c, g, or t
  misc_feature (448)..(448): n is a, c, g, or t
  misc_feature (463)..(463): n is a, c, g, or t
acggcttttgtggttacatttatagagcacaagcagagtagactttagcataattcataagggcataggtttttggaaacagtaaatgaacattggcttcaactcaaagtcaccagctgcattagcccataacaagagagtcatcctgttctttggaactttgaaaccagatactgtcttcccagtagttatgaaagtcccagatggcatctttcaatggaagcctgcttcatctacactgaaaatccattgtttagtgtagtcacgtttatcacttatcctagctaggatcttctgggaaaacttgcttacagctttcttacatccaggcacttgctactttcaccttnaaaatttttatgttatggaaggtgtcttttattcctttaaaccttnaggaaccagtctcttcctagcttttaaanttttctttcttgcnggtttcccncacctcttcccagcnttcatgggatttgagggt

SEQ ID NO: 307645 - DNA, 459 bp, Homo Sapiens
  misc_feature (28)..(28): n is a, c, g, or t
  misc_feature (109)..(109): n is a, c, g, or t
  misc_feature (125)..(290): n is a, c, g, or t
acacttctaggagttgaaggatgcaaanaactcagtcaacattccctgtcctcaagaaattgacaatccaataaatttcctagaacagcagttctcaaccagaggtggngcaactgttccccagnnnnnnnnnnnnnnnnnnnnnnnnnnnnnnnnnnnnnnnnnnnnnnnnnnnnnnnnnnnnnnnnnnnnnnnnnnnnnnnnnnnnnnnnnnnnnnnnnnnnnnnnnnnnnnnnnnnnnnnnnnnnnnnnnnnnnnnnnnnnnnnnnnnnnnnnnnnnnnnnnnnnnntctcctaggattgatccacaactaggaacacggaaaatgttccgcaattagggatgggatctttttgttatcttttccaatgggagccttcaaaaacacatgtcctaaggatcttccttattccccaggagcccaggatttcggcccttgagttttcccttaatttcca

SEQ ID NO: 307646 - DNA, 440 bp, Homo Sapiens
  misc_feature (133)..(133): n is a, c, g, or t
  misc_feature (136)..(136): n is a, c, g, or t
  misc_feature (340)..(340): n is a, c, g, or t
  misc_feature (367)..(367): n is a, c, g, or t
  misc_feature (380)..(380): n is a, c, g, or t
  misc_feature (417)..(417): n is a, c, g, or t
gccaaaacaatggtttttagatgttttcttgctggtctgctacacgttcttcttctgttcagtcagtgcatgtagtaataaataaaagctctgctcattgcttttgtttattttaagtactttttcacgtagncgngtgtcatggcctcagataaatgtctacataatgcagtcaactttcccacaccttgggttcctctaagaaatgcagactacagaatcttgatcatatttatatatgattgtcctttgggctctaaaatttatcccattatcaggttgggcttttattttggggaattctgtctggcatcaggaaacatgggctaaaatggacttncaacttccaagttccaaacactttccnttttgttggggcnttttccattttttaggccaagtggaatatctgggccnggatttaactaaagtttaggagg

SEQ ID NO: 307647 - DNA, 393 bp, Homo Sapiens
  misc_feature (13)..(13): n is a, c, g, or t
  misc_feature (90)..(284): n is a, c, g, or t
  misc_feature (338)..(338): n is a, c, g, or t
  misc_feature (353)..(353): n is a, c, g, or t
gatcttagaggtnctttacagaagttctgcctaccttttctcccttcatcttacacgaattaaattggatagcataaaaattcaagttannnnnnnnnnnnnnnnnnnnnnnnnnnnnnnnnnnnnnnnnnnnnnnnnnnnnnnnnnnnnnnnnnnnnnnnnnnnnnnnnnnnnnnnnnnnnnnnnnnnnnnnnnnnnnnnnnnnnnnnnnnnnnnnnnnnnnnnnnnnnnnnnnnnnnnnnnnnnnnnnnnnnnnnnnnnnnnnnnnnnnnnnnnnnnnnnnngtagtttgatgtggggagtatttgttttgagccttcgggaggttcggaggcttnagggtgagccattgnaccattaccaccacatttccaggccagttttggggcaaag

SEQ ID NO: 307648 - DNA, 419 bp, Homo Sapiens
  misc_feature (265)..(265): n is a, c, g, or t
  misc_feature (349)..(349): n is a, c, g, or t
  misc_feature (356)..(356): n is a, c, g, or t
  misc_feature (405)..(405): n is a, c, g, or t
gggttcagggcagctttgggacaggctatctggatggcaactaactggagtacctgatcaggcctagaggtgtgtcctgtgacccagtgtccaggcctgggcagcatgtcagagactcagcaagagtatgtgggtccttggctcacattgtttgagcaactactgaatactgaataggactactgaatactgaatactgaataggacaagatgtacatggtacaacttctgcccacctgggctttcaatggaaatgcccccaggnagccatgtccctgactgcatgctttcacaggagcagggataggcctgcccaacgtgccactgtatctggcagaacccagcccantggcctngacttcaccaagggcccttaccaaacatttgttaaagggccaagagttnacgctccagggaaa

SEQ ID NO: 307649 - DNA, 343 bp, Homo Sapiens
  misc_feature (42)..(273): n is a, c, g, or t
  misc_feature (295)..(295): n is a, c, g, or t
agacagaatgcaaacaactttgttagaatacttgttagaagnnnnnnnnnnnnnnnnnnnnnnnnnnnnnnnnnnnnnnnnnnnnnnnnnnnnnnnnnnnnnnnnnnnnnnnnnnnnnnnnnnnnnnnnnnnnnnnnnnnnnnnnnnnnnnnnnnnnnnnnnnnnnnnnnnnnnnnnnnnnnnnnnnnnnnnnnnnnnnnnnnnnnnnnnnnnnnnnnnnnnnnnnnnnnnnnnnnnnnnnnnnnnnnnnnnnnnnnnnnnnnnnnnnnnnnntgagtttgagattcattgccantgcactttcagccggggttaacaggagcaagattttttgccttaaaaa

SEQ ID NO: 307650 - DNA, 106 bp, Homo Sapiens
tttttattacataagaaaggcatcttttctaatagatgttggttgactcagaataaatgttaacatctagaagcaaaacgatacctgaatgattcaactgaacttt

SEQ ID NO: 307651 - DNA, 299 bp, Homo Sapiens
  misc_feature (53)..(53): n is a, c, g, or t
  misc_feature (60)..(60): n is a, c, g, or t
  misc_feature (69)..(69): n is a, c, g, or t
  misc_feature (74)..(74): n is a, c, g, or t
  misc_feature (154)..(154): n is a, c, g, or t
  misc_feature (164)..(164): n is a, c, g, or t
  misc_feature (170)..(170): n is a, c, g, or t
  misc_feature (173)..(173): n is a, c, g, or t
  misc_feature (177)..(177): n is a, c, g, or t
  misc_feature (253)..(253): n is a, c, g, or t
  misc_feature (258)..(258): n is a, c, g, or t
atgagcactgcgccagactgctggaattatttctgaagaactgtgcttcactnccgatgnacataatanaaatnaaatttgactcctgaggaaagcaaagcggtttcacgtacactgttttttattgattgtttttaaagacgcatttggattntaagggagantaaaanggntaangtaacacacagtttgtccactgcatctctgaatttcaggtgcatctcacacttcaagttagcttaacttggcagcnatttnttctttttaatgggacaaaacttagggttgtgacttatcat

SEQ ID NO: 307652 - DNA, 362 bp, Homo Sapiens
ggaggtgaggggaaggaggcagggaggcttgagagaggtgtccctgcagttatccatctgacaacatgccagttccagagattcccccagtagagagaattcctttccaactgttctgaaaataagaatattcctgagagggccagcccccgccacaggattggtctccaccctgctgtgaacacgtctgtaagctgttgtaagctgactggtagcggagatcctgggtacagtaggaagtcttgaaggaaggagaaggatattttggcacttgggaggagaggaaattcaggaaggagaaatctgggctgaggggcgacagagtggggcagttaagacagggggagaggagattagagggg

SEQ ID NO: 307653 - DNA, 211 bp, Homo Sapiens
  misc_feature (123)..(123): n is a, c, g, or t
gtacctggaccaatccaccccgccttctcttggcctatggaggccccgggacatcacaggccacagacttatcacaggcaattatgccaactctcctctaacagaaagaaacagcagcacctncaacccaaagctggtggcccagagagtgcagtaggctgcttgctggcttgaggcttgtggatcctgtgggcccagcgagggtttggga

SEQ ID NO: 307654 - DNA, 332 bp, Homo Sapiens
gtgaaggtcacatccccaggaggaaaaaggaccgctgggaatgagtgatacgagatttgtcattaaccgttcctccacgtttagttgccaactttctcagcaacgagaacctggtttcttgacccccgtcaaatggttgatatcactaagttttcaggaaaaagtagtcaccactgcctgacttcagctcttgctgataggagttcatgttggctgatctttttcggttacaccctgggattcctttgtgaggaaagggaaagtagtgtgaattaatgactatcactaattatggacctgctttcctttgttgagggaacttattcttttca

SEQ ID NO: 307655 - DNA, 336 bp, Homo Sapiens
  misc_feature (312)..(312): n is a, c, g, or t
ttctgacttgtgagatggtatcccatttgtggttttgatttgcatttccataatgattacgtgatattgagcattttttcatatgcttgttggccacatgtatgtcttcctttgaaaaatgtctgttaatgtcctttgctcactttttaattgggttgttttttgcttgttgatttgttcaagtttgttatagattctgaataccagacttttgtcggatgtatagtttgcaaatattttctcccatcctgtaggctgtttactctgttgataggttcttttgctgtgcaggaagctctttaggtttaatcngtttccatttctcaattttttgcc

SEQ ID NO: 307656 - DNA, 385 bp, Homo Sapiens
  misc_feature (48)..(49): n is a, c, g, or t
  misc_feature (101)..(101): n is a, c, g, or t
  misc_feature (132)..(133): n is a, c, g, or t
  misc_feature (137)..(137): n is a, c, g, or t
  misc_feature (146)..(146): n is a, c, g, or t
  misc_feature (149)..(149): n is a, c, g, or t
  misc_feature (159)..(159): n is a, c, g, or t
  misc_feature (175)..(175): n is a, c, g, or t
  misc_feature (189)..(189): n is a, c, g, or t
  misc_feature (201)..(201): n is a, c, g, or t
  misc_feature (268)..(268): n is a, c, g, or t
  misc_feature (339)..(339): n is a, c, g, or t
  misc_feature (346)..(346): n is a, c, g, or t
tgcagtctagtgaagtagaggatagtcgaaagtcagacttaaaaagtnntttagaaccagctctggaaggccttagatgtcagattaaaggactgagattntacccttgagtcaggcagaataatggatggnntttnaactaaggngtnacacaaggtngtgcttatgactaganggaggccactaggncagtcctggtcnagtcaggacacccttcagttgctttgacttcagccctgtgggattcaaagtctgatttttgtcagcnctcttagagcagtcttcaccaaaagtgtggtccacaaagggcagtgccagtacttgttaagcccttttgtntacacanccatagttcaaaggcctttttgccagaaagttaagaatt

SEQ ID NO: 307657 - DNA, 372 bp, Homo Sapiens
  misc_feature (100)..(220): n is a, c, g, or t
  misc_feature (224)..(224): n is a, c, g, or t
  misc_feature (230)..(230): n is a, c, g, or t
  misc_feature (253)..(253): n is a, c, g, or t
  misc_feature (287)..(287): n is a, c, g, or t
  misc_feature (307)..(307): n is a, c, g, or t
  misc_feature (316)..(330): n is a, c, g, or t
  misc_feature (343)..(343): n is a, c, g, or t
  misc_feature (354)..(354): n is a, c, g, or t
gaagaaatatcaacaaaggcccaaacatttgcaacactaatatcctgaacatacgagaagcttttacaaatcaatataacgaatgataagacctaaaggnnnnnnnnnnnnnnnnnnnnnnnnnnnnnnnnnnnnnnnnnnnnnnnnnnnnnnnnnnnnnnnnnnnnnnnnnnnnnnnnnnnnnnnnnnnnnnnnnnnnnnnnnnnnnnnnnnnnnnnnntatntttttntcagggttgccgaggactgatgntggaacaggtttaggggaaacagggttattactntttgtgggggagttggaacnttcatacannnnnnnnnnnnnnngaggacccaggtnctcacctctgnttgcccgggggtggggac

SEQ ID NO: 307658 - DNA, 276 bp, Homo Sapiens
  misc_feature (11)..(11): n is a, c, g, or t
  misc_feature (164)..(164): n is a, c, g, or t
  misc_feature (214)..(214): n is a, c, g, or t
cagaatgtgcntttccctgttgatactgctgctaatttaattctaggtaactgaaggaaaaggaatggtgtgcattcttgttgttttttcatactctcacattcatcttttatctagtctcaagatgatcttaagagtaaagctgtaattataactgattaganagaatttcctaactttagtatagagggaagcacatagggtgcttttcttnaatgttctagaaagcagaccctattttagcttcttagtcatggagtggggggaactgtttct

SEQ ID NO: 307659 - DNA, 165 bp, Homo Sapiens
  misc_feature (55)..(55): n is a, c, g, or t
tttttggaaatacaggaactcctttaatagtgcttagcttacaagctctccaggntggggatggagcctcagttagattgatacagtttgcagagtgcctggcttagtcgatgttcaataacatttggggcaggagggagtgaataaaggtatacatgggtgaac

SEQ ID NO: 307660 - DNA, 455 bp, Homo Sapiens
  misc_feature (73)..(73): n is a, c, g, or t
  misc_feature (131)..(254): n is a, c, g, or t
  misc_feature (257)..(257): n is a, c, g, or t
ctcactctgtgcccagactggctggagtgtggtgggtatggtcatggctcacctcagcctcgacctccgaggntcaaacaatactcccacatcaactacccaaggagctgggactacaggcacacaccatnnnnnnnnnnnnnnnnnnnnnnnnnnnnnnnnnnnnnnnnnnnnnnnnnnnnnnnnnnnnnnnnnnnnnnnnnnnnnnnnnnnnnnnnnnnnnnnnnnnnnnnnnnnnnnnnnnnnnnnnnnnngtntgagccaccataccggaccgaatgttatgttttttaacttgaatttttatggctatccaatttaattcgtgtaaggatgaaggggaggaaaagggtagggcaggaactttctggttaaaggaacctcttaaggatctctcggtggccgaaatttcctgcagcccgggggggatccactaggttttaggaggcgggccg

SEQ ID NO: 307661 - DNA, 165 bp, Homo Sapiens
  misc_feature (43)..(43): n is a, c, g, or t
  misc_feature (77)..(77): n is a, c, g, or t
  misc_feature (92)..(92): n is a, c, g, or t
  misc_feature (115)..(115): n is a, c, g, or t
  misc_feature (143)..(143): n is a, c, g, or t
  misc_feature (148)..(148): n is a, c, g, or t
tgaagaggtgaccatacagttcaggggcccaagtcctgaggtngagatggctagaagaccaccaaaaccttgtactntcccttccctacggngtttagagttggggcatggggantggctgcctagctggggggctacatttnccagntcaacatgggggcaggt

SEQ ID NO: 307662 - DNA, 315 bp, Homo Sapiens
  misc_feature (273)..(273): n is a, c, g, or t
  misc_feature (305)..(305): n is a, c, g, or t
atgggagattccaaggagagggaatgacaccggctaatacttgaacaagatcactacatcttgtcttctctgttgctcctggactgcaggggacaagtgtgaaagcagggagaccagctggggagctaccacaacagacggaagaaccagatccaatgatatgtgtaagaagaataatttcagtgcaatttgaaagaacagatgcacaatttgactcttgtcaagttgatgggaatggacccgtcttccaaataaaagccattgagagtttgntcttttcaaggttggaaacttttcagcccaantccaactttt

SEQ ID NO: 307663 - DNA, 349 bp, Homo Sapiens
  misc_feature (336)..(336): n is a, c, g, or t
acaaacctttcctcagagttgctttatagttgtgggtctgagaataaattcacagattcacccactgcatgctttgatggtttcacgtcaggaatgggcctacttttcctcaggtgagagcggaatcctgctgtacaagccacctgtaatgtgggcagtggcaactcttgtttcctttccaagtcttctgaggttgtttcctagtaagtgagctggaggctatggggcctgggtcctgggtggtagctattttgcttttgggacataaaaatcttgggtagcttaatgtatttgttcctaggggctgcagttagcaaaagtaccacaaaccgggtnggtactagtactg

SEQ ID NO: 307664 - DNA, 277 bp, Homo Sapiens
  misc_feature (81)..(234): n is a, c, g, or t
  misc_feature (237)..(237): n is a, c, g, or t
gcccagggagccaagtggtcttgcttagtggatcccacttccattgaaccaagcaagctaagatctactggcttgaaattnnnnnnnnnnnnnnnnnnnnnnnnnnnnnnnnnnnnnnnnnnnnnnnnnnnnnnnnnnnnnnnnnnnnnnnnnnnnnnnnnnnnnnnnnnnnnnnnnnnnnnnnnnnnnnnnnnnnnnnnnnnnnnnnnnnnnnnnnnnnnnnnnnnnnnnnnnatngaggcaaagttgcttttagccagattgcctctcttagagt

SEQ ID NO: 307665 - DNA, 355 bp, Homo Sapiens
  misc_feature (340)..(340): n is a, c, g, or t
taagtagcaaataaaaatgcttatctgtgggcatgatggggacaggatacatggtgacaagttggcagtgagactttgttttaatttttgaactatgtaaacatatgacctttttcaaaaaagctattgttaagctagaaacaaaaatgagcatgtaggagtattaatctttaagaattagttaggataacacttggtgctgtaccagcagccagccacatgaggccttacttcacgttgcataggtgagaactacttacctggggttacacctgcctccatgtttgagctgggggaattttagcccccagctagggcagccatttcccatggccccaanttttacattccgtag

SEQ ID NO: 307666 - DNA, 502 bp, Homo Sapiens
  misc_feature (72)..(72): n is a, c, g, or t
  misc_feature (75)..(75): n is a, c, g, or t
  misc_feature (357)..(376): n is a, c, g, or t
  misc_feature (394)..(394): n is a, c, g, or t
  misc_feature (423)..(423): n is a, c, g, or t
  misc_feature (434)..(434): n is a, c, g, or t
  misc_feature (452)..(452): n is a, c, g, or t
aggaagtgaggcaagaagcctcaagattaacttggcatcttgcaagtctttttgaaaaaatccccaacggtntgntcaaaaagccttcctgtgttttcctcagatgcttgtacttgcctcaagcctgcttccttgctggatgtgcaacttgaaccagtccttagatactcaaccttggcagtatttaaagcaaatcatttcttgcttagcacttttccctggggtaggagggaggactcttatgagcgggtgttggcatggttaatgtaaagctatgttcttccagggtaatatttttgagggagaaaagcagaattgatgttcattcctggcagggcatgtccccccatcgcccannnnnnnnnnnnnnnnnnnnccctacatttgaggtccngtttgaataactgacagattaaatgtttncaattctctantttcacttttctatttgnggaattataagggctttcaaaaattaaagtggttacttttcagaggaagg

SEQ ID NO: 307667 - DNA, 360 bp, Homo Sapiens
  misc_feature (172)..(172): n is a, c, g, or t
  misc_feature (199)..(199): n is a, c, g, or t
  misc_feature (213)..(213): n is a, c, g, or t
  misc_feature (245)..(245): n is a, c, g, or t
  misc_feature (256)..(256): n is a, c, g, or t
  misc_feature (274)..(274): n is a, c, g, or t
  misc_feature (288)..(288): n is a, c, g, or t
  misc_feature (306)..(306): n is a, c, g, or t
  misc_feature (316)..(316): n is a, c, g, or t
ctttaaggaagtgagccagatgaatccaatgaccaacctggttgagagccattggtctaggagtagaaatgcacacaaggaataagggagaaggaggttcggttagttgagggagagaaagttggaagcatttcaagctaagtaaatggtatagaaaaagaaagatgatgtnttacggttttcaatctcatcatgggtntaagctagtgtaanttggaaactagaacattctatgtcaacatggntgcttggaagntctaccttgagggaaaanttcaacaaagaaantgtcttaatgtctcagcnaaggaagctntgggccatcctgggtcaggtttgaaaggtcaaccaaacattgcc

SEQ ID NO: 307668 - DNA, 350 bp, Homo Sapiens
  misc_feature (208)..(208): n is a, c, g, or t
  misc_feature (282)..(282): n is a, c, g, or t
  misc_feature (288)..(288): n is a, c, g, or t
atacatcagggaatttattttctttatccagaagaaatctgttaacattttcccaaaataacaattcaagtaaaaaattcctaccaacgagatgatgttgccaccatttttacacaagcacactcacggcttgagacatcctcatctagcattaaacctgtaagttacagctactaaataatgttaagctattatgatgcatacagantagagtaccccaacccagctcttaatgaatgctgggtttacctgcaggtagggggttggctgagattaaaaggngaaacnataggtaaagggagatacttaaatttggattcaaatacttcatttctaaactctacataaaa

SEQ ID NO: 307669 - DNA, 384 bp, Homo Sapiens
  misc_feature (354)..(354): n is a, c, g, or t
  misc_feature (362)..(362): n is a, c, g, or t
gtgttctataatcagctgagttgctgtggaggttaatctaagccacagatagagcggagtgtccattatcatagatattctgaaggatcgaatcctttgcatcttggaatggctgtaacatgagtgcactgttgtccagctcttttacacttgtactcctagagtcatcttctgacttcaggagaacttgatagaacatgctgttcactaaggatcattgatattagattgcatacatagtacttgggcaactgaaatccctcaacagtaaaatatgggtgttcttggcatatatgctattaggaacttaaggaaaagggtaccaggaaaaaaattaagttctggacacacttntttttctntttaaatttaaatccgtcacgg

SEQ ID NO: 307670 - DNA, 318 bp, Homo Sapiens
  misc_feature (94)..(94): n is a, c, g, or t
  misc_feature (96)..(96): n is a, c, g, or t
  misc_feature (107)..(107): n is a, c, g, or t
  misc_feature (113)..(113): n is a, c, g, or t
  misc_feature (121)..(121): n is a, c, g, or t
  misc_feature (128)..(128): n is a, c, g, or t
  misc_feature (151)..(151): n is a, c, g, or t
  misc_feature (161)..(162): n is a, c, g, or t
  misc_feature (176)..(176): n is a, c, g, or t
  misc_feature (189)..(189): n is a, c, g, or t
  misc_feature (204)..(204): n is a, c, g, or t
  misc_feature (220)..(220): n is a, c, g, or t
  misc_feature (228)..(229): n is a, c, g, or t
  misc_feature (261)..(261): n is a, c, g, or t
  misc_feature (271)..(271): n is a, c, g, or t
  misc_feature (274)..(274): n is a, c, g, or t
  misc_feature (280)..(280): n is a, c, g, or t
  misc_feature (305)..(305): n is a, c, g, or t
tctgttgtcacagtctcagctcactgcaacctctgcttcccgagttcaagcaatttccctgtgtcagcctcccgagtagctgggattacaggtntntgtcaccacgnttggcnaatatttntattttnactagagatggggttttgccatnttggccaggnnggtctcaaattccngacctcaggtganccacccacctcagtntcccaaagtgctgganttataggnnttagcctccgaacccagcccatagtgatggtnttaaagtcanttntagggngggacaagaggcaaccagcctacgntcaggatttagga

SEQ ID NO: 307671 - DNA, 349 bp, Homo Sapiens
  misc_feature (88)..(88): n is a, c, g, or t
  misc_feature (319)..(319): n is a, c, g, or t
tttttcacttctctcctggtatcccgtgtgtctgtccctagaaatgtctctaactggtgtttctcagttcacttagctatcccttggntcaatagctattgcaaagaaacgaggtagcatgattggcctaacctggctcacaaacaagtcctagtggcaggaatgagctaaccatgactggcatttccaccagagccatttacagtgagggtagatgtgtttccccaaaggaaagaagactagggcagatcaaaattgacagatgtttcattaaagcttcatgggatatttaaactgtgccatcataggatgaattgtnttttggtcaaatggaagcaggcagtgcaca

SEQ ID NO: 307672 - DNA, 270 bp, Homo Sapiens
taagcagaaattgctcaataatcttgcttttattcatcatggattaaattaactccagctgcttaaaatgcccattcaagatttaaatgcctgggacgtgagtgtgcaaacctaggtcagaaatcacccctgggcagtcttgggagctttgagaggactctacaggaactacttcggcttaaatgatttgagggcaaagcagctggggtttacttgatttcatcaagacttaaatgttgaaagggagaggtaattttattccaaagggaa

SEQ ID NO: 307673 - DNA, 317 bp, Homo Sapiens
  misc_feature (13)..(13): n is a, c, g, or t
  misc_feature (85)..(85): n is a, c, g, or t
  misc_feature (97)..(97): n is a, c, g, or t
  misc_feature (107)..(107): n is a, c, g, or t
  misc_feature (120)..(120): n is a, c, g, or t
  misc_feature (124)..(124): n is a, c, g, or t
  misc_feature (138)..(138): n is a, c, g, or t
  misc_feature (165)..(165): n is a, c, g, or t
  misc_feature (190)..(190): n is a, c, g, or t
  misc_feature (254)..(254): n is a, c, g, or t
  misc_feature (259)..(259): n is a, c, g, or t
  misc_feature (303)..(303): n is a, c, g, or t
aagccctcagtcntaccctggaagagggagttgaaaatgctgggatagcagcaggatcagttctcagcttgagccaaagcacccngccctggcagcntgagcatcanacagaaccctctnagtnctttgggctctctnctgaggaagactgcttcactcttcccncccaccaactcgctggcccaaccancagctgctgctctaagaaaacacccacagactcaccacattttagtcttagcatttactttccncatcncaaatttttgggaacagcctttagtgtcttacaggcaaatgggnacttgatgggacag

SEQ ID NO: 307674 - DNA, 433 bp, Homo Sapiens
  misc_feature (143)..(173): n is a, c, g, or t
  misc_feature (177)..(177): n is a, c, g, or t
  misc_feature (231)..(231): n is a, c, g, or t
  misc_feature (241)..(241): n is a, c, g, or t
  misc_feature (279)..(279): n is a, c, g, or t
  misc_feature (293)..(294): n is a, c, g, or t
  misc_feature (303)..(303): n is a, c, g, or t
  misc_feature (334)..(334): n is a, c, g, or t
  misc_feature (350)..(350): n is a, c, g, or t
  misc_feature (357)..(357): n is a, c, g, or t
  misc_feature (359)..(359): n is a, c, g, or t
  misc_feature (364)..(364): n is a, c, g, or t
  misc_feature (369)..(370): n is a, c, g, or t
  misc_feature (373)..(373): n is a, c, g, or t
  misc_feature (380)..(380): n is a, c, g, or t
  misc_feature (382)..(382): n is a, c, g, or t
  misc_feature (408)..(408): n is a, c, g, or t
aaaaggaccaaagaggggtggggtgactcggttgccgatgaggtcagcgcttgcacacacagaggcttctgtcttccctggagagtgaaacccagactgtctgagaggccccccaagccctggaccctctgagctacactgcnnnnnnnnnnnnnnnnnnnnnnnnnnnnnnntggntggagggccagcaaggcctggagcttgagcaggcaccctggagctgtcaccctnttcccacttntgccttctcatcttcagctccttccctgcccacctgcntgcccacccccagnnttaaccttnggtagaggttggcggtgggctggctggtttntggaagggttgggcancctgggntngggtntgggnnttngggggantncggtttttgtcatttcccaacaacangggccatcaatatttcagcaccagg

SEQ ID NO: 307675 - DNA, 320 bp, Homo Sapiens
  misc_feature (23)..(23): n is a, c, g, or t
  misc_feature (60)..(60): n is a, c, g, or t
  misc_feature (98)..(98): n is a, c, g, or t
  misc_feature (197)..(197): n is a, c, g, or t
  misc_feature (224)..(224): n is a, c, g, or t
  misc_feature (230)..(230): n is a, c, g, or t
  misc_feature (251)..(251): n is a, c, g, or t
  misc_feature (285)..(285): n is a, c, g, or t
  misc_feature (309)..(309): n is a, c, g, or t
gctgggacggcaaccacccagcngggcagttgcgtactcaggttggcaaccagggtgttncgcaactgttgatccaacgggctggccacaagttgttnttggcaatcacatacttcacatcactggtttgataaaccacaccattccccgccagatagtcaggaacagtgacctgctctacccataacagacgattnccctggctggcggtactttgtgtaccnttcttncaccacaggtaactcgtaatnagtttttattaatttccgccggagctcccatccngcccagcccacagtgcttgcaatncgttcaattag

SEQ ID NO: 307676 - DNA, 203 bp, Homo Sapiens
  misc_feature (169)..(169): n is a, c, g, or t
  misc_feature (185)..(185): n is a, c, g, or t
gtgcccagccgataatgttttgatatatactttatttggtttacaaaacccacacccatatttatttgttaattgctaaaatactgaaagaaatctggcacatgataagaagaacacaattatctcgtgacaaaataaacttccatatcacaaagttatgatattaaantacatgagtcattagnactcatgataggggattg

SEQ ID NO: 307677 - DNA, 327 bp, Homo Sapiens
  misc_feature (35)..(35): n is a, c, g, or t
  misc_feature (44)..(44): n is a, c, g, or t
  misc_feature (46)..(46): n is a, c, g, or t
  misc_feature (125)..(125): n is a, c, g, or t
  misc_feature (142)..(176): n is a, c, g, or t
  misc_feature (178)..(178): n is a, c, g, or t
  misc_feature (196)..(196): n is a, c, g, or t
  misc_feature (242)..(242): n is a, c, g, or t
  misc_feature (260)..(260): n is a, c, g, or t
  misc_feature (274)..(274): n is a, c, g, or t
  misc_feature (293)..(293): n is a, c, g, or t
cgagctggacgctccgcagcccgcccgccagccgnccgccggcncngcaggaatccctggataaagaccagctcaaccatcgctgagaaaacagacctaggcttcccagggcggttaaccccggncctctgggcagagactnnnnnnnnnnnnnnnnnnnnnnnnnnnnnnnnnnntnccagtgtgtttcctactnttctttgtcttgggaggaaagcaaagggagaggaaatgggactttnaacagtggtcttttgggntttcattcaatttnacagggaaattgggcattnaaggatgggtttcaacttaaggacattggatcca

SEQ ID NO: 307678 - DNA, 352 bp, Homo Sapiens
  misc_feature (286)..(286): n is a, c, g, or t
tctgtagacagcttaagcattaacagctcagttgagtgaccctccattgtcaccaatgtgacagccctttgcacccacactcatggcacccgagttcttgtccggcatccaggataaatgaggtcacacaaacgagttggagatggtaaatgcaggggattttattgccgatgaaagtggctctcaacaggaaggggagctgaaagggggatgaagcaggaagataatcccctgggagtccggtcatccccagccagactcctctccaaagctatgccattcaagntgtccctcttgaagttcaagccgcttcttcttccgatgtccaaccgtggtcttacaacatccagct

SEQ ID NO: 307679 - DNA, 431 bp, Homo Sapiens
aatgacatgctcatggtcacacaaatagtggcattgtctactgactggccatcacgctgctacttatctttatttttaggatgagcaaagtaggtcatttgcctctgagatttggtgtaaaggctaagatcatcaggtgcctcaattttggccaatgaatgggcaatttccgaactttcttttcctcattccctgtatttgacactgttgacacctcattctttcttgaaattctctgttctttctgtttctgtggctgcatggtccctgttctccttttagtctgagctttattatttatttccttcagggggacctcttttatgttttcactcctttaacactggagcctccagagtctgcccttagcccactgttctttggccctctttcaccttctctttgggacaaatctcaacatttatttaggt

SEQ ID NO: 307680 - DNA, 372 bp, Homo Sapiens
  misc_feature (93)..(102): n is a, c, g, or t
  misc_feature (192)..(192): n is a, c, g, or t
  misc_feature (199)..(199): n is a, c, g, or t
ctctctggacccagaggaagtacaacctctgtagcgagaattgtccttgggaacagaaacaggcattcctccacagtgagtggctccccctannnnnnnnnnatttggaagagaccaagaattgggggaattgatttccagtcttagctgtttcccggaatgtcatctgtgcaggcaggtaggcggctgcgnggtgcanaaggcagcgttgactgatgtgaaggccgcccaatcctcacgtgctaagacccgagtatcgtgtttaattgcagtgtaggcacgtcgccattcaaactcagttctggggtggttttgcataaagttttgccaacgtgttcttttttctgtatgtattaattgcctttttataaa

SEQ ID NO: 307681 - DNA, 409 bp, Homo Sapiens
  misc_feature (65)..(65): n is a, c, g, or t
  misc_feature (347)..(347): n is a, c, g, or t
  misc_feature (386)..(386): n is a, c, g, or t
aattctaaagatgttggttcttgggtgaagtctctagtcttttatctgagagttgtatataagtncctacacataatctgtcaaaggtgtactcactttcagtctaaagatgatttgtaggtcctgtccatattcccacagctgccataaaacatatgactaaatcatattagattaacacaggctggtattgacagcccagtgggaacatattgattaggtcctctttcatgttatttgttatgattttccttctcagtttcatttactggggaagacacaggggaagagatttcactggggaacaatgacagtgcctgtcacaaaaatgttctcaatggtttccnatttgtttactatgggcagtgacaaagaggggttccaantgaaaagggtaggacctgctgtt

SEQ ID NO: 307682 - DNA, 354 bp, Homo Sapiens
  misc_feature (196)..(233): n is a, c, g, or t
  misc_feature (320)..(320): n is a, c, g, or t
  misc_feature (327)..(327): n is a, c, g, or t
tgccatttggtctggttcttcagaagcagagaaggcaacaaggactgaagtggcagtgagttcttaagcaaatgctcccaggagaagcctggaaaggaggaggggaaggacaaaaagagagaggagccaaggaggctaggatttcaggcaaagtctcagcctcagcctgaccttacaggggtcttgagagctagannnnnnnnnnnnnnnnnnnnnnnnnnnnnnnnnnnnnntaaagtaattaaatttaagtgaaattaacaattcagatcctcaccctccttagccatatttccaagggtccaattagccacctgtcntaggttngacttaccattttcgaaccggcacaga

SEQ ID NO: 307683 - DNA, 425 bp, Homo Sapiens
  misc_feature (412)..(412): n is a, c, g, or t
atcacaaagggagacggcgcagtggcccttgcttccttccgtcttggagttgttccagcctccttcccctgctgttggcttatgtgaagttgatacacatgtatcattcattcatccgttcatctagtagacatttattaagtaccgctgattagacaccttgctaacccatagatctaaatgttaaagatatactcctgatggctctcagatctcatgaacctgggaaacaaataatatttcaggaactaaagctgtaggggatacgttcttagccgtaattgtgaagataacccttccgcaagtgggagggctctccagccgcattacaacactgccatcttgtgggggaagtgctccgtaggagccactttcagggaagccttgaccaaagctgcggtaaaataattgnatctgtacttttt

SEQ ID NO: 307684 - DNA, 389 bp, Homo Sapiens
  misc_feature (43)..(43): n is a, c, g, or t
  misc_feature (65)..(65): n is a, c, g, or t
  misc_feature (78)..(78): n is a, c, g, or t
  misc_feature (141)..(141): n is a, c, g, or t
  misc_feature (248)..(248): n is a, c, g, or t
  misc_feature (261)..(261): n is a, c, g, or t
  misc_feature (279)..(279): n is a, c, g, or t
  misc_feature (284)..(284): n is a, c, g, or t
  misc_feature (369)..(369): n is a, c, g, or t
tcctatagaagtgtgccgccatgcccagctgtgcaccggtgtncattgttaagaacgtacacatnaaagcaagtcttngaaagacagcagccagtcagggcagattcctgcagctccgctctatcccatacccacaggatngatgatttctgaccacactgagaatcattccagccacaagtaccagctaaagattagcgagtggaagactgaactgacggatatagtccagatggctggatgggctngtgggtgcacagntggcccgagagaagggcngattnccacctccacgggaaactgggagccactggctgggccattcacatccttactaagggaccgtccttcccaaacaaacagagggantttattacttatgctcaaca

SEQ ID NO: 307685 - DNA, 284 bp, Homo Sapiens
  misc_feature (51)..(51): n is a, c, g, or t
  misc_feature (57)..(57): n is a, c, g, or t
  misc_feature (198)..(198): n is a, c, g, or t
  misc_feature (210)..(210): n is a, c, g, or t
  misc_feature (248)..(248): n is a, c, g, or t
  misc_feature (266)..(266): n is a, c, g, or t
accagacacagccaaccttatgacttggtagataagatgggcagctcaggncatatngtcatttaatgcctcatggtcaggttgtgttctcatttttttacatgtttttatccatttagcccttatataattctatgaggctcatgcttctttttgtcttccattatatttatccttgtcattttctatatggaatgntgatggtagcancacctggctatctgatcccatcttttggggtcaacgtnacaaaatcaggggctgtntctcaacttcaacaaaca

SEQ ID NO: 307686 - DNA, 434 bp, Homo Sapiens
  misc_feature (237)..(237): n is a, c, g, or t
  misc_feature (250)..(250): n is a, c, g, or t
  misc_feature (285)..(285): n is a, c, g, or t
  misc_feature (324)..(324): n is a, c, g, or t
  misc_feature (352)..(352): n is a, c, g, or t
  misc_feature (370)..(370): n is a, c, g, or t
cccatggtatcattttaaatttgtgacttcagttccacatagcctgaactttttcatggtaatctaaggaatgaggaccttcttgggaacacaagtagatccagagttttaacagagaaaaaacaatcacataccttgggaatcccaactctcatgctccgtcaacaggtctatgggccatgcttgagcactctgccatgtggtacagaatgctggctggcaggttcctgggggcangattatggggctnggagtattggggagctagctctctgaggtcccgtngcacagcaattcacaccacagggagtggggaagggcganctggggcattttggaaaaccacttcttnaggcacgggtaccagggnttggatgggttcttgcccacccgggggacaggaaagttcagtttttgggcatgccccggaagct

SEQ ID NO: 307687 - DNA, 368 bp, Homo Sapiens
  misc_feature (270)..(270): n is a, c, g, or t
  misc_feature (282)..(282): n is a, c, g, or t
  misc_feature (285)..(285): n is a, c, g, or t
  misc_feature (335)..(335): n is a, c, g, or t
  misc_feature (348)..(348): n is a, c, g, or t
catcactggcatgtaaatccaacagtcatattgcaacagaatcaaacatctgagaaagaaaaaaatgaggaccaacatagcaacctctaattttaaactgtggaaaatctgcagttgttcaaggtaaactgacgtatcacaggggcaagtatctctgtcataaatttgaactagtttgcttcttacgcgcttcacattttagcatgggccaaaattcaggagatgccatgcaatgtccataaatggggcaatataggatgtttcaaaggnaaagtgctcctnttnccaaggaaaccctctggactttttctccttgggccacaggaccacttttncatccttgttttncctgccgaggtgccacaggc

SEQ ID NO: 307688 - DNA, 111 bp, Homo Sapiens
  misc_feature (35)..(35): n is a, c, g, or t
  misc_feature (55)..(55): n is a, c, g, or t
tacttgcttcaaagattgctgacatgcagcatccngtctctgtgggtgggaaatnatatatagaagcactgagatggataaaaggccagaaatgtaggcattaaaaacatt

SEQ ID NO: 307689 - DNA, 212 bp, Homo Sapiens
cgctagaacacagcactttcaagtgtgcagatttagtgagccatagtctaaagacaaatagagccactgaatcctaaatttcaatcaatcatctccattactcgtcttattggtattaatcctttgaaattatgtggggtgggagttaaagctaataactaattatgttaatgctaaaactaagatttttctggcaagggaaaatcctccca

SEQ ID NO: 307690 - DNA, 289 bp, Homo Sapiens
  misc_feature (133)..(133): n is a, c, g, or t
tggctcgtaagttatagttggcagtagggatcgagtgaagatgtttgctgtatacgtattgaggcaatttagagaaagaaattatcccttgtcgatgacgaatcagtaggcccagttggaaattacaataacncttttcccataataatgttcttcacatgattatttacatgtgatatagttcatatttcagtgaaagctcatttttctcttcctgacttaggctatcttacaagttgcccttgagtttttgaaaatcactgtgtaactgtgggaatatttgctttcc

SEQ ID NO: 307691 - DNA, 102 bp, Homo Sapiens
  misc_feature (37)..(37): n is a, c, g, or t
gagaggtgtgagggtgtggccagcctgggagggagtngggacagaggcagacctgggagaggggccggcaagatgggccaggataggcagaggtgcgcaggc

SEQ ID NO: 307692 - DNA, 553 bp, Homo Sapiens
ctccaagcactgcgctaaggattttttgtgtattcgctcatttaattctcacaaggtatgtccttttattattctcattttgcagtttaggaaaccagctcaggcagtcaagagctttgaccaaggccattcagtagtaagtgacagggctgccacttgaacccaataggtctgaccccaaagcccaggcttataatcaccacacatcacctctgtgaccctgcctgtagaagtctctctccctgcttctaatttgcttctttaaatctgccacgggataagaaacaatatagccagattatagaattctgtgtaaagtaagaataaataggagatgggatgggaggtgccacagacaaagagggagctggggagagggtgtcctccatgaaaatgttaactttcgaacatttacatataaaggcacctctagtaagaagagaaactaaaagacaaaattgggtatgggcagaccccagaggaggatgctggggcatctgatagtccagggaccaggctttttttcaggaaagaagccgatggacagagcggg

SEQ ID NO: 307693 - DNA, 872 bp, Homo Sapiens
ttggtgcttgaaggtaaatgccaggtgccacgtaagtgtgtctaaaacacctttcacttctgcctggaaatccccaaaacacttctgtaagcctctcagggcacatgacgtgaagccaaactctcacttcttaaagctcttgatcccatccaagtgggagtctgtgttggaccctggcgtgtaacagaagtggtcttagggcctccaggtagggtcttccatctgcattgctgatatgctcccagccagggggtcagggaggctggagctgggctttcccagaggagccacatcctcccctggcctaccctcccttatcaaagctgaccccaaaaagaagaagtccccaagaggttcccagctgggacagagctcctgtggagatggcaaccccactgtgactccacccagctttagccatccctcctccaagcaaagcctgatcccgactcttcccccaggagcttctctcccagctcgccaccacaccccggcccacctccctgccttctgtgggaaacccacagcccctgcaggatccaggacctccccacatctctgcagccttactctccccacaacccgctgctccccgctcccaatgcctgagctccaaccacaccgcactgcttgcagttacgccaacacactgttctgactctctcataccatccctccctcctgacatttgcacatcacgtcgctctacctggaatgccaccacttccattcccctaccacaccctctgcctggcaagctcctactcactctaagtcagctcagttctggcctctccctcaaagccacctggttgacaggaagtgactcttgctcaccatcaaacacccctgcctagcactgaccctgtgcc

SEQ ID NO: 307694 - DNA, 722 bp, Homo Sapiens
atactgtacatgacatatgtctgtactggcatgtgtgttatggtgggcatgtttgcatgtgtgtgatcatgtggagacatgcctcatatagcaggctggaaagtgctgtgtgttttgaggtgtgtgggcacatggacatgcatgttggttcaggtgcacacggacacaaggatcacatgcatgtgtgtgtgcatgtgtgtgcatgcgtgcatgtactaacacatgaacccaagcatgtgcgagggcaggcctcacgcacctgcggaggttgttgagcaccatgatgttggcatacatgtagtacaggtagtagctgtagggtgggttctgctcactggtccagacgtccgggtttgggctcttgtcggaaaacatgtggtcgctgtgcttggactcatcatccacgctgtcaaaccccgtcacctgggcaggagaggtcctgagcaccaggccaaggcaggaccaggactcagcctcggttcagcctcccagagctcatagctgccagaggcctgtgggtctgggcccctcaggttcacacctcagctggggaccccttggcctgcctgaggccatattcctcccagggatgaaaagtgggtacaacaccaaggtctgccccttcggagcttccataggtactctggaggtgagacaggagagtgccaagcccctgtgtggtggtggtgacagtggaggaaactgccaagccaagtgaaggg

SEQ ID NO: 307695 - DNA, 645 bp, Homo Sapiens
gatcatactggatttcattccataattctattcgattccattcgatgatgattccattcattcccatccgatgacgattccattcgattccgttcaatgattattccattcgagtccattcgatgattccattcgattccattcgatgatgattgcattcgagtccaaggattattccattccattccattaaatgattccaatcgggtccattcgatgattctcttcgattccattcgataattccgtttttttccgtttgatgttgattccattcgattccattcgatgataattccattcgattctatgcgatgattccattccattccatttgaagatgattccattcgagaccattcgatgattgcattcaattcattcgaagacgattccattcaattctgttcaatgattccattagattccatttgatgatgattccattcgattccatttgatgatgattccatacgattccattagatgatgacccctttcatttccattcaatgaggattccattcggttccatttgatgatgattcctttgaattccatttgatgacaattccattcaataccaattgatgatggttatttttgattccatttgatgatgattacattcgattccattcgatc

SEQ ID NO: 307696 - DNA, 1000 bp, Homo Sapiens
gagacagagtttcgctcttgttgcccaggctggagtaatagctcactgcaccgtccacctcctgggttcaagcaattctcctgcctcagcctcccgagtagctgggattacaggcatccaccaccagacccagctaattttctgtatttttagtagagatggggtttcaccatgttggtcagactggcctcgaactctcgacctcagctgatccgcccacctaggcctcccaaagtgctggaattacaggcgtgagccaccgcgcccggccaatgtccccacttcttatccccaaattattactctttagcgttgctacatttaaatctttcacaccacatgacagtgcctcaacaggctgcatttaaaaaacaaaaccaaaaccaaaccaaacagcctaaaactacttctagagaatgcacacctcccattgattgacacatgcataacgattcagtcagtcccgagggggttacctattcaaattgtcaagccgaattaaagtaaaactatgcattcagacttgcttgcaatcatattgctgcaactctgattctgcagtgattagctctaaagattcacccctcagcaagtttttgccaataatcccagctcttccaaatttctttccttttgtccaaaatgacagcattgcacctttaatggtactattttcctataaaaataggcctcccggcttttcttccaccaccacactgatttaccccagtgtaccaggactgactgaggtcttacaagctgtattgttcgaggtcgagcgtagagcaagacaagctaatcagggctttcgggaacatagccttgctccctgctccatacatgccaggagatggtgagaagtgatgcttcttctgtgcgttattaataagcaagcccgaggcactcaagtgcaggtgtggtgcccgctggccagccagccagtcaccaagagttcttcacatcttggattccagcaagtcctccttctcctaaaaaagct

SEQ ID NO: 307697 - DNA, 1000 bp, Homo Sapiens
gccagataatctttattttacacatttgcaacacggcaagagaattcaccccgtacatcaccatgatcggatcccccacccattatacgttgtatgtttacataaatactcttcaatgatcattagtgttttaaaaaaaatactgaaaactccttctgcatcccaatctctaaccaggaaagcaaatgctatttacagacctgcaagccctccctcaaacgaaactatttctggattaaatatgtctgacttcttttgaggtcacacgactaggcaaatgcaatttacgatctgcaaaagctgtttgaagagtcaaagcccccatgtgaacacgatttctggaccctgtaacagtatcttacgtgctccaaaggctgaccttctggaggctcaccgcctcatctggctgcttcctccaaaatccaaaaccttgcctcaaaataagctgtcctgtgggtgagttggctgttctgtttcattctgaccattctgactctgcccagaacgccgtcccacctgcagacaccctgctgccagaactccaacaggtccccgaggtagcgaggccaagccatgcccattcactcctgcaccatctcagtgtgctccctcacacagggcctgagatgtgtggggcccatggcctggcagtgaaccatctaaaagcattatctatttttcaagcataaaccacgcagagaggctcagatgcatcgctgggctacagaagtggcctctggggaatctggagtatgttcagcctgccgaccgataactacgttccaggtggtgacaagtattagcgtcaactcaggtagatgccttttaaaaacgccctgccagaaacaccctagggaaaactggagtgaagagcgggtctttcagaacatttggtactttctggatgaatatctttttgatataccaagaggcatcaagtcaaagtctcacttctatagcgaggaagccattaacttgctgaatcctaaagggaagaatc

SEQ ID NO: 307698 - DNA, 1000 bp, Homo Sapiens
acttaatactcatttttattgtgtgagtcaaatgagttattgcatctaaaggaaaccagtgaagcatgccatttgactttggattatttcaagacagcacactgagcccacatccactgtttcattaatatttagataggacagaaaagcaaatgttgataagaacaaatactacaccacttaataaataatgaatggtatgaataatggaaatttgatgaatcagatgaatcagtacttatttagttcatacaatgtgttagtcattattctaagtgatttatacctatacacttaatacctaatcgtttaacatgtataacacaatgatttatggagaatgacacattgataatcatattaggtggcattaaaaccatagaaataaaaatgttctggtatataacacaaatgaacacaggaaagttaaataacttgattaaaaagtgtgacttcaatagcaaagacatggattcaacctaaattcccaccaacagtgaagtggataaatgcccatcaacagtgaagtggataaagaaaatgtggtacatttctttaccatggaatactatgcagccataaaaaagtgaggtctccctatgtgtcctaggcactggagtgcagtagctattcacaggcacacttcagcctcaaactcgtgggctcaagcaatcctcccacctcagcctcccagatagctgagatttcgggtgtatgtcgccatgcctagccctgggagttttgcagtaacacccattgaagtgcacaaggcgatgacctttatgtcagatctttcaaaatagttcaagtaacaacggtcatccccagttatgttctcatgtgtttcacggtgctacagagagatgtttctgctgatggtggccacgtggttgagttctgatcaatgagacttagaaagaagtgcctggggagaatggacttctgtaaattaaaaagcaatggcttccaacctaattccccatgacctatcagcttacta

SEQ ID NO: 307699 - DNA, 1000 bp, Homo Sapiens
cctgggggccagagagaggtggttggcagaatcacactcctgctccaaaggtctgagcctcgaggggttttggatgagaatcctagggctggagagtctcagccttgtcacttagagttagatgggaagtcacgtctcccctccgagctctcaagctgataccagctaaccacattttacagacaaggaaacaaaggccaagagggttgaaatctgcataccccaggcctcctgaacctgctctgtgatggtcaaatgcttattttaatttttttttctttttaattgagatggactcttgctctgttgcccaggctggagtgcagtggcgcgatcttggctcactgcaacctccaccacctggattcaaaagattctcctgcctcagccccccaagtagctgggattacaggcgtgcaccaccatgcccagctaatttgtttgtatttttagtagagatggggtttcgccctgttggccaggctggtctcgaactcctgacctcaggtgatccacccaccttggcctccaaagtgctgggattacaggcttgagccaccacgcctggcccaaacgcttattttttttttttaatgaatgtgctgctttaacttgaccccgtggcctgatagtcctttgcctactatcaagctcactgcccgattttctattagcctctcccagcagtctaagttcatcattttcccagtagattttcaaagtacaacattattactattcccacccttgttccttcactcctgggcccctaccttcttcacttgtccgtttccctcctttcagttgaaaacaaagggattggataaacttattgaaactcacacataatgagtctctcctttctagtggatattaatgaagagaggtccctaaaaggaagtgcttaattcaaaggtatgaatttagcaaacactactcaaagaagtgaatcatgatggaagggcttcagacacccaggggaagttggtaaaggagggag

SEQ ID NO: 307700 - DNA, 1000 bp, Homo Sapiens
ctaaaggtcgaaggatggagagaaggaactgtagcttaaaagggggtgaagttctgctacgcaggaggggggtttggggtggcaggggctggagaaagaaactgttcttcatccctggagcaggaggctgcggactttttgcagatccagaatttggcaagattacatttgtcgtcgttccagccattgccactaaattccgcgcagtcttcctccccaacgttgttgggctctcctctgttccaatactgcttgaagctgcaaagcccatgcggaatgtgagcctctgtccccgccagctacatgagctgtgtttctaccttctgtcatcttgatgccttaacatctgccctgcgtgtgtatgctggacttgaatccctctgcatacctgataatatgcctgactcacgatgccttgagttcctgcctctcttctcacaacctgtccttgggtggactccacctattgagtgtgtgattttcaaatacaagccaaccagtctggagtccacacctccagcgacctgccttactgggctcttgtactccaagccactatcctgtactaatcaccccaaggccaggtgtcagacagcgaggggcagcccctgtgccccagagcccaaaaaatgcttcacacttcccaatcctaagcctgttcacctggccttgacctttcctttccacagaaaccataataaaggctctggcccacagtcccccctccccaccactctgactcataacagaccctggtgcttccccaggtggcccccagctgtgatgtgtcctctctctagggatctgtgtatatgagaagctattcacaatggcaggtgtctcctgagctggtggccttactggacctcagaacttcctattaataacattatatttaataacaacctccccggtggcaggctcctcctgcagctctgctggtggaattctaggcacctgccatgctgtctggaagtgggtatgaagaccaccttcctca

SEQ ID NO: 307701 - DNA, 1000 bp, Homo Sapiens
  misc_feature (13)..(13): n is a, c, g, or t
  misc_feature (15)..(15): n is a, c, g, or t
  misc_feature (26)..(26): n is a, c, g, or t
  misc_feature (30)..(30): n is a, c, g, or t
  misc_feature (32)..(33): n is a, c, g, or t
  misc_feature (64)..(65): n is a, c, g, or t
  misc_feature (102)..(102): n is a, c, g, or t
  misc_feature (195)..(195): n is a, c, g, or t
  misc_feature (217)..(217): n is a, c, g, or t
ataacttgggggnanaactctttttngggngnnaccgcctcggcctcccaagtgctgggatttnnggcgtgagccccgcgcccggcctgctccccacatttntatgtgtcagctttagctatccccctactgaaatgcctaccctcccactccaccccaccccatttcccagactcggtcaaaatactatttatnctgcatctagcactgttttttntccataaagtaggcagatgataagtattgagtgaactttttccccaatccagctcaaatgcctttatattaatttcttacctaaaatttttattcataattactcattcattctctatattcccataacactgaatcacatatatttgattttgttttatttgttttatggtttgcattttctttaggttttactttctgtgtctcccataccttaaatatatcagatattcagtaaatgagtgttatttcctatttcttttactaaacagtttttccaaaatccaaaagagatacaatctttccacttgcttctttaatcactaatatatttctgtaatacccacagagtctttttgccacagttgactaccgttaaatgcataggaagaaaaattgggccattaggaaaataaataattattttgattggggcaacattctttgatgatatattaaccataacaattaagcttttgggataaaacaacagaattacttgttaaattttctccccacttttcttttgagagaaaaattagtttacctgttttgtttttacaggtaaaattagaggagtccactaattataaaagtcacaatatcaagatttttgcttctgggaagatgaagtagatgtgttttttcctgtaaagctattaaatacaacctcacatgttggacattataagtaaataaataaaagactctgaaagtgtaaagaaataggcagacaagctagggaccccaggacccaaggaacaacatggtgattaatactctg

SEQ ID NO: 307702 - DNA, 1000 bp, Homo Sapiens
ctcaattggagaatgtataaataaatagttgttaaggctctggagtccatctccctaggtttgagtcccatctttacaatttactggctgtgtgattcagtacaagttactcaatctccttgagttccattatccatgtcagtaaaagagagataatacttatgatatggtatttacttaatagggctattactaagatttagtgggataatgtgttgagcacattacccaattcatggtaagtgttaagtaaatgtttgtaaggtttatgaattaccaaatatatttggtataaaatctatgtaaataggaaactcttttaatagagctattattggtagatttggttcacagggaacaagctttgttgttctagctacagaaattctctttaataaaaaatctgttgcaactaactgcagtctccttctgtaagattccccagagaagaaagcacctggtcgtttagtttaggaaattctatccaaattgattttaccaatcaaagatcaaatgataatataaatggattgcatgccttgtgagaaggtatacttcctatctgtaagaatgttcaagcaaagtgtgtttagacagagcatgtctttgtggttctttttgctgaagaccataaaatattagtttgttgaatttagggtaacaattcatgcagccacaggttgggttctgagctccttaatgtcataaagtttcattggttgtgttaagatatataatattcacaaagttgataaacatttaaattgaggacattagaaattctatcttatcccattttagaagtggaatacttgtattacaggcttttaactgacttatattggaatccagatgtgttatcacaattttagagaaaataatttccttttactacaatctcaagtcctaaatccaaatcatataagacaagatgcttgctctctgagaaaaaaaaatggtcaacagtgatttagcggtctacattggccctgcattcaat

SEQ ID NO: 307703 - DNA, 1000 bp, Homo Sapiens
gggcccgagccgacacatcccttcccccaaaaagcaacacctgtgcttgcagccaggtcaggcccagctgcagcccaggcaggagcagtcgcctttcccacccacagcgctggccacagggctccctgcagggtcagggaccagaccacgcccagaggaggggaggcactggccccctccacaggactggagacgcaagaacaaaaacaaccaagtaggagagagtggagctgctttattgcccttggagcccgcgctctcggaggctgtcttctgtcgccaagggtcccggaccgagtacacggtggcagctggcttagttggtggacggcctggggtaggggagggtggcaggtataagacttctgggggcaccccaagaccccagacacccaagtggcatcttgggggtgggtgggcagaggacggggtaatgtgaggacgaagcgggcacggagccagatggccagtctccaggcctggtccacggactggcagggaccccaggcacaagagctgccacccctctgcccggttttggaaaaaaacaataaaggactgtcccctcaaaaccagccaggggactgttaaattggctcagggctattggttggcccaacactccgtgaaggtgctgggacaaggcagggagcaggggctggggcagggatggagtcttacttggcccactcgacgttgaggatgaggtggtcgtagccaaagccggacaccccggcaatggcacgcgcagcatcctcgcggcggtggaagctgatgaaggcaaagccctgtggaggggcgggatggggtcgggcacgagctaggacaggcgaccctaggacaagtgaccctcacacagaccccaccgtgcctgcctgcctgcccaccttggattggccagtggtcttgtccttagccaggtagatgcgggagatggagccgaaaggccggaagagctcctgcaggtcggtctcacgcgtgtcctctgacaagttggtga

SEQ ID NO: 307704 - DNA, 1000 bp, Homo Sapiens
ttttttttttttccaaattttttgtaagagatgggtgtctcactatgttacccatgatggtctcaaactcctggcctcaagtgatccttccgcttccgcctctgcctgcacctcccaaagtgctggaactacagatgtgagccactgcacccagcctcctgtttttcttttcttttaagacacgggttcttgctctgtcacccaggctggagtgcactgatgcaatcatagctcactgtaacctccaactcctgtgctcaagcgatcctccaacctgagcctcccctccccagtagctgggaccacaggcgtgcaccaccacacctggctaatttctgttgttgttattgttgtcgagacaggtcttgctatgttgtccagactggtctcaaattcctggcctcaagcaatcctcctacctttgcctcccaaagtgttgggattacaggcatgagccaccgtgcctggccctggaacctgcaatttaatgaaaccacccagggtactcatgtgcattttgaactctgagctctgccctaggggctggtagagctacaagatagaaatcccaattctggaattttagagcagagccattgttgaggtctaaactattacacgagagagaaataaacttctgtcttattcgagccactgtatttagggcttctttgctacagcggctttgcctataccaatacagcacctaagcctgctgcagggagctcctcccctcgcctaacagcagtaccttgaccagtggccactggttgggctggttgagcagcttcacgatggctgggatgccatagttgagacgcacagagttctgggccatctcggcctcagggtggcggctagtgaggtggcgcagagcgcagacggcaggctccgtgatgtcgtccttgtcaccagcacgcaggatggcatggatgagagcctccacaccgctgttctgtgtcaccagcgtcttgttcttgctgttgttgcatgtcaggtt

SEQ ID NO: 307705 - DNA, 1000 bp, Homo Sapiens
tcctttcctttctctaccacatatttcccagtaaattaagaagacacaggctatcaccctgaagtacaatttcccaagccttctctggcatcatttagaattctaacctgattaaaagacctgacttcagctcttaggtgtttaggtataaagaatgccatcccccttaaatggtgatttgatcttagttgagtgacatccatactcatagacagttcctatacattcattaggcaagtagacctggaaaatgcctcagtcttcgggtttcaggctggtgatagagctccttcaagtggtgcatagcagtaatgtaataccaaacacgtggccctctgagggagcccttgagtgccctccaccagcaaaaggccctttattgaagctaaatcgacgagggcatttggaatagcctgcctcccaaagacactccagagtgaacttccttctgtttgttcacatgtattcagtcatttgctacagctattctgagttacttaaaccacaaaaatctctttacatatagcacacacatgcacacaagcgacccctctcaaaccatcccttctgtctctctttcacacacacacacacacacacacacacacacacacacacacacagtgttggcaggatgtatcagaattcaaataatgctctggaactttcatccctcagtactaagagcaaaagctgcttagttggtaacctacatttcctgcactgtttccttgctaagccacaccatctcctttgtgatttggtttcctttatgatttattatatcacagtgaccactatatatatatcttaatataaatgttactaaattgtggagccagcaatcgtggccttcagtgtgtatgtgtgtgcgtgcatgggtgtgaatatgttttacatgtatctatgtgggagcttatatacacacacacatatatattccctccttaaaaaatccttagaagctggtgttgcaatgtgaaagcttctttgagcaaaa

SEQ ID NO: 307706 - DNA, 1000 bp, Homo Sapiens
caagatttacccattttttattttttataaaacaagctacaaatagtttccctctctccttcacaaaggaaaaccacacaacaccacctacacacacgatcctgtgggagacaagatgcctggggagatctcgaagatccaaacatctacaggcaggcgccgtctccatgtgtgcatgcttcctccaggcctgaaagtggggccagtgtctcgtgcaaggcccactcagctccggcacgttgagttctctcattggggctaatgggagaaggcttccttcccacctttccacgttggggcagggccaccagtcattcctgagataacctctaggactttctccaggacagcagggacctcctttagcccaagaccccatcagatcctgtcccgagaaggttgtgctcctcccacagggacagtgcttgtggtgccaacgccttccagacccggaacgggtggaggtacttttagggatgtcgggttggaatacaagatgaggccagatttgcaagggtgatctgaggaggggaccagtccagggctacccaacctccctcactgccaccacagctgcttatgggaaggggcgctaagggccacttgctgctctgcctgaaggccacttgaataggcacagcacctgggcagagggagctgcgcctcagaccagaaggctgggcagcccaccctagaatccgcggaagatgcctgtgatgcctgtggaaagctgggccgggatttccctgtagctgggttatcacccctgcccttctaggggaggcagaataggaaacccaagatcagttttacttctggaattagcttaaagcctggaagcccataagaaaacttgagggaacaggaagaacctcagtattgggtttttaaaaaaccaacaaaacaactttagtgttaccaacaaggtgactgacacttcccccaacccacccacccaggcctgtgatagccactaggacaacagcaggagatggaggag

SEQ ID NO: 307707 - DNA, 1000 bp, Homo Sapiens
agcatttggaaaatgttaaattttattatttaacattctttaccattatagttactgcacataagactattactactaaaggtcacttcagagtccctgcaaaatggcctggaattttggcagcacccattttacacaatatttctttttccacaaaataacagacataccaggaaaatcatttcagctaaaaatatgagtgaggtggtagaaatatcatcccttataaagcgcaatgttagaatagtacttgagaaagcaggattgttttaagttccaagatttaacaaacttactgttcagcatcatattcaagcctaaaaggaagataggattttcaagatatatttccaacttctttaacatggcaccatggatgaaactgtttctcagcactgtgctgcttcacttggaattaaggatgaattgggaggagacagtatgacataggtgggtaggttgggtggtgaggggaaccagttctaatagtcctcaactccactccagctgttcctgttccacacggtccactgagctggcccagtccctttcactcagtgtgtcaccaaaggcagcttcaaggctcaatggcaagagaccacctataacctcttcaccttctgctgcctctttctgctgccactgactgccatggccatctgctatagccgcattgtcctcagtgtgtccaggccccagacaaggaaggggagccatggtgagactccaattcccaggccttaatccttaaccctagacctgttgcctctagcatcatttatttatctacctacctaatagctatctaccagtcactaaaccatggtgagattctaaccatgtctagcacctgatgctagagataattttgttgaatcccttcaattataaacagctgagttagctggacaaggactagggaggcaatcagtattatttattcttgaacaccatcaagtctagacttggtggcttcatatttctatcataatccctgggg

SEQ ID NO: 307708 - DNA, 1000 bp, Homo Sapiens
cagatatcatttttttctactttgggagaaaaagtgaggagatagagataaaaatacaaagaaaaactagcgtaatcccccaacccatacttcatttttaaacaaacaggccaggtcctgccaggccttcttccccattaaatcccaaggccagctccagtcccaaccccaacccctgcatggcgccgaaggaagcttcaggcttcgggcaagagctccagcccaggcaggcaggtcgtggccctactgccagagcacaaccttcctgccctggtccacgctcaccatgtggctcccggagtagcaccaggccacggcgttgacggcagcgcaatggggtccctgtagtctgctctccagtttcccggtgtccacatcccagatgtaaaggggcccatcacaggagcctgccagtgcatagcttctgtccgggctgaacacagctttggtccagtcagaaccacacttgaagccatcggccctgaggacagacagggctggggtcagaacagaggtcatcactagtctctgccctctgcagtgagcttccagagcttcctctttgtcgaggggtttggtacctcagcaggacctggtctggaggggcctccagggagggctccaagagggtctattacaggagaagagaggctcagctgtcccagcaaaggccacagggtcagcaggcatgaggctggtacctgaacacctggcggatgttgctgacacgcaggtcgatgaccttgagtgtgttgtctcgggaacagctgagcaggtgcagttggtcgtggctgaggctcagggaggtgacccggccctgcacagggatgacctgggtgcagtggggccccctgctgtcccagaaccggatcttctggtcattgtggccactaatgatgatatggtccccacacaccacgtcattacagtaggaaaggacattgatggtcctggagcctggggaccaagcagcagaccccagggcctcagaggagggttg

SEQ ID NO: 307709 - DNA, 1000 bp, Homo Sapiens
gaagtatctaatttataaaatgtcacaatttgtgtcattgtaaagaggttgatctcaaccaggttgtaacaaaatttccacagcttattccaaaagaaaattttaatacaagagatcttaaaaaattaaacacatttgtttaaaaatcctattatgtaaaccttaacataagagggtagttaagataatactacaggtttcagggcgtttccacagacttctagaccttatgtacacacagactatcagactctagatatgtggcctgcttacccttaagggggtgcactgggagccgatcatgggcgccccctagtggggttaccatcgctcctccattcaaaaaaaactcgcttctctaagaagtcggtgtcaggtgagtaagcgttctacctgacggctaagccagggatgaagagaggccaacattcttcttaggatgagtcctgataataaaaattccaattagctctacccccatccccttcactccgggaaattaatggtctctggggtcactgagcgtttagtagctctgggtgcaaatgtacgatccaccattccgtgtgctactgtcctcagtcccaatttttgcaagggcatcctctgtcttacctacactgacagtgaatgagtggtggttccccttgccgttcatggagaccagcggcagagctgagaaaatttgaggggaagtgggggaagcctgggtgagtggttttccggttaggatgggaaaacacttacgcaccagtaagaactaaatccctgggcctcttaaaccaccagtgaatctagaatcttcggccagcagcgctgctccttaatgtcataggctcaactatcttattaaggaagccagatttctttttcacttctctatagaaactagctataaggaaggatacgcaacttggttgctgggatttagaagtaactgtctactccatgacataattcagagtacccaaatcgggcccataagatggcaatggctcat

SEQ ID NO: 307710 - DNA, 1000 bp, Homo Sapiens
cagttctaagacatttcactttatttaaaagaagccaatatacaggatataaagggcatgatatttacaacagtacagtaaacaggttggtttccggtaggatcagtagtctttccatgagtataaatcccccccttccctgtgatgctagacccagctggcagacaacagcaacggtggggcaggatcatggggtataaagtctccctgggtggggctaaaaatcaggtagatgcaaaaacatccacaaggggtcttgcagggaagggctttgcctcatttctttgagggcttgggagggaagggtcttggtgagggatttgctcagaactaacacacagcccaccctgagcctggaaatcatccattcatagaaaattcccttccagagagaatctggctttacctgcacccacccagtcccctccagactccccactccaggagagagctcttctagagccagagcttggtgtctcaagggggaagacccctgtcctaggaaacccccagcaccctgatccctccccccagggccctggggggaacatagcaaggactgcagcccaggcttggcctggagtagacacagccggggctgggctatgagcatcttaagccatttccacttctgctccagctgcctgaccacctgggacccgcaaaggcccaggctccaaggaagtcgtgtgctcccactgtcacccatgctctgctgcctcccaaccctctcccaacgcaactgggttggaaatggatctcggcagaccagagtcagagtaactaattaatcagagcctatccccagagcccagcttgttccctccctaatgcgccttgtcccttcccccacccaccacatttctgaatttcctgcagcccacccaccccctcagatccccaccccaagacttccaaggagctgaggggtcagaggagaggagaatggggtgaagtgggacctacactctgctgaagctgctcatgggtgtggatgacc

SEQ ID NO: 307711 - DNA, 1000 bp, Homo Sapiens; identical to SEQ ID NO: 119853

SEQ ID NO: 307712 - DNA, 1000 bp, Homo Sapiens
tgcaggcatgcaagcttaggaaaacggttcttgctggagatataaatttgaactcatcagctatgggtggcaattgaagccatatgcatcagagtactttggaccgcaagtaattgcagaaatacaacccaaaaaacagaagagatttatcagctcagaaaaattaaagggcaccagaggtaaggtggtggtcagtcttatttcacttggggctccagccttgcttttctgatgtcctctggcctctgcatgccttctctgtgttgccttctcctctgactgggggctgatggttccattagctccacgcctcatcaatgggtgcattcaacaatgccccccagaaaagagaccatattttgaaatgtctctcttaaaagaacaatgcacagaagccttttccaggacactgaccatgggtcccatgcccatttctgaatcaatttactgggtcaacagatcactgcggttcctgaacctgtcactggcaaagaagacaaattagcctaagaccaggcccacctcccaagctctgggtgggcccactgttctaggcacatgagggagagatggacggttgaatgagaactgacattctgtcaggaaaaggaaaaagatagctaactcacaaggcacaccatactgtggaagtggatgagcttcccaaagacaccgtgaagcatgagaagaaaagaagggctaggactgaatccagaaaagagtcaagcttcaggggtgtttgaaaaaagattcttgggtcatttggaaaatgcaccttaacttttgtttgactctctggttatatcaagcagggttattttgcatgctacagagtgggttgagaaaatcaacacaggggctgggtgaggtggctcacgtccataattctagcactttgggaggttgaagcaggaggattgcttgagcccaggagttggagaccagcctgggcaacataggaagactgcttttctacagaaaatttaaaaaattagctggt

SEQ ID NO: 307713 - DNA, 1000 bp, Homo Sapiens; identical to SEQ ID NO: 119855

SEQ ID NO: 307714 - DNA, 1000 bp, Homo Sapiens
cactaaatgagcttaatctttacaaaagttacgttagctcaaaagctataaaatcaaagttatcttaattctacaaagaagggagagggtcttcatgccaccatttccttagagcctcatctttttcatccaatttggccacaaatcaaatttctgtgtgcccctgttttcaagagattcctcttgcagaagaggccaagtataaacatggaagagtaactgcctaagtaggaaagtgttccataataatgtgcaaacaaggagttctgagttaatctctggaactcgacctggaccttgatcttgactttgagcgagatctagaacgggatcttgaagtagctctttttggtggaggggacacagaacgggcctttgagggtggaacaggtagcggcgaattggaacgggactggctccttgatctggattttgactttatatcaccctttccattttctttgggggatcgggaccgagacctgcttcgagatttctcatactcatccttagatctgcttcgagaatgtgaatgggagccccgatcagacttgggcttagatttgctctttgatctagatttcctgccttttgatcgagaacgtgatcgacctttgctccgcgacctggaacgggagcgactttttgagatacttcgagatctactgcggctgctcctgcgactcctacttcgtgaccgtcttctagatcgagacctggatctgcttccagagtaagatcgcctatggcttgtgcgtggcttatcttcaataagcctaatatttctgccatttatttctgtgccatccagtttgtccaaagcacgcttcatgtcagagtaggagcgaaactcaattacaccctcatttgttcgttccttgtgggcatccgcataggttacttcacctgcttgtcgcataaaatcctttaaatcttgccaactgcaccgactagaaagattttctacaataagcctgtattctgtacgaacaggtggtcc

SEQ ID NO: 307715 - DNA, 1000 bp, Homo Sapiens
gtttaaaggcatggctggcgcaggaaggggggctccggggatctccaggtagggaccccggaggtgtctagggaatgcaccaggtagggtgcggggccgagtagctggtgcccgacgggaagcttgcaagacgctcggcttcctattgcaagaccgcacccctgccccgaagcgttgggacctaggcagaaggaggccgcagcgtcactgagcccactggcgcccctgcagtgaaacctcgcagccgccaggaggcggtggccgccccccccagccagcgccattggcccacgcccgggggcggggatttccgcgtgtcctcattggtggaacgggttggagtcgctgtgtcccggccccgcctcggccgtgagacctccagggggcggagcttgccgctgcgctttacggaaacgagtggccttcagctctgtcaatctggagctggaggcctcaaagtggggaggaggaggagggtgggataaagaggaaaggagcgtggaggacgtgtggttactcaaagaacagctaagaattttgcaatcggcctgagcggggcggtggtggggctgagcaaaaggaggaggagccaggagacattgggaatggacccaggagttccggacgcccgtcttccagcgcagcctcggtgggagggcggggcataaagtcccgccacgcccccacaatatttacatatttatgaggaaccatcgagatctttgaagaaccagctagcctagaggagccagaacatctcgctcctcgcgcgtttccgtttccgctaggactctggcagttggtgagcatcatggcaaccgttgtaagtgtgggtgcatggagggtgaggagcgagctagcagtctcgagtttgagagaggaggatgctggaggccctgactggtgggtctgagggaggggggatctgggggttcagactcctgggtctgaaagaggaggaagctcggccacccagatctgggggagaaggggacatggg

SEQ ID NO: 307716 - DNA, 1000 bp, Homo Sapiens
agctttaaaggaagcagcactagaattatggctggaagcctgaggacctaccccagaatcctttgcttcacactcagcagtgaccattatcatcatcatcacaggcatggaagagatttcaggttttgaagattatctgttttctagagctaggcctcattatctttctggatgtctgggtttcaactacagccaaatagaaagaaaaggagtgaaacaccaggaagattgggttctgatcttgtgtaactttggacaaatccttgcccttctctgtacctcatttggacatgtgtgcaaggagaaggttagaccttattatcttaaaaggccattttagctccaacatcttataagagggcttagccaatattaactgtaacttgtattacttgcccttgggactcagcattgctggcttaatggctttgaatttggtaaatggtttggagaaggcttattgaaagcatctcacaaataccttccttctgcagacttaggaggacctaggcacagactatttctgagggagaatacagagagaggaaaattccttgtcactgcttgtttttctacattttaaaaaccactgccaccaacctggggaaatgccactgatttggcatcttgaaaagagtataaagacttttgctcacagtgctatggcttttattagatttctggggaaagaacagcaaagcattccttattatatatcttcaggtcaggattgtattgcttttggccaaaggccattgcaagacttataaagcaaagggtagattcaatgtgatttttagaagaaattgtaaagatcagaacagaactaagttagaataagtctctgagtgtaagaattgtcaacattatagcattttttcctaaaaggaataatcattctttgctgtttgaactagggtctacaatagcttatgcttcagtgtttgaataattcaatgcaaatagacacttgaaatatatgtctgcaaaatcccataag

SEQ ID NO: 307717 - DNA, 1000 bp, Homo Sapiens; identical to SEQ ID NO: 119856

SEQ ID NO: 307718 - DNA, 1000 bp, Homo Sapiens
ttttttttttttttttttttttttttttttttttttttttttttttttttttttttttttttttgcaggcctgtgtgtcactttcaggcccttcctcatttattcataatatgtgtagccacgaggtagcatttcctttggcatcctggagaaacatgtctcacttagggttggacctgttagttaatagttctgcagcttctggtatttgtagtctgcccgttgatttacaaaatgcctcactgtgattgtcgctacagtcaccacattcagagctagaaccatgaaggaaaacagatgcacactgttgaaaggctggtttggagtttcttccgcatgtgtttcatgctgaaatcctgaattgccacttgcacttcgatcccttttcagacgaatgggtcctatgatggaatctgttttccatttatatgaagaaatgtctcgtttgcttctggagacacaaccttgattgcagcgagactggtggtcactgctatcacatatcaaaactttacactgcagacacgcggagctcatacttctcaagaatttaaaggcattaaactggaatctcccatagtgtccaaataagggatacaccttacaagtttcatctcgactacatccactcttgattaggtcgtaggttggagatgcaaagtcagaggtgggagaggctctacaggtatcaagaaacaccaccaaatttggatctgaggtgtgcagactaacttgaacaaaaagagtttggttcaaatccacataatatggtgattcaagtatagtcttttcaaatgaattggattcaaaaagagccatgctggtgttatatttgcccagtgcattttgactttgtattacatcatcttctgttatgtatattatctccactgtagaattatgtcccatttcacacttcacaataatctggagttgtttctgacgggtgatcacttcagaagttgaggatgcagaaaaggtgattatattggtgtaagta

SEQ ID NO: 307719 - DNA, 1000 bp, Homo Sapiens
gaattccgcggattccgtttacttccaactatattcctatagaaaattgctacttcatagggcacttcaacacattttgcctccaaagtcaaatgaatttggtagtgcagtaggggtgagtcccaattctttatgagctgcaacatttttaatttaattcagtcttcattgtttcttttccaaaactttcttcacatagtgatactcaatatttcttgtttattttttaaactatcacttaaagtgaatacataataatgtgatattagcataacttagctattgttggactaatatttatccagcatatttattactaaaatatccgtaaaaaaaaaaagagcagatgctttagagaccttaattccagtgctggagtttgagatttaccagttgtctgttttaacatttttcactttttggaaaagataagcaacaacttgctttaaaaatataattggtgagtagcataattcaaaattgagaaaaaaatcatcatatacatacatgttgaaattgaactttacaatattatttttggaaacctccagaatgtctgacaaagacctaattgtagcactgtgacattatctctttgtgcatgcttctgctaatgtaataaatttgggttccaaattatttaaaaagtcaaggccatcttcttcctgcttttcactgcagcagcccacagaaccagctggagatcctcttccctcatagttataagtgaggacataatcttgggatggcatgcggtcttcattctgattacatcgatgcaatttctgtaaaattttttaaaaaatgaattgcattatagttttaaacaacttaaatatatgaacataaaatttatttttatttaccttttatgtttaatttttaaccagtgtgtcctctaatggattcctacacacagaaaatgcaaatgattggtctatatcacaaccataccataaagtcagtatagtttacatttctagtgctccatataaataaa

SEQ ID NO: 307720 - DNA, 593 bp, Homo Sapiens
ggactcaaagaggaattttattataagtgtgagagatggaaatgggacagttagggtctctcagtttcattttttctccattctttcaccattcttctgtacaaattgaatataaaaattcattttagggtcctacgaagtgttctcttattcctttttactctacaggttggatgttcaaattccttcagagaacatgcattgaactacattcaaggcagtgtagtagatactgtgagaaatattgtaaagcctcaaatgtgactataagtaatgaaaccagttccacaaaccacatgtcaaaattagtcttattacttcacaatcatactgtattctagccacatcccaccctccaagaagaaacacttcagatgatagaaataacctatatttttcacaataataaccatactaccaagaattacaaagaatcaaatgcttggtactgaagtacttactcaaggaattatttttaaaagccatctgcaatatgtgtcaagagccttaaaaatattccctttctcaaccagtgttcctcctctaaatcccagaacacagaaaatgattcgagtggctgctttctcagttct

SEQ ID NO: 307721 - DNA, 1000 bp, Homo Sapiens
tctctcctccctggagttaagtcaaatgggatcagggttctattctaaggggccctgtccctccctgcctcacccatcgggaagattggctgtgcatcttgtgggcagaggaggagggctgccttaacagtcattttcatggactatggacaggaagagactgacatgcccaggattaaagagcccgggatgggctttcagactttgaaacaagtactggcaggcacacccatcagcggtctgggctccaaatgttcatctgtgagctggtggtttggaacttagaatatatttcctaacccacagaaataaatgtgataaactaaaacatctgaaacgaaagctgtagaacacagcgttgttaagtgctacacgacggcttaggggtggggagggggctgacaatgagactgattcgaagttctttctttattttaaccttctttttggttcttaaggaaaactaaatttaaggaaagaagaacaaggagcagggagatccttgtacagattccacggaggtgtcttttaggcacttttgaggtctttagttttgtttgttgttcaattttaaaatacacagtagagatgagatctcgctatgttgcccaggctggtcttgaactcctggactccagcgatcctcctgcctcagcctcccaaagtgctgagattacaggcatgagccactgcgcctggtccaagttctttagaagttgatgacatgggctgggcgcagtgtcacatgcctgtaatcccagcactttgggaggccaaggtgggcggatcacctgaggtcagagttcgagaccagcctgatcaacatggagaaaccctgtctctactaaaaatacaaaaattagccaggcatggtggcgcatgcctgtaataccagccttttagaggctgaggcaggagaatagcttgaacccaggaggcagaggttgtggtgagctgagatcgggccattgcactccagcctggacaacaggagcgaaac

SEQ ID NO: 307722 - DNA, 1000 bp, Homo Sapiens
tcatccccaggtctgaccagtttcaacaggctaggtggcctggtcagactttatcattggttaagtgtgtggtaacagtactgtccctcagaatccagcaatccatactatagtaggtgttgggctggtgaataaaatagggtatggcattttttaggttctttgtcttagcacaatctcagtcaaatgtcagtacctcccaagatgaggtattttttttaaatatactatcttggtcagggagaaaggcagtttcagagccttttacttgtcttttctcactagttgagttgttactcaacaggtcaaggatcccatgtgagggttctgcaaactaccaagaggtccactctaattatacatttagggcctggggaaatggccatcagctggatccacggatccagtggacccactgtgagctagatctaggcaaggacttcctttattagatggacttcatgcatggacctcatgtgtccccattctagaagagttattatggcccactgggtccctgggtatcaatgtcagttcagaccctgtgaaaaggctgaaaaatgttttcaggtttttgagaagtctgagtattcttcccaatgcatggttacctcagtaaatggccataagccactttgagaaagatctggcatcattactactgagtatagctgcttcagagttgcagggtccttactcacagggacacaggctttccttcagtcaatggagtttggccctgagaagtagctcaggtatgaaaaacgggcaaaatcaaaactttttattgggccagttgctctccacctcccaatcaacccctaaatttatactgatatacagtgtatatacattaaagaattcctgtgtttgctgcccctctgtcttggaaggaagaccttggtcctttaaccatctccatagtattactcaggcagggccttcctgtgccacttgggctttgccgctcattgccatagttaggtccatcttgcttctg

SEQ ID NO: 307723 - DNA, 1000 bp, Homo Sapiens
tttttttttttttttttttaacatgcacaacctgccacttttaatcagaagtccatgtatgaaatccaggctggttttggatgttaacatggagcgaatgggatacatcaaagaatggttggctgcttgttttaaagaggtcccactggtgacaggatggtagtggcgatggcagtgaggacagactggtaaagggaaaacccagaggcttgtggggagaaagggcttttgtagttaggaagagacagaggtaggcccctcagccagctccagcaggatagagacaacaacatacagcgcacagagaattcgtgcctcagggtcatagtccatgtcaggaggactgctggccagctcatcccagttctgctccatgacagatttcacctggtccttcaacagaggaagggtccccttctccagggcctcagccacaaactgctgctcttcagacagctctagcagggcatccaggaagtccagaatggcttttgcacgcgcttctaccaagaccccagcagcattaaaaaggctgcttaggagaggcttgtctgggtcctccatgtgtagctccccggaaatcaggacctcagatactctttgctctagatcctgccgaatatcctccttgccgaggcacttagcgagggagtttagcacatcttttctcttctcctctgtcaggtccttgaggacactctccatgtcctccaacttctccttcatgtttctggaatcctccgaacccaaagactttcctgtagaggcagcaattgagaacctgggccacccagcccaaaaggttttatttctaaggctctgttatttgtctgactgtcttctggagaccacctctttgtatcttcccttcttccagtctttccgtgttaaaattaagcatccttcttccaagatacctaccatcattgcctcccactgaccccacttccatcttccatctccccagctcacccccagtctagtcccaaccccaaattct

SEQ ID NO: 307724 - DNA, 1000 bp, Homo Sapiens
ttttttttttttttttttttttttttttttttttttttttggactcgcacacaaggacggtttattggctagagagcaaacgcaggcagaagtaaaaacaccagataaaaagtgagtgtggagaggtgaaaactgcggccgctggacttggcttgagctagctgagcagttccaagtaggtgacagggaccttgcccttcttgttgcctctctcgccaatgagccagtcagggtccatgccaggcaggctgtaaacagtgatgagctcatcagccagcagggccagctcactgctgtcggctgcctcgtagtcatagagcacccgagctttgcgggtcccactggcagggggggccacctcttccaggcagagcgaggcctcccccggaggggccaggctggccacagagggcaccacaggcatagtggccgcagcagtggtgggtgaggtgctgctcaggggtggggaggcgggctctgtggtgcccacgaaggtgccgggaaatctgcccagctgcttctgcaagtccagcatgtggcggtagcatgtgcgtagtaggttgtctgagacttgacgaactcgtggaggcagcgcaggtggttcacgtgagtgctactgattccctccagcaagagacgggtcacttctgcttgccggtcaaactctgtctgggccacgcggagctcctgctcggccttgtccacttcatcattccagagcgcggaggcgctggccgagagaatgtaattacgaggtctagtctcctgaaagtcaggcaccgtcgtggctttggcttctgcagccttggccttcttcagcctcgctttgcaggcatccaagtccagacgccggttttggaggagccgcctctccttcgagatggtcttccagtccccctccaggaagttgcgcaagggtgtgaggaagctgatggaggccgtgtggataaaatccctctccgcgggctcccagttgcttttcaagcttctgccaccttga

SEQ ID NO: 307725 - DNA, 660 bp, Homo Sapiens; identical to SEQ ID NO: 119857

SEQ ID NO: 307726 - DNA, 342 bp, Homo Sapiens
agggttccaggtgtgcactcaccccgggcttcgaggggcgcgtggagtctccggggcccttctgcgaccacgggggtggcggcctcgcagtgctgaggggccgggttcccaggcaatagccagggcgccccgaggcacgccacgcctccgcttgccgcgcgcagaactgcctcagcaagactctcgcagtcccctcggctgggccccaaaactcgagtccgcgaggcaagaagcgccaaagttggccacccagaggccgcataactcgtccgggtactaggaccagcatcgccatgagcctcggagaccgggtctcctttgaccctccccgcgatttccggt

SEQ ID NO: 307727 - DNA, 1000 bp, Homo Sapiens
tctactaaaaatacacaaattaggggctgggcacagtggctcatgcctgtaatccttgcactttgggaggccgaggcaggtggatcacctgaggtcaggagtttgagaccagcctggctaacatgatgaaacccatctctactaaaaatacaaaaattagctgggcatggtggcgcacccctgtaatcccagctactcaggaggctgaggcagcagaatcactggaacccaggaggctgaggttgcggtgagccgagatcatgccactgcactccagcctgggtgacagagacttcgtctcaaaaacaaaacaaaacaaaacaaaaaaacaaaaactcaaattatgttctggatttgaaagggagcaggcggctccgtcccttccctcactgaccacctgggctcccattatgccctgagcttcctgcatcatggccctgagagctctatgtggcatctgcccatttctgtgatggtctccccaacccaggctgggccacgggcagggaacggatggagctgcctgctccctgcactgtaggtctcagctgaacaaatgctggagacctgcagtggcaaaggccacacgcgtgaccagacaagtcctcttcccctgccggggcctcagtatcctcctctgtgaaacgggccccatgggttctggtgccaggagaaggacagggacctggacatgaggtggcccccgccactcctgctggcagaaacggtgggagccaggcacaagtccacctgcaggcaaggctgtgcgttttgttgttggtttaatttattactgtttgacatccagtgacactgacataccctcgccgggcccccggcgagtctgacctgtccaataaaatacagtaggaggagtggacggtgacgcacatgcatccacacttaactacagtgactccaaactgcggcgcaacagtactgccagcaacggaaaagaaaaacaggtatcgtgtgttccccaattcggaattctctctct

SEQ ID NO: 307728 - DNA, 1000 bp, Homo Sapiens
agtacctgctgtaagtcttcactttcagattttagttgggccacaagtgctctcatgcagcctttcatagagcatagcgtagcctgtaaattaaatacagaatagaggatcattaaaaagacaacttgaagccaagctttatttttggctactaaatgtctaattccagttttcataatttggttttaatcataactgatacttcactcataaaaatctagaataagattacctaaataaaagacaaatattctcctaattctttgctatctgttcttcctttgtcaaactagagaaataaagtgaataagtggtgagaaatgataagcaacaggttttagagtaaagcctcttatttggatggaatcaatgtgtgtgtaacacttgccttggtcttaagaatttttagatttttaatcccattcctaggaagtgttttatcttttattttttaattctacacagttaaaacttctctagtaatggatcacagaaatgatccctacaagtatattcttatgaatggtgtttttaatgcaattacataaattcactactgtgttccatctgtagatgtacctttgcctttgtttaggcataagacaaacaaatgagtaaagataagcgaatgtgaagcacaggtttttatcagtcattgtttaatgaggagagtgaaaaaaaagaaaatcagtaaaatgtatttgtatgaaagtaaattaactcatacctgagctatcttaagaaatacatgttataaaaacataccttgttggctacatctccaaaagtcaagtttgtcaaagccattccagcatatcgtcttagtgtaatactgtagtggtcattagtaagcccgtacatttcacagtccacttgcaataattctgcaatggcctgtagtccccctaatttaaaaagggcaagaggaaaaagacaatcatctaaaataaaacaaactggtaccaagttggtaacttaaatactaggaaaaaaaaactca

SEQ ID NO: 307729 - DNA, 1000 bp, Homo Sapiens
ctatagcaaacatgctgccctcttaataaggaaaaaaacagctactacctgaaatcataccacacaaaaacaaaaatgaacattacgctatcaaaaggaaactaaatagtaggtctgaattttaagtgctgcagtcctcaacatttatatataggtaataacattaacaacctcaaatatttaaggcactatgtgtaggaacggtttacaatgcagctgagattattagaacaacatttaagagcaaagtctaggcaacattttgcccatgcaaaagacacatgcaaatgtaaagaacaatagctcaatttcttaggtaagtgacccaacatttatacactaagacacggataatacaattcacttgtatgctgtaattctgacatatgtgcatctgttgctctaagtctgtacacagaatggcttcccaaatgtagacgtgtcttgcactagttagaaggcaatttataaaaaatagcaggagcaaaactggacttctgctcccataagtcacctgtctagagttactacataagaagataacatgaccaaagacaagttataccaaatgtgcaaaacacatcaaaagtgagtttttaaagctcaaagttgtttaaattgcacccaagtctacatgattccaaaaataattttcttgtgccatggctaatattaaataccatgtttttatttttaatcaaatgtttgtatcattgagcttccccaatatactgtttttcacatatatggatactggctgagttttgttggactcagtggaaatccagtatatgcaggtgatgctgcaatgtaagaatgtggtgggaagattggtttgtactgagtctgatgaatggttggggatggtaacagacggggatttaagcccactgggacttggtgaactatgccactgggatgggagatattataagttggatgctttaacataggtcttgaggtacacggagaggctaacaggtgggccactggtgcagca

SEQ ID NO: 307730 - DNA, 1000 bp, Homo Sapiens
cctctggctctgccactcactgtgcctggcttgctgcccagccctccccagccttctctcctcctacctttcccacttattgcctccttccaggcttgtccagcatgataaactctggtctcagcattcacagcctcctctatctctcagctgtgtccctggtcatgactctgcttgctcttccctaaagcaattaaaataggaaaatctgacccttctcacccaggaggcaggtcctctcctatccactggagacccagagcaaaagctctctcctcccttcatcctccttctcaccatgtgatttcagacaagtcctttcacttccgagttttgccatgtgtgcctgtgtgcatatgtatgtgatgtacagacctctggagccatttcaccacagtgcctctccactcccagccagtgccagggcaccccctcagctgctgcaggatgtgtcaccagaaggagagagttaaaggggaagaaagcccttgagtaggagccaagtcatctgaacgcacaccctgtgcccagaggaggaggggcaagagttgctttccatgaagagtgcacctgatgagaaggcagctccagaggactcaaaggaaaaccaagaatcaagagagaaagaaacgtgcagtccttgcctacttggggagggggaggggtcgtaccacaaactccttggtcaatatagggacctgcttctccgtgcgccccagccccctctgcaccatgcactctcctcccgggcctagcgcctgctacaactgtggcctccactaatttcgggggtgcgaggcggtggatgatgcccaagtgaagccgttcaggcctcgtggcagcaccagatcaagggcgaggttgcgctgctcgtcctcagagtacacaggccggtagcccagcagctgcagcgcaccagcgcacagttcctgcacgcggcggatcttggcaaagggcagcgcatggcgccaggcctgggagacgttgagcgcattcctgg

SEQ ID NO: 307731 - DNA, 1000 bp, Homo Sapiens
cctgtttcccagagccttgccctggtggctgtcgctcagtgatgcttgggctggctggaatcacagctctgaccccgctcattcccctggagcctctttggaatattccctgggtggctggctctggaaggaagcaaaggaatgcatttgccctgttgtatgtctggaaatctaagtagcctgagtgcctggagattagcctgtattctccaagctgagtttcccaactctcctggctaggaccccttgtattagtccattttcacactactataaagaactgccagagactcttttccaatttgccctttcctttatgaaggaaagaggcttaattgactcacagttccacatggctggagaggcctcaggaaacttacaatcatggcagaaggcaaaggggaagcaaggcaccttctttacaaggtggcaggaaggagaagtgccaagtgaaggggtaagagccctctataaaaccatcagatctcgtaagaactcactatcatgaaaacagcatgggggaaaccacccccatggctcactgatctgcctccactttctagggaaagaatttgcaaataaggaagttgcagacaactcactgctggcaccgtgtgtgaactgcctacattctattaaggaatataagcttaaacacatcctaaagcaattatctgtgaatttgaaaatcattgagtagttctattatttttaccttgaccatatatggccagttacttaaattaacacaagttccaggagtatatcaccaataataagtttctttctgtcaagcaatggggggaggaagtggtgagtaattcctgcctctgaggtagccatgggatagaaatgtttcccatttcaacccatatggatgcctgccttaaatgctagttgttagaaagatgtacattggaaaccctattgcaaataaatgtcactgcaagttgtagggttaaccaacaagcgactaaattgataatgatgaagctaaatt

SEQ ID NO: 307732 - DNA, 990 bp, Homo Sapiens
tttctcaaaattttaaggtagccaattaaaaggcaaaagaccaactgttacgcctctaggacagaatttttcaaccttggccagataattctttgttttggcggctgtttggtatattataggaggttcagcagcatcccaggcctctactctctagatgccatagcacctccctcccttcagctgtgacaaccaaaaatgtctccagacattgccaaatgtcccctggggaggagaatcaaccctggttgagaaccatcactccagcagaaatactgcatgaagacgagaagcttgagacctctaggaaataggtgataatcaaatgacacagcataatgatgacaaacaaaatctgtgcataaaaggggcaaaaagaaagttccccaggcaggtgttctttgttcctgacctgactctgccagcatcttcacagctttggccttggccagttccagggccgtcacccagcgctgccgctcaacttctgaactagctttcagatggtaggtctgagcacccccattggaaatgatgaagttgcaggagtcctccacggtgatgttggctgtggcgaggttgatggtaccacggcaggtatgtctcatttctgcctttgatctgtaataacaagacaaagacaatttaaacagaaagttgacggtttatcctttatcacattccatttcttttcataactctgagctccctgaaaatatgacagtcttaggaatcagcaagttctagtccctcaaacgggtccctaaaattcacgaaacaattagtggggatttcccttcagagcctataagtgttgtttctgagtcagattttttttttttttttttgctttgctgtccctcttaccattttccttttagaaataggctttacaggccgggcacccgtaatcccagcactttgggaggccaaggtgggcagatcacctgaggtcaggagttccagaccggcctggctaacatggtgaaa

SEQ ID NO: 307733 - DNA, 1000 bp, Homo Sapiens
ctggaattacaggcataagccaccaccctggccataaatattttttgttaattttacattaagtacaatatttaggtccaaacttcaaaagtctgttgaaatccctaagttatagcagccaacaattgatatgaaatggcaataaaaatgtaagttcatctgcttcatgagccttaaggaaaaaaactcagaaccagacactttttagccccttccaggttagatccaggttttaaaagttactcctttgagggagtttggctgcttttgagtggaggtgacttcaggcttattctctctggctctctgctctggtcgtttttagacatagtaataggttgtgacctgtcttcacatcctaattgccactgtctgttcatcccaggaatcctggctttcatccctttctgttcactgtccatgcatgtcatctttccttctttctgccagggacagatgggttagggattgtggaattcaagtaaacgtagagctactatgagttacagattgactgtgttcctgtctttaataaatttgccaagagtggttataagaacttacacctgatgaggcaccaggctcctgatgctgtgtaatgtcacaaaatacccctcactctcgatctgtgcaagagaacagctggttgcgctccaatcatgttacataacctacggcaaggtatcgacaggatcatactcctgtaaaatagaactttgttgatcacatcctgtgtacttgtttcacggacatgaggagcaattacaacaggtcgtacaattatggcaaagtaatggccttattttgtttttagcttcagcgagaacccagacctttcccaaagctcaggattcttcgaaaagttgagaaaattgatgacttcaaagctgaagactttcagattgaagggtacaatccgcatccaactattaaaatggaaatggctgtttagggtgctttcaaaggagctcgaaggatattgtcagtctttaggggttgg

SEQ ID NO: 307734 - DNA, 1000 bp, Homo Sapiens
tgcttgcttcggcctcccaaagtgctgggattacaggtgtgagacactgcgcccggcctaactggtgtatctagaccatttacatttaatgtaattattgctatattagggcttaagtcttccttttcattttgttttctctgttttttaaatttctgttttctttttcctaatttcatgcttgttcctgaaacattttttagaattccattttgaattatttatagtttttgatgataaacatatatatttggtatagcttttttagtggttgctccaggtattacattttgtatatatgacttaatacagtgtattgatgtcattttaccagtttgagtaaagtatagaactcttagcttccattatgtctctacttttccctgtttatataattatcttagctatttcctcttcatacatttagaaccacatcatacagtgttatagtttttgctttaaccatcaaacatattttagaaaactcaagagaaggaaagcctattgtatttacccacagttttgctcattatattttctgtctcctgatgttccaagattccttcatttttaaaaatcattttctttctgtttggagaacttcattatttagtaagtctttttgtttttgtttttgtttttttttagagatggggtattgctgtcacctaggctggagtgcagtagtgtgatcatagctcactgcagccttgaactcttgagctcaagcaatccccctgctcagcctaccaaatagctggtactacaggcatgcaccaccatgcctggctaattttttttttttttttttttctgagatggagtctccctctgtcacccaggctggagtgcaatggcgtgatctcagctcactgcaacctctgcctcccaggttcaagcaattattctctcatctctgcctcctgagtagctgggactacaggcacacaccaccacacctggctcatttttgtatttttagtagagacagggtatcacc

SEQ ID NO: 307735 - DNA, 1000 bp, Homo Sapiens
  misc_feature (292)..(292): n is a, c, g, or t
  misc_feature (602)..(602): n is a, c, g, or t
  misc_feature (604)..(604): n is a, c, g, or t
gaattccacttcatatcttgagtgctttgctctctttgaatattacttgtttgaatgtcatttatacttgggaagtaagtgttcagatactgatttatttgagaaaacatcactaatggaggagagcacaaagttgactacaaatcaaaaggacctcagagttaggatggacctgtcaggataatctagtctagtactttaaaaagtttatcctcagaactataacaaaaattatgaagaatgaaaggttctataggcaagtgagttagggctcactgctaaaatgaatatntaaacaggcttctctcttaaaggcattttagaatgctaccatgcattgtgatactcatatggttagggtcagagaagaatgcatgaagtccctgctcctctccatctcatttgacctgaaagttttatgcagtaaggattcacaggcctcaaattctctgcagaagtctgaagggagaattttatccaatctttgatccattgcttcaactcctgtaaccttggtcacataggcttccatgataatttcctgatacaagagagtcctttctagacatttccccccattattctagactaattctcttttngnctgtttattgccttctcatcttttatgttcaaatctagaaactcactcctgcagaagcattacctgaatctgaactagataaataccctgtagtaacatcaattactaacgatgtgattagttttaatgttggtctccctgccggagagtaaattccatgatgtcattgatgttgtgcatcttactgctatgccttgcaaatagcaggtgctcaggaaactgttacataaataaaagaagttgcaagaagtcattcaaaatgtcatggacattttcattagaggtatgttttggaaggtctgaagacttgggcctaagtcttgaatctggacctctttcctttttaatttttctttcttctttttttttccctgaaccaccatttttttttaattt

SEQ ID NO: 307736 - DNA, 1000 bp, Homo Sapiens; identical to SEQ ID NO: 119858

SEQ ID NO: 307737 - DNA, 460 bp, Homo Sapiens
aagacctctaagagcctgccccggaggccccgccatggccaggctacaggctgaggcttttgaggtgctgcttacctgggagactgtgatgccacacttcttggctaactcctctttggcttcctcactggggtaagggttgctgagatgggaatagaaatattcattcaggatttctgtcgcttgcttgttgaaattccgtctcttccgcctttgtaaagagaaaggaaataataacaaaaaggctcacaccaaataaatataaaatgggagagaataaatctacttctgggagaagacaaatttttgagcaaaaggtgaatttggagcagatttaccaaaaggggctggatgccaaaaccaacgctaaaagcatttgctcaatacttcattgtgatccatctgggcaccgaacagaagagtggtcacagatatttttgcagagtagtgaggagtataa

SEQ ID NO: 307738 - DNA, 363 bp, Homo Sapiens
agaatgctgccgatggcatgaccgatacagaaacaagaaactaggtgaccgtaaagctaagataagccctactaagtggcattctgggccctatggctttgaaataattggtagtgaaagaataaaaacaaagcagggggtgggggggcttgttttcttacactgatgccctgcggactgtacatctgactggctgcgagtccatcactgtatcctcctgtctggctgataacatggcgaagggtatccacctaaaccgatgaacaataacagagagaaaattagtctagagaggtgtaggaaaagggaggcagatcatcatcaggcaggcccccatttgggcatgccatattaaatgccatc

SEQ ID NO: 307739 - DNA, 1000 bp, Homo Sapiens
gggccctaaagtcagagcgcctgggattaagttgtcacaggcactatggcccttgcgagttgctttctcaaacttccttcagtttccctatctgtcagttaagtcggtattacctgcttcatagggttatgggaagaattaaacaatatgtgtaaagcacttactagcacactgcctaacacaataagttagaaatataatttgtgtagaactctgacaacatacatttaaacagatgttagtaattctggtataaggtttgtcataaccaaatggaaatgtaggaaacatttataacgttcttaaaagatagaaaattcacctccattttctttgtacttgaagatggcaccactggaataaatacttaagacactgatactgcttatagtcctttcttcactgagtagttacataatacatcattttactagtggcttttcttttaaaaaagatactaaaattaatacttctgctttatttagatggcttctttacctaaaaagactcttctggcagatagaagcatggaattgaaaaatagcctcagactggatggacttggatcaggaaggagcatcctaacaaaccgttaggaacagccccgtggatactgaagttttttttatggtagttacaggaaacttctgatactctttttattattttcttgtatagagtcagacacttgaaaaaaactaatgtttgaagacaaaaatattttggcagtcacaataccagaactggattgcatttccagaattctgagttaaagaaacaaagtatttgctttgtaaaaggccaaaattctatttcctacaaactttaaatgctgtttttatagatgtgatatgaggcaacacaagcacagacagttgcatagattttaatttatacatatcaagaaaagtgcaatttcatgctgaatgaagcgtaggaacttgacaagcccataggtagctatagttctttgtcagtatagggaattatgttcatgtga

SEQ ID NO: 307740 - DNA, 1000 bp, Homo Sapiens
gatcaaaccaatgtatttcttaaatgtatctgattgatgtctcatgcctccccaaactgcaccccaaccaccgtgggcacatgttctgtggacctcctgagggctgtgtcactggctgtggtcactcatattaggctcagaataaatctcttaaaatattttgcagtttgactcttcttgccaacacaagtaatcaaaataatttaatttgactgaaacatctggctatgtgcaagatgttgctagaacatggagaaatgaggctagaaaaatgggctagagccatattacaaagatttttcaaatgccccaggcagaggatttcattggttcaggtgactatagtaagaatgtgtcaaaaacctgtcaaaacagactattgttaaggttactactgaagttactcaaaacaaaacacacaaaaaacaaacaacaacaacaaaaaaacaaaacccaacccatagtaaaagtttagcatgggataaacttgccagtgtcaacaaaaaatcaaactctgtaaaatatctgaagagatttattctgagccaaatatgagtgaccacagcccatgacacagccctcaggtggtcctgagaacatgtgcccaaggtggtcagggtgcagctcggtttgacacattttagtgaaacatgagacttcaatcaaatacatttaagaaatgcattggtttggtccagaaagatggaacaacttgaagcagggggcttctagcttataggttgatttaaaatttttctgacaattggttgagcttatctaaggacctagggtcggccgggcgcggtggctcatgcctgtaatcccagcactttgggaggccgaggtgggtggatcatgaggtcaggagactgagaccatcctggctaacacggtgaaaccccgtctctacaaaaaattagccaagcatgatggcgggcacctatagtcccagctacacgggaggatgaggcaggagaatggcgtgaacccggaaggtgga

SEQ ID NO: 307741 - DNA, 1000 bp, Homo Sapiens
  misc_feature (805)..(805): n is a, c, g, or t
  misc_feature (807)..(807): n is a, c, g, or t
ttttttttttttttttttttatgaatagaaatatccactttattcatgtatagattataaaactatactaaacaaaaagtaatcatttactattacaaaaattattaagaaccattacaaaaattctctgcctactaattttcaatcaccatagaaatacagtatttaataatgctgctgctgtacttacataaaacatattaagaatagatgttatatttctgtgtttgaatattgagcttaaacataaaacatgtttgaaatgtgtttgtgtgtgtctctcacacacacacataacatgtacatacctgaaactcatactgcaattgcaacacatcttaagtttttccttttaaacataccaagataacattctaaaatgaagaataatatctatgtctctcttcatactacatattatctctctacgtatatacaattgctataaacatatctttatatttgatatatataggtacatatatatggatagataaatatagatatatgagagagaaatggagattagagatctatgtttgccataaatcatacttgttaacataaaccatctgattaaactgatattttgtggcccaagacctgagacatgcaaaactattcttagcagatagaattttctaaaagctgagagctcattctccaggagctggccaaggaccagtcctaaaggcagacctttcttggaaatgtacagagtctgggcaaacaagacctgctgagttaaccctttcctatacatatgcagacggtattcagcacagggcctgacagaaggcagtgntngctattattattcatagcattagcccatttcttgttgtgagcaacatgaacaaggagactaaggggaaaaaaatgcccttttttagggtgaccaccctaactgatttgaaagtctacaattttttcagtttaaaatggaatttatttgtaacatgtactattattgaataacaatttctaataaaaaaactac

SEQ ID NO: 307742 - DNA, 1000 bp, Homo Sapiens
caacaaggaaatgtatttattttttctttagaatttggctcagaacagtaacaaaaatatttacattaaaataaattaacatgcaattacttaaccatatgtaataatttacgttggaatatattagccttcccatgagtttaataaaaactaatatttggtttagattcaataccatcctttcaaatatttggtatgaaacttggtagcaatgcaattgtctgatgtacagagcagatttcaccatgagagattacaccaaagaacagatgtccttccagaacattatctcaccccagactcagaaactgagcagccaagcttccttcccaggaatcaccatggaatgtctgaacaataaccaggcctggagattactgcagggctggcagagttttaggaatcagccaaactctttttcacactaacccactaggaaggatatagttcaaatgtaatgttgagtccttcagtttatttgaacactgaaacaatatgttgtagaaaccttcattttcccaaaataaaaatctgaaagatatatgcacatgatttcttagatcatctaaaagtacccataaaaacctgtcactagggccaggtgtgatggcttacacctgtaatcccagcactttgggaggcagaggcgggcggatcacctgaggtcaggagttcaagaccagcctggccaacatggtgaaaccctgtctactaaaaatacaaaaaaaaatcagccgggcgtggtgcatgtgcctgtaatcgcagctactcaagaggctgaggcaggagaatcacttgaacttggggggcagaggttgcattgagccactgcactccagcctgggtgacagagtgagacccgtctcaaaaaaatagaacacctgtcactagaccaaatactatactggtaaaatttcacagcagagaggaatatttcattaaattcagctgatagggtcaaggatacattaagtcatttacaaatcagatattagtatta

SEQ ID NO: 307743 - DNA, 1000 bp, Homo Sapiens
acttgaggccaggagtttgagaccagcctggccaacatggcaaaaccacgtctctaccaaaaatttaaaaaaaaattagccgggggtggtggcgcacacctgtaatccctgctattcaggaggctgaggcacgagaatcacttgaacccaggaggcagaggtggcagtgagccaagttcgcaccactgcactccagcttaggagacagagcaagactctgtctcaaaaaaacaaacaacaacaacaacaaaaaaaaaaaaaatacaagaaataaaacaattcgataatgagttagagggacattgtttccaggggatacaactgaagaatatttttctttttaagaccataggtttttattaaaatgtttgatttttatccaactctatcttattctaaaatagaaacttcagtaatgttctctaccacatacttccttaatttttaacctgtcaccaaatttattattgtaacctcttcttttttataatcttcatttgaataatatattaccattcagaactctcttcattgatgcaaatttgtttgcattcatttgtagtctaaactaaatttagtgctcaactgtaagattttccagttagctctgcacatgtatactttggctatttataaataacctgtactatgcttcaaatttaatccttttatggaagaatcgaagtatgagataaacaaacagtttagtattttaatcaaataaaacctgataacaaagcaaacctgatatatatttatgagttgttattctgttatgtatctacagaaaagtctgcatacattatgtaattacacacctgaagatagtatgtcaagggttagatggctgaagagatgaggaaagattggaaacacgggaaggagaaggaagctgctctgaaggcttgctgtatcattctgagtggtaactcagcagcacccacatggcatggcctcctcaagtcatcagcagaagggacaggactacaccaagccatga

SEQ ID NO: 307744 - DNA, 1000 bp, Homo Sapiens
ccagccaaattttgttgaatgaatgaagaaacaagaggaggggctggggaagggctggaagggcgggcagatgtaggaccagactttcccgaggctccagatgaggcctttggaatacaacgctcaaaactcatcttgccgctcttgccttctgctcacaaggtttcatagccaggacggggaccgccacagtgagcacccaggctcagggcacctggggagccagaaagagtttaagcacttgcccctgccctctgtcctcagggaccccaactggaccctcccaaagctccccagggcagtgggcaggatagtcacctgtacagagcaagaggatagctgagacccagcccaggtagaaggaccaggagaagaaggtctggatctgggggtgtggaggctggtcccaccgctcgctggtgtacaccgccatggccaccaccatggagatggctggggacaaggacaagagagatggctcagctcctcggcaggaattcgctggctcgcgatgccccagtccagtccagagtccttacctgcagcaaaggctgcggtggttgagacaagcgggccgtggcctggggggaacagtgaggggaagcaggacaggaccaggaagctcacggacaccagggcccacagaacagccataatgctgaaggtctgcgtcacgtggatgtagcctgatcgggagaagaccactgagcacccatccccgctggcaacccctctgtaggacacccattccccttacctgatatgatgtccccatgccctgttggccagaggcccgagtgagctgagtgggtgggacccacagcctcaaaccagaaatcggtgctcaaagcaatcaggcagaacatcaggcccagggagccccccagcagggccagggatcggcagagctccatggggataagctcagggcttctgggtcctggaggaggaagaggctgctgatcagactcttgaatctcagagagaaggaggctgtgca

SEQ ID NO: 307745 - DNA, 1000 bp, Homo Sapiens
ggatccggtagatgcaagaagagctgtggatggtaagggagagtctaggaataatgaaggtgagctgcagacactgtgtcattttgaacagcgtcccaatttagtatcaaaggatatttggaattctcaaaaatactttgatactaaattgggacggtgttcaaaatcccaaattttggaaaattttaatgcccttttataggagatggtagtttttgttttgttttgtttttgagactgagtctcaccctgtcacccaggctggagtgcagtggcacaatctcggctcactgcaacctccggaaacgccagatttttttctaatgaggcataatgcccaaacaggagcacatgctgctcttcacactcattatttccatatgctcaattttccgatacatgtcacagcaaagcagaaatacaacacctttttgctgaattaaacagcaagtcggccaggtatggtggctcacgcctgtcatcccagcactttgggaggcggagacaggtggatcacatgaggtcaggagttcaagaccagcctggtcaacacggtgaaacccgtctctactaaaaatgcaaaaattaactgggcgtggttgcgaatgcctgtaatcccagctactcaggaggctgaagcaggagaatcgcttgaacccgcgaggcggaggttgcagagaggttgcaccattgcactccagcctgggcgacagagcgaggctccatctcaaaaaataaatacatataaataaataataaactcacctgaacctttttagataagcaaaaccaattttttccacttccttggcaaccgaacagagaatggcgtgagaaagaagaaatcgcgagccgtcattgctttcttggaacccaacctgaaattaagaaaggccaccagggccatgcctctctcacctcagacacagattcagagagaagcgagaaggcacctctgtccccaagttcctggggcctgagctctgcacacaccgtaggt

SEQ ID NO: 307746 - DNA, 1000 bp, Homo Sapiens
ggatcagaccaaagtatctgaacccatcacacaccctgtattattaaaattctaacaacagtgtgtgagcaaccaaacttaagaagaggccaatggatgcagtaagactgaacctcctggtcaggctgcctcggctctttttagctgttagagctcttcagccaagcaacgtgccatggatccctggagcaggggtctggggctgcctgggtctaacaggctctgggggccctgagcacccacaggtgcagctgtcccctgctcttctcagagccattgtctgttgagcccacaacacatctcctttgtgttcctgcagcatttcttcctcctctccatctcatcttttcctctccatgtaaccccacatactgggtgctgcagagcagggagggagaaggaaggatggggagggggaggggggaacacacttctttgacgctgccccctctgagtttggccacgtgacagttactacccacagccctggcctccccctgctgcccaaccaccagcacccaggacaccacccagcatcttctattggctctccaggatcctgaggcaggatgcagatttgaaatcagggcaagacaggagtgaggagggataaagatgtttgtgcagtttaaggggcttgctgtgcttggcataatactgcctatgctccagacagagattttgcaaaccgtatctgaatgctcttagaaagggctatgaatttctagacgtaggaagctgataggtgtctccctgcaatgtagccactggggctgatgaacctgtatttcactgaaaccacgctccagggaaccaacatcagcctggaggctttcattgccatagatttacttcttttgctattttgtccttaacacattttcctcttaaaatctacaattgtttccactttttgcttttttttttttttggagacctcaaacaagccctctgtgaactaatggaaggaaggctggctctgactgcataggcccaagtt

SEQ ID NO: 307747 - DNA, 1000 bp, Homo Sapiens
gatctaaccatgaatgacatgattccactgtggccagacataataactaagacattttgagacctatgttaggcaaacaatatttatatatattatctcaaagctttacaaaaggattgcctgagtattattctcctttttgacatttgaggaaacaggctcagagagactaaatgacctgcccaataacacaaggctagaaagtgccagagctgggatctgaatccagttctgtctgctctcatgcccacattgtttgcatatctgattttcacacgcccgtgactcaagtgtcacactcccactgctcctctctcctttgctatgaacatgaaaagctcagactactccaaccacagtgctgcacaaagagctcagagatgatgactgtgtggaagccaaaatgaaaaacatgccatcgtttacaatagtgacaaagaaaatgaaatattcaggtataagtctaacagaacgtacggaaacgctatgctaaaaatctgaaaatgctgatgaaaatcaaagacaaagccaggcatggtgactcaacgcctgtaaacccagcacttcaggaagctgaagcgggcagatcacctgagatcaggagttcgagaccagcctggccaacatggtgaaaccctgtttctactaaaaatacaaaaattagctgggcgtggcggcgcgtgcctgtaatcccagctactcgggaggctgaggcaggagcaggggaatcacttgaacccaggaggcggaggttgcagtgagccgagaatgcgtcattgcgcttcagcctgggtgacaaactctgtctcaaaaaaacaaaacccagaaaataaaagacaacctaaaaactggggagagttaccatgttcatgaactgagcaactcagcattgtagagatgccagttaattgtttaacgcaattgctatcaaaatcttaggaaggttttatgtagacaatagatctataggtttaacgcaacagctatcaaaatctcagga

SEQ ID NO: 307748 - DNA, 1000 bp, Homo Sapiens
gatcccacatcctgctttcagctgccagcaatgtgaagtgcccagagattaattctacgtctggcctggaaatgcgactttaaagcatgagggaggggagtgagggtgggtggggggcggcgaggaggaaagaggaaagagaagggcaggctaaccgaggctggcagcaggccaccaaccccttcccaagccatgtttcaatgcagacagaagtaaacccctatagacagcagcgcctcagcctgccagggccttacaccagctgcagtgcatctcgcgctctccctcagccctgagtgcagatgttccccgcagcatcacttccgctacactttcttttaaagaaacagcgcacacatagaggtatttctgcctcttcccagtaggcagaaatttttggccttcagggatctcgggcaaggtggaaactcagatggcaggtaccacgatggtaaagcagctaccccaatctcccttggaagggaccaaccaaggtatccaaggaatggggtcaagagcattagtgaggtaataggaattttttttacagatttggctttctactgtcttcagagggagagagagaggtccccacagtttggggctaagaaaagggggggaaaaagtaggctgaagatttaaaccgtgatttctcaaagcagtctactgtaacattaccatctcaaagggattctgatgacttcatcatcatggaagtcttacagaattttttaaaaatataattctaaggtattaacattttgcaaggcacaaatacttacctataagacataatttttttaaatcaacaatctgttaatttcttatttgcctaaactctttatacattttcagaccttagaaaatcaatcaatcaatcactgattaggcacctaactttttcaaaatttctggcccttttttgtgagaataagcatctaattttggagttagccttgaacattgttaggaatttgctaaaatattatatagtctcttg

SEQ ID NO: 307749 - DNA, 1000 bp, Homo Sapiens
cctttcactaaggggcaggcaggtttttataaaaaaccatgtggtaatcatcaatatgccattaagactcctattactagacttttaagaaccattttataaagattatctggtgcctaattaacaagaaagaaattagactcaggtttaagatgctgctggtgttctgaaattactctgaaaggtcattcaaagaacttcaaacttaaaatttttcattcatgtatttattccacagtcaaaataaatcaaaatttaaagctataacatttttaaaagataaaggagaatttgtggcacagctgcattaacaaaacagacaccagtctaaagtgcaacactaaacaggtattctctgttcccacggtggaataaatacacacaattacacataagatttcactaaagataggagatgaggcaaataaccctttgaaattacctgcccaacaaatagaggcaggctacattaatttaacattttactgcaaaatggaaaaaatccccgaggtgactaactcaaactcctcatttcatgcacatgaccttggcttctgtgttctttccatagccacatccaaatccagaaaggctcctgcaccccatgctcaaaaatgcaacctcaagtccctgaggtcctcagcacagactgacattaacaagcctgtgttcagccttcatccagaacctccagggaaatcaggagcacaaacacagagcaaagcaccgttcctttaaacaatggctttaactgtcgaatgagctctgacaagccatatgcatttcataaacaaaccaaaacatcatcttcatatcttcctatttttcttgcaaaaatgttaagccatccaagtaaaaaaaaaaattttaatttaacaatgaaaaaggaacttcaaagggtttatgccaaaaaacaaaccagtcctctgcagcctaactcatttgtttttgggctgcgaagccatgtagagggcgatcaggcagtagatggtccctccca

SEQ ID NO: 307750 - DNA, 1000 bp, Homo Sapiens
cacgagccaccgcgcctagcttctgtcttcttctgccatgttcaaatttccaggataatctccttgtcctgggagccttagtttactcacatctgcagatccgtattgccgtatggctttcacagtcccagggattagggcctggatatctttggggatcgctattcagcctacagcaggctcctcacttgtcttcgaaatgacttcacttttcccattgtgtgcgaggagcacccgtctcatgcctcttctctgggatgggcagggtttgtccagggaaggtccctgtggtttcacttccctgcccttggggagaggcgggagccatcctggaaacaggtgtcctgggaaggaagacaagccttgctcaggatgcaagccccagtcatgagaggttgtgggaggtcactcatgctgtgcctttttaggaggtggggtcgttaccagttccaaactggatactccacacagtgctcatgcagttttacctgtggttttgggggccaccgttgcagaagttgcctagattcttccatgaaggagcctcttgcctcgggctccgggcaaggaactcttgtgttagaagttcccttcttctgtgtcttttaaggtctggacttcagtgaaagagaaaagaaacatctagtttgttctttctgtttttcttttctttctgcttttccatgcacttgctgtccccaactctgtaatcatggtgatacccgatacgcatacacactctactcacatatcttttcctacatctttgtgtcccttagcagtgatcttagttgtccttccagcatgcctgaaaaagggctgagtctgtggattgaagcgtccagttgtaggcattctcctgccctgcctggccgcagcccccagaggcgggatcctaagtggtctgttttctcaggcatttactgctgttgaagctgctcctttaaagcttaagacattatttttttatttctcccaaaggccgtggggaggtttagct

SEQ ID NO: 307751 - DNA, 1000 bp, Homo Sapiens
tcctgattcatctgtgacaaaggtgatggtcaccgtgttgctttttgtttcaatcctgtggggcaatgtcttcccacagaatgggccatgttcttctctgtctgtttgaatctgagaaagaagctcatgaaagctggggaagcagctgcctgggtctggcctgggcggagggaagtaacccacctcctcagcatttcagggacagccaatgaggccaacccaggccatggattggggtgcccctccccactctgcctcccacacttgtactcgaagccccagccttgacctccatagagcacctgaagaggtgggggtcaccgagggtgacgggaacgtggtgggggccatgctgcaggaagtagggggtgcagctgggctgaagggggaggatctgggacaagatgaggggcccaggagccagaccttgagaaagtcgtagggacacagggtttcagggtgtgtctccacatcgaaggactccacaaagtccagaatgacactgaacccctcctccaggctgatgctgtaagtgcaactggagagtttgggatacggccgtgggtattcagggctgctgagctccccagacctctgggtgaagacctggccggagcacagggctggaaggagggaagggcaggggagtgacttggcgtgccctctatcagccctcgcaccaacagcagggtggatgccttggggagcaggaaactgggacagggatgtggctgggacatctgcatccctgggttggctgggccctgcaggtggccagcccctgaggcctacccagaaaccaaacgacccacccgatggctgaggggccgcttagagagggggtttctcttgctttgaggctttacgtgaaacaggcagcactcgggatggagcgcacaggcccctcactcacacccccaggagcgtggtggtatcctgagccagagtcgcaaccccagggtaggggctagagcactgagttccaccagctctgccaggg

SEQ ID NO: 307752 - DNA, 1000 bp, Homo Sapiens
aggtcttacacccataattcacgcaaaatatggataccaccctttaggttttgctaaaaagcctaggaaagtgaagtctaagacatccgtcccaattcattctttaaataacatgtatgtgaggccttgtgtgattttctaatattccttccttgtttaaaaagtaaataagaaaacccatgaaacaaaataaaattatctgattttgcatctgttttgtttttttctaagctaagcatctttcagtacaggtaagaaggctggcatcacatctgggaaatgccttaacagatatctgaggagttactgcacattccgtcagtaacaccacacttcagtttcaatgtgtacataatctccccttgatgctcttcaacagagacaaggttcttgtctgcagatcagatagatcacagtattaggaaaaaaacataacagcaaatttggaagtacaatcaatttaaggagaagcaaaaggaaaagacttagaaatgggacattattgtctacatctagaggatacatacacctgaaagcttaagaaagcccttatcttaggaacttgaagctgaggataatctcaagttcacttagtgccagtcactttagttttttaaaaaatttaacttaaaccccagcctaggcaacatggcaaaaccccgtctctactaaacatacaaaaattagtcaggcatggtggtgtgtgcctgcagtcccagctagttgggaggctgaggtgggaggattgcttgaacctgggaggcggaggttgcagtgagccaagaatgcaccactcccctccagcctgggtaacagagcaagactgtctcaaaaaaacaaaacaaaacaaaaaaatttaaactcttcttgtgtctttttccttgtaaaacattaactaaaagttattggtagtaaatggtgactgttttacaattaggtttcgttattgacaatgtcaaaaaaaaagcagcaatctttaacagttcaaattagtgtaagg

SEQ ID NO: 307753 - DNA, 1000 bp, Homo Sapiens
cgatgaaagcagggcaagggaaaatatgctttttacttaactctggaaagaggtagaggatgatcatgaacccctggcaagggttaaacaaaaattgaaccaatatttacctgccaggttgactaagcttattctgattgaatacaaagcacatgaaaagctgaatgaaattacactgagattaactggtttgcttcagccaagaaagaaggacatgggagtcagccatatcacaccaagtgagctattttaaaaaactcaggagaccatctttctcttccacaggaaaagaattattttattaagtattttaaaacaactacttaacatttactcatagataaaaatatttacaattttacaccttcaggaaggctccaaaatataaacactgtacctctccctagagaaaaaaaaaattattcttctcttcaaaaacaggaatacattcattttttctcactgtgtgaatcaagtaattatacaaataaacatctgaaacattttcctttttaatatatttatataatatatatttataacagctttacaaataaaggcaacgacttaataccaaaataaaaacaggaaaagaaaaagttaaaacacgatcagcaatcaggcatagtgcatyttgaaaagctgctgcggagctggctggacacatcgggaaaacaagtactctggaccaaaaataaaacttctttgaaggagacggaatcctttttagcaataaggacactccatatgccgttgggcaagaggaattagcctacagaaaggatctggcggtgccaaggcttggttaggcctttgagaagctaagcttggttaaaaggagttttaggatggaattgaaaactgagtctagttctgtttgaagggggcagctttttactcagctttgtgcactttggggtgctcgctcggggtgtccgcatttctcagaccttggtttggttccctgcacagtaagtactaatggttaggcctagaaaca

SEQ ID NO: 307754 - DNA, 1000 bp, Homo Sapiens
ggatccatatttgctggctccaaagcacttgttgtaaatacttcactatcctgtgcttacacgtaaatgtaccatttctcttaggggtcttgaaatactgaatcaaagaatggtgtaggggaagggcagtttagaaatacctggaaatttggttgtttgaaggaagcccactctcagatggtaggagatcaatctaacagaatagctgagaatattttctgagagccccagaagtataaaaacggtctaggggggaaaatttgggacacagaggtaaaatagcctgcctctgaagaccagcttcatttcttcccctctgggtgttaatgaaagagcctttaactttgccaggcctcagttactaatttctaaaacaactgctgctactattactacggatcttactgctactatgaccaccaccaccaccaccacatcagttactgagaactgaactagatgccaagcaaaaatggtaaacacttcatatacattatctttttaaacacaaaatgtactattaatccagttttacatataagaaaactgaggctcaaagaggctaagtaatttgtatgtgaacatgctttacactatgtaaaacatcttagtagatatcactattattaagaacctatcagccggagaggaagaattggccttttatctttctaagatgcacagttgtctttctgtttaatgtttttttaaaaatccccctgtgacaagctccagaggacaaataatttatttcttggggtgtatggctctctaaatgaattaattgataggcatcccattgtcagtctcagggatgtggaaataaaacagacatgagatgttttttaccaaactaatttgtgctttagacacataaataataaatatatatatattaaagtaaatgtgtatttaccgtctctcctgctccactttgaattcaagaacccgtgtctttgttgggtcactgcactgtcaattgagaagtttggttttgttt

SEQ ID NO: 307755 - DNA, 1000 bp, Homo Sapiens
gatttctgcagttttttattctagccaggttctaggtgctggcctggaactataaaacgaacatttcacaaaaagttatgacaatatacaaaggaaagacaatttctttgaatatccataatctcaatatgcagtctggctgtggatggccaagagatagtttccttaactggaaaaagcttttaaatgaggcttggtggaagatatatctttgcatcattacaaagaagaaaaaagagaaatctcacaactgaagaaagtgaaatccactttacttaatgcggacctctgtctctggtgtgcaggtcctctgtgtccaaagataattagcactttataatgctaattattataattaggtctgagaaaaaaatcattagggggtaggcccgttcactgattttcaactgccccctctatttaaaaataaggtcatttttctatgaaatagctttaggagctcaaagcagaaagagggttatagaaaatcctgtgtaggtataagcctgagttttaatattcttataattctgtgatgtgtctggaaactgaaccgggaggaaaacagtgaacctatttagtccaggagactagaaatcaggactcagaagagtaaacatttctgtaatagttagtcctcaaatagtcattcattgaccttccactgggtgtctggcaatgtgcaagctgcttctagatgctacctcatgtaacaaccatcacagttgcacagagcaagtactagtactccactttcatagataaagaagtaaaaatcttagaaattagctgcccaatgtcatgtatgtaggaaaggaaagctggattctgattcatatttgctggctccaaagcacttgttgtaaatacttcactatcctgtgcttacatgtaaatgtaccatttctcttaggggtcttgaaatactgaaccaaagaatggtgtaggggaagggcagtttagaaatacctggaaatttggttgtttgaaggaagcccac

SEQ ID NO: 307756 - DNA, 1000 bp, Homo Sapiens
cgcggctcggtcttaccatggcatcgtagcgcagggcgttcatgaagtgcgccacctcggcgcccttgtacacggtgaaccagatagtgccctggtactggtcgccggcgtccagcagcagcacgttgggttcggcgcggcggatctgctgaaccttggtgaagagccgagccacgccacccatgcagcggctggcgttgacgcacttgctggagtcctcgctggtctgctccagccggctgtgcacgtcgttggtgtgcaaaatcgtaagctcccaggcgccagccgcaggccacagcaccgcgcccagggcgaggagtagcgtcgcgggcgcccgcgcggctcggggacacatagctgtggcgcgtgaactgggtgcgaaagcgggcgagccgggcgagtgccggcgagtaggggcgagcagctagggccggggctcggtgccccggctggaggggcggggcccgggtcaaggccggggcgggtccttcttcagcctggaggccggcttggcggccaggcgcaagttcgcgacgtcacccgatccgaccctggtacccggagcggccctggcgcggctgtcggctggcaccagctccctgcaggaagagtggagaggttgttcccggcggggagcgggtaccggccgcatcccggccggaccagggagcctgggcgccggcagttcggctgctggtgcgccgctctttcgggggcgcgaggaaggaattggaggggtccgccccgcgcctgggtcctctctgagtctcgcctcattcgaggcacgggtttttctacaaaaggaatgtatggtttgtggttgcgctagctcatcacttcaaagaaccaaagaaggaaaagagagggggcgggaagaaagatgagcgagctgaggggcagagaggaggagtaaagagaggccgggcagaggagctccttgcagtttcgggctgtgagagccgaagctcactgagatgtgacgcttcctgttgggttgaga

SEQ ID NO: 307757 - DNA, 1000 bp, Homo Sapiens
aagcttggcccggagcagcagcgggattccagtagctgtgggcatacaggatgctagggcggccacaacccaggcagctgaggccgagccacctaggaacgcaggctcagagcagaccctcttgggacagacggagaaggggagggggcgggcttctctaagttaagccgatcactgagcacctcactggacacgagagaaggcaagcccctcggaggacagaagggaagagccacagacttggaggctgtgaaagtggagacaggtggatctggggtggcagcaatcggtgaaatgccaggccgtgccccgccccaggagcccaacatgacaccggcccccagggaagctgactgtgccacttcatccagcgcccatcagtcgccttggagcatcaggaatcctgagggctggggtccgagatcacagatgctggggcacctcaacctcagggagccgctcgagaagtttcttttctgaagtgtccacctccttctggtcaccggctggagctgggacaggtacatcgtctggaaatggagggagggaatggtggcacaggacatccgaacccctcctacaaaacgaacccagaggcccagcccctcctccctcacacccaggggtccagcccccagcccctcctccctcacacccaggggtccagcccccagcccctcctcactcacacccaggggtcccagcccctcctccctcacacccaggggtcccagcccccagcccctcctccctcagacccagagtccggacccccagtccctcttccctcagatctgggaatctggcccccagtccctcttccctcagatctggagtccaggcccagcccctccaacctcagacccaggggtccagccctgcagcccctcctccctgcactagggccagcacctgtgtctgggtggaacttgagctgcccctcagggtgggcagccggggccttgtggccttgctgctgctgctgctgctgcttctgctg

SEQ ID NO: 307758 - DNA, 1000 bp, Homo Sapiens
ggaaaacaaaaggaaaacttatttattcttagaggtgggaatgtggggagtggggcagaacaggtggtggccctgggagagggtcccaaggggcagaggttggggatgtctcagtaaagaggggcaggtcatgaatagagcctccacccccagcagggggttcctgggcccgcccaagcactgggctaaaacgtggaaactgggcattgacaaagtacagcgggatgtgggcaattcggcctgtggaccagccctgcagagaagggaaagaaaaggatcagagtctgggcccaaagaagggccacctggcagagccatacagcagccaaggccctcagcttctccatccaactcctggaagccccagcagcctggcgcactcaccacactgagcagggcccctttgttgaaggaaggatggaaagtgatgagctggggctgggctcctggctccccctggataatgccactagaagaaaaggtgagcaggcaaccggaggcaagaagggagctgaatgtagtgggatgtgggtttgtttgtgcaggaaggctggtgagaagtccagacctaagggcccacatggcacttaccagggaaggagctcaaacacagggctgtttcgagtgcgaaaaaggaggatgactggtttaccatcctgtacccttggctttcctgtaagaaatggatccagggataggggaggaactctgaaggcagagtcccaggacatgggcagaggagaactccaggccagggcacggcctcattagattaactgggaagatggctgtgggctgagcccttcatccttgcctctcacctttcataagcacagccagacgttccccactggggtcccagaccatggagtgagcctctcccccaagcctgtgggtaaggacaggttaggagagtttcagtgtggtccctcccacctgcttttcactgccactccctcaaccactcagctcacctctcctcaccatctggtgtctgtat

SEQ ID NO: 307759 - DNA, 1000 bp, Homo Sapiens
tttttttttttttttctattttcagggtcctctatttgtctttgaccttccaaagtttgattataatatatcttggggtattcttatttgggttgaatctgattgattagctgtgatcttccagttcctgtatatttatatctttctccaggtttggaaagtcctattattatttctttgaataaccttcacactgctttgtctttctcaactctctctttaactccaacaactggaatattttctcttttaatgttgttccatcaattccataagccttcttcactgtcttttcattcttttttttttttacctcctctgattatttccaaacagcctgtctttgagttccctaatgtttttattctatttgatcagttctgctcttgatggtctctatttcatttttcattatgttccctgtatttttcaactccggcatgtttgtggtttttttaattattatttcaatcttcattaaattatctgataaatttctgaattgtttttctgtatattcttgaagttcattgatcttccttaaaacagctattttacattttttgtctgaaagatcacaatccccatcactttagggccagtccctggtgcctcattttgtccagttggtaaggtcatattttcctaaatgttcttgatgcttgtggatgtgtgacaatgtctgcacactgacggattaggcatttattctagtttccccaatctggctttgtttatatccattcttcttcaggagatcttccacagactctaaggagactgactgttgtcttccctgagcccaagaccagtacagctgtctcagcattagagcattaaagggcatgctaagcccaggtttgctatgagtcttgggagagctctgagatttatgcagctttctagcccagatagacctggggaagaccaaagaagggtacccaggttgtatgaaaaatctggccagaaacctaaacccagaagactgttctggtagcta

SEQ ID NO: 307760 - DNA, 1000 bp, Homo Sapiens
ttttttttttttttttttcaatcctctagtgaatattatgcttaaatgtatacacccgttgcccacgttaatattacaatactgtaatactgttttgtggtttcgtttttcacctaacaatgtgttgtacatctttgtgaatcaagaagtaatacacctatatagtatttcaaaagtaagcttatttttttaaattttctttttttttttgactaggtaatacatgtatgaggtacaaatacaaaaggtacaaaagagtatgtggtaaaaagtaagtctcatcactgtcccctaaccatcttgtttctctccttagatattctatataatatccttttttattggctgtgtaatattctttaagtggtaatgctatatatattttttgaaacagggtcttgctctgttgcccaggttggagtgcagtggtgtgcttatggcttactacaactttgacctgggcgatcctcctgcctcagcctcctgagtagctaggactataggtgcacaccaccatgcccgtctagtttttaaagttttttttttttttttggtagagatggagtcttgccgtgttgccaggctggtctcgtactcttggcctcaggtgatctgtctgtcttggcctcccaaagtgctacgatattaatgctattatttatatactaaattctcatacatttaggtttctgactttacagtggtgtgtaatattcttgaagctaaattgttttacacatttttagttatttttttaatagtactttccagtgtggaagtgctgggttaaaatacagtcctaggagactaggtcgatactggaaaatcctgtattttagaggtcatttaaaaattacttcaggaaaccaattaggaactcatctgcagaagtgaaaaaggaagtggtagcagtagatgtgatagctaaaggagagggtagaaagagaagataattgcagggatagaagaataaggaagggaaacagttatgctgtgacct

SEQ ID NO: 307761 - DNA, 1000 bp, Homo Sapiens
atacccataccaggctagtatagatgcttaggggtatttgagagcataatagagtggaaatgaatatagttttattttcattgagacaaaaatcaaatactttcttaacaatgctgtaggggctctgactgatctgggagtcaaaaattactttaaaagcaaaaggaacattttgtatgtgtgtgtgactgaacataactgtaggctgaaaatattttctgaaccatttcttccttgataaattggatggggtggatattgactaggagagtttaaaacactgtttacaaaggactgctgttaaccagtcaggttacagggcacacacagattaggaaaaaatgggctcctaactagctgaatcttccaatcttccaattgtagagaaattattttaggaaggaacttttttccttctaaaacatctgcaaatgttgtgaaagcattatcaatttcaaaccctagtttcatatttactacctgaattcacactactcataatgctactgtcattcgcacctgtaaaatgccctgttgtggccagagctgtaagtgcttgaatagatgactcaaggcagagacactttttgtgtgacaaagcgtaaggagggggtttgggggcagctgacctggagggaacatatactctttgagtaaaaagcttttgaagtgaagtaaaaggagaaaactatcttccataagtaacacaaactaattttggggggttggggtgatggctaaaggagatttcagagcagcttcatttttgtagtcttctgatctatgccccaaaggacctgatgcatttcatctgagcctcaaattaggagatacgtttttgcgagaacaaaagcggtgttatccttaggtattccacattctcagctgtgggctattggtccaaatgctgatgaatccaatgtgggctggaatccgagttattatttgatgtgtcatcctctcttgctgatttcatgacagcaagacaggggcggcatac

SEQ ID NO: 307762 - DNA, 1000 bp, Homo Sapiens
gatttgaaattggtgagatgttttttgggctggtcggtctgaggacctgaggtcgtaggtggatctttctcatggagcaaagagcaggaggacagggggattgatctcccaagggaggtcccccgatccgagtcacggcaccaaatttcatgtgcgtccgtgtgaagagaccaccaaacaggctttgtgtgagcaacacggctgtttatttcacctggatgcaggcgggctgagtccgaaaagagagtcagcgaagggagatggattatcattagttcttacaggttttgggtcaggcggtgaagttaagagcaatgttttgcgggcaggggtggatctcacaaagtacattctcaagggtggggagaattacaaagaaacttcttaagggtgggggagattacaaagtacattgatcagttagggtggggcaggaacaaatcacaatggtggaatgtcatccttaaggctatttttacttcttttgtggatcttcagttacttcaggccatctgggtgtatatgtgcaagtcacgggatgcgatggcttggcttgggctcagaggcctgacagctagattttgtatttttagtagagacggggttttaccatgttggccaggttggtcttgaactcctgacctcaagcgatccgtccacctgggcctgccaaagtgctgggattatagatgtgagccacctcgcctggcctactccaatttttttgtattgtagtaaaataaacataaaattactatcttaaccatctgtaagtgtatagatcagtggcattcagcacattaacactgtcgtggaaccatcaccaccatccatctccataactcttttcatcttgcaaaactgaaccgcccaatcacacttagtttttatgaggtctaaacaatttcttgttactcttatcactccgacattgtaagccctgtgtatggggcacccatgtattagttataacatacacatagggtatctactattaggc

SEQ ID NO: 307763 - DNA, 1000 bp, Homo Sapiens
attttacattcccactagcagtatatgaatattctagttgctccacatctttgccaacatttggaggtggtggtggtggttgtttcctcaccagtttcttaggagaaatcaacatttggttttgttagtctttgattttagccatcttcttgggtttgaaatgctctctcattgtgatgttaatttgcatttctttgatgataaaagatgtgcactttttgagttatgaatcttttgtgggaggtctgttcaatgagcaatggaatgatttgtacattttaaaacacttttttggctcatttttaacggttgttcatcttttcattgttgatttgtagaagtttgttgcacattctcaatacagtccgtttttagacttatattcaatatagtgtgtgtatatagtgtgaatatcttttcctcagtctgggggttgtctgatctttttcttaacagtgtcttttggtgagcagaattaattttgattaagtccaatttatcagttttttctttcattgttagtacattttgaatacagtccaagtaatctttaaggttgcagaagtatttgcctctcttgtcttctagaggctttatgattctgagttttgcatttcagggtgtatgagaccaccaacttcattcttttttcaagagtgagactcaacattggcctttagcacagtacaagaacagtttttaaatatattacattatttattttaagggaaatgaaaattaaaactacgaaaaatacatcagattggcaaaaattcaaaagtttgatactatcatggtgactatgctgaaggagaagaggcactatcaaaccctgcaggtaagaatggagactggcacaaccctagaagggaagtttggcaacactgatcacaattacgaatacatgtatctttgcaccagcaatcctgctctaggaatttatctagcatatctactcacacatatatatgcaaaatcacatgtgcacaaggttatgtgt

SEQ ID NO: 307764 - DNA, 1000 bp, Homo Sapiens
aaaaaatttgtacaatatattcatgatttgcctcttaaaatgtacatgagaattaactcaattaactttcattctaagtgaataaatagttcatttttccaaatagcataatgaactagcacaattaggagataaacaaaagactgttaaagagagtgaactactactacaaagtgtcagagatattaagacatgaaaaaacattttcctaaaaatgtattcatcaaaatcaatggttcctcaaatacaacctgtaaacctttggttgttttatgagaaatctccagatgattcaatttaaatcaacagttatgaaacatattctataaagtattttgctaagttccagaaatacacagatggataacatccagatcttgttatctagtaactatcagttgaggcagggaggggataaatagacaaagaatcatactatatagcagtttcccaaccaccagtgtgttgagaggcctggatgagaaccccagggtttttgctgccatatgagagtagcctcatccagtatgtcataaaaatgttataattttctatttgtgcatagagagaaaaacgttgggaagctttattatatagttcaaagaacaatgagaaaagcgcatttagaatgaataatattatcttggggagtccaaatatttgaatggggaaaaataatttagtttggctttttgtgattttaatgtttactagatgtctgagtttacagttttgtttcagtcttaaacattatatttttactatacagtaaactagaactcaggaataagggatgatccttatatcacttcttcatttagggagactgtgtgactatccagaggagagagagtccacatcttaaatgaagtactctgatgaccttagtcagaaattttcacactacaatctactttcttgtgttatagatcaaaaacctgatggagcaaaaactaggaagtgaaatactatttgctgtagaaaatacctgcttgcaagg

SEQ ID NO: 307765 - DNA, 1000 bp, Homo Sapiens
gaattccctcttctccttttttcattatttttaacaaccctattgatatatgattcacataccacacactccttcattattaacacaggggactctgctataaacccttcagaaaaatagactatgtcttattcaatttggtattcccaggacctagcacagtgttcagaaattagtaaatgctcattttgagaatgagagacccacagtactaaatttattactagtaatatatttaagctatattttggctaaatatacttttaaaggttgacttgaggaaatcaaaccaccatttataaattaattcctatgggaaaacacatacttaacgcaaaaaaaaagtctgtaaggcaccttccgcaacttttccactcgtaagtaaataaagcccatgatttatcttgtaaggcactaccactgctacaacctagtcccctcctagacaaatatctgtgtccgctagaaacactcagatttttttgtaactaatccagatttttccaacctccaggttatgaaatactattcctggaagaaggccttttgaggaatgtagtatatcctctttgaggtaagtccaaaacttttgcaggtagcttttcttttcattatgctctcaaagtgtataaaaaataaggatggggctctaaaaaaaaaactgttgaatgactgagtatatacatggaaagccattcatgtaagcatgcaaccctttttataagaattgccatttctatctaatccacggtttgcccttttccatttttttggatactgtattttaagctacattttactttctctgcaatttttttcataaaagattatataaaggaattgcaaatgccaactatcaaagatattgcttttgaatcacaaacactatttggagtatactgtcaataaacttcatagtaacatattgccctgccctaacatttacagcaataactactgaacccaccatcacacaatttacatagtgaacagcacaaga

SEQ ID NO: 307766 - DNA, 1000 bp, Homo Sapiens
gagctcattacagtctcattctaaaaacaagtacttcatactgattgcatttctacacacacatatgcagatttctggacactctttctgtttttctttcatttatgttctcaatgctgaacctttattagaattacatcatcactgtggttctttaaataagaaacaaaactctgtcacaacatctgaggaaattatcttttaatgtccccaagctctatgccttggaaaaaaaaaacttcctctgctgttcaagaataacaggccccagaacaagccccaaaaataaatgacaaagcccatcttactcacaggaggaaaggatcatggtagccccttctgcggggagcacacaacagtcttcagttcttctgcggtgctctactcacaaaaacacatctttcaactgaaatcatagttcgctcaagatgtttctcacgggcagagttaaccccacctattttcctgttctgaaaacctcagaagagtataaatgacaaccaatggcatatataagaaagctcagtaatctccatcccaatctctgagggtatctgctattagtctctcatccccaaaggtgtgggtgactcgcaaacatcattttcaagaaatcacaaaattttggtaaaaggcacctttaaaattatcaaatcaaactgccctctctggactgggaaggaaatgaaggcacagacagaataagggacttgcccaaggccacaccgtgagtggcagaaacaattagattctaggctctggaatattgagtttagaatgttccatcctcccactcagcagacactttatttgggggaagtcaatctagtaataaccctaaaatgtgattgggggatggctgagaaatataaaaacaccaacaatacaaaacacacttgggagtttcacttcatcccactggaaagcataaccatgtgtcaactaattaacagagcaactttaatgaagacacagcatattctaatcgcccttccaattt

SEQ ID NO: 307767 - DNA, 1000 bp, Homo Sapiens
tacctattcagtaaatagtagtcctttcattattacaaattgaggttgcttccattactacaaaaagtaagtcaatgagatctgcttaaaataaattgcagattatgctataggcaaatgttaaaagaaacaaacaagcaagcaaagagagaaaaaataagcttaccgatttaggttctgagtaggtaccaagtccgatgatgggaatgctgtttccatcacttagaggtatgcggtgacttgcagcactgagatccattgtggagaacctgactgtaggagtgattctgaacaccacagggagtctttttagaaaggtgtcctagggcctattccatcaaagaaaggaaggccagagggaggagcagagggaagggagattaacacacctatttctcaacctgtttttttttccaggttgtcctggaaatcctaagcatggttgtcctttgaacttcatcagaggcttgtaaaacgtaacctattgagagtttatgcttacttcttcacaacaaaagattgaaaaaacaaaaagaaacaaatctgtctggcctctatcagttaggatgcttttgttggcaaataagagactgacatagtttggctgcgtcctcaaccaaatctcatcttgaattgtagctcccacaatccccaatgtcatgggagggactcagtgggaggtaattgaatcatgggggtgtttttttcccatgctgctcttgtgatagtgaataagtctcacaagatctgatggttttatgaaggacagttcccctgcacatgctctcttgcctcctgccatgtaagacatgcctttgctcctctttcaccttctgccatgattgtgaggcctccccagccatgtggaactgtgagcccattaaatctctttttctttgttaattacccagtcttggttgtctttattagcagtgtgagaatgaactaatacacacatctatcttaaattctcttaaactataatggaaatttattggtt

SEQ ID NO: 307768 - DNA, 1000 bp, Homo Sapiens
gatcttgaactcctgggctcaagcgatccacttgcctcagctgggactataggtgtgagccaccgtgcccactcgaaccactggtcttttaatgttttcagctccagctggcaaacccattacctgctcttcctaggcagcatcccttggtcactatccagccatctgttactgccaaagcaaaagtccatggccctcgaagtgtgggaactctggccatcggctacttatcattttgccctctgaaatccttatatttctttctgaattcacacactcagaattggcagtatattcttaagctatgaagtcctccactatatgcccatcccaaaaacctaagcgagtaagattatttaatctaggaaatggttatttactctatagaaatctgatcttctcattgcccaataaccatggaatgctgaagagttgcctcagatggcagggagcctgcatgctagctcacacactatccctaatagccatttaattttgggaaaagacccgtcttttctctggactttagttttctcctctttagaaataagaagctggttagccaatcagtcatgtctctttcaggtatatgttctacgctttgcaactgcaaagttgacaatctgagaatgtgtgcacgccaaaggggcttaaaaaataatattatctaacacttaagcacttgatgtgtattaactcatttaatccttcaataaccatatgaggtaggtattataattattacccctatattttagatgagaaaagaagaaatagagagaggttgagtaacttgacccattatccagtagttttaaggctggggtttgtatttttaaccaccatatgcaggataatgggcagatctgaggactaagcttccttgacgtttgcatgcttagaaggttacagagggagtgtgagaatcacagttaatctgcaaatcaatggtatataccgaaaatcaggacaggggccagagtgtcctcactgttacctg

SEQ ID NO: 307769 - DNA, 1000 bp, Homo Sapiens
tactaaaaatacaaaaaattagccagacattgtggtgggcacctgtaatcccagctattcgggaggctgaggcaggagaatcgcttgaactcaggaggtagaggttgcagtgagccgagatcgcgccacagcactccagcctgggcaacagagtgagactccatctcaaaacaaaaacaaaaacaccaccaaaaaaaacaaaaaaatgattagttaccacagtagtacttaaaggattaaaatcacaaacataagctcagcttacaaaagcatgaaatttgagctggtgaaactattgcagatttgccaaggtgaaaccactaaatttactaaatttaaatttggggaatttaactttgatgggttcctatataagccagtactgtttaaatcaggaaatggggggaaacacaggtatattcttagtaaattaaaactttcaagctgagtgtgatggcgcatgcctgtagtcccagctgccagggtggctgaggcaggaggtggcttaagccaggagtctggggctgtagccagctaccagcccacttgtgagtagccaatgtactctggcccaaggaacaaagcaagaccccatctcaaaaacaaaaacaccaacaaaaactttcatggccttacctgatcattcttaccggcacaaacagtcttcttctgaaaaacaagcattcaggttaaacaccgacaactcagttgttgactgtctagatacaacaaacgcagagtaaactgctaggatgacaggagtctctgccagggtcattcatagtaaaactttattgaacagaaaacccagcaaaggttttcacctccgcaaagttccccttagtttaaagtaaagcactgcattttaaaaagcaattatacataagtctttcctagaaaagtcctgctaaaacatgtctagcaatttcattgattatataaagtagtacacttagtgtaatttaaacattccaacaggaatcaaatcgtaccagcagaa

SEQ ID NO: 307770 - DNA, 1000 bp, Homo Sapiens
aagcttttttttttttttttttttttcttgagacagtgtcactctatcacccaggctggagtgcactggccctatcttggctcacttcagcctccacatcctaggttcaagcgattctcctgtctcagcctcccaagtagctggtattacaggcgtgcatcaccgcacccagctaattttttttttttttttaaccagaaagatttcgatcaaaggaggggctgccatgacagacagcctcccttggcttgctggctcaggccttggagttccaggagcctggcagatccctacaggtaaagcctgaagaggtcagattagcaaaagaagtctatttaagcatccttttcaatgcaccttttattgactacctactttgatctgaccccaatgggcccattttctcctccccctttgaaaccccaagtgcttctccctatcaaccctgctgcaggaggctcctctaacatagccatttcctaaggagaaatctgtgaacgtccccaagcccttcctgcatgcagcccttcaacacatgcaaaagcagcttcggtaagtcagtccctgtatctttagatgtcaccggggatccgcaagggatattcaattacttatcaataatcaaccagagctttccagagacaattaggaaaactggtctatgtgggctcttttaaaaaatacattataaaagtgcagtgttttcatgcaattgccccgtcttctaccaaccgtaagcattgggaagggtgcccactacctgtcgctgagacctcaccagcagggaacacacacaggaccaggggctttgtgaatacttgtggaatggatgaacaaatgaattgacgggtggatgaatacaaacatgtcagagtacaaacatacaggcaaaaatcaagcatgaaaaattagaaacatattatgtgaacaatccactctgcatagcaaacccaacatgtaatgtggtttggcatatgacatcatgagcttccatcgctgc

SEQ ID NO: 307771 - DNA, 778 bp, Homo Sapiens
ctgcagggacccaagtgttcctatgtattgctggtaagcataaatgggaagacagtgtggtaaaatccatcaaaacagcaaatgtcccacacttgttcaagtaattcaatttttaggtacttcttcaacagttgtgttcctccttgtactaagtgacctacatacaaggttttcaatggtgtgtccacagtgagccacagtggggttctgtgtagctacccaaagatgtagagcacttgctgctgtgtacttaagttggaagatgcacaaaaaatgccagatgtggaacagggtggagaataagcatccatgtgtgtgtgttttttttttttttttttttttttttttttttttgagactgagtcttgctgtgtcgcccaggctggagtgcagtggtgtgatctcggctcaccgcaacctctgcctcccgggttcaagcgattctgctgcttcatcttcctgagtagctgggattataggcgagcaccaccatgcctggctaattgtttgtatttttttttttttgagacgtagttttgctcttgttgcccaggttggagtgcaatggcgtgttctctgctcactgcaaacctccatctcctgggttcaagcggttcttctgcctcagtctcccgagtagctgggattacaggcatgcaccaccacacccggctaattttgtatttttagtagagacagggtttctccatgttggtcaggctggtctcgaactcccgacctcaggtgatctgcccacttcagcctcccaaagtgctgg

SEQ ID NO: 307772 - DNA, 1000 bp, Homo Sapiens
gaattcagattcatttttctcggcctgtaaagaacttgaaattgcattatagcagaatgtaggccttgagtggattgatgtggaagcaaaacaagccacaaataaagacaaatgtgcaacatcaaaaacatgacttgtgccattaattttaagcagtttcatatgaaacgtgggtttctttattgctacgtcacagtcagatgttcatggtcctgagtgctctcctccaagcagtgggccaggagtccaggtgccttcctgtgattgactttatcatttcagaatcttttactttctgccacatagaggaagggaaagagaatgatagaagggcactctgcctcagggagtaacacattattatctccacattattttagtcacaaccagtcacatggccaagttaattgcaagggctgttggaaattgttgagaagtatattgatttagtgactcatattgtttctgacatactgtgtccggaattggtgggttcttggtttcactgtttcactgacttcaagaatgaagccggggaccctcgtggtgagtgttacagttcttaaaggctgcgtgtgtggagtttgttcgttctgatgtttggatgtgttcggagtttcttccttctgatgggttcgtggtctcgctggctcaggagtgaagctgcagaccttcacagtgaacgttccagctcttaaggcggcgcctctggagttgttcgttcctcccggtgggttcgtggtctcgctggcttcaagagtgaagctgcagaccttcgcggtgagcgttacagctcataaaggcagtgtagacccaaacagtgagcagcagcaagatttattgcaaagagcgaaagaacaaagcttccacagtgtggaaggggacccgagcgggttgccactgctggctcgggcagcctgcttttattctcttatctggccccacccacatcctgctgattggtagagcccagtggtctgttttgacagggcactgattg

SEQ ID NO: 307773 - DNA, 1000 bp, Homo Sapiens
ctgattgtatggtgctgtctatgaccgtgggcttttctgtggccagcacagtggtgccacctgaaaaacaaaaacaggaacatgcaaaaataagaaaacagtagcgaatatgcaggagaaaaatgtatgcttacaaatgtctatcagaggcaaatattttccatagaaaaatccttttaatttcaatgatagcaattgtttcccttcaattttgctcaccacaatatcaaattcaaataaaccattattttttttttttacctaacgcatttcttttaaaaatttataaataaaataattgtctaaattaacaaatggaagttgtatatatttatggcatacaacgtgatgttttggtacacttagtggaatggctaaatcaagctaattcacatatgcattacttcataaacctattttaggcttttttttttttttggtgagaacacttaaaatctaatctcttagcaattttcttttttttaaatttttaaatttttttttttttttgagatggagtctcactctgttgcccaggctggaatgcagtggcacaatctcggctcactacaacctccgcctcccaggttcaagcgattctcctgcctcagactcccgagtagctgggattacaggcgtgcactaccatgcccaggtaatttttgtatttttagtagagacagggtttcaccatattggccaggctggtctcaaactcctgaccccaagtgatccatccacctcagcctcccaaagtgctaggattacaggtatgagccactgtgcccagcctgcaattttcaagtagacaacgtatcctaacacctttctttacaaagcatccagaaggcacccagaaatcgggacttcactccacgggcactcactgattcccagacgacgcatggcacacaattgcaacagtgaaaagcaaaggcctctgaaaaagcaaagccaccttctcggtgacttgggtattaaacttgacctcaacctctaa

SEQ ID NO: 307774 - DNA, 1000 bp, Homo Sapiens
aagctggacagcttttttgagttttatttgtaaagatggaaaggctgaaaagacactttgcttttcaagtgttgattagaaagagaaagcggagaataatgatcactgctccacttctattctggaaaagtcattctcctcttctgcctctttgagttgctcacagaccaaagaaataaaatataataataataataataataataatacaaactcacaaacaaaatagaactgtgaccccaaagagatgagctcctgttttgtcccagcagagaacacagccccgttcctgcaatgacttagccaccgcggtcctaggagggtaatcatcccctgtgcggctgcatctcccttcctcctgcgactcgcttttctgtcctgtccataccttcggtattctggatcggtttgatcgagattatggcattcagtttccaaaggaaaaaaaaatgtaatcttccccagcccctcttgctggaatgaaacgtcagataggattcaggtgcaatccgtcatgcctcggagcagcacttttggtggttcatcttgaccttgtgcttaaggccatcgtagagctcgaagttgtagttctccagtgtggtgcagcttcgggagctcaggcccgagtaggaacaggtgcagtagagcaggaggcctgcacaggtggcccccaggaggacgcccagtgagctcatggcgatgatggtgatgaggatgggatccagggtgtacagccagctcttttctttgtcggtcgagggggcgccagaccctgaggttgcagaagaagaattgctccagtccacctcgtattcatctgtgatacataaaattcatgagagattgcaggcactgcctatgtcagggtgaagtgactgagcctccccagcccagaggctcttcagagcacagtagttagcagcagcagctctggaattagactgcctgggttcaaagcccagcctggccgcatcctagctgtgtaactttgggcaagcta

SEQ ID NO: 307775 - DNA, 1000 bp, Homo Sapiens
ttcttttacctcacaaaacacccatccaggttagacagagccgtaaacaagggcgatcgagacatggagaatttcaaatgcagtttattgcagcaaaacaaggaaatggggagtttaagacctctccacaaaagaaaaacaacttgcttacaccttatgtacaaaaccaaaacagcacagagataagatgctaaggagctgtccacaccctgggtctaactggtcctactctggctggcttaaggaggtgctttgaaatgtcatgtgggtggtggtcactgctgaactgtttctcagggaaagaacaaagcagggtcatagccaggggactgagattgccactgatctgaaaacttcattgggaaacagcagaaaagaaagagctgggggaataggatgagctagtgtaactaaccatagctcttttctccggtaaggctgggacaaatcgacctcggtcttgccaagcatatttgttagtgatgatgggggagaactagagctaatgaaacagagggcatctctttatctggttactccggaataagtggtagaaacaaacctcacgctggaactgccaccagaggacttgacacccccagagctggatccccggcctcctatggagcctccagagctcccgccgccagagccccggccgccagagctgccgccgccgccgcctccagagccacctctgtagcccccactgctgcttccggagccgtagctgccatggccgccgccgccacctccagagccatagctgccacctccggagccgtagctgctacctccggagccatagctgccacggccgccgccgccgccacctccagaaccatagctaccacctccggagccatagctgctacctccagagccgtagccaccgccgccacctcctcggctgccacctccactgatggtggtgtggcttgtgctcacagctgcaagaggaagctcagttattttcaacctcaactccgtttccagccca

SEQ ID NO: 307776 - DNA, 1000 bp, Homo Sapiens
tatatatatatatatatatatatatatatatctcacacagggtctcactttgtgacccaggctagagtgcagtggcacaaacgcggctcattgcagccttgacctccctggctcaaggaatcttttgcccagcctcctgggtagctgggactacaagtgtgtggtactgcacccagctaatttttgtatttttggtagagacggggtttcaccgtgttgcccaggtttgacttgaactcctgagctcaagtaatccgcctgccatgtcctcctaaaagtgctgggattacaggcatagccactgtgcctggccaatagtatcttttaaatgtcaatattctttttccttaactaaagctttagcttggagagtgtcttattatctttgtatctttatttagcatagttccttaggaatgagaaaatccaaaattcaatgttgcttttgcttttcaatccatctctgtatctctcagtccctgctcttattttctgtccatgtgtttagggatgtaaccaggattaactgaccaatgtccaaatatcaattaaaggtgcagtaagagaagggaaaagaaggagggtatagaccaaaaagggagagaaacaaagtgtcatctaggcacaacattcagtatgttaaaaaaacaaaacaaaaggaaatatccaaatacaggaccatcagctaattgtgacctggtcatatctaattctctaaattttattttcttcatggcctagtcaaaacagaaaggtttaatcatatatttatattataatcataaaaacctttagtaaaggcaaagccagaaaagcaaaaagacattttattgctcaatatatggtactgctttgatcacatgtaataatttgttttaaaggtaagttgaaagtgctatccttattcatatcaatagtaatgataatatgactgaaacagagacgcctttggcaatctataacatttcagggggaattaccttcatttctccttcttcta

SEQ ID NO: 307777 - DNA, 1000 bp, Homo Sapiens
atcatcctattctctatctcccacaagatcaaattttttaggtcccacacatgagtgagaacatgcaatatctatctttccatgcctggcttatttcatttaacacaataaccctccagttccatccatgttcatatttagctttaattttaaatagccattaagcaaatttccataatctgatttttgtgtatttaagatagtgttgtcccttcaaatactaattttgaatggaaatattcattaggaataggtatagattctacagttggcgcagaaaattccaaaggaagctacaggctatgtataaaatacatgttttaaagaatgaagttgaagaaaggttcaacttactagtggaggtgtcatgcccttgcttgaagcggggatgacaactcgaagatctggttttccactgttcattccaagattactgccacctggtggagggggagactttgtaggcatgactttacctaaactatttgcaccagtagctctaatcaaatttggagaagctcttgagtttacaaattcattccccactgggctgcttccagttccatttggcactgtgaagtctgtagtgcccaacatcccacctgcattgccagtacttggtggtctctgaggagctccaggggacacatttctatgtaatatggtttgaggtggagagagcgtgtttaaatctgttaacgttgagctggctgccaaagatggggacaacagtgaactccctgggttagtgtaggacaaagcattggggcttttcactggaactgtgacagacattgaaaaattctgaggtggcaaaccaggtgcaatgttatgattctgcatcatattatcaaattcctcattaattatttttcttctgtatatggagttagcacacatgaagtatcagggtctgagctgtcgcaccctctgtgttccttcttgttcagagcctcaacaatatctgagttggttgtgctttcataaggttaattatatt

SEQ ID NO: 307778 - DNA, 1000 bp, Homo Sapiens
gagctccttttatgctatttgtttctcatctcttctgcttttaggatcatcttcttgtccttgacctgatgtcttggcgtagtactctactatatctaggactacacttagaatgaataatatgtaataaaacatagtaagtgaagtgaagttgctggcttaaaaagtatttatttattgtaagcataagaaaatttgaccgatgtaatcttagatgatagttctaaaagtgttggttgaggaagtagaagagaatcagtacctaagcagttaaactaatgtgggaaggccccttttataaagatcctcttgagaaaacatttatacattattaatatatgactataattagaggaaacagaggtgagtgaattttgtcctcatgaatctcaaaggagaaaatggtttacagaattgcttggtgttcttcagattccaattttaaagtcaaatctgaattttaagttatgggaccactgataatatggtgggctaaagaatcaggtttttagttggattgtctggttttgagttgtgattctgccacttattaactctttgacttggggcatgatgacttgacttctctatgtttctgtttctacatttgtaacatgtagacaaactgataatttcttcatatatttgttccgtggattaaatgaactaatctatataaatcacttagtatggtacactatagctcgtgacagagaaatttgtgactttaatttttatgtacttgagtttaaaattagcatttagagagactgtcaggaattgtgaaatttgactgtgtattcacgtattgtagtcagatttggtgaaaaagtaattacttaataaaatataattacttattgagcaaattttactaggaactttgctaattgcttaatgtgcaccatttcatttaatcttcaagatcataaaagctggattttattttcttattcatttataaatgaataaattatattcaaacaggtcatactactag

SEQ ID NO: 307779 - DNA, 1000 bp, Homo Sapiens
ggaaagccagtttcccatggaaatttacacactgatgctaagagacacatacacacaaaaaaagtaaacaggactatgtaatcaatcattttattattttcatcaacaaccaacacagcaacacaaattgacagccagtcctcaagggaaccttttttgaagtgaagagcaaggccctgaatgagctacctacatggaacatagtatttgcaatatgcaaatggagacctaaaggctcatgacgggaacagaaggtggctgtatacagaggaacagacacgaagtggagttatgggaagttcaatcaacaattggcaacaagctaggtcagtagtttacgaaagtggtcatctatacagtgcctgagtttgggttctgggcctggatcatgtaagaaaggcagcaaagtctgggtgccatgaatcacacctgcaatcccagcactttggaaatctgtggtgagaggatctcttaaagctatggccttgaaaccagcctgggtaacaaaaccaagcccttgtatctaaaaaacaaaagggcaggtagattccagataaataatgttgcaggaagggggtgataaaatacagaaatgtgatacacagcaaaccctcaactgctgtttcattggctcccagtgtcttaatctgtgtctgctaacactttaaggtacatctgaaataccccccaaacccagaaagcttttcaacagctaggttgtccaagaacttggaaaattcaccttctgatgtcctccaagacagattcctgcagaggtaaaaaaaaaaagttcttattggattggaaaatacaaatgaacacaatatttaacactatgtaacctaggagcaaaaggttgctattataaaatcagttaaatatttaaacagatacctaccattttttatacaccttatttgctcagacctggaaaaaataaaaccaatgttttcaacaagtgatgattactccctttctctgtatagaaatctttatcatc

SEQ ID NO: 307780 - DNA, 1000 bp, Homo Sapiens
tgcaaactgcccaggtctgcattactttattttttatattggggttctatgtaagatttgtttttgaaaaacatttaaaaatcactgctttggatttattccacactccactggtatttttccccctgcagttctccctaactgctaaaaggagctcagcaggtaaaggagcagggcctcttttccttgaaggagtcatgggccagtgcagcctgcgcttaccagctggcattcccactcagcttcctttcctgacttagaagttgggtgataggctgccctgccgctggagaatcttggtcttcctcctagaaaagactggatatcaggacaccagactttctctcctggtttggaatggctagtgacctccatccctgcagttacctagaaaaccaccttagcaccatgtggaaggaaaggaccgtctgaaactaaaacaacagtcctcttcagtatggagggtgctgcatatgggctgagaatggctgggagaagacccctcacggtcaagccttagagcttcccacctcttgaaaatccaccctgcccctttctttaaagtgcacttaataccagatggggacattagagaaggaactctttgtggagaaaaaaaaaatgtacattggggaaaagtcaggctccagcttgaaaggaaggcaactagagagattttgccaatgagctggaagcccccaaaccaaggggtggagatgggaggagcatgccgcccagtatggaacaagaaagaaatccagctcatcacttcaacttgagggcactgtgacaaaaaaaaaaggctcagaaatttcccagcctattcacccccaaacccaaggaatcaatcattttgactacacctgcctgtaaccatctccatggacagatgagcagccattgacaggctgctgggagcagtctgcctcctccatttttcaaaatattttaaatcagctctgggttctggtcatgagctctggggcagggaatatcaaaa

SEQ ID NO: 307781 - DNA, 1000 bp, Homo Sapiens
cttggagatccacgcgggcccagccatcgcttcccctcctggctccgcagcaacagccgcagcggcagtgcgcaagcgcccaccccacgctcggagcccgcccctgcacggccacgccccctgaacgccccgccccctagaccgcctcaggattgcttcgcctcgctcgctgccccgcccctggacattccgctggcgaatcgccgggctcgtctctctgtgactggcctggctgagcgccaggcgaacccggaaactgaggggccggcatctccgggaaagcttcttcctcccctccctggttcattgactcgctgttaaggtaagacgtttgttccacacctactaggtgctgattaatgttctaggatctggggcattaaaaagtatcttttcaaatagtatagtctgtctcataatatataattatgacccacagaggggaagctcatcgcagactagaagctgctttttacctattgccccctcttccctggttccccaagcattctggttgtgtcaggaacccaattcagattttcttaagcagaaaaggggactaataggattcctcgttgggtcactgaagccaaggaagagtcagggacttggtcactgtcagggtgctctgccactcatctgtatgtctctgcttggccacattgtttttggctgcaagtggccttctccatgtcgggggcagtgtgactgagcgcagtcctagagcacagccttccaggtctgtgactcaggccaaggagtcaggtcctgtggtcagcctggctaggtcatactgtggccaggcaactggatctgttaccagaagaaaccttttgaggaggggaggagaggttaagggtcagaatcatgagcccggcagccacttctgtttgtaatggttacatatgtattaattgtaaagcaatatgtgtggcattttgtcacacctttgtgtggatatcagggctgttttgatgttaacgctaagatgttgcctaag

SEQ ID NO: 307782 - DNA, 1000 bp, Homo Sapiens
tttttttttaatttaaaggctttttattaggaaccaggggaatgagctgcttatccctctataacagtctagagcaggtcatcaggcccaggatggagagaggttatcaaaggtgctgtggtgtgctttgctgcacgtgcttagggcctggaaggaaaggtggtggcaacagaggttggcaggaactggtgttagtcaaaacaccaaaatcctgggggagagcccctctaccttccttctaactccacttgaggtgggagcattccaggagacagagaatgtgaccaggatgcagcagtgtcatctgaacccctggcttcgttcagtgctacttcacttgccagccctccactcttcttgccttttagtgattaggtatttgaagaactcatacacagaccatgcgatggctgtggaggggatctggtaaattactctggcctgcacccctcggaaataggcggtcaccccacctacttgatataccgtcctgaaggcactagccatgcctgtgatatgtcctgtaatgtgtgagttcaaagccaaggactcctgggtgttgagcagtgttttgcaaacgtccagtggggttgtggctgcggcagctacagctcctgcgcaagctccagagaggacgtgggagcttgggttgtaccgtctctgggggttaaagtgctcctgcaggaattcataggtcatgaagtgaatggcttggaaaggaacgttcatggtcagctgggtggtgtagctgcggtaaaaggccccggccccttcattttgccacactgcccgtacacagtctgtcacccggtggtatggtgagttgtacatctgcatcctctgcttgaccactagtagtgccatcaacgaggaaggaaatggtgacagcagccaaccggtgatggagagtatccagattcagagccccaagtcagcagatcagccaatggaatagagagagaaaaaagtatgagtgagctgctggctaacctgagaagtc

SEQ ID NO: 307783 - DNA, 1000 bp, Homo Sapiens
attttttttctttttttaatatcaaaatatattttattctggacctctttcagatctgattcaaattacagttgtcaaagcaatacaatgcaaaggggaactgcaacaacaacaacaacaagaaatgtgcctagaaaggataaaagggtcactggggacaaatcattgtgatgtggaactaaaatacgtcgtaagtgtaattaacatggtccaggacagcacagaacatctacatcagtcttccttacacaataatcatgaaaactgaacaatgaagttctttaacatgtacaaaaacctgtcatgggctggtttacacttttacaacagttttaaagttaactggataactaaagaaatgatgcagacattttaatccagtgctataggtaggctcacagaattagacccaaaggatttgtaaaaacaaaaatggaaacagtatagctacaatgtcaaagtcaggaaagaagaaaatttacttccgtattcaaggattacagagctacaaatgcagttctgtgtgtttttgtttgtaatgagatggataagtacatcagactagatacaacatgcagaatgttttcctgaacttatccggaaattccaaagaaaacatcatgaaacagcttacaaaaaaaaaaaaaaatatatgccctagttattcaccctgcttcaacactgtcaacgtaaaggcagaaataaagcaagctatcaatacctcagaactactgatataagacatcaaatttctaaatcagtgtattaaaaaagtgaacacttcctctttcttctctcttctacatttaactagaatcatgtttaaaaaaaactgatattaaatgtgacacttcagagctactactggaaggagtaattcataacttccctaccctccttccatccctgctgattcaggagaagggggaaaaaacaaagaaaacaaaacgaaaaaccaaccagggtctcttgtagatttgctgctattccacaaaatgtt

SEQ ID NO: 307784 - DNA, 1000 bp, Homo Sapiens
ttttttggcatgcagcatatataaaatgtgatctagaattgaaattgtaaaacagaataatcctcttaaagaaaatcagcctatgaacagtcagacttgtccttccatggaaaacataatctaaacttctttaaaaactggccatattttttcagtctgtaattcgaataatgaagatggcataacaaatttttttgcttactaggaatgcgcaaaaggatgagatggatacacaggtttaaaaaaaaaaaaaaaaggccactgggatatttagtatttgtccagatgcaaaacaatttcagaataacaaaatacacaccttgctttaggccacgtatatgatacacttcatagattctcaaacaaaagatgaaaatttcagtccacatttaaacattttaaagcataacttctaatattttgttaaaaataagtcaaactaaaggcataaatcagaattacctgttaacatagtggggaaagtagggaaagccctcccagggccccgtgccccaagtaaaagacaaggagttaaattttacaatgaaatccacgtatactcaggccctttaacactaataatccaaagtggagacccaacccagttcctaaagcataaaagagtgattttaagaaaatatcacattttgagttacggtatattcatcacatttttccctgtaattttcactttaacagtgatagtcttagcagcaaaaatttgctgggaatgttaggaaaaaaggaagccacacatacctactaatttaaaaatatataaactattttttacagaagggcaggtttaaaagaaaatccaatcatgatcttttcatgccattttttgtcaactttccatacacacgcagacgctaacaaagtactgtgtcatatacactgaagtgtcctgaagatgcctgtgagctgctgattccagctggtaccagggaagcatgtgtggctaagttgcaacaaacttaaatttgttccccttagttct

SEQ ID NO: 307785 - DNA, 1000 bp, Homo Sapiens
gcagcacatcaccacaaacacgcaggtcatcaccggcgtcacgtccaccgcctcgtcctcctgcttctcgggcccatcgtcgcgcttgtgcttcatgtaccttcttgggagacaccatggggtcgtggggccctggggccggctggccgacacggggctcgggagcccacagccacccgggggaacggggcagaaaacccgggagcaggaggggacccgggggggactgaagtgcaaggaaccgccccgaacgtccccagggcagaggagaccacacagcagagggtggcagggcccgcgtccctgggttgagctggggtggccactaggccgggccagaggctggcgtgtgggcagcaaccgcagcttggatctgcataaagagccctggacatggggcctccccagacccaggcggctcagcaggaagagggtagctggccccagccacctgcccagccctgcacctgccacgcccgtacctgccacatccacacctgcccagccctacacacccaccaggtgcccggagcccaccctggcaggaaaagagactgattctgtcccaggacctcctgaggaagaaacgaagggctccacggggcgagccgtgcctgccgaggccaaagcactcactgctgttctggaagactggccgtcccggcccgtgtcagagccgcccgaccccgtcacagcacacgcacgatgcgaaactcacttcttcacgtcccgactcccggcccagtagccgccgatggcgacggtgcccacagccatgatgaagatgatgaccatgttgtagtccagcaccggctccttaggcgcatacagcgccgccctcaccgtgcggccgaaacgctgcctcaaggaacacaccggaggcaggcgtcagagccacccgccagccatgggtcgacgtgcagctgtgggctgtggggctggggctggagaccctggcctgcaggggccacgcctcacccaccaccctgatcccaccaac

SEQ ID NO: 307786 - DNA, 1000 bp, Homo Sapiens
gccaagtagggaggattgcttgaggcccggagttctagaccagcctaggcaacatagagagaccccgtttctacaaaaaattaaaaaaagattcaggccgggcactgtggttcatgcctgtaatcccagcattttgggaggctgagacaggcagatcaccagaggtcaggagtttgagaccagcctggccaacatggtgaaacctcatctctactaaaaaaaaatatttcataaattagccaagcacgctggtgcatgtctggaatctcaactacttgggggaccaaagcaggaagattgcctgagcccgggaggttgaggctgcagtgagtggagatggcgccactgcactccagcctgagtgacagagtgagaccctgtctctaaaaaaaaagtaaaataatttttttttgagacggggtttctcttgttgcccaggctggagtgcaatggcacgatctcagctcactgcaacctccgcctccagcgttcaagcgattctcctgcctcagcctccacagtagctgggattacaggcccccaccaccgcgcctggctaaaaaaaaagaaaaaaaaaaaccagagagaactttctctctctctctaaggaaatgtcaggtagacagagcagggccagggatctcaggggaccccagttgggctctgtgcagcccaaagggcgggggctggggaggtcgtgcaggccagggaggctgagaggacgtggggccagtacgggtggacggccgcttgggagccgtgagctcctggtcgggggtggagggtggccagaggggacagcggcactgggtcctccaatgggctttgggggtccggcatcctggaaaggacccagaaccttctccccctccatcctggcaggtcagatgcagggcatcccggactcccacagggaggggtttcttgtccgggtcatctggtcgccttgctggagaggcctctgcctgagctgagaggaggctggagctcactccccggg

SEQ ID NO: 307787 - DNA, 1000 bp, Homo Sapiens
ccggcctatttctctagattttaagttcactgcaacatgctactttatgcatgttgcatttgtttccttttgactatttcaaaggctgcaggtggtgagtctccatccaggatagcagcaagtagactgttcttttcacagaaatccttatccctacactaaagaaacatccgtccctatctctaccagtagtatattttgcaatgaatgataaacctcaaaagtgaaaggttcagtcagaaacccaagccactccactttgatctgatctgtcccactgtgtctctcatttagcttaagaacatgccttccccatcacagagtcttgtcctaagctagcctgttcatccttcagccacagctaaaaggagatgctcttactgttggctcccatgccatcaggaatggttgtaggagtgagggcgttgcgctgctgagggttgataagctggctcacagaaggcagcttgttcatgctgttcattttgttcagaggtggggagctgttaccatatgaagatggagactgtattgaggtcctaggaagacaaacatggaaatgatggtgagcacgggacactgaagagtggggactattgattttcaacaggtctctgtttaaaacatggcctcaaaccaaacatttgaaaacattcttctaggattaatggtaagaagttaattttgtttccatctgagaatatttcctgaatagggagaaactgactgcgaggctatcatcaaatcatatttttcctgaatgtgcagagtgcaaggtttagtatttcctttgagaaagagaaaattcttgcctcctcttttcccttcagttgttttctccattcccttctcctcttttcccttcaactcaaatgagtttgaaaagcagttagggaaaagaattgagcaaagacttaaaggctgacgaaaaacatggatatcccaccctcaaactgcagctaaggcattccatttgtagctttctgtatattccatttgg

SEQ ID NO: 307788 - DNA, 1000 bp, Homo Sapiens; identical to SEQ ID NO: 119860

SEQ ID NO: 307789 - DNA, 1000 bp, Homo Sapiens
gcattgcagaaatgccagggggctcggacatgggtgcccacagggtaggtttccacccaggtcgtcatcatctggcaccaggagcctgggggggggtgcccggcggcagaggctgagaggtgcaggggtgaggtggacagtcccctgagccatccctgtggggcacacgggccacctgtccagcacttgcgctccacgctgaccatctcacaggcgctccaggagagggttgaggccccccaaacctggcctgcagccatcctgccaacaacaggaaggtcagcacaggtcagccacccacccctcacatcagcctagctatgtctcccactgccacacccagggacccccaagggagatgggtgagaaataaacccagcagagaatggccccaccccagggcgatgcgtcacagggagcgacgcggtgctacaaaaatattttgaaatgataaaaatttatagcaggctcctaacaaaacagctctgggaggtgtaatgttctgataagagtttcctcaggatgccctttgtttatccctatcgagcgcggccccgccggggggaggcggccacggtgaagcagggggccctgagtacccccagagaggcctccccagagcccctcggcgccatgcagaccctagagcctgtccacaggcatcttggggggagcccactgctctgcctggtctccacctcagccccgggggagagatggagcccaaacaccccaaccctgggaggggctgacagccatgggggtgccccaggtgggctggatggcacgggctgagggcccaccctgccccggcccctgccctgcagcccaggccggaggatgcactattagaccacgaggcgagggggctctggcacaggcatccctggggcagaggccaggagcccttgccagtttcttcctccccagaagaggtcacgatgaacaacatgccccccggtcagcctggctctgcagagctggaacagaaccagatgtg

SEQ ID NO: 307790 - DNA, 1000 bp, Homo Sapiens
  misc_feature (518)..(518): n is a, c, g, or t
gtaaggtttcttatgcctgtaatgacaacactttgaggaggccaaggttagagtattgcttgaggccaggagtttgagaccagcctgggcaacatagagaaaccccatttataaataaataaataaataaaagtaaacatacacttaccagagggcccagcaatcagactcccaggtatttactaaaaagaaattaaaacctgtccacacagatacttgcacacaaatgttcatggcacctttattcacaatagccaaaaactggaaacacatcaaatgtccacaggtgaatgaagaaataaattgtggtatatctgtacaatagaatactacctagtaggaaaaagaacgaaatgctgatacacaaaaccatagatataattcaaaaacatgctgcgtaaaaataagccagatacagaagagtacatgatgcattaaattctagagtagggtaaactaatttgcagatagaaagcacatccctggttgcctggggcaaagtgggtggcgaagggcanaaaggaacttttagagatgatgaaaatattctatatcttgatttcatactgggtaagatatatatatatgtgtgtgtgtgtgtgtgtgtatatgttaaaacccatattcctcatgacttaaagtgagtgcattttattgcatgaaaaagtataactcaataaagttaatttttaaaatgtcaaggtcaagaaaaagcctaaagaactgtttcagattaaagaagactaaagagacattacaatcaaatgcattgaattatcctgaacatggatttttaagaaatacatataaatggcattattgggacaattgacaaaatttgaacatggattacagattagatcatagtactgtactaatgctaaatttcctgagtttgataattgcactgtgattatataaaacaaagcccttgatcttggaaaatatttagacaaagggacatgaagtcctcaatttattattaagtggaagatagaaa

SEQ ID NO: 307791 - DNA, 1000 bp, Homo Sapiens
aaaaaaaaaaaaaaaaaaattataagaaaattggagcaatgtggtcgctggatatttaatggctgggtttctttcatttcttttttctttttttttgagacagtctcgctctgtcgcccaggctggagtgcaatggcgcgatctcggctcactggaacctccgcccccaggttcaagcgattctcccgcttcagcctcccaagtaaagaggattacaagcgcccatcactacgccccgcttatttttttgtatttttagcagaggccgggtttctccatgttggctaggctggtctcaaactcctgacctcaggtgatccgccggcctcggctcccaaagtgctgggattacaggcgtgagccatcgcaccctgccgggtttcttaatgaataattgtaatgtggctatcttttcagagtggttatcttttacagttatatatttacaaaactgaaatgagacatctgggatttgcttggcaatagtggaaccaaggagtagtgggagtagggatgaaacaaggtgggccatgtgttgataattgctgaggctggttggggaggattcattattacctttcttttttatgtacttggaattttccataataaaaataatagtatgacctataatagatgtatacatacacagagtggtagaaaaaaattcatcctaaatgtccaccaataatgaaatgcttaaataaatggatacataaacgctgtggattacacagtcattaaaattgttcttaacaaagaccacataattagcacaaggaaataattttatatccaaaacaaaaaagccaatggtaagaaatagatgtatttgaacttttattgaacctagaagctaggggctgggtgtggagcctcacacctgtaatcccagcactttgggaggccaaggcaggctgatcacttgaggtcaagagtttgagaccagcctggccaacatggtgaaacctcgtctctactaaaattacaaaaattagcc

SEQ ID NO: 307792 - DNA, 1000 bp, Homo Sapiens
tttttttttttttttctttttttttttgattttctacaaatcacctttatctgcattttagtgtgcagccttgtctgtctccagacatactatagatacacatttcatatacataatatatattatttataaaaaacagattagagcattgactccagattctacagtaagaactgattaaaattgtacaagaataaagtctgttggaatctgtagaggtttctatacagtggaggtgtgtagtaagtgcaaaaaaaaaatactgtcacttagttaatccaggattttcagttctcttgctttctggaaaaagcagaggctgttgattcacccaagtgacaaagtgccgcttctcccactggggaggggaaaggaggtggcccaggaagtgcacggtgtggattctccagcttctggtctgaggtccagccaggcggcagcatgttttagagatggggctggtgcttgcccaaggtgaccaggcgaacaaagacgccaagctgtggcctgaggaagggtgcttgctgctctcaccgtgaggttgtgcctccctggtcattctctaacttggaatgcagctggctggggtggtggagcccatcggagacagtcttgccgcctgttttatttggtagactcctcctactggaaagctctccagcagaagaatctgtcaaaccatcaaaatcttttccctctgacactcccataaattctgtgaaagaatggtcttcaaggatgttggtggtgtgttctaccgtcacctccctggggcagaatcccctggctggctggctaattttgctggggcaggcatctagttctgaacatgagccagtcctgcacagtgatttggagtttttctcagggatgctctgggatgatgggctccctttggctaaggcactgttttccttgagtggcaccacaattatcttgtcctttaccaagcctttttcgacttctgtcaactctttgtttgaggacggcctgaaatcat

SEQ ID NO: 307793 - DNA, 1000 bp, Homo Sapiens; identical to SEQ ID NO: 119861

SEQ ID NO: 307794 - DNA, 1000 bp, Homo Sapiens
aaatcctttttcctgaaccttagtctcctcacctgcgaaactaagataatacctactctgtagaattaatgtaaggattggtatgttgactaaagaaaaaatattaagcttttaaataattaaaattagttttatttagaagccttattgaggactatagactgaggcctgtagcccaggagtaatcttgtgaggctcctctaacacggtattttagtttaggttatacataggtgaagatttagtatgtgtaaaatcatatcaaagtttagggataagtatatctggttatagattgcagagtataatcattaaccctgtcagacatgatcgtatgtttaggagaaggcaaagagtaggtcatttatctttgaaggaatgtagtgactcaggcaagagatttggagggcaggggtgttttgttttgtctttaaggcatttttttctggagagctgtattttgtttttttgttttattttgagacagagtcttgctctgtcatccaggctggagtgcagtggcacgatctccactcactaccacctctgcctcctaggttcaagcgattctcctgcctcagcctcccgagtagctggtattacaggcacgcgccaccatgctcagctaatttttgtatttttagtagagacggggtttcaccatgttgcccaggctggtctcgaactgctggcctcaagtgatctgcccgcctcagcctcccaaagtgctgagattacaggcttgagccaccgtgcctggctgaggagagctgtattttgtcacagagtcaggggagaaatgagcacataagcagaaatgagcacataagcagaaatgagcacataaggcttttaatgtttgtgacattctcatctcaccggtaaaataatgtgacgtgtactggaaatagaaagatgggtggagaccatcctctcctagcaccctcaacccaaaacccaagcagcaccagcagcccctgcccaaacattctgtttctcc

SEQ ID NO: 307795 - DNA, 1000 bp, Homo Sapiens
aaggtctactataatggttaattttatgtgtcaacttgattaggtcacagggtaccctggtatttggtcaaacatttttctgggtgttactaatgagatatttggtcaaacattattctgggtgattttggatgtgattaacattgtgatcagtagactgggtaaagcagattgccctccctgatgtaggctagcctcatccaactagctgaatacctgaagagaacaaagactgaccctccccaagtaagacagaattcttcctgcttgactgccttgtaactgggacattggcttttttccctgccttgggactctaactgaaacattggctcttcctgggtttgagtcaagcctaccagccttcagataggaactacacccactggcattcctggttctcaggctttcagattcagactggaactcaaccactggctctcttgggtctccagttgcccacctccataatcatttaagtcaatttcttataataaatcttctatattttttgcttatttatatgtgataatatagatatagctatacatattgtatcctattggctctgtttctctggagaaccctgagtaatccatttacccttatcacttctatttgaaattgtactgggattcttagccagtgcatacaggaaagaaaaaagtttggaaagaaagatgtaaagctgccaccttttttcagattttgctttaacattctactggagctcctcacctgtgtagcaaggtatatctacaggaaaatcatgtcataattacatttaatgtactcaaattcaactatataatcctgctggggagaagaaagaaaaagagaactacagtgctaggtacggtggggtgaggtacatacattaaatactacctgtcattaagcccattaatcctctccatgaacataacaacggcaaacaatagaatcaatcaagcttgatacctgatagaagtggcaaaacatatggacataaaatgtcaat

SEQ ID NO: 307796 - DNA, 1000 bp, Homo Sapiens
gaaaagaaaaggaaggaaggagaaagagagaaagaaagaaaaaaggtagtttttttttctgacaagcattagtttcagtactatgaagtccagattgggagggaaaaaaaatgtctgagtacagagtcagaaatgagaaatctattaatacaatttccttagaaaacaaaggaataactttagttctcattcctgattttactcttatatgaacttggtgaagtaaggttcgtgtatttctggaaattacctacttaataaagaaattgaataaaattgctgtcattatagtatacctttaccttcactcaataacactagtaatgacagtaccacccacaactttctagatgaaataaataggtctgcattgagcccaaatatattaagacaataagtacactttactggaaaatagcaatacattattaatttcagttaaaaatcaagcaggtagaaaacacacacaaaaaaaaaaaaaagaaaggaaggaagaaatgaagaaatcaagcaggcatggagggacacataagggtcttggataactgaattactttgtcaaatctcaaatcataaaaatcaagagtgctggtatcaagaaacaggagaaggcaccaaaaccatataaatgttataaacggttcagaaaaaaactaaagcagctatttttctattaaatatattatgcttgtttatagttactaaagcacctggtgggctcaaagtaaaatataaaagacttacctaagatgccaaaatagaaactgccctatcctccgattaccaagtgctctttctaataggaatctagagagggcacaatcaagaaaaggctcatattttaacacttgcaccagttgtaaaagatattgagaaagttcttcatcactgaaagaaacaaaagacacagtgagtaaccaaacaacctgtgccagaaaaagatcccttggtatcaaactatcaaatgtgaacttgttgaaacacaatggttcttttgggc

SEQ ID NO: 307797 - DNA, 1000 bp, Homo Sapiens; identical to SEQ ID NO: 119862

SEQ ID NO: 307798 - DNA, 954 bp, Homo Sapiens
tgacagaggactcacgcttggatggggaggtggagaggtccatgcggagaggagctgggatcagggttggggggaaggactggaaagaggagaaggagcaggcgtcggggacagctcagaagcccccatccccttccttccttcctgcctggcctgttctggctccacagcccctgacaactggggtgggggaggaccctccagcccctgtgtgcagggcgtgggcctgagagacgggcctgcctggggtcaggaggggtggaaggacaggtgacatccaaggccggacctacccacttatccaaattgagggcctgtggggggcagggcagagagaggaagaagagcagatggtaagcgacccccgggtcctctcacccatccttgccaccgtgccctaaacgacccctgggtcctctcgcccatctctgccaccccgccacccccaggtggggtcctcacctccacgccagcctccaccgtgttagccagcatctcctgcagggctcgcacagacagggactgctccaggacgaagcaacagatggccagatcggggggcacattctggggtgggaggggggatgtaagtgaggtcaagaagacccccccaccccagcaacattccctgccacactccctcccctagtctggatgcccacactcttgagacgccagaccccacccccaccccacaggaaggccctgccctctgccatccccctcagacacactgaatctagaccaacatcacgaaaacacctcttctgtgcctcctccctcaaacacctcagacccacccagactccatagaaacttccctaaccctaaccctccccactaacccgtgttccacctaatctcataggaagcctcacccccatgcctctcccctgagacacactgaccctgctccaaggacaggaatctcctgttctgtgtcctcctctgcag

SEQ ID NO: 307799 - DNA, 650 bp, Homo Sapiens
ggtatgtatcctgaggtattcattaccaagggatatgcaaagtaaggggaagggcggtgtctcacccgatgctctggatcatgaggttctcctcctgggggcccatctgcacgatgagcagcgagcggatctggccgaggcactcgagcaggctcatggtgtcttccacggaggacggtgagatggtgtacgcccgcggcagggcacgcagcagctcacccagcccgtcgtactgccggtgcaggaggctgaacatggcccgcaccagctcggggctctgcacgaagtcctcttgggcccagcgcaccaccatgtgggacaccagctcctgcagggaccctgggaaggagacaatgcaaggcttggagcaccatgcagggcaggtcggcacatggggccttggaccagaacaatgtggaaggggccccctgttccagaagttttcccagttactaccacctgcgccctccacctgctgggagcaggcagattctagcagattgttttcctttttttcttttagagacagtgtcttgctctgttgcccaggctagggtgctgtggggctatcacagctcacttcagcctcgaactcccgggctcaaggtatcctcctactgtggcctcccaaagggtctgagggattagga

SEQ ID NO: 307800 - DNA, 1000 bp, Homo Sapiens
acaatggtttcatttcctttttatttattccttgaaactgctcgtattgcaagtttttcacggatgaaatatggaactgagcagattctttttttctcaaaattatggtataaacttgctcattttctatcttattgctaataaacttcaggcgcacagtttgtaaaataaaccccttaaggactgaatgcgtaggcatgctgaaaggtacaagaaataagctaaaatgagatataaacctcatctgcaccaacacagtactgaatgctggcaaacaatttatcacaacacaggggaaaattaacaaaaggagatacagttgagtcctgaaagggttaacagaaaccctatatattattgtttctaaccatccatcccacattacagtgcttgaaaacaaagtcataagtctggcacagaaaattacacacatttgttcagtacttatcagaaacacagctgcttttgcaatcaaagtaacttggttactaactgaacagcattttgtttcaaaggaacctcctccccagtggattttctggttagcatgactgttaggttagttctcaaaaatggcattggaagttttttgtgaaagcacagatggtaccagattcattaaaaacaataaaacaaaacaaaacaaaaaaactaaccagtttgattgcagataagtctgtgcagtaagagtgacaaacatttcacgattagtcatgtataaacatgcctttaattgcaacagtttaagaaagtgagcagcaaatttagatagtatactgtgttcaacgctgaaatcactcaaaatataaagggcatttttaaggcttttagcttgccttcccaatctatgtgataaattaatggaacaaataaaaacatattggatcagagactcagcttctatgtgtatgttagaaactgcatagtcatgagagcatagatacattctaaacaggaattttttaaaattcaaacatactataactgaagcactcaccat

SEQ ID NO: 307801 - DNA, 1000 bp, Homo Sapiens
tctagaactgcactacaccctactccatctcttagacaaaacagaccaaacctttttgatatttgattattttttgaaattgagaaatggtgtggaatcaaacttttctgaaagagtttggaaattgcctcgacgtaggcctaacaagatttaaacctggggctgtggaactaaagacctgtccggaaccataaccattacacaaacccctgccctcagcaggcaaagacctacaggccctcttaacacaagatctaagtttcaaagtatagtccggggacggagacggggacgggggttgcgggtgggaggtaacagcctaaagaaacgtcgtatatatcaaagaatgtccattttttattttttaaattaaaatctaaacctttaaatgtttggaagcaacgcctcaactaaagagcagtgtggtccagggtttatgaatccaaactactcttaaagtaaaccgagacactctgcctacagttttcggcatcaagcggctccagcgggcagagggttaaaagaggaccacatcacagaccagacgccgaccgaggagtgagggcgggccagccccgcactggctgccgctccaacggaggtcaggacagggagcccccctcaactcccacctgccccctcgctcccttgggtatactcgagtctacccaagtccccgggatcgggcccctccccaggtcaccgctcccccaccgtctctcgcggcccccgccccgccccggcgccttcagctccagctgcgtcccctcagccctgggtctccttagttgtcagcccttcggcccctcccctttagaggcgccccagtcctccgtctcctcaccggggttggcagtagtcgccgccatggccgcagatgccaccgccgccgcgccaccccccccccccagggggaggagccgccgccaccgaaccgggagggaggggaaaagaaaggccactccccagaagcggcgcctgaccgccgcctccgctaccg

SEQ ID NO: 307802 - DNA, 1000 bp, Homo Sapiens
cctcagcctcctttgtagctgggactacaggcatgtgccaccatgcccagtgaattttcgtatttttttttgtagagaggagattttgccatcttgcccaggctggcctcgaactcctgggctcaagtgatctgcctccttggcctcccaaagtgctgggattacaggcatgagccaccatgcccagcctaaaaggccacattttttaaccacattttcaaatgatcaagaaaatgaatatactaaagactcagaatggtttaatttcctgtgaaaaattggaatttttagaaatccatttcccaataaagagtatcttgtgattttccaacatcactatagacatatgactttcaatattgctttttgataatgcatataagcacaatgaaaatagtaaataactgtagtacatggttatcataggaaatggaacaaaaaatttaaaagcattcttacctctttgctttcttctagttctgactcactgctgaactcttcagtatttaagttttcaaagtcagactctccaacagcaattggcactgtgacggtgaggctggggttgtttatgaatgacatataatcattttcatcgattacgtatttttcaacactgcttccagtacctacaccactggtggttccattcccatctctaagataattaagctctttgcttatttcaattccagtattattggacatgcagctgtctatcttattgccttcatggatttctataacttttggctttctaaaaaaggctttttggaaacactcccgcatcttatttttcacataatcaattcccttttgcattcttcctactgcaatctgcagattattcatttcattgtcatcatcagtagcagcaaggttgtctgagctaaatgaactcaacaataaggccagaaagaggttcagaacctaaaagaaaaaaagaaaaatgtctattttaatattgaaatatgcatttaaataacagcctaaaaaggga

SEQ ID NO: 307803 - DNA, 1000 bp, Homo Sapiens
agatctccaaaaagtgaatgaacattacaggattaaaaaaaaaacctacatgacattattttccaaaggtacatacaattatgtgattataaatccattaattgtaaaccagttacagtgattacctctgtatcaccactctggtaagcggaggaaggcaagaggagaaaagggctggggatggtcaaagcagactgacaccacatctataatatttaaatgcaatttcttttctaagaagtatatttaagaaaatctatgtactaattgaaaattttaaaaataatacattataaacactatgttgaactttttcttccagctgggatgaaatgaggctggattcttgaatgactaaaaaacactggacaaggccaggcacagtggctcatgcctgtaatcccagcactttgggaggccaagacatgtggatcacctgaggccaggagttcgagaccagcctggccaacatggcgaaaccccatctctattaaaaattacaaaaattagctggccatggtggcgggtgcctgtaatcccagccacacaggaggctgaggcaagagaatcgcttgaacctgggaggtggaggctgcagtgagctgagatcgcgccactgcactccagcctgggcgacagagtgagactccatctcaaaaaaaaaattgtttctaatgtttaccagagtcactaagcttagcatcaagttttgtattacttaaaccaaatgtgactatatttaaggctaatacaaaacccaaaattcatgatttctaaagtgaattattcagtccacccttacaggttttaaggcttacagaggagtaaattcttagttcaagtccactgatataaaatagaacataattttgcccacaaaataacaagaaccacacttcaaagtcacagcatgtggcttgatagtaatttataccaaatagttcttggtttttactttatatgcaatatgaactaaaaaggcagaaagtcacaaactagc

SEQ ID NO: 307804 - DNA, 1000 bp, Homo Sapiens
ttttttgacacttcttggctaccacatgggtgaaatttcccttacatactatgccccaaaagagctgtgaccaacctggtggttttatggcacaccagggaagcagtcttggtttggagaagaaacccaccatagagaggaagcacctgaggctgtgtgttaggactcttctcttaatgcttgccatccaaagacacactgaaatccacctctcagggttgaggtgagaacaacaagttcatatatatggcgcgctctggactgtgctgaacacggcagctgtccgacatgtgtcactactcttctttaggctctgaattgaagcgtgtcacttggtttcttcatgccttaatgtctccaacctgcaaaatcgaggcagcaaaccaaaagggcagcagatggcccagtttactgtggcggggaaagagtcatttcctgttgagcagggcacttctactactccctggcacatgcagccaacctgggggcaggtacggcagaacgtggggctcctcccagtgccagtatagcagctggcctgggcacctcgactcctatcgggaagtacccttccctactttgctgggggatcttcttttgagaccttcctcaaaagcattcataaccctaatccacaattttaaacaacgtacaacaaaagttggaagttctcacccccatcctcccctaagcttcccctccccttttaatatattatctctttcattccatccattaaatgtcctctccttatttttatactcaaaaatcaacattaaacagaaaatttacatacacagattggttaaaatatttacttgtagatttataaatagtctgcagtcccaaggacaattggccatgtaatctattgaacaacagtgatctgtataagtttggtcacaatggaaaactacagatcctgtaaaggtttaatatgcaggactttaataatgtgtaatttcacacatgcagggccttttacatgcctgtggacttt

SEQ ID NO: 307805 - DNA, 1000 bp, Homo Sapiens
ctggacattttttaaagtccaaaagatatttaaacgacaactctgaattcattattttcatccccacaaaatactgattaagtgctttctgtgtacccaggcatgcttttaactcctagagttcgagttgtaaattagaaaaaaaatctttgtcctcactaacctcacactctattcaagaggctcagatcaagcatgattttctgttagacaatttcaagcgtgacaaaaatcaaagagtaccacatgaaataattatctccacaaaaacttacactacaggtaaaatacttacataaattctgtctttactatatcgaactttgatattatggagcagtgtggcttcatttaaatacattagtgaacctaagacataaaatttatatgtcattagagaattgaagaaaacaaataaaataaagcaatactatcttaatctgaatcactttgactcatcctaaaaatcaattgttaggttacatttaactccatcttttttaaaaccctggctgatgtaaaccctagaagctgatttaaaagcgattcagtttacatgtgtgttacagtgatatttttaagtaatgaattttcaactaaaagagtaaacctagtgagtactcattaatgaaggttgattaaaaagcacaattcaagagggaaaaaagtactacaatagatagctctgattttaatatacttctgacacaacaaagtgatgacaccaatccaatctgatactcagaatttcacagataaaacacaaaagataaaattttagaatgggaacagaccatcaaatcattcagggagtccttcacaactgacataatgaagactcctagagaaattatgtatgtcttaactgagaatatgaagctaattaatgggagagttttgaacagataaatcttgtttgtgtgacatctgctctactgaagtgtcagaactgactcccaatctattctccaagtccttcaatctcctgagctccatttct

SEQ ID NO: 307806 - DNA, 1000 bp, Homo Sapiens
  misc_feature (78)..(78): n is a, c, g, or t
  misc_feature (103)..(103): n is a, c, g, or t
  misc_feature (114)..(114): n is a, c, g, or t
  misc_feature (863)..(863): n is a, c, g, or t
gaaactcatttattctgaggcattgcagagtagagttctcatttcaactgacaggagatttaatacattaaatttttntgcattagaaaaatatcaactacanatacattacantgcattatataacacagtcacttatttcaatgccagtgtttgatgacaggtatttagaaattaggtgtctacytaatrtactatactcttaaacaatttcagggtaaaggttgatatattttcttaatagagtactcattagtgaaattttagtcttatttgtcaacaatttaataatatgatgaaaaatcaattatctcattcacttgagtatgaaagtcgatacaaataattttaaaattattttagctcaaatatatcagggccttcagaatattattttctcctattcccttctgcatggaaatgagaggcagagaggtagagaaagcaaaggagagagcgctataccccacccaggggccccagtacctccgcagcgccaggtcggcctgggcctcatcactgatgagctcggcttcactctgggcaatcctcagggccagctcccggtccctgcgctcctgctccagaactgcttgctgttgggattcctcctccttctgtcgggccagctgtgcctccacttcagcctgacaagggcagaaagctatttcaccaagagttcttcacttgtttacttgatcactccccttattacttaaaataaagggaaagcataactgcccccatacaagttctttactaaagaattgcttaagcacagatctcttcagtctctactttcttctctattatgattaatgcttcaaacacatccccattttgcctctttcccaagaccaagnagaaggtagaagaaccacagctccataactctatgactataaatattagtgtcccaaacatcacatgagtatcttaaggcattcccattaacactaacacctagagagcagatgtcaggaatttaaagttttggtta

SEQ ID NO: 307807 - DNA, 1000 bp, Homo Sapiens
tgtgcttgtccatcaggtccaaaggcatgggggcagtgaatgcaagcagggatgggagctgcccacctgagggagcatgagcccagatcctttaacatctatcctgtcttgctgcttcagtccctaaggctgggtagggtgaggggcatgagcctttcagcagacggactgggatttatcacctgagggtctcctggctaagaatatgagctttttactctgccaataggttgtggccttctcctttccccccaagagggctggaccacgtgacggctaggtgatactgtatctgcagaccttactacaaccagtgggggtcagaaagagaaatgacatttgcagtctaggaaccctttgcatcggtcatgcttctttgcctctgttttgtgccccaggacaggactgaattcttcaaccatgacatcaagtgtgcttgttctgctgctgcttgggttacaaacagctgggtgacatcaggggagaagaatcttccctccctgacctctccccaagtcagtgaccagggatttccgcttggcaggaaacacagggctgagcaaagccagaggcagggcttgctggatggagaaaccagacccagatcctggctgcctggggtcagacctggccacccacgtacaaaccctgccagcgggcctgaacagctcttctctgggcatggctccttcattttgagtttagatttaaccttcaatagcccccaagttaactacatttgtagtttggaactacaggatagttttggatctcctgaattaaacaatgacctcatgaagacttatggatatagcagatgactaagggtgatggcaggagacttccatgagcccaaggaaatcaccacctccctagacctcaactttcccatgtactagagtgtgctagtgttcacctggatggcctcaacacctttgtcacttaaacctggtgtcttccaagaaataaccgtatatactcttggttacttgaagcttgg

SEQ ID NO: 307808 - DNA, 1000 bp, Homo Sapiens
ttttttttttttttagggaagatagtaaaattcgtttaataggcatgttccatataaccattttgttacaaattttgcattttccacatgaaaaaaatcacagtaggcacatactagaagcaaaatacgtcagacaaaaatatcctaaagatgtttctgttatcaaacttttacaatttttccaagacgtttttgaggtttgggaaaaggtctggggcatttttggcaaaaaacaaacacactctatccatgtgagttttgactattgttctttctcaccaaaaatgtccataattttctacaaattccatgaagttttaaatcaatcatgtttgatttacatttaccaagaatgatttgcccatcaccataaaaattgaattaaaaatacatcaggctaaataaatccaaaagagaacagtgaattttgttgggtttacagacagtggtatgcatttctgtgatcatgtattattcttaaccttttccttcagtgcgatttggaagtaacctgccttttaatagcttaccttggacatcatcattgcaatcaaagtgagtagcatcacaacacaattatctaatatacacatgctgcttagggctgcaatgttaccacagttaccaccagattaaatgtctcaagaaaacagaaccactaagtctttcaacatgcagaaattcagcactcttgatagattatgagccttcatttttcttcattttgaggcttttccaattggtcttgtgttgttttttcatctttctcttttgcatcttccttcacggagagagcctccagtttgaggggcaaatctgaggttccgtctgtggcagctgaactctggatgtctggtaaggcattccggcggcctgcccttgctgaagatgcaaaattggcgaccccagactccacgtcagtcatttttgatgaatctgtcctcatagcaacatcttcatcaatgtctactgttacggtcctgcagcatccatttgcaca

SEQ ID NO: 307809 - DNA, 1000 bp, Homo Sapiens; identical to SEQ ID NO: 119865

SEQ ID NO: 307810 - DNA, 1000 bp, Homo Sapiens
accctggatcaaacgaggagaacagacttcagcgatacattaaatacattcccattgtatttaaaaagtgaatattctcaggattccacatttttaaaaacttcttttaattgaaacatttaaaataaaataccgttgagataacaaccaagttacagttcttccagcagcacccagccagcgagagccctcagattttagaattttagaagagaagattgtggccatgtctggaattcaaagaagaaccagtgagaagagcttgatagaactgatggatgctaagacatctaatattaaaatagaagggcaaacttaaatgataatataaaattataatattaatggtaattaaggaagccattaatgttgaattatgtatgtgtatgttaaacatatacataaaatatcatgaacattatattgtctgtgctggtttcattaatgctaaattataaaattattaaactgtatgaataacatttaataatataaaattataaattgctattgttgaatagaactttaaagttgaataaaaggaatatattattactaatatgttagatttgataaaataggaaatttaaacattttaataaaatgctaagtttcccagtagtatttgtatgaagttatttgaggtaccgtttgttcagcaaagaatgtgaccactaccaccaccccatcatactccttcactcataagaccaaccccacttccattgataatcccgctaatacactcaccaagacttcaattcctgacccccgtgtctcaggatactcctcaatagccattgctgtagtatatccaaaaacaaccatcatactcctagataaatttaaaaaactattaaacccatataacctcccccataattcagaataataacacacccaactacaccactaataatcaatatgattagttctgtggccatgaatgttatgatcagggagatttgaagggtgattagtacagacaggtaaagttttt

SEQ ID NO: 307811 - DNA, 1000 bp, Homo Sapiens
tgtaggggtgatcagacccaacatgaggtcgtgggggtgacaaagtccagcagagtcaaaggaatgagaaaaagatagttggagagagaaagtgggacgagggggccattgcaagtgtggaggatgcgaaggccctgagctctgggagcccaccctatttattgctgctcaaacaaataaacaggtggtgaggatgtgggggttgaaaggaaacagtgtacaaatgaatgagaaacatatggctgcttgagataatgggagtgctagaagcaaggagccagcaagtctagcagaaatgcaagccctgcctcagcttctctcccaacactcagcttttctcccaacatgccccccttctctttttcataaaaaccaccacagctgtcattattattagcataaggtggccttttttaaaattaattgagcaaggcaattgcaggctgtgtagcccttaattgccggttggtgatccagcttcatttttcttagaccttattcaaaatggagttgctctggtttgaacgtttcctacatatctcccctttcccttttacaagagaacctttaatgttagcggtttcaggaggatgaaggtccatcttctataacttcttcttgctgaataggggtgatgatactcttgcctgcctattagggtctcttgtattcacggtagagaggagttcagttaaaaagcattgatcagttaagcataggtaaaaccctggcactccagtagtttctcagcatggcttggtgaacctggtccgtggttgggatccatgggtccttccagtcccctgttccatggttgtacacatcttgagggcacctacatggtttgtgtctcctgcaaaaacacaagcatactttcacccccatgttagtaaatctactgaaacagaagcaaaaacttttgtggctgtagccaggaggcatgccattgttgaagcatttgtaactcagcctctgcctctttggttaattaccatgggat

SEQ ID NO: 307812 - DNA, 1000 bp, Homo Sapiens
aaagattaaaaatattttatttaaacttttcttcataaacacttttaacatttttttcaatttaaaaacagaatggatagcataaacatgtttgaatagattatatccacggcttgggaaaaattacctgacaaaaatgtaaaggctttcaaaacaggtataaaaggcaaaccttaaattattctaagatttttatatcggccctaggattatttgactactggcccaaaatgtacctaaaggtcaaaatatttttctatagacaaagtatgcccaagaggtatagggcatatacaagttaggtagaaaataacctctcccaatcacctcactggaccattccttcagaaagcaaacacctaatccttactatatactgactaataacattttaaatgcagttgttcccaaaatgtaaaaagaaaaccaaagaatttaagggagaacaaagctgatggcattctcctcaatgttacttgtgtaatattgaagttatacggtgtactgaaaggatatgatttccatgaatttatctattccagtctatgcctactgaatatttgactttataaactctggataaactaatttttaggacttccatttttaagataaatctctttttagaagatatttattcccaaaccaactctaaatgtaattgaacaaacatatgatctctcaaaatgttcagaatacaaaaacaaaaatcaaaaatgtataacaggcaaacaagaaaactggcactagcagttttactgccatatagccctcaattatatctgatttacactattatctatgttgcattttacttcagtctaaaactttaaattatgaattctcaaaagagctagtctcctctgagagatagcttataaactgaaataacaatttatattataaactgaaatgttatgacctacacccacatatacatatataaaaatagtcccactgaacgtttgacatgtttagattatgcagctcaaataatctg

SEQ ID NO: 307813 - DNA, 1000 bp, Homo Sapiens
ccaataattataaaaatgggaacagtttatttcaggtggaaacagcttttcttcaaggtatttctcttcctaagtgttcctttaaaacacattctaaattcagaagagacaatttgcagcagaaattttacagggttatttaggcttagctacacatacacatgcacaaaagaaagaggaaagaaaagaaaagaccactgcttccatcagaaaaacaagcactttttccccctggtgtcatgtctttggatatgtaccgccttggagaaaggcataaatcatttttatacatggaactgtcttagaaaactagagattttagtacaaagaaagcaattcactgaaagaatgcccacatgccattgttataagttactatatatacacaagaggaacttacaaagaacccctgttttacagttactgatgtacattagcatagtgggcttacaccttctccaggcctgagttacacttagtattacaaataatattataacaatgttgaaaatactgatacaaaacagctttaagatgatatttccaaaaaatacccttccttttaaaatcgaactgtttaatccaggttttcttttgaatgattcagctttaaaaaagatttttcaagaaaatactagcgtttaaaacatctcttaaaatgtctattaaatgacagatcttctataaatagattatttttataaagtataattcaaaagtctatcttccaggaaaacaaaactatcaactccaaaagtccaaatcaaaaacattatttgtgatacatagttcttccatatcctgggaaaaaatccttgattattttatcatgcttatttatgtacagatttaaaatactctagcaacagacaccaacatttaggacaaatcaagctgaattccacaattaataatcatgatttttctattttcctatcatttcttaaatattgcccagcccaaagtgtatatctgcatgatcattatagcttccaaagta

SEQ ID NO: 307814 - DNA, 1000 bp, Homo Sapiens
cccaacgttttcaagttttatttttaaaatatattacaacatcacattaaaaacagtagaggaaaacaagcaaacatgatagaattacttttttccaactcaatagtacttagctttacctagaattttcatacagttgatgctaacttcttctgaaccctttctgactagtattttaccttatgtattctttatagtatttccatataatctttaccgagacctattcagagcataacatagacagggcagcacaagcaactgacacctttgttggtagtacagtgttttttcaaccagtttatgagagaatgaaaagaatgaaagtgaaaattttacttaacttagggttaagtagctctaggtaatctcttcagaactcccctgcttcaccttctcaagttaatcaacagtggctagtttataactagaaaccacttaccaaattgcctaaacaagaaaactttttaaaataacaatttgctgatctgtccaataactccaataaagttgaatttgctttatttttccaaaaattatgttgtctaaagactctttgtaagtgtaaatgtatgatatattgagttgatttttagtccctattagagagttgttagacaagttattaaagtttaagaaaatttggattctaaatttccacctgataacatatatgaaatattttatattttcaatatatacttacttatattttgcacactgtatataaactaggagattagaaatgttttaagtcccttctctgtgtgtatatctgcactatataaagaaaaaaagaaagggtagaaagagacttaactttttttctatcttccataagaaaacttcaaaaatgtttctttttaaaattgaatttttcaaaagggaaaaaatattatcctgtttgatgggaaatcacttgttttaacaaaaggtaaaatactggcatgttaaccacaaggtggtgctataattccatgctggtactgatattttagga

SEQ ID NO: 307815 - DNA, 528 bp, Homo Sapiens
agatcaatatcttgcctccaaagtatgtcaatcaaatccatgtcctgctgggacgggagtcccggcggcggcagctccaagtccatcatgatgagctgtggaccgtgtgttgacaataaatatccactgtaagtggtcataaggaagaaaatcaccctgccacacagtcagaatgttttcccttcagctctccctaccgttgaggagcgctataaaaggaggctttagcgtcctctaaagtttaccattatattcactaaagccaccaccttgataaagttactaaagccaagatgggttacaaagttagataagttcattaaattcaactccccaaacaattacgtttatctatgatgcctaggcgagaaaggcctgtgaatctataaggtaggagaatggggaactaagattttaggccttaaaatatgttggaagaatttttcctagttcccacaagcagctactgtaatgaaataacaggagaaaatacagagctgatggttttgctattgtgcttaaaaaact

SEQ ID NO: 307816 - DNA, 925 bp, Homo Sapiens
tttttttttttttttttttttttttttggctagaaaatttaaaatttttaataaatgtgctttgttcacaaaatgtgaaaaaatacaacaaacacacacgtacattttcaggtatgctacctcccaccacttggcaactatggtaaaaccacatgatctagtcatgatactgaagaatccaaccaaatgattaccatttgtttttgaaacaaccaaattattttggagaaccagctgtgaatgtgacaggaggcctcataacttctttatatccaaaatgaaataattcttaggagtacccatacagtattagagggccctattaacttccacttgttattacatacatgatctggcatcaagctgcaatgactgcttatacttcaatacttatacactgaattggtttttgtggaatgtgtatcaagtttaaatctgtgccaacctaattggaataagctgaatttacagtaacaaatgatataaattcaaacaaatttatactaagtggtagtaggttttataaagagacttcctcagagtactacgtaaaatacatcatgcacactttggagcataagcagaatcaacatctgtaaacaatcagaatttatagcaccaacattttcgctgtaacacaaaggctgactccagggtcatactataccagcctttcaaaagcgctgttttcatttactttcaaagcattttcatttggtgtattgttttctttgctcttaagatatttacccaaatcaaaaagcaaacagtatggtaaaaggtactaccaaaatagttcaaaagagttctgtattatccttaacatagtgcttttttttccctccccttctcttggggaagctacaagacataatccttcagtgcttaactggaaagaacagtcaatcctaaatattaaagaatc

SEQ ID NO: 307817 - DNA, 769 bp, Homo Sapiens
ggaataggtcacaacggggttgatagattaaccgccaaggaatttcgctccttaggaccgtattgttacggccgccgttcaccggggtttcatttcaacgtttgcaaatgctaaggcaccacttaaccttggggcatgggcaggcttcaccccctatacatcaccttgcggttaagcagagagctgtgtttttgataaacagttgcccctcataatttactgtgtcctaagtgttaccttaggcgccccttcttgcgaacttacggggtcattttgcagagttccttaacactagttttctcgctcgccttagaatactcatctcggggacgtgtgtccgttctcggtacaggtttccataatattaagtttagaagcttttcttggaagtgtggaattatctaattcggtttgaccctatgcatcacgcctcccggttatagactgcggatttgcctacagtcaccagttaacgcttaccccacaatccagtaagtggtaagattatcctcctccgtcactccatcactattatagaaagtacaggaatattaacctgttgtccatcggctacgcttttcagcctcgtcttaggtcctgactaaccctgggtggacgaaccttgcccaggaaaccttccccaataggcgtcgtagattctcactacgaatcgttactcataccggcattctcacttcctagcgttccaccagtcctcacggtctgacttcattgccctaggaacgctcctctaacgtaaatataatta

SEQ ID NO: 307818 - DNA, 1000 bp, Homo Sapiens
aagcttcctgacgacatgaaataattgggggttttgttgtttagttacattaggctttgctatatccccaggccaaatagcatgtgacacaggacagccatagtatagtgtgtcactcgtggttggtgtcctttcatgcttctgccctgtcaaaggtccctatttgaaatgtgttataatacaaacaaggaagcacattgtgtacaaaatacttatgtatttatgaatccatgaccaaattaaatatgaaaccttatataaaaagaggtgtggtttttgtctcccgccccccaacctcccctcctcctgtgaatcagctctgagtgacaggaaaccagggctgtgctcctgctgggactccttccttcctccctcccctctgttttcaggcttggcctcctgggggtgtttcctgaatccgactccccagagtttaaagagctaggttcctggggactgggattcatacctccttcccctctctctcctgcctgctcctccctctggggacagggacaccaatgttggcctggctcacccacagcctcccaggagagttctctgggctgccgggttgcatctggttccgacagctctcggggaatgggcggtgggtccctgaagttggggggccggccctgtttctcagggaatcccgtggtcactctcctatggcttcctacagccctgggtcgaccttcgctttctctgccccggccttccctgcatccccaccagggtacccaggttgctcagcgcttcaggcacctaggagacctatttcccgttccccttgccctggaggacccgctctccctttcgtccacagcttccgggaggcccaggtgtgcccccacgctgtccatcttccctagaagtggaggtgctccgggttcccccttcgtccccccagccctgcccatgggcttctgggcctcacttggagccctgggctgcgctgagctgcagggaggccgagcagcctgtagagggcagcata

SEQ ID NO: 307819 - DNA, 1000 bp, Homo Sapiens
cattgccattactttcaatggcaaaaactgcaattacttttgcaccaacctaatacttgtttttattatctgtcttatccatttgaatgtcagctccataaagtccagcacttcactatagtcattgctgtatctttagctcctggaacagtacctgatacataataaaagcataataaatatttgctatatagaattccatatggcttactagacacagccaggaggaacatctctcacagagagaccagggcattgagaagtctggcacactctaagcagatctttgaagggaagaaattgagagtaaatggagggaggctgcaaaatgctgagctaaaggggaaatctgggaaccctacacagggtggctgaacatcaggactcactcctgggccctagcaactcctgaggatggggtgagttgatcaggcaaagagtagacttctctcaccacgtatcttcagaatctgagcagcagtagactccacgaacctcatggacaccggagctggcagtgagctgcttagagaggtagcaggagaaagacttcagcctgtgtggagcacaaagggcttagtacataaagggctacagtggagcttggccaaggacacccatcccccaatgcttgctacactcctctaggagactttagcattagggtgatggttggactgggacagagcaggaactgttccctgtgggatgaggacagctcaatctgagcaacccctgttgaatgacctattcaggagctccatcctggccacattcattggcagtgcaacctcagatacacaaccagggtgcttcccaggggccctcatcatagctccttcaacagcagagtacactgaccatgggagagctccagcagactagcccccactgacatgcaccagctcacccacagcttccccacacagcagcctccccacatcattttggtggcatacacttacccatggcctccccatcgctttgctagtgcatgcat

SEQ ID NO: 307820 - DNA, 1000 bp, Homo Sapiens
gatcatttgagactactatgaacaccactatgccaacaaattagaagatctagaggaactggatgaatttctagaaacatacaaacctcttagattgaatcaggaagaaaaataaatcctgaacagatcaaaaacaggaagtgagattgaatcagtaacaaaaaaattgccaacaaacaaatgtcccggaccagatgaattcacagccaaattctaccatacattcaaagaataattggtaccacttctagtgaaattattaaaaaatatagagaaagaggaaatcttctgtaactcattctatgaagccattattactctgataccgaaaccaggaaagtacataacaacaataacaacaaccctacagacagatatccctgattaatatagatccaaaaatccttaacaaaaccctagccaatcaaatcaatgagcacatctaaaagataatttactgtgatcaagttgatttcctcctagggatgcagggatggctcaacatacagaagtgagtaaatgtgactcatcacataaaaggaattaaaaataaaaaccatataatcatctcaatagaagcagaaaaagcatttgataaagtgcagcatcattttatgataaaattttcaacaaactaggcatgaaagaaacatatctaaaatattaataataaaagctatgtatgacaaacccacagccaacatcacactgaatggggaaaagttgaaagtattccccctaagaactggaacaacacaaggatgcccactttcatcacttctattcaacccagcactggaagtcctagccagtgcaatcaggcaagagaaagaaataaaggacactcacattgtaaatgaggaagttaaactctctgtttgctaatgatatgatcctatgactagaaaactcttaagtctctaccaaaagactcctagatttaataaatgcattcagtaaggtctcaggttataaatcaatatacacaaatcagtagtat

SEQ ID NO: 307821 - DNA, 1000 bp, Homo Sapiens
aagcttctcagagcacctaggcttcatctcctgaaccaaccagaggtcctccaggactttcaagtcaggtagcactcaacttacctcccaataggggagtacagctctcaggctacccaaggtaccctactcccaacccttcccacttctggtggcagctctggacccaacagaactgccccctccctatcacatcctaattctgcttcttctggcacatctaaaatttccttctgctctctcttggatctgctactgatagccagacatgggctcaaggctgctatgatctgaatgttttatcccctctaactcatatgttgaaatctaatccccaaggggatattaaaaggatcagcctttgggaggtgattatgtcatgagagctctgtcctcatgagtgggattaatgccctgaataaaagaagtccgagggaggggtatgtgtgtgtgtgtttttaccccttctaccatgtctaccatgtgaggacacagcagaaggtgccatctatgaagaacaagaccctcaaaagacactgaatctgcttgcaccttgatcttggacttcttagactccagaactctaagcaatcaattcctgttgtttataaattactcagtctaaggtattttgttagagaagcctaaatgaacttagagaaaggctaacacattatctactttcaggactcattcaagttacttgctagacgttgtaggagttacaatctttcacgcattcttttttttttttttttttaatggagtcttgctctgtcgcctaggctagagtacaatggcatgatcttggctcactgcaacctccatctcccgggtttaagcaattctcctgcctcagccaccccagtagctgggactacaggcacataccaccactcccggctaatttttgtaattttaatagagatggggtttaaccatgttggccaggctggtctcaaactcccgacctcaagtgatctgcccgccttggcctccc

SEQ ID NO: 307822 - DNA, 523 bp, Homo Sapiens
  misc_feature (215)..(215): n is a, c, g, or t
cctcacctccttggaggagccttctctgaccccgaggcttgggaggaggacgactctgggctcctccagctgcccggggccattaacactgaccactgacttctgagcttgtttctgcccacttccaaaggggagccagcagaggtagtatccttggtcacacagacagggcctggcactgagcagtgttcaataaacatctgatggatgacaangaaaggctcacctggctcgtcagagccatctttgcagtcgcaatagtcatcgttgacctgatcaaatgggatggtggccgaaccgtccaggcaggtgaaaggcttggactcatcgtagaagtgatgatctgcggggtacaggaagctcagcccagggcaggtaagcgccttctccaccaaataccacctcagaccacccatccccaccagcggacactaccgggaaactgagtcaaaaggctgtaaatgcctatccctaaggccaatgttggcccctcccacctccagcctggcggagggtgaacagg

SEQ ID NO: 307823 - DNA, 1000 bp, Homo Sapiens
gaattccccggatcacaccattgcactccagcctggacaacaagagagaaactccatctcaaaaaaaaaaaaaaaaaaatcctggccaagcacagtggctcatgcctataatcccagcactttgggaggcaaggcgtgaggatcacttgagcccagttcaagaccagcctgggcaatatagcaagaccctgtctttaaaaaaaaaaaatagggcatggtggcgatgccatggtgctagctacccaggaggctgaggtaggaggattgcttgaacccaggaggttgaggctgcagtgagctgtgattgcaccattgcactctagcctgggcaacagagtgagaccctctttaaaaaaaaaaaaatccccagcaatcctaccatccccagcctccaggagtgatctgtctcctaagcattgagaaagtggagactaggtagcataaactagtgtgcaaacttcacactcacattagattggcaggatcattttatgggggaggaacaggtacagccagcttagggggcagagtaggggaggagactggtaagaaaaagaggtctacttcctatccatccctttcttcagggtagagtttcacatggtaggctaaggcagaaagctctcaacccctgcaggaaaagaagaaattcagggcttgagccaggagtaaaggaaagaagaaagcaagttatcctagacatgaaggaatggaagaaagaaatggagtcctatcctgtgtctgtgctccccaccaaggccaatgccagtatgcaccagtttagcctaaccaactattaaaatgttgaaatccttccatactggaaagaagccactgccctgagccctccaagtacctgtcaactgccctggcctgcccccaggacccctatacctcccagcacagcaggcagcctccaggatcctatttagacctatggctcagcatctgttctgattcattgttgtcccctctgtacccatgttatgctttcacctct

SEQ ID NO: 307824 - DNA, 1000 bp, Homo Sapiens
ggatccgggtccgcacaatctctgcatcctgcgaggtacacaggggtgaaggggctgccgggtgtcgccgggtaggggattaatgctggacttcagggaggcaggaagggtaggaagggtgcttgggctgccgggcgctatcggagtgaccctgttggcggaatgccatccaccccggaggcatgcatgcacgcagtcccagggtcacttttcgcggaccgtacccggtactccggcaggaggcgaagcagtgcgcatgccagtgcctcgtcgcagtggaaggtgccattgtgcgtcccgattcggggcggtgccatgagtttgctgcgggatcgttttgggggcgggacggactctggaccgagcatgcggtgccgggtatacaggggtggcggcggcagcagcagcgttaagaggccgcgcaggaagcggtgtcccataagcagctccctgcagggaggcaggagcgccgacccggaagtaggaagcgccagcgcagccccacttccgcttgccaaccgttcccttggcaaccagctctgcagagtgagcagcagcacactcccagcctaggatttcttccagctggtcaaagggccctgcgatggagcctccaagaggcgcatcgcatcacccctgcgcatcaggctctgagacggggcccacactctcgaccacacccccatctcatcaccagtcccttgcttaatccaagaaaagaccaacattctgcccagctggcacatttattggcattaaaacacaagacccttcccatcaccaggaagccacgcccaaagggtgtccctctgccccatttctgcaaaaactctcaggccttagcagtagcctgagctgcccccagggctgtgagctgctgaatcttctgactcatcatttccatgacggctgtggaaaaaaataagagtcaaaggttagaagcaaaaaggagaacctagagttaaggagaagtgacaggcaagtttaaggacaggcgacc

SEQ ID NO: 307825 - DNA, 1000 bp, Homo Sapiens
gtcagcaccacaacttgggcacagcacagcagtgccaggtgtggaaagcagaagtctaagaggcagacaaaagggttgagacctgcaagagttggtggctagttcctcatgctggaaaggatgatctctatgtgaaaggtaccttatccctcttctacagaccaggaaactgaagcttgatttgtcccaagctactggagttggggttggaatccatcccttcttatttgggggcagggtttttctatttcccttactggcctgggagcaggtggagatgcatgaggtcatatggaagagacaggctgataggatgggtggagtcctttgggaaggaggaggcaatggggaatctattggtaggaccccatggtggacgtatgaaraagccaagcatttgagttttgactcgatgcagtaggcagtggggagcccttgcaggtttggggacatgatggaagagggcttaatgaagacgaggctggtgtaatcaggggagaggctggatcaggcacatggtaagggtgatgtgtggcatttgttttgtgtaatcagaatagtacccacccatccaacttcttggaaatatgtatttctgcttctccatgagattggactggaagcttccatcttatatatcccttccccatggataacagcaccttccagggatgggcacctgatacaaacttggcctatcagagcacttccctgggaattttgcccttggggccagagaaacatgggtgtcagtccctctctggtgataaagctgtgtcatgtaaagtctgggggatctataatgactaaaagatttgagagtcagagagagggaattctagcttggctcaggccctggtttcccctcactttgagggctcagacacccttttgcttgtgccacaatatgaacaatattcaccaccctcatttaactaaactagtctgagttgaatttttgtcatctgcaaaccaaaaagttctgatgacatttgcagta

SEQ ID NO: 307826 - DNA, 1000 bp, Homo Sapiens
gatctcgatgaagcaaatgagactagagacactgcacacccaaactctccaaaggatatcgcctgggaaaccggaggtagctggctacacttgaggacgaaagtagtggccaaaacgccctctctactgtaaaaacaaaaagtaccagggcatgatggcatgcacttgtaattccagctactcaggagactgaggcacaagaatcacttgaaccagggaggcggaggttgcagtgagccaagatcgtgtcactgtactttagactgggtgacagagtgagactctttctcaaaactttttttttaaactggatgaaaattataaacatacagatatgcagctatgagaagctcaatggtcccaaatagaataaatattaaggaaatcataccaaggaaaatcataatcaaattcctatgaaacaatgataatgagaaaatattaaaaatagcaagaggaattggctttgcagaggagcaaaaagagagagaaatagaaagaaaataaactgcagacttctcatcagaaattatgcaaaccagaagaatatgaaatgacatctttaaaacactcaggaacaaatgtcaacctagaattctgtacacaaagaaaatacaggtgaaatatgaaggtgaaataaagacttttccagataaatagctgagagaatttgttgccagcagacatgaaccacaagaaatgttcaaagaagttattcatgctgaaggaaaacaataccagatgggaacttgaatttatacaaatgaataaacagcacagcaatgataaatataaaataccttttcctggccgggtgtggtggctcatgcccgtaatcccagcactttgggaggctgaggcaggtggatcacctgaggtcaggagttcgagaccagcctggccaacatggcgaaacccaacaacaaaatgccccaaatgaggacaaaggtttttcaggaagtgcctatactggaaaggctagatcgtaaaacattaaata

SEQ ID NO: 307827 - DNA, 1000 bp, Homo Sapiens
ttttttttttttttcaatgtgaaaataaacatttattataaaaattagttttgacattttaaagtgaatgcagacaaggtgttttccagttcaaaaggtccattgtaagctagagaagtaaattccaaggctggcaataactgactcatattcttcacaagtggcctagacaataaggaaccattcacctcaaattcacagagccatgaatcacctctgcttccccatgaccttttccatatccttcctactctgtcttccaaccatgacacagaactgaaacatactttaaaaatctcatccttggctaggcacggtggctcacatctgtaatcccatcactttgggaggccaaggcaggcggatcaagaggtcaggagcctgagaccagcccgaccaacatggtgaaaccctgtctctactaaaaacacaaaaattagccaggcatggtggcacgcacccgcaatcccagctactcaggagactgaggcaggagaatggcttgaacccgggaggcggaggttacagtgagccaagatcataccactgcactccagcctgggtgacaagagcgagactccgtctttaaaaaaacaaaacaaaacaaaacaaaaaacaacaaactcatctttactgaaccatttcataagctctactttatttgtctagttggatttcatttcttctggaaaatttattgtttattggcatgtgacccttgactgatggcttcattagcattttgtttttctttttggatccttaatagaaaactcaattctgttagggatttccaaataggatagggcaaagtcgcacttagtatatcctccacagaaagaaagaagcaaaatcaagccaagagggccctttacttgtcctcttgctaagttaataaatagactggtggatggtggtagatggagaaacaaaaatgtaagggcagagaagggtccaaatggggaggaagaaagcaatgacagccaggctgtccggctca

SEQ ID NO: 307828 - DNA, 1000 bp, Homo Sapiens
caggctggcactctttgtccattacattaaacctgccacacagttatcttaagaattctcatggtcagtagagaacatatatgttaatttaacatttgaaaatgaaatgttggccaggcgcagtggctcatgcctgtaatcccagcactttgggaggccaaggcaggcagatcacgaggtcaagagtttgagaccagcctgaccaacatggtgaaaccccgtctctactaaaaacacaaaaattagctgggcgtggtggcaaacgcctgtaatcccagctactcaggaggctgaggcaggagaattgcttgaactcgggaggtggaggttgcagtgagctgagattataccgcagcactccaccctgggggaaggagtgagaatctatctcaaaaaaaaaaaaaaaaaagaaagaaatatcactgagatagtgtttgtaagcacttttggctccatgaggatgctatgggaggcagccttctcccagggctccagaggagaatactgcacacatcccctctagccttgaactcagacttctcagtatgttctgacatcattcccttttacagccaactccactggatgagagggaggggcaagacacacagccttctctgagatcccgccaccatcctcttcaattctctaccccatcttccttacccagagggctttgtcacttctctgttctggaaatctgttctatgaaaaaatggaacatccagccccatatattttcaagtaggagataggaccctgccttccaccaagactcatgtgatggaggaatccccaaaataggaagggcctcagaactcttgagagatgaaaacaggctaatatccacagcaaggaccaagactttattattattattattatacttaaaattttagggtacatgtgcacaacatgcaggtttgttacataggtatacatatgccacgttggtttgctgcacccattaacttgtcatttatattaggtatttctccta

SEQ ID NO: 307829 - DNA, 1000 bp, Homo Sapiens
aaaatggaatcgctccatgctcggactctctgccaccagacatctgactgcgcagccatcagctgagaggctgcttgcagttccccatccaggacccacggtgcctggtgctaaggagcgactggactgaggaagcctctcatcaccagctgtgttgcagctttaaattctgccccagttgtggtatttaaaattctgtatgttaaaaaaaaaaaaaaaccaccaatctgcctacatcttcctagttaaagctagaaaggggaatggagagaagatccaacccagctgggcagagtggctgagcacgagacacccacaaacccaacgcggttctaggggttggatcagaagagtctctgtgtcgtcggtcgggcacaggcttgcctcctcgattctagacgtgccctcggccacagtgtctaatcttcctgtttcctggcattcaggtgttttacctctctgcccggattttgtacctgaggacaaaataggcaatgaggcggagggagatgaagaaaatcccgagtacgatgaagtccaggtacagcttggcattttccacgtccagctcccgcaggatggcctccgacttctggaagtggcacgtctcgtcgatgtcacagtgcagatcttcccggtctaagccatagatggagaggatgaccccttcgaacccatacctgacataggagatgtaggacatccactgtaggtacgtggggatggtgtcgaagctgacgaagaaccccgagaacaggagcaccgggatggctgtcactgggcccacgaaagtggccacctgcagggacgtggaggcggctccgatcagcaggcccagggactgtgccaccagggaggtcatggtgcccagcgcggcaaacagcacaaaggccacggcgtcggacggctgcgacgtcatccagtacacgatgctgcagtaggccactgggaacatgatctgaaagggcacgtctgccatggtcttggccaggtagtaggc

SEQ ID NO: 307830 - DNA, 1000 bp, Homo Sapiens
ttaaaaccatctatctctatgtaaacacaaacatatacatgtgagtggggattggtagataaatagatagaaattgctttcccagaggagaacatttctggctttaataaattgattagctttttaaatcagtcaagaaagttaagatcttttaaataaatccccttattcattcattgtactgcaatctaacacaataaaatgggagtaatatttttaaagtgttgttaatctgcgactttgtcttcttgggactaaaatataatccaacttttaaatgcaaaatgagttttatttgctagtcctttttattctcaaatatgttaaaagcacatgattatattgtcttatgttgtttcagttatgatcctcttctgaaatcaggaatacgaccccaagaaatgagtgagtcatatttgcttttatatcttatgcattgcaagaattcagtctcacaaacagttgaaccataaattaaaaatggtagactcacatttgaatagcagctagttatatataaaaaaatccaaatttttgaaaaagtgacttgtattaataaaaactggtgaataaatcaccaatgatttgtttcctcatgctgtcatattattcttcagatacaaccataaaggcaaataagccataaagacaaacaagatgacatattaagaatgtttaaaattgcttcttccgaattttccggattctactggcaaagcgaagctttggcatcttctttttctttttcaaagctaaaatcaataaaacgacaatgaaaatcatacatctccagtctgtaggctcactataaatcactatttctgataaggttattgagctcacttcatcttatttttaaggactgtgaagtcaaaactcattatacactcagttaataatattttacctttaagatatgaagatacagctaccgtctactgcagctagccagtaaaagcattttgacaaaactgattaacactacggagatacttatgta

SEQ ID NO: 307831 - DNA, 1000 bp, Homo Sapiens
aggactccagtccatcacagggacacacacacacacacacacacacacacacacactcatactgggatcatttaggcatgccagttaacctaaaatgcacttctttgggatgtacgaggaaactgaactacctggagaaaactcatgaagacatggtgagaacttgcaaactccacaaacagtggccccagctgggaatctattttctcatcaaaattataaccaaacagcattgaacaaaattgagacctgctgtaatgatacaaattacaatggagattgacctgaaaacgttttgctaagttaaagaagccagataccaaaggccacacacatattatgtgattccatttataataaatgttcagaataggcaaatccatagagatagaaggcagattagtggttgccaagggatggaggtgggggataagttgggcgaaaatgggaagagactgctaattggtgctttgtttcttatttgggtgataaaaattctctggaattaaacagtggacacaacattgtgaatatactgacaaccattgaattatatactttatttttattataattaaaatggtgaattttactttatattaattttatgtcagtgaatattaaatattttcatgaataacacaatagaaaaaaattaagcacaatatttcactagctatatttttgaagatataacaaaacacaatcatcgtcagagtctttttattaagataaatccagtaaaatttgtgtattcacatataatcaaaactgcccttctgaaataaacatttgtatttattttaaaaatgggaatacaatttcatttttcccaagctaataataaagttatatttgggaaagataagtttaactcttaacattacatgaaaatagttcaccttctttataaaagcaacctgcagaacaagaatgttggatgaaactctttttttgggatccctcactttatgaaattatcacatgtataaaagagtaa

SEQ ID NO: 307832 - DNA, 1000 bp, Homo Sapiens; identical to SEQ ID NO: 119868

SEQ ID NO: 307833 - DNA, 1000 bp, Homo Sapiens
aacacatacttgataaaattgtattttttttttacagtcatgtgtacaatttgttacaaaaccatagaagactacaacttgttttaaatcatttttggtctgcaaatatgtaaaatctgtgtgcaattatcatgtatttacagggtcttgtgttagtcattttcaatgattattccaacaatgtcacactctcaacataagacatggcttaagataaatatattagtaaataaatattctgagaacatatttccataaatgaaatgtgctgctatacatatacagaatatacataagttgtcttctagcttttaaaacattttttaaaaatggtaatgttggaaaaagagcccttagaccattttattacaaaatctttacagcaaggtctttacaaaatctcttttaagtgctatgggaaaaattaaaaaattttaaaatagtgccttgttagaccaacacaatagaaagagtttacataaagagtagaaaaaggcagttctgtttaaagaataatagtctcgactagtaattattttttagacctcattttaaaagcattagtcctgcacgaacttcgagtagagactagcagcacataagtatgtgagcagtgggacagaaggggctttattttataaaagggcttggattaggaggagacagggaaggagctgagagttaaagccagcttactggggctgcatccataaagaggtaccttgttggtaaacacccaaacttccatttttagctggttctagaactcttcactgtatatggctgtcctacagccagggctgggtcacttgaccctgcccaactgccacaccccaacttagagggattgggggcaggggttctcagtggaaagtgagatactcctagtttccatggctataaaaccactacacaccactcagagtccaccgaaaagggtgtctgtcattggtggagtcttacaacttcaaagaggacatttcttttgatttacgtgtga

SEQ ID NO: 307834 - DNA, 1000 bp, Homo Sapiens
  misc_feature (722)..(722): n is a, c, g, or t
ctttaaaagtggctcctctcttaattcatactggcctctcctataaccatttcaaaaaagtgagatttataatactgtactacagaattagggtgagcataggaacttcatcatagtagctatgttcctcttaaggaactccctatcttaaggatgaaaaatctaaacattaacataataagatatgaggctttacacctggcaaatgaatcaactatgttttaaactcagcggaacttcttttttaaaagttgaatgcagcagaaattttttaagacaacgcaaggagatataactgtaaaactatctactgaaagagcgggaaagaaaacacaaaattattaaactttaagctcagaaaatatgtcgggattgttatataaaaaagtaagaatattttattactatggaacatatgtgtacctgaacacatccagctaacatctcatagagaatgtgagcacgttttttcatcactctgacatctaccatggtagaatctgcacactgaccattttgaattggatttataaatctattcctgaactccttaatggatccaagtaaattttccttgataaaattaaccatacaatgatctaagagagaagacattattcattaacaacattagcaatcgttaaaaagacttagaaaaattccccaatgaaatgctcatgtcaaaaacacatgcattagaattaagctataaagaaagaatnctaagctaagtatagaataaacatggttataagtctgatctacaagtgaattaccaaaacgagagagaaaattgaagtaaaaaccatccctaaatactagacatgaacgtttttaaaaatacctaaggacagtttattcaaactcactattattctttataagagatatgaagtataaaacaagtggtccattaatctaaccatgattttatggtcagtgaggctatcttgtgaagaaaggagatactaagtcaaaacaataaataggaggtaataag

SEQ ID NO: 307835 - DNA, 1000 bp, Homo Sapiens
ttttttttttttttttttttttttttgatgttccaaatgggaatttatttcaaagaggaaaagttaatattttactttaaaaaaatcaaaataatacaaataaaaataattcttggtttatggtctgtgggaagggaataaaaggacaagtagcaaggccaatgtgcatgtttagaaaacctaatcacaccagctcactcaagcagagaagctactgcatgtgcatgcattgtgtggaattaagactgggtttcttagagaaggaggagagaaagggggagagtaggagggagaggggaaaaggaggagggagaggaagagaaagaagagataaagtgggactaagagaaagagggaagagaggaagaacaaagacacagttcctttaaacatcagggcttcctgagtgcaaggctgcattaacagcttattaacaaccagccagggctgtgtggacaaagaaacttcaggatgacattatcgaagccaacatccattcaagattggagaggaagacaggaatgcccaagagtgaatctgaagttagacgttaagtgaggtgcccaatcacggctcttgggcactgctagacagcactgaaagagctgcattctccttcctcccttctccactactgagaaggcctgacaaagcaaatgcctcacatgggcaaggctggccgtcgccatggttcccttactgataccaggtgggatccccaaacattccctcaactccagttcacagcagacacgagccttgactcttatgttccacaacttaattccagttacgacactggtcttcccgggggaaggccactcggtcatgcccaccttagcctaaacatgtggactgacttgactgtaggcaacggatgggacacatcgctaaggggagggaaaggcaaagaacgaggtggccccaaagagcagcaccacagacttgccaattcagccatctgagcgcttgtgggaaacatgcaggaagccgtctgcag

SEQ ID NO: 307836 - DNA, 1000 bp, Homo Sapiens
catcgtgatgtcttatttaaggggaacgtgtgggctatttaggctttatgaccctgaagtaggaaccagatgtcggatacagttcactttagctacccccaagtgttatgggcccggagcgaggagagtagtactcttgtgcgggatattgatttcacggaggatggtggtcaagggacccctatctgaggggggtcatccatggggacgagaagggatttgactgtaatgtgctatgtacggtaaatggcattatgtactatgtactgttaagggtgggtaggtttgttggtatcctagtgggtgaggggtggctttggagttgcagttgatgcgtgatagttgaaggttgattgctgtgcttgcttgtaagcatggggagggggttttgatgtggattgggtttttatgtactacaggtggtcaagtatttatggtaccgtacaatattcatggtggctggcagtaatgtacgaaatacatagcggttgttggtgggtgagtcaatacttgggtggtacccaaatctgcttccccatgaaagaacagagaatagtttaaattagaatcttagctttgggtgctaatggtggagttaaagactttttctctgatttgtccttggaaaaaggttttcatctccggtttacaagactggtgtattagtttatactacaaggacaggcccatttgagtattttgttttcaattagggagatagttggtattaggattaggattgttgtgaagtatagtacggatgctacttgtccaatgatggtaaaagggtagcttactggttgtcctccgattcaggttagaatgaggaggtctgcggctaggagtcaataaagtgattggcttagtgggcgaaatattatgctttgttgtttggatatatggaggatggggattattgctaggatgaggatggatagtaatagggcaaggacgcctcctagtttgttagggacggatcggagaattgtgtaggcgaata

SEQ ID NO: 307837 - DNA, 1000 bp, Homo Sapiens
catcgtgatgtcttatttaaggggaacgtgtgggctatttaggctttatgaccctgaagtaggaaccagatgtcggatacagttcactttagctacccccaagtgttatgggcccggagcgaggagagtagcactcttgtgcgggatattgatttcacggaggatggtggtcaagggacccctatctgaggggggtcatccatggggacgagaagggatttgactgtaatgtgctatgtacgataaatggctttatgtactatgtactgttaagggtgggtaggtttgttggtatcctagtgggtgaggggtggctttggagttgcagttgatgtgtgatagttgaaggttgattgctgtacttgcttgtaagcatggggagggggttttgatgtggattgggtttttatgtactacaggtggtcaagtatttatggtaccgtacaatattcatggtggctggcagtaatgtacgaaatacatagcggttgttgatgggtgagtcaatacttgggtggtacccaaatctgcttccccatgaaagaacagagaatagtttaaattagaatcttagctttgggtgctaatggtggagttaaagactttttctctgatttgtccttggaagaaggttttcatctccggtttacaagactggtgtattagtttatactacaaggacaggcccatttgagtattttgttttcaattagggagatagttggtattaggattaggattgttgtgaagtatagtacggatgctacttgtccaatgatggtaaaagggtagcttactggttgtcctccgattcaggttagaatgaggaggtctgcggctaggagtcaataaagtgattggcttagtgggcgaaatattatgctttgttgtttggatatgtggaggatggggattattgctaggatgaggatggatagtaatagggcaaggacgcctcctagtttgttagggacggatcggagaattgtgtaggcgaata

SEQ ID NO: 307838 - DNA, 1000 bp, Homo Sapiens
catcgtgatgtcttatttaaggggaacgtgtgggctatttaggctttatggccctgaagtaggaaccagatgtcggatacagttcactttagctacccccaagtgttatgggcccggagcgaggagagtagcactcttgtgcgggatattgatttcacggaggatggtggtcaagggacccctatctgaggggggtcatccatggggacaagaagggatttgactgtaatgtgctatgtacggtaaatggctttatgtgctatgtactgttaaggacgggtaggtttgttgatattctagtgggtgaggggtggctttggagttgcagttgatgtgtgatagttgaaggttgattgctgtacttgcttgtaagcatggggggagggttttgatgtggattgggtttttatgtactacaggtggtcaagtatttatggtactgtacaatattcatggtggctggcagtaatgtacgaaatacatagcggttgttgatgggtgagtcaatacttgggtggtacccaaatctgcttccccatgaaagaacagagaatagtttaaattagaatcttagctttgggtgctaatggtggagttaaagactttttctctgatttgtccttggaaaaaggttttcatctccggtttacaagactggtgtattagtttatactacaaggacaggcccatttgagtattttgttttcaattagggagatagttggtattaggattaggattgttgtgaagtatagtacggatgctacttgtccaatgatggtaaaagggtagcttactggttgtcctccgattcaggttagaatgaggaggtctgcggctaggagtcaataaagtgattggcttagtgggcgaaatattatgctttgttgtttggatatatggaggatggggattattgctaggatgaggatggatagtaatagggcaaggacgcctcctagtttgttagggacggatcggagaattgtgtaggcgaata

SEQ ID NO: 307839 - DNA, 1000 bp, Homo Sapiens
catcgtgatgtcttatttaaggggaacgtgtgggctatttaggctttatgaccctgaagtaggaaccagatgtcggatacagttcactttagctacccccaagtgttatgggcccggagcgaggagagtagtactcttgtgcgggatattgatttcacggaggatggtggtcaagggacccctatctgaggggggtcatccatggggacgagaagggatttgactgtaatgtgctatgtacgatgaatggctttatgtactatgtactgttgagggtgggtaggtttgttggtatcctagtgggtgaggggtggctttggagttgcagttgatgtgtgatagttgaaggttgattgctgtacttgcttgtaagcatgggggggggggttttgatgtggattgggtttttatgtactacaggtggtcaagtatttatggtaccgtacaatattcatggtggctggcagtaatgtacgaaatacatagcggttgttgatgggtgagtcaatacttgggtggcacccaaatctgcttccccatgaaagaacagagaatagtttaaattagaatcttagctttgggtgctaatggtggagttaaagactttttctctgatttgtccttggaaaaaggttttcatctccggtttacaagactggtgtattagtttatactacaaggacaggcccatttgagtattttgttttcaattagggagatagttggtattaggattaggattgttgtgaagtatagtacggatgctacttgtccaatgatggtaaaagggtagcttactggttgtcctccgattcaggttagaatgaggaggtctgcggctaggagtcaataaagtgattggcttagtgggcgaaatattatgctttgttgtttggatatatggaggatggggattattgctaggatgaggatggatagtaatagggcaaggacgcctcctagtttgttagggacggatcggagaattgtgtaggcgaat

SEQ ID NO: 307840 - DNA, 281 bp, Homo Sapiens
cgtagccagcacaaaaataaataaaatttaaaaagccaacctttattccactttgaacaagtttgtgaatgtccaaataaggctccttgaaaatttctccttcaggggtaagtatcttcacataaccttctttttccagaatgaagagacgttgcgagccatccccactatgcagggcaccaacgggctgccgcagcccactcacaacctcctgaatacagaagcagttgtgtttgtgctttctaaacaaattaaagaaaaccggtaagcttttcttgaga

SEQ ID NO: 307841 - DNA, 1000 bp, Homo Sapiens
gatcttcaccttctaaagacttccataaaaatatgtaatacttaaataattactaatagacctttcccaaaacactgcattgtaacaaatataaagttggacttaactaaaatggtagttatgagtgttagaatgataccagatacaactaaatatatgcatattatgataaataatagcatagcattaagagaagaatgccaaagaagggatagtatcttcaagttttctctacacatcattctagaagagcagaaaatgatgacaactcaagccatgtcaatttaaataaaattactttagctaagaagcagaaaatgtgatcaagaaaagctcaatcaatcttagccacttcaatcgtatcaaataatactaaaaataataaatttgaaggctaatctatgcaaaggcagaatgctaataataccagaggaaatttggcaactattgcccttatagaattatgacgtcactgtagcagttttttgttcattagatgcttggattaacgaagatataaataaattaaacataacctctccattttagcaaacttcctaaagaggctgagtcttttaattttctataatttcttcacattccaatacattcctatcacatttaacccagaagagattaggtaacattctaatgctttgtaaattgtatttaaacccactattttaacttgatacacatgcatagatttcttagataaaataatcaaatattgtttgcatcatacaaaggtggtatttcaaactctattcaaataagtcagtcccatgtcccaccagtggcaatttattatgaaaataatgtgtgtgctgtgaaatggtgaagatctctacagactacaagcattaagtgtttttattatgtcctctaattggttcttatgacttgggtcccaaatagagaaaattaatgaattaaagaaatcaataccaataaaaaacatattaactgtactacaggtgtagtttaaaagcagaacaca

SEQ ID NO: 307842 - DNA, 1000 bp, Homo Sapiens
gggccctggagggtcccgtccactgcccagactgacccaggtcctcgatgaagcctcattatgaggactgggggaaaaggacccagccacttcctggggaggtcggagaccccagggtgagcgtcaaggtagcctcaaagatgagacgtcacctcttgaaggcagccatgagccttgggtggggacgtcactagaggaagttcaggccctattttcggaggaagcagttggagaccccataggaggaagggcgatggggcagtagaaagtcgcggtgtccccgccccctccagcagctacgcgccccactctcttggagacgctagatcagtccctccgggcctactaaagaaaccacgcagggctcagatccgctccatcatcatcatcatcatcatcatcatcatctccaggtttatttccagctcccccgcaacccctccggacctggagccgcctccgcccgcgctgtgcacgcgctgcgcgcgacctcagggctgcacacgacagcagcgcgctccggtccagtccatgcccgcgcactggcagtgacatgtggtctcggcgcgcacatcccacgagccacaggcggagccacaagtgcagccggtgacggcgaagcctgcagcccggaacacaggagcgtggactctgagctgggaggctgagggtgggagcgggaggggggtggggagcgcggaggggggttgggggggcgggggtggggacggggacggctggaggctccaaccactgaatgggcactggaggcagggagtgagggtggacaccagtgtccagatggtgggcggagaaggctgggagtcaggaccaagatcctaggggagtagaggctggacacggggaacgtggcggggagggggcattcccaggggacttggaacagaaatgggcgcctggacaacagtctcctgcactcacctcgggggcaagtagccaggtcccccctggaggtgacgctctggcactccaggccaat

SEQ ID NO: 307843 - DNA, 1000 bp, Homo Sapiens
tcccaggttcaagcaattatcctgcctcagcctcctgagtagctgggattataggtgcatgccacactgcccggctaatttttgtatttttagtagagacagtgtttcgccacgttggccagaaagtaatctcagaatatctgttggctcacacaaggcaatataaatctcaagccaaggatccaagaaaaaacaaggaatctgccccattctccctaacctctccaaataccatttgtctcgagagaaacttttttgactcaacttccccaccaagagctgtggaattccccatgaacattcaaaacactaacaggtttagaaaagaaaaactatactgacttttggcctgattcctgtgaggtcaccggacccccatcttttgcaaagtcctgagaaaacagcagcggcaggaggtttatggcaatcccatcctgagtgtcgtattcttccagtccgtacagtgctttcacaggaaatggaaagtcactgcggagaaaaaccagaatctgatgttgcagctcaggaatacgcaaggctacagggaaaaccactagagcaaaccaatttcaaacacaacatcatggggagaaattagaagaacaaacagtgaaccttttaggaattttggagctaagggtgcaggggtgctggggttgggaggaaagaagctgtgggactgggcagctgtggctgaggtgaagggtattctgaagtttgtatcagctactgacagaattgatgtaacttcaccagtgcaaccaagccagcaggtaaacaatacctacccttccggaacaacacaggagtccactacgaaggcatcctggaaatcattacagatggtatgcccaacccattccttcaggaagcaaacaaacaaaaagggcagtgcagagtgtacttgctgtacagccctagataaattactcttaacctttctaagtctcagttccctcatttctaaaaagaaagtaataataaatatctcactattgtg

SEQ ID NO: 307844 - DNA, 1000 bp, Homo Sapiens
ggatcctaccagtaagaaaggcaaacagcggatttcaaactctaacacaaaatgatcacaggctggcagagacacagaagcaggcaacaatttatctggggtctaatcagagtcatcataactctcatcactatcttgctccttttctccagcacttacttcgtcttcttcaccatcctaaggggcaaagaataaataaataagcattttaggttactgctctgggtgacctctggaatacagctcctagaggatacacaactgtactattatcactgttaaaacttttttttttttttaaaggagtcttgctctgtcaccaggctggaatgcagtggcatgatctcagctcactgcaacctctgcctcccgggttcaagcgattcccctgcctcagcctcccaagtagctgggattacaggcatgtgccaccacgcccggctaatttttgtattttggtagagacggggtttctccacattggcaaggctggtctcaaactcctggcctcaggtgatctgcctgcctcagcctcccaaagtgctaggattacaggcgtgagccattgcgcccggcccaatttgcataattttaaataagctatggtcctccagctctactgcatgtatatgacataggaacaaagagggcattcgatatagaatgaaatatttattacaagtggtggtatggcagtgcacggtggctcacgccaaagtaatcccaacactttggaaggctgaggtgggtagatcatctgaggttaggagttcgagaccagcccggccaacatggtgaaaccctgtctctactaaatatacaaaaactagccgggcatggttgcaggcacctgtaatcctagctacttggaaggctgaggcaggagaattgcttgaactcgggagacagactgcagtgagctgagactgcaccactgcatgctagcctgggcgacagagggagactccgtctcaaaaaaagaagtgctgtgctggtgtat

SEQ ID NO: 307845 - DNA, 887 bp, Homo Sapiens
  misc_feature (720)..(722): n is a, c, g, or t
  misc_feature (724)..(724): n is a, c, g, or t
  misc_feature (727)..(727): n is a, c, g, or t
  misc_feature (778)..(778): n is a, c, g, or t
  misc_feature (814)..(814): n is a, c, g, or t
cccagtcctctccttccacctcagtaaaaataaattacacatcccagcatcaaaatggatctcagtaatgtaatgctgaacataagttggctgtaaatatagcataatatgagtatacatgtgattaaacagcaaagaaaagcaatgaaataattaattcaaaattaataatgcttccctttgggatagggggaagcaggtgggatcagggaaaaggaatgggataaaggaatggataatccaacaaaaagattctacctttttgttgaattgaggagtattcatgtgtatgccttatccttatgttacaaatattcttgtaggtattaatatatactaaaaacaatttcaaaatgaaatcacacaaagcaaatctatgttttgtctgatcttgcattgacaaccttgaaagattaagggcatttcactaaaataggtaagctcagaaacagatttgggaagcctcagcacttggctcaaactttttcagagaaaagttttacctgttctgatgaatcacaaataagttaaaccaagagttctcatcttcctttggtctcaacattgttacttttttattgacaaacattcgatagagcctttcatctggaatggatcctgaaatggacattacattatttttaaattgttttcttacttcggcttaaaaaatgaatctattttgcttctaaattatgtccttctcaaagtatttcactnnncnggngggagatatatttgaattctggaataatttataagtgggtatgttgcaggntctttttttatcttttttttttaactgaaacagggncttgctatgttgtccaggctggtctcaaactcctgggctcaagcaatcctctcgcctcagcctcccaaagggc

SEQ ID NO: 307846 - DNA, 1000 bp, Homo Sapiens
ttaaaattcctatggatgcatatttaataaaaacaattttaaaaaatctttagagatgaactgacataatgtgtgagaaagtcactgagtgaccaatttctattggcgtgaactattcaatgacaatagtctcacagtaaatacaatgttgactatgttaatgactagttttaggaatcaaattggggggcagttttctttcttaaactgactttataaagactacttgataagcatatgtgtatttgtatcttatgacagtaacaaaaataataattgtatgatctggagttttcctcctgttgccaaaggcttttagctattttctttaacaactcatatttgcctattactttgcacatgtgaaaatacatatgacattaaatgtatccaaaaggtactacgtgacaaacacagtgaagcttttataaggtatgtgctaagaacaattaaaaccctaagtgcatgtggccattcaaaatttatttaagtaaaaggcacatgtcagaactgccttaaagactgtctttatatattataaaaatagatttttaaagaaccgtgttttagaaataaaacttataattcaactctgaacagatctaattctgtattttccactcaactgccaagtgtgaatgtgcacaggactgaactcagtgctcacctcttcctctttgagaccctcctctcgatgctgaattctgccctcttccacctcttcgacctcttcctcggcctcttcctttgttggttgctgctgagatgctatcatcagagtcattagccatctgttctgctaaatctatactcataaggtcatcagcactaaaggcagaagcagactcctctgactgagatctgagtgctctggccctggtcatagcctaagagggagaagaaggagaaagtacacacaatgagataacgtaccatcctaaaaatcattaatttaggcattgacatgaactaatcatactataaaaacataaaggaggct

SEQ ID NO: 307847 - DNA, 1000 bp, Homo Sapiens
ggagaaccacatgatcactgaatcccatgtcttagatggttctggggttctaaggtcttgagagccatcaagtagcctattccagggtttccatccagcaatccccaccccccctacatttacccctgcttccaggagaagttctcatctccaaacaagaaggtcgcagactgtgggcctcgaagctgcagctgtgtgaacctctgagctcagctgccagcctccatgaagtctccacatctccttatctcagtgaagaagtggctgtggccatgagggctgcgaacaatgacccaggcttcttccgcagtacctccggccgatcaaattctaccaccttcccattgcccataaccaggatgcggtcacagttcagcacagtggtgacacggtgggcaatgacgagcacggtgcagccctggaaggcttcacggattgtgcgctggatcagggtgtctgtctccatgtcaatggaggctgtggcttcatcgataaggatgatcttggagttgcgaagcacagccctggcaatgcagagcagctgcctctcccccacagagaagtttccaccgttttccaccacatctgtatgcagctttttggggaactttgagatggccttggtcaggaatgtcctctccaaggcatcccagatctgctggtcggtgtgacggtcaaagggatctaggttgaatctgatggttcctgagagcagcactggatcttgagggatcactgagagcttggaccgcaagtcctccaggccgatgctgcaaatgtccacgccgtcaatgagaatccggcctgccatgggctccaccaggcggaagagagccatgcccaaggaggacttcccagagcccgtccttcccacgatgcccaccacttcgtggccgcggatggtcaggttgatgccgtgaagcacggtgggtgtgttgtctctgtatttcatgtgataatcctgaaatatgatttccccatgctgtggccacccctgggg

SEQ ID NO: 307848 - DNA, 1000 bp, Homo Sapiens
accaaaaaaccaaaaatattttattgctgagtcatcctggggttccataaaggaccccaagccttgcttggagtctatagctttgctaggactcccatgacatcaggatagagattgaggcacggggtcctttgggttccgattaaggaactatctactctgattctgttgatcttattagtccctccaggtcacctctacttcatctgtccgatacctgtggaaaaacagaagaaacatggtggagagcgagcccttaacatccttcattcttctctgccctcatgttcctggactcttccctgctgtttttgtctatgtcccaataatctaccctcaccaagaggtgaatcactcacctctgtgtaaccccagaatcactgagtggggtcctgtgtccagcccgaaacatctcccagccagcctgggctatcatcgctccattgtcaatacagaatctgggatgcaagagagatgaaaattgggatctaagggtggaaaatcactataacaggagaagtaaaaaagaaaccaaagggaaagtgtctttacctctcatctgtagcaaaaagccgggctccacgttcctggcacattgttgccatcatctcctgtagcctcacattacctacaaagaggcagggaacaggattagcttagttttagccatctcttcatggtccagcagaacacgtcatgtgcactcacttagaacaatgacataggggattaggggcaaggattgggaagcctactccaaacgcttaatgatttagagtaccaggaggaagacgcatagtgttaagaataggaaagaggaacacttttcaataatacatacaccccactcctcccacaatgagggcctcctgggagccacaatgtgccatggctcgctctgtgatctctaccagcattgcaaacacagtttcctgtcagggacagataaggagaaaatattagaggggcatcccagattagttctgctctacaatataaa

SEQ ID NO: 307849 - DNA, 1000 bp, Homo Sapiens
ctggaatcgcaccttctcaatgagccccgggcccctacccgcagctatgagcccaccagggggaaggggacgcacctgccctgctggcctcaggtcccatcgagacgccatgttagttgaataaatgagtgagcccctgggcctcaatgggacctgattggccacttgctgtgactgccagcagccaccagggacccctaggccgttccagggatgtctcatacccagggcggctccttggggggtgggggtgagcttcccctcaggcagcataagggcctttcctactcaagctgcctatgtgcattatgatgtgtaagaccccacagtcagccttggagtacggcgcagcccccagctcaggcccagaggacccccaggaaggagcgtgctctgtggcgagtggtcattattgctttaacagttattattagaccgggtgcagtggctcacgcctgcaatcccaacactttgggaggctgaggcgggcggatcatgacgtcaggagttcgagaccagcccggctaacacagcgaaaccctgtctctactaaaaatacaaaaattagctgggcgcggtggcgggtgcctgtaatcccagctacttggaaggctgaggcaggagaatcgcttgaattcgggaggtggaggttgcggtgagccagatcgcgctcctgcactccaacctgggcaacagagctagacaccgtctcaaaaacaaacaaaaaacaattattattattattattattattaattatttgaaaagaggtttcactctgttgctcaggctggtcttgaactcctgggctcaaatgatcctcccaccccggcattccaaagtgctgggattacaggcatgagccacctcacccggccctttaacaattgttaacataattgcaattgtaacaggttggctgccccagggcacctgcagacattagagggtgcatggtaatatgcataaatggtgctgacctatctctagaagacttttc

SEQ ID NO: 307850 - DNA, 1000 bp, Homo Sapiens
ggcaaaatgtgtcctgcatttcccacactttctgagctggagcacaggttctggagttagaccacttggctcaaaccttggcctcgttcatggctagttgcctgtccctggacaagttaattccctggtctcatttttcctatctgtaaaatggagtatgcaataatagtactcttaacctcataggttgtggaagaattcacagacacaatggaaataaaaggcctggctcattgcctggcatgtagtaaggacctgataaatgtcagccatcatattattactacatggtattactgcctccccttagatgggagccaagtcttgctcaccagctcattgcctgatgttagtaggcattcaataaaagtatcatgaatgaataagaacatttgagaaagacagcattccagcctttccaggcaatactcgtgtgtgtgtgtgtgtgtgtgtgtgagagagagagagagagagagagagagagaaagagaaagaaagaaaagaaagaaagaaagaaagaaaacaaagaaaggaaagaaagaaaaaaaaagaaagaaagaaggaaagaaagaaagagggagggagggagagagggagagagggaaggaaggaaggagagagagagagagacagaaagaaagaaagaaagaaagaaagaaagaaagaaaggaagaaaggaagaaagaaagaaagagaaagaaagagagaaagaaagaaagaaagaaagagattggtttgaaacattgggagctgagcttaatgagaaaaggccattcctaactgctaagctaccgtattaaacagtggcaagtaccttggaaaataaaacagaaaccactgcccatctttttctaacggagaaagacaagagatggcttgaccagagtggagatttagaacttcaggtgctgataaatatggtaacatcatggggtgctttggcagctggatagattttatttattcagggctcctttaagccagaggagattcctggagg

SEQ ID NO: 307851 - DNA, 1000 bp, Homo Sapiens
gtgagacggagtctcactctgtcacccaggctggagtgcagtggcgtgatcttggctcactgcaacctccgcctcccagtaactgggactacaggcgcgtgccaccacgtcctgctaattttgtattcttagtagagacaggctttcaccatattggtcaggctggtcttgaactcctgaccttgtgttccgcccaccttgtcctcccaaagttctgggattacaggcgtgatccaccacacccggccaaatgcctggctaattttttatatttttggtagagacagggtttcatcatgttggccaggctggtctcgaactcctgacctcaagtgatccactcacctcagcctcccaaagtgctgggattacagatgtgagccaccgcacccgacctaatttgtgttttaagtcactaagtttctggtaatttgttgcagcagcaagcagcttgcagatgcaaaacagaggtttgaagggctgacgtcatttgcccacaatcacctgacaaatggttcttccgactgccactgccgtgctgtgaaatccgcagaactctggagcctgaccacctagacctgacctccagctttgccactggctagctttgtgtctgtgagcaagttacacaacctctccttgccttagcttcctcatctataaaatggggaagcagccatacctgcctctgagagagagggacggaataatgagtgaacacagaaagcactgagaaggtctggcaccatgtgatgtcagctgccattgctctcccacttcctccttcggccagcctgggatttcatgctcccaacagtctctgggacccaggttctgttgctgggtatttgctctctttaaatcttctgaggtcatattttcattcattagtttcagatccaaaccctttagagctgcagccacgaagtgctcactcaggcggctgccacccacaggccaagctaaactggcaacccgttcacatatatatccctggaat

SEQ ID NO: 307852 - DNA, 1000 bp, Homo Sapiens
ttatcaatttcttacgaaatacatatatgaacttgacattcaaagatacagaggtcttaaaagccaaatatcacccttaaaggacatcttaagacattatctggaaaagctctgagtgatttaaggagacagatatatatacatacacacacacacacatatatacacacacacacatagtatatatacacacatacatacacacatgcctttaaaaatcatttactgtgcaaatatatttcccaaggcatatataagtgtatagctcatacttatttatttatttagagatagagtctcgtctgtctcccaggctggagtgcagtggcacgatctcggctcactgcagcctccacctctggggttccagtgattctcccgcctcagcctcccgagtagctgggattacaggcatgcaccaccacgcacggctaagttcttgtatttttagtagagacgaggtttcaccctgttgtccaggctggtcctgaactcctgacctcaagttatctgctcatctcggcctagcaaagtgctgagattacaggcgtgagccaccgtgcccggcccgctcacacttattttaactgtcgggacaattctgatcacttgtaaaaagtatgaattgtgagtgaacaaccacaattaaaaaaaaaaaactatactacctacattctactaaccagaaatctctgtgaacaggcacttcagcacttctctagcccagtgataattgatttttatacccaaaagcactacaacattttcatgttaattaaatttaattataatcccattatttaaacttggaaagacattccaaacaagatgaccaaagcactatacatggaataagagtcaatttcagcttgaatctcagtttgaccatcctcagactctgtggcctttggcagtacagtttacttccctggtttgaaattttctcatctataaaatgaagacatcatcacttcctttgcctatccctagtgactgcttt

SEQ ID NO: 307853 - DNA, 1000 bp, Homo Sapiens
ccagcacaaggtgctctcggggcacatagtctggcacgcgagggccccggcggggctgttagaggctcgtggtcatcctgaccatgtggtccagggcgccccggtcctctgggccccgcatggagcgcggcgtcagcgcggacagctcgcagtccctgagcctctgcaggcagttcttggagccctcgggcttttgcggcctctcggggagcggcggcagctcaagctggtactttttccccaacagctcccggcaggggcgctccaggagcctctgcatgaggcggacgtataagtggccactcctctggcgacatcccacggcgggggccctcgcgtggacacccgcccctgctagctcagggctccgatgcgatccgttcgaccctgcatggcggctttcaacccgaacgcgtccctccttcaaggtcaagaccctgaacgtagttcaacaagtagttggtgatgatagcgtgccctgactgggccaggatagcctctttagtaaaacagccacgaaagtcatgaaacagatgctcagctcctttcttcattttcactttaattcggtgatgcctctgtgtctgtctgacgacatctctcctggggtctgtgattctgctgatggtcttcagtgcctactgagaagggttcctggacatcatcaggtatgaaaacctcaaagctctcggtcctcaacgtgagaaccctgggccagcggcatcagcctcaccaggaaacctgttcttctgctcattcttgggccccaccccaggcctattcaaagaaagactccaggggcagggcctggcagcctgtgtttccaccagatctgtgttaaagctcaaatgaaccagcccacgtgatgctgaccaggaagcacaaggctgagagccagtgtccaaggcaacggtgcccatggggccagaggcagctcctgcctgtgcagctgtatttagggctgcgttcccctccctgtcctgccagttgacgtcagtgt

SEQ ID NO: 307854 - DNA, 1000 bp, Homo Sapiens
ttttttttttaggaaaacaatgtattttattaaagaaaaataagttaaaacccagtagacacacctacgagatgctttctttgtccctcatttcatgccacatctaactggcaattaaatctcttcctttctaggggaacactgtgaagaacatgttgcttttttcaaacagatttttggagaccaagctctaatgaggcctacaacattctgaaatcacttgctgtttttttatataaaaatgtgtacaaagttaatttattgcattaataaagctctttaaactataaaatgttataaagtgtatctacaacctcaactgtcactaaaaatatggtatagaacttgtgggatggcttactcctaaaaaggagaggacagacagtgcattgattggcctttacagagtgtcagtgagcggatcacattcacagccatctagtgtcacctcctgcttgccaaagaatgaggtttctttcctgaagaggctgggagaagtttagtgtcctgtggttgcctccagatctagtaatactgcttcccaagtcaactgtgcattcctgagttcacaggcgctacgttcaaagctgctgccaaacaaccgatggttggcaccatccggtgttcaacttggccttgccgatgcagcacccgtccagtggtaaaccgaccgacccttagacacagttcagtcaggatgccctgcgagagggctagaaatttagaagccgttcgcgctctgttcctttgtatcgctcttcagtggcacaacttttggctttatttactgatggccctatgagagagagactttttcttatttctgcaggagaaagggagctagttggctgggcatagtggctcacgcctgtaatcccactttggaagactgaggcaggagaattgcttgagaccagcctggacaacagagtgagaccacatctctctccctctcttttggagatgggctctttgctttcttcctcaggctgcagtgcag

SEQ ID NO: 307855 - DNA, 1000 bp, Homo Sapiens
gcagagaaatgtctgagtctggcttgctgccatctcccctgccaccagcccgcacatgtgcgatctgggctctcagaccctgggccctcactgtcaccagcgtgggaccctgggaaagcacttatgttattgcctgtaaaatgggaacaataatagaacttgctgggttgtcaagggatgggtgatatcacaagtgcaaagcatctggcatgggctggtgcatggtgggggctcagtactttgggggatggacaaggtttggggtcctgaccttgttacctctagtaggcactcacctctgatacagtccagactctagaatcagagggtggggcacagccttatggaagcatgcttagaacatgcagggtggggtgagcaggcgcacagaaaatcagacttgggtgcagcgaaggactcactcacccactcattccattcttgagtatctaatcctcttcattcggcacatgaggaaacacatggtgcttggtgaagggagggagggaacttagctggctcatgggggagctggtgcctgagatgtccctgaatgaagtttctgctcctggtcatctctcctccacagcacagagcacaggactgagtgtagggttcttggtcgcactccccccgccaaattctggctgcaccacttagaagatatgtgactgggtaagccacctaaccacttcaagccttgcctttcccatctgtgaataacagatgggataacagtggtgcctttcttcatgggagtcttatgaggggcaaatgcgaccatccaggtgaagggccaggcacccggcctggagcatggtaagctatcaatgtcaccattcccagagctgcctccataaagacagttataaccagtgtttgcaaaatgctttattgttaatgccaacatagaattcaaaaagttagtcattggcacctgcaactgatactctactatttgcaaaaggcttcccttcttccactcccagccaggcccatc

SEQ ID NO: 307856 - DNA, 1000 bp, Homo Sapiens; identical to SEQ ID NO: 119872

SEQ ID NO: 307857 - DNA, 1000 bp, Homo Sapiens
gtggtagtcgtgagggctaaatggagcaaatgtagacgagtacgttgcgaggacgttatgttgagatcaggtgataatagtatgaggagaatgacattaagatagtatgctgataatatagtgatagtttagtaataatatgaagtaaatgataatggagagagtagattgagagacgggtacgacgaaagatggagggaaaagtgttaacagcgacgaggataatattgaaaagagtgggataaagtagggatgaagtgagggatggaagtaacaaacggttgatcgtatatattaagcaagtaaagataaagcaggacggaacgatagaatatatctgagcattaagaaataacgatgtaacatatgtggaatagatacaagttggtgatggagtcagatgacatatcaatgatacgaaactatataggagatacgattggggataggggagcattggggagggtagcgagaggatatatggtcattggcactaaatccccgtctctactaaaaatataaaaattggccgggcatggtggcacgtgcctgtagtcccagctactctggaggctgaggaaggagaatcgcttaaacccaggaggccgaggttgcagtgagccgagatcacgccactgcactccagcctgggtgacaagagtaaaactccgtctcaaaaaaaaaaagctccacaagcacattataaccagttcaaaagatatttatgtaaggaagagactacacaatcatcttttctgaaaatggataacagaaataaactcttatccaaaattatccagaatcagtggtgggataagggtgaagcccaaattttcattgactttctaggcttacagtacccataaaaaccacacaaaattctctttcaccattcagaaggcaatttcagaatcttgccatgtgcctcaaagtaattagcaacagttaactacatggtactgaaggcataatggtagctaacattcgctggatgctgata

SEQ ID NO: 307858 - DNA, 1000 bp, Homo Sapiens
cagaaaatctaattcattacaaagcctatacctttgaagaagaggacattttcatacaaagaaaagtattacactattatacaacatttttaattgaacatgtacaaatttttggcacattaaaaataactgaaaggactacaaaataaaaaccaaagaaactaaaacaaagatacaggagagagaaaaagtcctcaaaatgagaaacactaagtattgacatagaagagaaacaaaaaataagctggctgagtttcctgaaatgttcttgtgtgtaacagaagtatgttgtgggtgcaggtgtctgtgattgagcggcacaacttctctaccttgctgtggccggctgcacgtggcctgggtatgatcttctgctgctggtcgcttgcctctgcctcgccagaaatgactgccctgagcctgtgcttgccagtctatcttcagctgcctttttatgcagggtcattcccatattgtaccaggcactaacaatatatttctcttccatctctctctgactctttgttttctcatattctttctctaatgagtggaacagtcggtctcgttcctggagctgatttttaagagcttgtatttctggtgctgctccttgattctgtttaggatctaaagtacggatgacacttttggctttctctaagtattttttgtatcgttcttccatttgcttcatttcttcctctttctttcgtaaagcttcttgtaattcttcaatttttaaggagctgttgttaaatcttggctcgagatcttcaataatggctctcttcttctgtagttcattattggcctcatgcagcttctctagatgttcttcaagcttcttttttagaaggactgaatcttctgcttttgagccttgatcctgtaaagatttttgtaattcttcaacttgtgactgtacttccagaagtctttgattcaccagcctattctctgtctccagttcattcttgcgtagatttgcatcatctag

SEQ ID NO: 307859 - DNA, 1000 bp, Homo Sapiens
ttaaacaccaaaacttaacatatagtttactttgtgttaaacaacaacagtatgttttaaagcaagtatgtctttatttgtaagcatattactgaaacgatcaaatgaacagaagtggataaacgtcgagtcacttggctgagaccatacgcatcttccgtactgcttgtattaggatgcaagattgaatgtgtcttttttttaaaaatgcagccttgtgttgcactctgaaataagtgatttaaaaagaaaaacatgatacagagatcccatcctgaccttggaggcttggataaagctgtggggagacagcctcatggtccagccaggctagtccgcctgcttcaggactctcaagatctccccaagactttcaggatcagctgctgttaatcaaacaagtgcttataaaatggaaattgggacaaaggaaatgttaaatttcctccctgcaaccaggcagatgagaaatatggaaataaggaaaagggaaaatgaagatatgacaaagttgatgaaaaggttgaaatagtgatttatacatgatgggcaatcaagtgccccttttgccctgttttttggagagggtgtatcattgcctcaatggtgcgtctgcctgcactgagggcattacacatggctgactcgacctccctgcctctcacactctgtgtattttgtgaagctccacaaacggggtcacgtcatccaggtgaggccaccaccggtacagaaacctctcggcaatggttcttagccagggggtgactttgacttcacccctcgcctccctctccagcagctcccacagctcctcctgggacaggtagaggatgcttttcgtttcactgggatccgggttcagagtgacgtttttcctcacaagcagaaggtaacaaatttcatgctctccccaaattctgtctgattttgccttgtggtgatagattgtcatgaacacaatgtcctctggagaaatctattgacagaaattggtgca

SEQ ID NO: 307860 - DNA, 1000 bp, Homo Sapiens
gtgagggggctggtggctggaccctcgggtgggtccccttctcagtcccgtgcgcggctctgactcgctaaagtttctcctgagcccggttatttataagggcggcccgtagcaaccgctgcgtcacgccggcccctcccgccgcgccgccgggacgcgaaggacacggccgcggccgcccgagacccccgggaggacggcggcagggcgcagcggagggaccgggcacccggagcgcgttttcggggggcccccgggacgcaggggcggcctcacgccccctgcccacccccgcccggccgccccgggattgggagcgagagggggcggtgcgaccccgcccccggaccgcccctctgggctggaggctgtcctggaaggcgggggaatcggaggagggggcgacctgatcgccttccccccgagacgcggccccggcccgccccctgctggaggaggcggaggtttcaggagggccgagcagagccccgacggcgaccagggtcggctccccgggccgaaccctggagaccccagcccgcagctctagctccaggagaagcgacccatctccgtggcccttcctcccgtaaactcccacctcctccccaggtccccggctttagaaagaagacttgacgcctgtgacgactcccctcttaagccacagacaatatgaggaccccgggggtcggcgcgaccgggcaggatcgcgccccgcttggggctggaccctggtccacggagccccgcccctagccccgcccaccacacctgccgcctgctcgaggcttggacacgcccgggtcttctcttgccccgcgctgcgccacccgacctgggccctgggatggggcaggggcggggggtgctcggccctgccacactgtgtgaccttgggtgagtcacttcacttctcccagctgcaatccatgaagggtgtcgctactgtcagtggtggtggcattgttcccaccagactcccaaacctaaggcttac

SEQ ID NO: 307861 - DNA, 1000 bp, Homo Sapiens
catgccactgcactccagcctgggtgacagagtgagactctgtctcaaaaaaaaaaaaaaacaatgtgattgacttggacctaagcaaggctgggtcagtacgccgagagtggtgccagtgcagagcccaaagagctcttgctgtgctcagaggcctgacacgcgtgactcactggctccatgattagtcacatccctcacccctcaaacacccagtggtgaaaacccagcacaaacagatcacttcttgagccccgggaatgcaccattgcaggccacaatctgaggaagtcgctagatgcaggaaaattcaacccagtcccgctaagagaatgacttagttcaactctgttgaactaaggcaagactaattactgtaattagctgactgtacaattagaagtgattaagcacattacaaaagaggctcagaatccccacaactggaaacatcccagctcagtccgttaacaatgtctgcggcttttctctgttttcatagcttatgcttgcagtacatgtctaccttctcaatagggtattatttttcttttcaacacactgtagcatatggacattagccaagtatatcacaatcattggtttactttttctatgcttaaattgagatataatttatatatggtaaaatgcacagatctaaggtctacagttcataaattttacaaatgaaaatatcctgtaactaacacctaaatcaaaatatagaacaattttatccctccaaaaagttccctcatgtctctttccaatcactgccccccagctccctctccccaggcaactattctaggttgattccattaagggaaaataactggaaggttattttggccattcaaaattaggcaagtagccattgaattgaaaaaagcatatagggccagacgctgtgctcacgccggtaatcccagcattttgggaggccgaggcgggcagatcacctgaggtcagggattctagaccagcctggccatca

SEQ ID NO: 307862 - DNA, 1000 bp, Homo Sapiens
ccaggcgtggtggcatgcgcctgtaatcctagctacttgggaggctgagacatgagaattgcttgaacccgggacacagaggttgcagtgagctgagatcatgccactgcactccagcctgggtgacagagcaagaccctgtctcaaaaaaaaaaaaaaaaaaaaaaaggcagggcacagtggctcacacctgtaaccccagaagtttgggaggctgaggcgggcggatcacctgaggtcaagagtttgagatcagcctggccaacatggcaaaaccccatctctactaaaaatacaaaaattagccaggcgtggttgtgcatgcctctaattccagctacttgggaggctgaggcaggagaattgcttgaacccaggaggcggaggttgcagtgaggcaagaatgcaccactgcactccagcctaggtgacagagcgagactccctctgaaaaaaaagaaagaaaaaaaaaattagccaggagtggtggtgtatgcctgtagttccagctacttggcaggctgaggtgggaggatcacttgagctcaggagttcagggctgcagtgagctatatgattgtgccactgcaccccagcctgggtaacagagcaagaccttttctcttaaaaaaaaaaaatagttaaactataaactaaattcctcccaaagttagtttggcctatgcccaggaatgaacaagggtagcatgaaggttcgaagcaagatagagtcaggtcagatttctttcactttcaaaatttccttatgccagatttttctcaatgttgtaatttttacaaaggcattttcatcagtggatgtgaaatttggtgccattggtgtttgatatcatgggcctgagtaagctcatctgggcagagggtatagagaagaatgagaagaatagagggtccaggaccaagcccccaagaattcaaagagaggaaagagccagaaaatgaggctgagacagcgcggccaggaggcaggagaagagaa

SEQ ID NO: 307863 - DNA, 1000 bp, Homo Sapiens
ttgagaaccaccaagtcagactatgcctcaggcttgtctctgaactggcacttccatttgatgctgttcatcttggtcaaaaatgctaagacctaaaccatccctgaataatcagcatcaaacataaactgggggtgggagtgtcagtgttacatctttataattctagtttcagaatcgtcctgcttccagtaaaggaattccctccactaggaaatagctgatgatcgtcacactaaatatatactcaatagaccatttttacagtttagaagacagtagtcaaaatcctctttattttctttatttacatcagccgtttataaaatattgactgataggccgagtgtggtgtctcatgcctataatcccagcactttgggaggctgaggtaggcagatcacttgaggtcaggagttcgacaccagcttggccaacagggtgaaaccccatctctactaaaaatacaaaaattagccaggcctggtggcgtgagcctgtaatcccagctactcaggaggctgaggcaggagaatcacttgaacccgggtggcagaggttgcagtgagctgagattgcaccattgtactccagcctgggtgacagagtgagactatgtcttaaaaaaaaaaaaaaaaattgactgataaatgtgcagactcacagagaatccactccaaaaagacacttcctgtagatgtagtgaatgaattttttcttttttcttttttttttttttttttttttgagacagggtcttactctgtcacccaggctggagtgcagtggtgcaatctcctcctgggctagagcaatcctcccacctcagccttgagtagctgggaacacacgtggatgccaccatgactggctaattttttgtgtgtatttttagtagagacggggtttcaccatgttgcccaggctggtctcaaactccggggttcaagctattcacctgcctcagcctcccacagtgctgggattacaggtgtgagcc

SEQ ID NO: 307864 - DNA, 1000 bp, Homo Sapiens
  misc_feature (12)..(12): n is a, c, g, or t
  misc_feature (24)..(24): n is a, c, g, or t
  misc_feature (87)..(87): n is a, c, g, or t
tttgattctaanatttctttaagngggaggacaactttacaaagggaattcttgtaaacctttggaggtaggcattaagagtataanatttcccttctaggcgccgtatgggaggggtctccgaaaatttgggaagggggatttttggttttaaaaagctcaaaaaaaggttcctttttgctttaaatttaaaaattacctgagagtcttttaggggccgatttttggatttttatgtaaaaggataattttgaggggagtttttagttttcaggtttaaatggaatgcaatgtttaaaagggttgggtaaggtgtcaccccatttttatttttaactggaggccttggaaaccccccgggtcatggaggggctccaagggaaaaaatttaattatggggggggggtttttctaaaatgtttttggaaaagggaaaaaacctcaagacatttgaagggtttaaaaaaggcaggttccctggacacaaggttttggcttgtgccaagtaaaaagggcctggggtcctcccttgcattttggtaagaatgtgaggcctttccaacccagggggactgtgagtccctttaacctttttttttttaaaaacagttttggggacaacctttttttttttttttttttttttttttttttttttttttttttttgagacggagtcttgctctgtcacccaggctttagtgcagtggcatgatcttggctcaatataacctccacctcctgggttcaagcaattctcctgcctcagcctcctgagtagctgggattacaagcatgcaccaccacacctggcaaatttttttatttttagaagagatggggttttctcatgttggccaggctggtcttgaactcctgacctcaagtgatatgcccaccttggcctcccaaagtgctgggattacaagtgtaagccactgcgcctggcctggtatgtctttattagcagagtgagaatagactaatactgtaaattata

SEQ ID NO: 307865 - DNA, 1000 bp, Homo Sapiens
tctggctttttatttgtctgtgtctttttttttttttttcagtctgattcgagtatatctgttttggcaagttgtgggcagctctcttttacttttgtcacccagaggcttccgtagacaaaaggaaaggagagaggtgtgttcaaagacccccatggcgaagagcccatcccccaagcctgacacaaccctccctcccagcggacccctcttctggactggcttcgctgttggctacttcagtgcatctgacccccaccccccgcgtgaagacctgagattgagcgtggatttctgttctccaccaactctgcagcaagggccctgccagaggcgtcgcttcctgtcatctcctcttcccgctcccaagtagaggcacctaaacagagattagatttctggtttcaaggcatgtcggaccaagcacgctgaatgaacatgagttagttaattagctcggtctctcttctttccgttccctggtctgaatgtttcttgatggcaaagcgaccaggagagagttgatttgcatcttaagacctatgggtaatgcttctggagtggggagatttatttagcaactgcttgaacttgtgtacggggtcgggaaggaggtggagctgaccccaatggggctatcggagattggggtgtgggtggtgcccactgccacgctgacaccccgggcctcgatgatggcagacaggagctgctgctgctgctggcgcagggtgtcggcgatgagcagcggcagggagttgaagctggcggtgagatgctccagcttcgactccaggctgccaatctgcttctccaggtcttcgctccggtcattgagttctgtgattaagtcatacatgacattctgcatctgtgtggagagagagaggcgagagacagggagatgacaggtcatcacagaggaatctgcaatgggagaaatgaaacgccctccacagtatgacaggagccacttccacaccagctgatctggtcaagg

SEQ ID NO: 307866 - DNA, 1000 bp, Homo Sapiens
tctagatgggtgcctgccactcagcagctctcttgttgccatgcaggctgacagttgccaattttttttatttctttttcccaagaaaagtgagaaatctggatttttatgtgaaacctcctgatttctatggatggcaactgacgcaaagatttttgtgtttgctatttaaacacagtgccacctaaacaaaaccttgaagtaggggtgatatgctgcataggccatcagggtgcatgttctgaagtcttccctcttctctaggccccttcctgccttcttacctctctgcccccaccctctgcccacccccggcatgtctggcacccgtaggggatttggtccggggagtttcttcatgctccactgagatcaaggggatacagagcccaaaaaggatgacttgttatgaacgaaaatgacagaggcaagcagtttagaaagtaccaggttttattatctttttatcaaaaaaaatcagtaacagacaacagtgtgagaggtgcctacagaggaggtgctcactccaacacagcccaaggggaagggcactgggggcagaagaggacccagccagctgggaccctgggttgcagtggtgacgggagctaatggccactggtgcagcaagggagggtggttcccctcaccgcagccactggggtcaggaggagacacgacctgcccaggctaagccaccaggcctcccctctcaggagagggagggtcccagacaacaggccccagctggggcctcatcagccctcccccattcccccccctcctacccagggagacaagggtcgtcccagcacagctgaggctgtgactcgttaagccagtttagttctctagaatagtgctgtccaacagatggacatgctctcgctgtcagtacagtagccatgaactacatacagtgacgcctctagaaacgtggttagtgcaactgaggaaggaatttttaatcttatgtgattttaattggcttaactttaaa

SEQ ID NO: 307867 - DNA, 1000 bp, Homo Sapiens; identical to SEQ ID NO: 119873

SEQ ID NO: 307868 - DNA, 664 bp, Homo Sapiens
ttttttttttgcattttatcatttattaccataaaatatacacaagttttttttaattataatttatcaaaacaatttgcacacagactacgtgacgccattcacagtccagagaaatgtaaacagataaagatgcagtatgaaatcataactgtataaaattaactgtagtacatactgtacgactgataattttgtagccaccttctgttgccattgtgatgagctcaagggttgggagtattcacttaaaatgccacgtgacgctaatcatcttcaaatgagcagttcatctctccagtcaattgtgtatcacagtaaaaagtgttctctagcagttccatattttccatcatgtttagcacaatacagtaaataatttgaataatatcatgggacccatatcaagtgctactaatgatggtggaagtgctcccaagaagcagacaaaagtcatgacatgacaagaaaaagttgcattgcttgatatgtaccatagattgaggtctgcagctgcggttgtccaccatttcaaaataaatgaatccagctgaaggcctattgtaaaaaaaaaaaaaaaaaaaaatgatcccggcatgttggcgtgcacctgtggtcccagctactcaggaggctgacagaagaggatcacttgtagcccaga

SEQ ID NO: 307869 - DNA, 1000 bp, Homo Sapiens
  misc_feature (5)..(6): n is a, c, g, or t
  misc_feature (16)..(16): n is a, c, g, or t
  misc_feature (57)..(57): n is a, c, g, or t
  misc_feature (82)..(82): n is a, c, g, or t
  misc_feature (85)..(85): n is a, c, g, or t
  misc_feature (102)..(102): n is a, c, g, or t
  misc_feature (127)..(127): n is a, c, g, or t
  misc_feature (182)..(182): n is a, c, g, or t
  misc_feature (195)..(195): n is a, c, g, or t
  misc_feature (268)..(268): n is a, c, g, or t
  misc_feature (292)..(292): n is a, c, g, or t
ttttnntgtttttaanaagggcataaaaatttcttagtcccataaacccaaggggcnatgcagcttcaatgtcctggtaaantcntttttttacaatcaagnggttggccctggggttttcttcccntaattggttaagggaaatattatttcctttaaaacataatgcctttatgcttaanacagtatttttcntgattccaatatccaacctattttctgtttctgtaataaaaataacttttatttataaaatattttttaagtnctttaaaacatatatggtcaatgntctattccaataacccaaagtctgcacataataaatcattccagaaaaaattactatatttctctaacatatagactaggcttaattgttcttctttatctaatattgtaattaggtggtagcatgattaaaagatctttatatctgcttaaaaccctaaatttctaactatgtttcctaacattttaaatacaattacaatttttatttttttagatgttgagatattgacggttcttagctctccaattatatgccagctctccttgaacatggaataatcaatagtctaagttggccccaaagattacccctccagcaatagtttcgcttctacataattccagggcatgtcactataatagattttactctcattatttggtcatgttacatagcacacttgaccttaaaatagagcacaatttaatcacatgagcctttctataagcagagagtttgtctagttgaaagcagaagggaaatcagataaatctgaggtgtgatatggattcaatatgagggcagttctttattacagaaacggaaggggcctgtggcataacctgatagcagcctggaggaggtgaggtcactcccagctgacagatagtgaggcaagagggacctcaatcttacaaccacaaggaaacaaatgctgccaacactctgaggggcctttgagccgatctttttgtagtcaggcct

SEQ ID NO: 307870 - DNA, 1000 bp, Homo Sapiens
ccaataaaaataatctccatggttttcagtcttcttatagatacaaaggttttacatagttgcctggaaaagtaccaaactgctttgtccttcttgaagtaccaacaaaccatccatcgtcacatttttccatgacatcaacgatatctccatcgcggagttccaactcatcatcattctgtggtatatagctatataatgcttgatagctaaataaatcttgtgaggtttgactcctgtcgggggtgactcttcgctgctgggcttgaggttgctggctcccacctctccgagcagctttcctccccgcctgctcgccacctctatgccgctctgtctgctcagcctcacttcctggaaaagcgctacccaggggcttgccgggccggctctcctcaggggtgttgagatctgagagtctctgttcagtactcaggcacctgacaccgtctgaaggcttcaagcagctcttcttagagatcttgggtccaccagggcctctttcgcctgcccccctctctgctttcctctcatattgtccactctcttcgcgccatggctgcctcttgctctggctgctaaaggcatcactaagctgggagatgacactatcagagctccccagcggcagctgcaagaagctatcttggtggatgcctgaagatggcgtgtggacaccaccgtctccattcatgtgaagggaggcctgggaagtaggtgctagggagtaggttttgtgtggggaaggtagggccagtggagaagctactgatcgtggggtgggacgatctgaccaactcaaatgggggaggctgagagacagggagggactggcccttggtgacaaggcgaggtggtcagtgttatagatagaagcctctggcagaggaggcaagggtggggtcagggccagagaacgcctgcctgggacccccacagtcagtgagatccactcagaggtgacagcgtgcatctcgggggacagggctcggcgggagtg

SEQ ID NO: 307871 - DNA, 1000 bp, Homo Sapiens; identical to SEQ ID NO: 119874

SEQ ID NO: 307872 - DNA, 1000 bp, Homo Sapiens
tacccacgtacctatcatggtcactgggtaggtggcggctgcgggccaggaacaggcccatgcgcgcagcggcgccagccgcgcctcccaccagcggctctcctgggttaaatcctccaggcctccccgcccccgcgcccggccctaggaatgcgcacgcgcggagggcgcggcccagggcctgctgggagtcgtagttctaacgcgtagtttctcctcacgcctcctgcccccagccccccaccgccgccctttccggcttcaggcccagcaatcttacgtcaccggggggcggggctatgcgcccgccgtgttgaccagtcgcttagcaaccgggaggcttacctttggaagcttgttgcagctctagccaaggtcctgccctcttcccgccccgcccctagggtccagctcccttcacctaggagctgccaaacatctggatcaacctgggcactacgaggggttgaatttctaccattatcgcgccttttgatatttttttccagacctcctgctcacatccgtaaagcccactgattcttttactacactttttatgagaacaagacattttctaggaagatggtggcagaaaaagagaccctgagcttaaacaaatgcccagacaagatgccgaagaggaccaagctgctggcacaacagccgctcccggtgcaccagcctcactctctggtttctgagggtttcacagacaaagccatgatgaaaaactcagtcgtaagtgatcttcctgaattaaatgcactcgctctgaatcaggggacacgagatttacagaggttggccagccttaggatggactctgagccatgtcctgggtggtctttgccaaaaaaggcagttacttggcaagtagcaaacggtgccccacagtgtgtggggggcaggctaggttgttagaatcttgggcaagtgatgtactctgcccatttataagcaccttcctgataacttatggtttctggaccgcccaaaa

SEQ ID NO: 307873 - DNA, 1000 bp, Homo Sapiens; identical to SEQ ID NO: 119875

SEQ ID NO: 307874 - DNA, 1000 bp, Homo Sapiens
ggatcaacacagtcagtttgggattctctattcaagctctgatattgatttcatattcgccctctggcttcaggcactcacttgggtcaggggcaccctacagtctgagcccctttcggggagagagtggaacagaacatgggtttgaggtcaggtggctctgggttctgaccctgagtccttgaatcactaggttttgctatcttggtcaatttacctgacctcagctttcctatttgtgagatacaaagagaaatattatattgtaagcttgttgtcagcagtgattctcaaagtttggtctttggaacatcaatcctatgagatggaaaaggtttttattatcaagtgagtttggcaaatgctcaatatcatatcctcatcttgggaattctcaaataacaaaagaatgggttccactttcattaactcagtttttctaaacaacaaaattcctttttgcaaggaatacctgttagcatcctgtagaaccaatgttttgtgtaatccatggtggggaaagctgcttgggaagatcagaaatgctcaacaccaggccctctgctcggctcctggcacatgcatcgtggacaccaggaagcatgagtgcctgttgcatttcttcctaatgtcaggtatgtttggtcaaacctttcctgcttctgctacaaaaaaaagcattttagggtgttgagacaagtagttttcccaaatattttttgagcccttctcgtgaaagggaaataacacaaactgaagttaatgacatctgtactttggagcctcgctctgtcgcccaggctggagtgcagtggcacgatctcggctcactgaaagcactgcctcccgggttcaagagattctcctgattcagcctcccaagtagctgagactgcaggcacgcatcaccatgcccagttaacttttatgttttcttagtagagatgggtttttatcatgttggccaggctggtcttgaactccttacctcaagtgatcc

SEQ ID NO: 307875 - DNA, 1000 bp, Homo Sapiens
ggatctcactttgtcgcccaggctggagtgcagtggcgtgatcatagcttactacagcctgtaactcctgagctcaagttatcctctcatttcagcctgcctgactacaggcactcactaccacgcccagctacatttttaaaattttctgtagagccaggatctcactaagttgcccaggtcttaaactcctgggcccaagtgacctgcccacttcagcctcccaaaatgctggaattacaggcacgagccactgcatttggccactagtcaaattctttaaagggcatagacaaatcaccaaagaagatatagggagagcacatgaaaagctgtttgaccttataagtcattgaggaaatgcaaatcaaaaccataaggaggcctggcatggtggctcatgcctgtaatcccagcactttgggaggccaaggtgcgtggatcaccgaggtcaggagttcagcctgaccaacatggcgaaacccgcatttctactaaagatacaaaattagccgggtgtggtggcatgtgcctataatcccagctacacaggaagctgaggcagaagaactgcttgcacccaggaggcggaggttgcagtgagccaagatcatgccattgcactccagcctgggcaacagagcgagactctgtctcaaaaacaaacaaacaaacaaaaaccccagaggctatcagatgatacccactgtcagtcaagaggcggagaaattggaagcctcgtgtattgctggtggtatagttactttggaaaacagtctagcggttactcaaaatgttaaaccatagaatcatcatatgactcggcaattctagttgtgggtgtgtgcacaggagaaacggaaacatacgtccacacacaaagacatgcacacaggggcacagcaaaaagtagaaacgactcaagtgtccttcggttgataaatgggtgaacagaatgtgatccacccatacaacagaatgtgactcagccatggaacgt

SEQ ID NO: 307876 - DNA, 1000 bp, Homo Sapiens
ggatcatacccgggcacctaaaagagggcattccccaaggcacggtacaggccgaccaggtggataggagacgggaggaacaccaggcctgctcctggataaaggatgggataaaggatgggccctgctcctttgcagccagaggcctctgatgctatctagggccccaaggggaacccctggcccagggaggccaggtgtggtggtcctgggtccatgtctatgggcagccccgctttatccattatgctccatgagtctcttgagtctacggtctatgagaatgtttgaaacctaatggaaaaatgagactctccaaaccacaaaaagaaaatttcaaaatcaaaagtaacacccacttagtttaatgtcccagtaccccttacatgatgttagctggtaaacccagctcgagttatcatctgtaaagtcagattcaagtcatgagtgcactgattcaacaaatgtttactgagcacctactaagtgctgggcacagtgctaggttctgaggagtcagggtgaccaaaacagagaaagtaatggcagtaaagtgttgagacatcgaccgggcatggtggctcacacctgtaatctcagcactttgagaggccgaggtgggtggattgcttcagctcaggagttcgagaacagtctgggcaacttggtgaaaccctgtctgtacatacacacacacacacacacacacacacacacacaattagtcaggcatggtggtgcacagctgctcaggaggctgaaatgggaggatcacttgagcctaggaagtggaggttgcagtgagccgagattgcaccactgtacccagtatgggtgacagagtgagaccctgtctcaaaaaaaaaaaaaagtgttcagacatcaaaataaataatgtgtcttatcaaaagatgatcctatcctttgaaaaatattaatggcaaaaaatttcaactcaacctgggctgtggataccacgtgttttaatgtgtttgctctg

SEQ ID NO: 307877 - DNA, 1000 bp, Homo Sapiens; identical to SEQ ID NO: 119876

SEQ ID NO: 307878 - DNA, 1000 bp, Homo Sapiens; identical to SEQ ID NO: 119877

SEQ ID NO: 307879 - DNA, 1000 bp, Homo Sapiens
gagggtgagcttcccgaaggctcgttctgggctgattcagagccgcgtttccctccctcagcgattcctgccaggagagcagacagctggtaccgccccacggccatccgggccaaggccccggcaacagcacccctgcctcaccagcgagcttctccatctggaccaaggtatcctcggtcggagcaccttccaggagcttctcggtcagccggctgccacacgccttcaggagcctggagaacacagcaccagctatgagcgttctcgccaaaggaaaaagcaaacctgacgctcacccagcccctgatcctaccagtttaaagaaaaaatgggtataaaagaacaccagcagggcacaaccagccagatcccgcatgcaggcagttccacaagtcaacgaccaaggtccttcaatagatggatgggaggaacttggaggggaggggatgcaagggggagctgttctaaaccagagagacttggggcgctgctccgatgccaatgcagtcacttgtgagacaaaaggtaaactgcacaagggcttgcagcctggagaacactcaggagtctgtccgttttgtcggacatgatcacagtattgtgattatatttatggctggaatgatacgactcagatttgctttaaaaaaaaaaaaaaaaggctgggcgcggtggctcacacctgtaatcccagcactctgggaggctgaggcaggtggatcacgtgaggtcaggagtttgagaacagcctggccaacatggtgaaaccccgtctctaccaaaaataaaaaaattagctgggtgtggtgacaggcgcctgtaatcccagctacttgggaggctggggcaggagaatcacttgaacccaggaagaagtgagttccacgtcaatatgttttcagcacactcaggggaagaggcctacagaacaaggactcccagcccagatctgtgctcactgacaagtgcccacaggccagtgctcctcacagaggca

SEQ ID NO: 307880 - DNA, 1000 bp, Homo Sapiens
gatctgcccacctcggcctcccaaagtgctgggattgcaggcgtgagccaccgtgcccggccggaaaatattcttcatgtatagcagtgttgggtaccgcaggagattttttaaaaagtagcactcagtccttaccttcaaggaacttagtttagttgtgggagataagctatatccatgagaagtttggctgagaggaggcggagttgggctccctgcaggtggggaggagggtcagttctcatttctgagggagatgagctgacgtctgcagtttggaaaggaaccagaagttccacatggtggttttgcaatagaacatgctcgtgtttaccaagcaattctgagggaaaggctaaaaaaagtgttagtttatcaacttgatagaactaacaggtttcgatgagctttgattcaatataatgctgcggccaggcatggtggctcacgcctgtaatcccagcactttgggaggccgaggcaggcggatcacttgagaggagttcaagaccagcctgaccaacgtgataaaactccatctctacgaaaaatacacaaattagccaggcgtagtggcgcacgcctgtagtcccagctactcaggaggctgaggcaggagaatcacttgaacccaggaggcggaggttgcagtgagccaagatcacgccattgcctgggtgacagagtgagagtcttgtctcaaaaaaataaaaataaataggtggggcgcggtggctgacacctgtaatcccagcactttgggaagccaacgtgggcggatgacaaggtcaggagattgagaccatcctggctaacacagtgaaacctcgtctctactaaaaatacaaaaaattagccgggcatggtggcatgcgcctgtagtcagaagattgaggcaggagaatctcttgaacctgggagacggaggttgcagtgagccgagatcatgccactgcactctagcctgggcaacaaagactacatctcaaaaataaataaa

SEQ ID NO: 307881 - DNA, 1000 bp, Homo Sapiens
ttctttatatgaagacaacggcaattcaaccaagtttcccctttcccttttaaaaggattaaactgggaaatcttccaaaggaagtttggcccatgcccgatccccaggaaattgggggggtttctttcttttcaactgaaatggtatctgaatcctactgttcaggttagggatcacctaatcacagagccaaacacttttctcccctgtgtggaaaagtaggtatgctttacaataaaatctgtcttttctggtagaaacctgagccactgaaaataaaagagacaactagaagcacagtagagtcccagactgagatctacctttgagaggctttgaaagtaacttcccaccaaaaaaaaaaaaaaaataaaaaaaaacccgtcttattcaagtttgttgctccgttttgcacctctgcaataaaagcaaaatgacagccagcacataaggggttagctgcacaacgtagacttcctggtgtttaatcggtaagttttttgttccttaactatatctgtctacaggcagatacagatagttgtatgaaaatctgcttgcctgtaaaatttgcatttataaatgtgttgccgatggatcacttgggcctgtacacataccaattagcgtgaccacttccatcttaaaaacaaacctaaaaaacaaaatttattatatatatatatatatatatataaaggactgtgggttgtatacaaactattgcaaacacttgtgcaaatctgtcttgatataaaggaaaagcaaaatctgtataacattattactacttgaatgcctctgtgactgatttttttttttcattttaaatataaacttttttgtgaaaagtatgctcaatgttttttttccctttccccattcccttgtaaatacattttgttctatgtgacttggtttggaaatagttaactggtactgtaatttgcattaaataaaaagtaggttagcctggaaatgaaattaaaattcacaagt

SEQ ID NO: 307882 - DNA, 1000 bp, Homo Sapiens
ttcctgggatagcgatggagacgccgggcgcatcagcgtcgtccttgttgcttcccgccgcgtccaggcccccgaggaagcgcgaggcgggagaggctggggctgcgacgagcaagcagcgggtcctggacgaggaagagtatatcgaggtacgacctcggtgcggacgccggcgacttctgggcccatcctctgcttcaagctcctctcaggttccctctctcgggtgttgacactccgtctcctcgtggaagtggaggagccgggtgtggacggtcccacgagtcaagtaaacagggcagaggaagacgtctgtggtggaagaggctgtagtagtgttgtcagggaaaagagagagcggctctctttgtatgggacgggggtcagggaaagaagattttctgttaaagtgtgagtaggagtttgacaaactggaaggatggtggcaaagagggctttctaaagagcggtggcagcaagtgtgaatgctggggttcctggaaagagaccgcagttgtgacagcatctcgagtgagtggacctgcgtcgccccaccacacgcacacagaaggaggagctgaaacggggattggcggaagtcagtttggttttagacctgtttaattcgggacaccttttgggatatgtagatggatggctttaacggacggttgggtgcccagatatgcagctcgggagcaaggtctggctggaggtgcagacttgggaatctcaacttgtggtagtgactggctgaagttactcaggaaaaaggtttatttttattttattttttgagacggagtctcgctcgtcgtccaggctggagtgcagtggcgcgatctcggcttactgtaaccaacctctgcctcctgggttcaagccattctcctgcctcagcctgccgagtagctgtgactacaggtgcccgccaccacgcccggctaatttttgtatttttagtagtggtggggtttcaccatgttggccaggctggtct

SEQ ID NO: 307883 - DNA, 1000 bp, Homo Sapiens
atcacttataagccctcccttttgtaatgatcagatgccctcttccctcagagttgattagagaagcagtaagaatttgtagtcataagtactagcctggtgcacaggtcagcagtcctcttggccagtggtcattttctcccaccaccatggtacaagcctgggttctgtgccctgaacctgaattctggaaagggagagactacagcatttcacagagaacagccagacccaagagctttcagtgtaggatgggcctgaagtgacagttcaatagccaaacctggggaagccccatcactgactgaactaggtcatttgaccatggagggggggcagtgtaaaggcaacgtgtaggtacagctcttttattattaaatgtgtaaggtgatcagctgattaacaggctccgagactgtccatttcagtctcccatccagtgcttcttcctcagtaaccttcaggccgttatttctgcccactctctgacacacaggataaaccaagactcccagagttatgttaccaaaggccaaaaggcaactgggtggccttggctctgctttattgacctcagagcaccctatgagtgcagttaaaaaaaaaaaaaaaaaaccacatacaccatgggaactggaactggatcccggtcagtggcacctgaccccagaagaattcgtggatttgtacaaaatgcagaggaagaaatgaggcaatgtggtgctgagtcgaggggtagccgattggcagagtagtagtcagcaacagtgcagtcaggtcatgcctctttctcgtaagtgcgagtgcaaactgcagtgccgtgggtgagtgtctggaaggaaagacagagtgagatggggggtgggagccaggaacaccattgcgagcattctaccctcccttcctcctgataattgtcactgagacctaccagtgccggcaagtatgtatgtgtgtgtgtgtgtgtgtgtgtgtgtatacatacataattttttttttc

SEQ ID NO: 307884 - DNA, 1000 bp, Homo Sapiens
gtggcattgcactccagcctgggcaaaaagagtgaactgtgtctcaaaaaaaaaaaaaagaaagaaattgaagctcagagaagttaaggaactcactgggtgcagtggctcacgcctgtaatcccagcactttggcaggccgaggtgggtggctcacttgaggtcaggagtttgagaccagcctggccaacatggcaaaaccctgtctctacgaaaaatacaaaaattagccaggcgatgtggcacgtgcctgtaatcccagctactcaggaggttgaggcacaagaatcgcttgaaactgggaggcagaggttgcagtgagccaagatcatgccactgcactgcagcagcctgggtgacagagtaagaccctgtctccaaaaaaaaaaaaaaaaaggaacttgcttaagatcaaaaatagctaatgagtagaagagacaagggttccaatccaggtctgtgtgatgctgaagcccacaggcagaagattcgcactctacctaggcttccacagatcactcaaccatgcatgaaagtaaggcctgaaaagtgtctctactaggttgcccttcattaatctagttccagtcatgtataataaaatggagtgtctttccaaaatttcataatttagatttcactcatttaggctgacttcccccctatacatacccactagttggaattagttgccttttactatatgctgtattgaatgtccttatagttgggggtcatgagaaaagctaaagtctaacttggacaagatgacgactggcattgccagggttgtgcagcaacagtagtggggtggggtgtcctgcaaggacatgagttaggtggctgttaggggcagcataagttgtagtgtaaagccttggagcctagatgccaaggtcgcagagtcaccaggaggcaggatcctggagtacagattgcagtggcccagtaggcacagcatctggcctctaggtctgcctctgctatttaccagctgggg

SEQ ID NO: 307885 - DNA, 1000 bp, Homo Sapiens
taaaaaaagttgatttcagaaataaaaagtataacaggattctagaggatgggaaagattaggaggaagacaaggatgggagagatttgttaaacaaaattatagctagataggaggaataagttctagtgctctataccacttcaggataactatagttaataatatatagtttcaaattgctaggaggatattgaatgttctcaacacaaatgataagcccccgggggagtggcttctgtgagacctaaatcctcatctgccacagaaggaagtcaacacatactctccataactgaaaatgcaagaaatagcagaaaatgactattatttaaaaatacgggccaggcgcagtggctcgtgcctgtaatcccagcacttagggaggctgagccgagaggatcacctgaggtcaggagttcaagaccagcctgcccaacatggtgaaacgccgtctctactaaaaatagaaaaattagccaggtgtcgtggcgtgcgcctgtaattccagctactcaggaggctgaggcaggagaatctcttgaaaccgggaggcggaggttgcagtgagccaagatcatgccactgcaccccagcctgagcgacagagcaagactctgtctcaaaaaaataaaaaacatacggaaacaggtattagaagaacagcttaaaatgttgaaggtggttagtctggggaccagtactctgggactgggaggactagaccagaggtcggctgttttgctcttaaggcttacagaacgatctagtttcaaactatctatgtttaacttcgactttttcctatcaggctcggtgctgctattccactgagctcatggaaaattaaatctttattaggagccttccaagatcacagtggggtggcaatggggacagataatgcagaaaagcgaaggctcactggtctacaaatacacgtctatcacaacctgtaaaagttaaccctgtcctccgtctctactaaaaaatacaaaaa

SEQ ID NO: 307886 - DNA, 1000 bp, Homo Sapiens
cctaattttaatgtcccttttatagttgtagaaactggggttcacgaaattaaaagcttcatttcaggtctatacgaggcatgcctctcctgaatctactaaaggaaaggaggcctgctacgtgtcctctcaaaatgtgctagggcatgccatgagcagaaggattaaaggggctagaaaattcaatatgagctggagaagaggtggaagaagggtcaggtttctgggagatggtggtggcatagagaaggtaaggcagggggcacccaagattctcacccatcctaccacaaagtcttgcctctgcagacacaactctacaaaaatccaagtgagccttccacaaatgatgaatgaatgaatgaatgaatgaatgaatgaataaaaagggagacaaagtttattgctgtattggaaggaatacaaagtcaagaaccaaacccttttccaaccttggtggccccagttcctctgagttcccccacattcatcaaatccataaggtaccccaagtctccctaagacagtcatggggtaggaggatatcctgtacccagcccatggggatagggattgaagagtcaccctggtcacccccatgctgaggtctgtgatcagttacccacaagtctgcagatctcagtccttgcacattccttggtggggtcttgtgtgcaggttgcctcgactcagagccaaatttgggaatgcggacaggagtcctggtcccaggttttgcaggcagagaacttggtggtgtctgggcaggtagcgtcgtctgtcccgacctctaggtatggcaggaccaagatcgaggtgtcaccagcccccagaaagttgcctgagccagagaagaataagtcgtgaatgagatcattcctggtgactcaacccatgcatccaagacgtgagagtccatcacccccaagccaggccctggtgcctgactgtggccggtgagttggggaacaaggagggactggctgttggtctgtgtgtc

SEQ ID NO: 307887 - DNA, 1000 bp, Homo Sapiens
gatcctacggttttgcttttttggtagatagaaggtggagaaaggctagagaatatatgtaaattagggcttataacttttagagtgtctattttaaacctctcgtattcttatacagtgcaataaaactacatttttagatagcatgcatttttagacacaatacctatttaaataccacaggttttttttgaacttttattttaggtttcgggggtacatgtgcaggttaattacatggataaattgcgtgttgttgaggtttgttgttcagatgagcacagtacctgataggctttcagttctcacccccctctcaccctcccctctctatagtccccagtgcccagtgtctatcgttctcatctctatttccatatgtacacaatgtttagatcccacctacatgtgagaacatgccatatttggttttctgtctctgtgttaatttgctttggatgacatccagctgcattcgtgttgctgcaaaggacatgatcttgttcttttttgtggctgcatagtattccatagtgtatatgtaccacattttctttatccagtccaccattggtgggtatctaggttgactctatgtctgtgctattgtgaatagtgctgcagtgatggaacatatgagtccatgtatatttttggtagaaagatttattttctaccaaatatttattttcctttgagtatataccgagtaataggattgctgggtcaaatggtactactgttttaaattgtttgagaaatctccaaagtgctttccacagtggctgaactaattcacattcccacaaactgtgtgtatgtgttcccttttctccacagccttgccagcccctgttgttttttgattttttaataatagccattctgactggtgtgacatggtatctcattgtggttttgatttgcatctctctaaaaattagttatgttgagcactttttaatatatttgttggcctcatgaaatactagttttaaac

SEQ ID NO: 307888 - DNA, 1000 bp, Homo Sapiens
gctcagcagcaaagtgaaccccagttgttttagcttgagcctagccctccctctaccaaggctgaaagttaaggcagttccccaaccctaggacccagcttgggccctgtgtcccctctcaccaaagtccagtagctgcttcatggacagcggggacgggctgtagcgcgagaaatgctccacctctcggggcaccaggccggcgccgttgagcgagccagcgctgcgcagcacgaagcgggccgccttcatcttgacgcccacccggcctggcggggactgtggctggcttgaggggcgaaggctgctcggagcagagcctggttccgagggggcgcggcgcgtccgggcgaggactgcaggtgcgctggctggcttgtgcgccccggcctgggctggggtttgagggtgccgcggagtgaagagtctgggcagagtcggagatgcagtggttcgagattcaagttcaagtcttcccaccagccgccgccgcccgaggttttatttgtctccccgcactctccccccgagtcccaaacaggaggagtcactggaacttggaaacgcgtcctgaactccaggtcgcgccaatcagatcagagaaagaactatgggctccgcccctccagccgcggtcatcacagaatggcctggcacggtgaccacggagtgccctggcaccggtgcccgcggctgtgacggaaaaagggtgggaagaacagggaagaggaagcagaaacaggtatctggggcaacgtgggcttaagattagcctcttgggacggggctccgagtcgcgtgggctggggtcccgcccaggctcgcccttgtttacaactcggaggctgtctcaatgtcaagtactcctggccacaaactgtttccaagagtttggactccgcgtgctcattggtccttgctcagagcagggcttttacagtagccaacaagctgcgttcaaaagtatgggcttctctgccactggacagagagaaaggaa

SEQ ID NO: 307889 - DNA, 1000 bp, Homo Sapiens
tttttttttttttttttccccagaactggaaattgatttttaaattgaaatcccttccttgtgaaaattgtttacacagtctaagtatcaaagaaaattaatttccaatacaatacatgataagcaaaagtccacatgtaggkctttatgttcatttatctgaggaagaagtctgcagttttcatccttttctcaaataaatttactatctcaaaaagattgagaatcactgctctagagcgtatgcctaagttagacatatattagtacacatgttagtttgacctagtttcccccaagtgaaatgagaaatagaattcaggtagaatattggtggtggcctatcagtttcattcttgagaattttatatcacttcccatgcctgtattatcactggtaatctctctggaaacccttcaattccatttacttcattgagaggaacttcttcagtgtcagctggtatggaccatagttggctcagatttgttttggccagtccaacaaacaaactccaggttagctcatcaaactcacacacagaaagtaacatctctggcaacactccacaaagctacaaatctaacataatctgaaagaatggtttggcttccttggtcaaacacccaaaaaaatctacattcatatcatcacttttgggtaaaaggttaacaaaacactttacctttgtacatgagaattaacctttggttaattttctcaattctgttttattgaaaacttattaataggtcaattatgttacccaacaatattgtttatggtaaaaatgtttcctgattaccaaaagaattataaatgaactataaatattgactatgctaatggatactataactttgggcctccctgagtatagtgactcttgtaattggcatgtctcttacagaaattctagaagctatgtccatggagttgctataagacatattagctcctgtggaagtttctaatccagatgcatcccacaggttccca

SEQ ID NO: 307890 - DNA, 1000 bp, Homo Sapiens
aaaaaagctaattttgcagacaggtttacatgtaaaaggctaggtatttagccacctcagcattgattagttttggatgtctaagctctgttacacatggcttcccatggcttcactctacaaaacatatttacaacgtgaaggatacatctacaagaaatctacatttcaagggttttacaaatcaatcttgtatctttcccctgaattgactctcacagaccccgtccccttgtcatttcctttgcccagcttaacggtccaaagtctacttaaatgcagctcaaaaatgttaagattgggcaacagatttacagttcctgttctcaaaaccatgtgcaattattcacatcttcacaccatgaaggaattctgattttttagcttttcaagttccttaatttgttgtctcaaaaatagtatcctttgctctcgcaaagttgcttgaatttcacatactcggactaaagatcttaaattttttaattcagtacaaatttcggacatgtgaatagttcccatgttatgcgcttcttcgcgtaatcttgatgcctgcttctctgcatgatctgcaggccatccttgaacgtgttttatgagattttcactgaagtgtgctgctagtgcaggcgttaatgaacacgtggatcgggcagaagaattctgtggtacaactgttgcatttgatgcattactactattagaagtatgattgggaccaggtgatggacttctctggctactagaaaacagaattgaatgtgtagtatgtttaaaagtagtttctgggtatccttatcctagaaactgcatgttaataccttttattaacttaaagatatccaaattcctaagaaaaatttgttattttaatgtcaaataaagagaattaataatccaaagtatatgattcctcaaaacactttagggggaaaaaacccttttaacactactgtcagagtcaaatgtaaactactctccaaatctgagagcagaacct

SEQ ID NO: 307891 - DNA, 1000 bp, Homo Sapiens
cagagctatcaactgcctttattgtctaggatgattgaatcaaaggagggcagagaaccttgggttcccaacgcattctatgagctcttgggttcttcctgtggctttgtaggaacaaaagaacagaacaaacatgttggagtagtgtccctaacatttatttcaggtggtgactaggagggttgaggtgtagatatacttcctctcttctcgtggagccttactgaagacaggatcgccgttcttgtgtttatcagctgagaagggcagtctcgccatcttaaagacctgccctccagccccttcaaacgccacacttcccaggaagcactctctccataagtgttcagagaaccctgaccagagaagctcccgcacttcttatatgaactccgattgtgctgagggggaggggaggagtacacaaagcaggaggtgggtggggaggctggggtcacacagcccaggaggggcacacccggcgaggtgctccgtcagcacaggctccctcctccctccctccccccagtacaccaggctctgacgggaccggtcccaccgcagagttcagcggcatcaagtccaaggacagaactgcaagagtatggacacaaaacaccaaacaaattgggggtgggctcccggccagcctggtgagagagaggctcctttagccaaggccatttctggcttgtcaacctccagggtatgggctatgagcagcagtggggagccggggtttctggggcagctcagtgctgggaagacgtcatccccttctccccagggctgtatgggagcacaggcacaggggtaggtagagcttgtggtcagtgaggggtagagcccacagagagaccagagagtggaccgcagtttcatgaaagcagagttatagctgccacttgtgcctgtgggcagagcaggtggtagaggggcctccaggaaagggccggggacacgggtgtccagcactaagcacagcgcactcagccgcagc

SEQ ID NO: 307892 - DNA, 1000 bp, Homo Sapiens
agacaaatgaaaacatgttttatttacaagaaaaaagtctgtacattgtgtatacataaaaatatacaaaaccaaaatagaaaatatccaagtgttaaaatgtgtacaaacacttttaaaatgcgactcctggaaaacttcaagctttaattagtttgaagagtacacatttcattttaaaaattatcatacaaaagaattcccaaagctgttaaaaaagttcactggtttccactggaagaattgtctaagtatttcatctagaataaaacaggatttgttataaatgttagattttaacaccaccaatgcaatttctttgtttccaatctacctagcaagaagactattttccatagaaccagtaaatgtttcttctaatctttgaaagccatgagctacagctaagcttcccttcaaagttcagtgttaaatcaggcttctgactaggataaaatattaaggtagtgttctaccttcatagtgccttttaaataattctgtcagtccattttaatgtagccaagatgtgcagagtatgagtgtgtgggaagcggttggcggaggactgaattttttttcttttaacagaaggacatataacatttgcttccttctctcaaaatattagtggttacataattaaaataaaatttattgtaaaggtttcagtcaaaaatattgatgaaaaagcaatataaaaccaaccatgtgtgtagatatgtatatacacaattatataactatatctacatgtacacttttcatactaagaactagatcaatgtctttaattccttaaatgtcattagctcaagtttgaacagaaacatattacattactttttttttaaccaaaaggcttcattcatttaataaaacaagaacttacattttatttccttgaacggacagagaaatacctttcatttatcaagtgtgtaaataatgcccatgtgacagaaacatgcataataatctcataagagaatatccagag

SEQ ID NO: 307893 - DNA, 1000 bp, Homo Sapiens
  misc_feature (90)..(90): n is a, c, g, or t
  misc_feature (102)..(102): n is a, c, g, or t
  misc_feature (136)..(136): n is a, c, g, or t
  misc_feature (215)..(216): n is a, c, g, or t
  misc_feature (221)..(226): n is a, c, g, or t
  misc_feature (277)..(278): n is a, c, g, or t
  misc_feature (281)..(282): n is a, c, g, or t
  misc_feature (292)..(293): n is a, c, g, or t
  misc_feature (297)..(297): n is a, c, g, or t
  misc_feature (363)..(363): n is a, c, g, or t
  misc_feature (376)..(377): n is a, c, g, or t
  misc_feature (423)..(424): n is a, c, g, or t
  misc_feature (426)..(426): n is a, c, g, or t
  misc_feature (436)..(439): n is a, c, g, or t
  misc_feature (444)..(445): n is a, c, g, or t
  misc_feature (448)..(449): n is a, c, g, or t
  misc_feature (451)..(451): n is a, c, g, or t
  misc_feature (454)..(461): n is a, c, g, or t
  misc_feature (464)..(464): n is a, c, g, or t
  misc_feature (466)..(473): n is a, c, g, or t
  misc_feature (486)..(487): n is a, c, g, or t
  misc_feature (496)..(496): n is a, c, g, or t
  misc_feature (539)..(539): n is a, c, g, or t
  misc_feature (544)..(544): n is a, c, g, or t
  misc_feature (557)..(557): n is a, c, g, or t
  misc_feature (586)..(586): n is a, c, g, or t
  misc_feature (589)..(589): n is a, c, g, or t
  misc_feature (637)..(637): n is a, c, g, or t
  misc_feature (675)..(675): n is a, c, g, or t
  misc_feature (715)..(716): n is a, c, g, or t
  misc_feature (741)..(741): n is a, c, g, or t
  misc_feature (762)..(762): n is a, c, g, or t
  misc_feature (809)..(809): n is a, c, g, or t
  misc_feature (817)..(817): n is a, c, g, or t
  misc_feature (846)..(846): n is a, c, g, or t
  misc_feature (848)..(848): n is a, c, g, or t
  misc_feature (945)..(945): n is a, c, g, or t
  misc_feature (989)..(989): n is a, c, g, or t
  misc_feature (993)..(993): n is a, c, g, or t
ggacgtactgggaagagtaaacacaactcggatattgtagtataagcacgagcagtgatcaccagaaaacgtcgggtgaacaggggcatnagggcagctcangaaaggcgaagctgcggcggtaccgggacgacantacgattatcaggaagaggaaatgagttacgcagatagtgagtacgaagcaggacgtatagtcaggggtggagcgtatnnaacannnnnnaaaaccacatcacgtacagacgcgtcgtaacacagaggcgaggagggaaannagnnctgggaaacnnagancgctgcgggtataggatgagcggacgtgaaaagggggacggcggtagaaccttgcgctgcgccgantaccgagtgcgcnncgctccggggggagcaggagagagcgggaggcagagaggacgcgcnngngagagggggnnnnggggnnagnngngannnnnnnnggngnnnnnnnnggggggggaaaannacgcacacnagagaggacagacagcagagcgggagggaacagggcagcagcnaaaanaccaggggagagnaaggagagaggaggaagagaagcgcgacncanccacagcagaggacaagcgcgacggggcccagcgcggagacaagcgangaggagagaagaaagggcggggagacaacgaagggcgnaaaccgacgggaagcgcgagcggcacagagaagaacgacnnccaaggagagagcaagcgagaacgnaggggacagaagggggggganaaaggaagagggggagaaagaggggaggagagggagagaggggaaanagggaagnaaggagaagaagagaggaaggagagggananggaggaggaaaggaaggagaggggagaagaaaagggagagaaagaagggggaaggaggaggagaaaggggaaggagaggagagagagagggagaaanaagaaagaggagggagagaagaggagagaagaagaaaggagagnaagngagagaa

SEQ ID NO: 307894 - DNA, 1000 bp, Homo Sapiens; identical to SEQ ID NO: 119878

SEQ ID NO: 307895 - DNA, 1000 bp, Homo Sapiens
tatgtgtgtgtgtgtgtgtgtgtgtgtgtgtgtgtgtggcgggggtgtatgtggcgtgtgcatgtgctggaaaagacaggatttccgacatgaagaccggggaagcctctggctgctgtgccccatcctcagctgggggcagccctctctgctgcagggtggagggaggtaggcgaggatgccgaggctcagcttcaaaaggggaggactccctggagttgcggaagcctttagtaggggggaagtaggtggaatgcgggggtcactccttgctttccggaaaccccagtgtcccctggggtggggtttctggaaactttcccctggccgttttctctccatgcgcctctcctgctgctctctcctctccgcagctgtcggggagcaggctgggtacttatttcagtcccctgtacctggctcctacagctaagggcccttccagaacaggtttttcccaaagtcccagagaaagtgctcaccaagtgcgtgttgatgatgaaccccgaaatcaacgtgtggattttccttctggtatttgggattttttttaaaaaaagagcacacctttgagtttttctctcttctctataatatgccacacggcgaggtttcaaaggttatagcaaattgagaacgaaaaaggttttgaaggagccaagaggaaaagactccaggttcatcctaatgggaatatacaagcaggcctcgtctcatctgtatagagcacaggtctatgggaccacgcagagtgaggggatgagactcctgcactcaagactttgcagtcctattggggaccaggtggaaaacgttatggaacatgtggaaacagaggaaaaccaaacccatgcctgcaggagaagtgcaggctaggggatctctgcgccgggattttcggggaaggattcatgggggcggtgggaacgagggggccccagaggatgagtaaggcctacgtagggggaaggaggggaagaaatcctcgaagctggtatga

SEQ ID NO: 307896 - DNA, 1000 bp, Homo Sapiens
aatgaactacaggtaaaatctagaagaacatagataataaaaaatttctgatttaacagacatagtaaatataaatgaattaactcacacaacctacttacaccaaacaaaactagaatgaacaacttgtaggaaccacctctagttgatttcaccacttaacaggggcaagatcttaggtggatcattttgtttaaggatgacttgaaattttacaatactaccttagctcccacatatgaaaactcttcaagaattttttctcatcaaccagacgttgaggaaaatacagtgagaaataaaatgaaacggcttctcacacatatgaaggcccagatcacccctaaatttctagtgatttaacttaagaagctccttgccctgagagattcctttatcccacaacactctactcagagggggcagagaatcccaggacactacacaagccacaggataaaaacacaacctgtcttctatctggcaccaactgactaatatctaggtatacacaggactgactttaaagttggttaacaaatattttaattcattaaaataaaacttaaaaattacatgcttagtctacacaagtttaacttactttagtcacttagtgaattgtgaattggctcccattagtggtcaggagaatgtatttggtgtagaaaccaaataaatcaagctattatcgccgccgtgagtacaaaacaatgtttatttgtttgtaaagtgccaggtttatatttaagtaaacattaaaatctgcgttgaagcagtgaggctgcatcttttaactggctgtgctggttaaaggactgtttaatcccgctgtgctaagctcactaaagggtcacccctcactttaaagccaagactgccattgtcactgctatggtaagtcacagccagccaggccttctggcaaaaggtgatactaccagcactataaacagacaggactggttgtgaggtagctacacagttttaaagatgctgt

SEQ ID NO: 307897 - DNA, 1000 bp, Homo Sapiens
catccccgggtcgcgcgtggggcggtagggaaagaaggaaggagggggtctcccaaatcacctggctcaggggaggggacagcaaggcatgagagcgacttccccagcctgggccatcttctctagctgtcccagccagagcgctcagcctccccccaccccaactccctcggtgccaccgctcttgggggaggagtagcgacgcttaaaggggcagctgcctatagtctggaggggcctctggagccgaattggagagtggggaggatggccaatgggatgctccacgtttcctttagctaaatctggaggaagggacaccgtggttcctctgccaccatctgtccacccctgccgtggccaggctcctggactcagcatagcactccctgggcactggcttcctggagccctgcacctcctttcccagaagttcccacagcaaggcaggggaaggagagaggagagcgctcccatccccaccctttatgtatcagaggcaaaggtaacccgctggagtcaagcaaaggattcacaggagccccgcatccacttgggtggcctcccctaaggtattttaaattaagtaatagggctcagccagtatctcctctcccaagacctcagcttggtgagatctgtcccctttcccttctgtttcagttaccttctctttccttctagctttttgttttttttaatattttcaggtactgaggaaatttaccatatttcaagtctctctctctctctatttttcccaggctggctttgaactcccgggctcaagccaccctcctgtcccagcctcctgagtagttggaattgcaggcgtgaaccactaggaggctcaggagtctttttctttttctttttctttttcttttctttttttttttttttttgagacggcgtctcgctctgtcacccaggctggaggctggagtgcaatgatgtgatgtctgctcactgcaatctccacctcccgggttcaagcgct

SEQ ID NO: 307898 - DNA, 1000 bp, Homo Sapiens
gatctgcctgtctcagcctcccaaagtgctaagattacagacgtgagccaccacacccggccagggcaattttttcaaagctgtgttttaattcgcaaattcctctttgtatctaagctgttactcattttttgacctaaaaattcaatttaaatttcttttattctaaaagttagcaggtgtggtggtgctcctgcagtctcagagtcccagctactcaagaggctgaagttagaggatcgcttgagcccaggagtttgagaccagtgtgggtaaatcgaaaccctgtctctacataaaatacaaaaattagccggacatgatggggtgcacttgtggtctgagctactcaggaggctgaggtgggaggatcacttgagctcaggaggtggaggttgcagtgagctgagattgtgccactgcactccagcctgggtgacagaatgagaccctgtctcaaaaagaaaatctgagtggtagggattttcaagtatttgccttagttgaggtctccaaatggaaatagtgattgggcactagtttaaaatgtacaaaaggtgtattcagtgtgaggttggttccaaagtgcacggtttgacagcccagggagtgagtgaggtgtgttggtgtgttttccatgatacaggggaactgactccagtatggccagtatacgagactttggtaaaatcattactttgttctggaactctattttagcatctgtaaaatgacttctaaagttccttctggggcagaaaatacatgcttctaaggttctgtctcattgctttttttttattttagtaatttaataagcatttatttaagatctgctgcattcagagcattgtgttaggaatattggaagtaaagcattgtaatagctcttgccttcagtaagcttgcagtctggcagttggattaaaaaaatgaccatacgaagccgtgataacagcctctaggagggaactctactatgtggtggagatatgtgtcc

SEQ ID NO: 307899 - DNA, 1000 bp, Homo Sapiens
ccgggcaccaacgttggttttaatggcatcaacacccaggaggtcacacgtcagttctggttggcaacgtctaggggtgaggggctgtggcctccagtcggccccacagcctttgagaactggctgcccggtcccacccgcttcccgccccgccccactgaaaaaacactaaacgattgcactgacagacagaccccagagcgcccggcctcccacacacccacggggctgtcagagtcaaccagggctttggcgtcactcggcggtggcccggggctgcgcccaggatagtgtttatcaaatgtgacacaggttcatttacaaactggggctctggaaggtctacttctgtggctctaagagacttgtctctcatggcttctctcggagtaccggaagttgggcctggataacgctgtgtaggttggttggtttatttgtaaggaatgtgtaaggcattttggtaagttgaacagtaacttctttttccaaagaggaaactcagacagaggtgccctcctttgagctgctgccgtcctctgccttttccagctgttcctgcagcttcttcaccgtgtccttctcccttgccagctgctcctgggtcgtcttcagaagctcctgcagtctcgtggcggcgcgccccaggtcacttgttaacttcttctctttttctagtctctccttcagctgtgaggcctcctctgtttctgaagactctagggggccggctgtgcggagcttctccaattcttcttgtaaccgacatgccgaggtctgagcctcctcaaactcggccgtgagcttctgccgctgtgtctgctcatcctccaggatggcttctgtccactccagctgcgtcttcagctgaacggggtcctgctcggctgggggcgcctctggggaggaagctggggccccagctatgtcaccatcctctacgtggctcttcatttcactcaactgctgcctgaccagggcaagctcatcgctctgtttc

SEQ ID NO: 307900 - DNA, 1000 bp, Homo Sapiens
gaattctaataaatacttgttgaataaatcaatgagaatcccaaagactatgctctaaacactctaccaaaataactctatgaatagcctcatgtattatctattaaatggccaacatcttcaaatgtaaacattggcatacaaaaatcttcaaagtttagagaaccaccaggaaagccaggccatgagtccataaccagtcttcatttcctgagttacttctcctttgatatcaatatcaagcatttatatcactaacacaacagcaattctggcttggaatggagggcgagaaccaccactgtcattgttgccttgtacaatcattccacctctctgaataacagattttgtaaggcatgcaacatggccatacctaagaggtagtgtatgcaatggttaacaatattgttccacaaagctggaggcatcacattacccaacttcaaacttcaaaccaaataccgtgggagctaaacattgagtacatggacataaagacaggaacgatagatactggggactactacagaggggtgggagggagaggggtgtgggttgaaaaactaactactgggtactatgctcgctacttgggtgatgagatccatacaccaaaccacagcaccatgcaatatacacatgtaacaaacctgtacatgaaccccctatatctaaaataaaagttgaaattataaaatatataatatatataaaattctggaagtatatattatattatatattatatattttataatatgttacagtaatgtaatatattatacagtattatatataatatataacattattattacataatatataatatatatgttatatacatttatatatagttccagaattagagaacctaaattcaaaccctggttctgccaattactagtgatatcacactgaacacattagtttatctccccaagccttagatttcctgtttgtaaaatgtaaatgaaaataatacctacccatagag

SEQ ID NO: 307901 - DNA, 1000 bp, Homo Sapiens
tttttttttttttcattaatagttgtaaaaccccaaaaagaatataccttgtaaggcttaaatttcatgacttgcttcttgatgaggatgtgagatgtcattagataggaatttatgcccattttctgaaggaaataacattaagaaaacccagagaccctaagaattagtatatgtgtagaatttatgttctttagctaatcctgcatgtaatttttatgtagcattagcttagttgacagggttggtcctgcaactttattgttttctgctggataaataatatttagtatctgccattgtatacatcgcatattgttctaggtgctggggaaacaaaacagacatgttctttattcatggagactatactttgttctgggtgagttttgttttatcttgatcttagattattgctgtttttagtagatgagaaaatcaaggcttagaaagtttaaataatttgcctaaggttacagaattgatacatggcgggtgttgagaaaagaacccagagtttgtgtggcttcaaaattttttctgctgtttcatcacaaatccttgaggccaaggaaatcatggtttccctgaaaagttttaaaaggattttctctctttttttagtaacaagctaccaaagagaattgaagaccaatttacattttgcaagagtttgatacatcagagtgcattcacaatatacgaaaatagaatagttaatttagtccgtatttccaaaacatatgatcgagttcattttgtgtatcttatgtgtatgtgtgtgtgtgtgtgtgtgtgtgtgtgtgtgcacgcatatgtaggtagatatatatgtgtgtgtgtgtgtgtggtgtgtgcatacttagtgtatatgtttactcattataaacacattcagggaaaacttaaagggattatattctatacctattcatcaccttccttgttctcccgcaccttcactataattaaggataccagctcatatggggatatttct

SEQ ID NO: 307902 - DNA, 1000 bp, Homo Sapiens
caaattaaaaaaataaatccaggagaaaatacttgctctttcctaacttatattcataaggttctcttagtggacttctgtagccttagtgaaacccaaactagaatgtttagcaaaatccccaaatgtatcctattttcaatattttcagaactcaatatttttagaatgtaaaattgtgttttataaagaaataattcatttgtcatgtacattgatgacatgaaatgtacataaaattcagaaaactgaaattatcagttaacagggaggttaatagaattatttttacagcaatttagattcacagaataattgggaagaaggtacagagacttccaacatactcccctgaccccacacacgcacagcctcccctactgtcagctctccctaccagagtggtgcttgttacaattaatgaacctatattgatacatcattatcacctaaagtctatcatttacattagggttcactcttggtattgtacactctgtgagttctgacaaatgtataatggcatgcatcagccaatgtagtatcatatagaatagtttcactggcctaacaatcttgcgctccacctattcatgcctccttccccctaatccctggcaaccactgatctttttactgcctctatagtttaccttttccagaatggcatacagctggaatcatacaacaagtagccttttaatattggcttctttcagttagtaataagcatttcagtttcccttcatgtctttttcatggtttgatagctcatttcataatattcccttgcctggatgtaccagtttatccattcactaactggaggtcatcttggctgctttcaagtttttgcaattctgaataaagttgctataaacatctgtgcacaggtttttgtgtagacataagttttcagctcttttgagtacattccaaggagtgcaattgctggatcttatggtaagagtatgtttacttttgtgtgaaaccaccaaac

SEQ ID NO: 307903 - DNA, 1000 bp, Homo Sapiens
tgaactatattggtaggattttaatagggatcatgttgaatttgtaggtttgggactaacataactgaatgtgaacctagctatgaagatgtattttccctcttaactcaggtcctctctgtcatgtccataaaggtctttcaccttgtggttttgtgtctttttgtcagatggcctatgtcgtagatctttttttctattacattttctattcagtgatggctggtgtatgtgagaccactgagtgtaggttgatcttgtgtcctgctggtcagagtggtctttctaaaacattgccctgatgtcaatttctgttcaagctcttcagagccctctctttgcctcagtagactggcctttgtcccctcccttgccctctgggtcaggtgcatcctgaagttccgcctcacctctattccagtgagacctgccccaccagctcctcagccgggaccccccgccagcggccacctccccacagatggggaagcctagccagggaaggagctgtgcagggccagccccagatcccacagggctggggttggaggcagatggtgagagcgctggccctgatgcccctggggtgccctgctctacccatccctcacctggaagtgcagcccaggctgctgctgtcaagtgatatggaactcaccaggactggccttccccctggaggcctcccactagacagctccaggaactgaaacacgggagggggctgctggtggtctccacctggctaaagcactgcccttccaaagagcagagctaggtccaggccagccctgtggccgcagcatcagggcagcctttggcagagctgcgaccctctccccagccctttgggcagtttcctgggtctcctacctcctctgttcccctgacccccctgctgtttcaccccatgctctacccccatgccaccttgtaggctatcacctgtccttctacattagtcccctccacccagatacacagagactgagggacaggg

SEQ ID NO: 307904 - DNA, 1000 bp, Homo Sapiens
ctaagacatgtagtgaaggacaaatacgcctgggccccacctttacccaagaacaatccctcagtaggtttaaatgtgcatgtgctcgttggtgtgaaaatcagaggacaacatcaggtaccttcccttaggaatcatccactcttattttttgacacatggtctctcattggcctggaacttatcaaatgtccccagggatccacctgcctctgtggccacagggtttggattgcaagtagcacatgctcacttttttttaaaaattatttatttatttatttatttatttaatgtatatgagtacactgttgctgtcttcagacacaccagaagagggcattggatctcattatggatggttgtgagccaccatgtggttgctgggaattgaactcaggaccttcggaagagcagtcagtgctcttaaccactgaaccatctctccatcccacacatgctcactttttaatgtagcttctggaactcatatgctggtcctcttcttggaaggaaagcagttaaccaactgagtccccaccccaggcccacggctctgttggaagtaaaatttacttctggattccaagacccttctcctgtccaggtctttgcttttgagattttcatccctcagtgacttgcatggaatgtagagtctgaccaggttcaagttcaaatccagatttcatagctcacaaagtttcatgggcctctgggtgtttttaaactgccaaatagtggacacagtgcaaagaggctgaaatgggtcaggtataactttatctgcatccacctgttctcccctgctccggggtgtaatgttctctctagagagcatgcaggtaccagaaatgtcctgcaatgatgaggccaagactatgaaagtaagtcaggcctttgcacagcagggactcaggaactgtcctggagatagactgaggccagaccagtggacatgattcagtctgtggaatgtgaagtgtcctacatcgagtgc

SEQ ID NO: 307905 - DNA, 1000 bp, Homo Sapiens
atccatagagagagaacaccagaaatacaattagacattaggcttatttttgttattttttattatttatttattttagagataggttcttaccctgttgcccaggctggagtgcaatggcgtgaccatagctcactgcagccttgatcctcctgcctcagcatcctgagtagcttggactacaggcacccatggatcaccacgcctagctaatttttaaatttttgtcaaggcagtcttgctatgttgcccaagctggtcttgaactcctaggcccaagcagtcctcccattttggtcttacaggtgtgagccactgcacctggccctcatttttaaacatattgaatatttaatttagtcccctgaaaattattggttatgttctccaataccataagagtttcatagcatttaactcagaacccaaagaatgctaattgaacattatttatcagcaccctttaatataaagtaaattaaaaccattcattataactgaattggctctcaaaactgaaatagttattataataagatgaaattaatatcataattatcaatgaaatagttattataataagataaatgactatcattatcattattgaacctaacaattattataggtctcttttagtacaaagaatgtagatgaaggctcttaagaatagcaaatgagttcttaccaaagatgatcagaggtagttctagccacacggctgctagccgaaagagcagaaatggggctatgattcccccaaaatcacacagacctgaacagagcgaaactccgaaatttctgttgaatgaaaagtaattttaagtgaaaactatttcaacaagtgacttcaagataatcaacatattcagacatatwaaaaaaccaaaggaagtgtgaagatactttgcattttctaactttgaaaacgactactctcagaactctaagcaaaacatttccattctgcacgtttcacagtaaggctagtgaggaagtc

SEQ ID NO: 307906 - DNA, 1000 bp, Homo Sapiens
ttgagtaatggtcatgttgactttaacactttttctatgtctgttcactgggtggtgtgtgctattttacaattgaaggttttgcttgtgaacatatgagttatactccaccaaaaagttctgttttgctccttgtatataccataaaaactgtgtgcttttaacgaatattgctgtattttttccttaggtaaaactgtgttgtaattgatgacttagttttcagaagtcagctccttccatttaagtttctatcttcttgaaacttactttaggtttgtttttcattctcactttagtgtttacctgagttttgctctttgcataaccacacacatattataaagggtcttcatgtggaagctttttacttaagtctgatgaaatagaaaactgtgtacatttaaaaatatgcatttaaaattgttttttattgttttgttgggcagtatgaaatatacagtcaaggcagattcgtacagacttgtaaagtcatctcaggaatcttttatgcttaaagtttcctcagccccatttatattcactactatcattcactctttaccactaatatcttccctgctgtctaatcactaatatcttccctcctgtctaatcactaatgtcttccttcctgtctaatcactgagttaagggaaaaatagtcatttacttacaggaatataatgggtattaataacaaaattccatttccccattaaaagctatgtctaagaaaaaaaatagtggaggcattatttaaaacttctaaatggcctggtgagtatagtcttagtttagcttccttacttttttgtatgcccaacctgaaatgatgtcatcccgtatcatcacagtatgttgctttttcagtacgaagttaatgggctttcctgctgtttaactgctttgagattttaaaaattcattcagccacatagtattcaaagcatggagctgggtgccacaaagacttgggcctggcatcacccagaagctc

SEQ ID NO: 307907 - DNA, 1000 bp, Homo Sapiens
ttgtgacaagtttccttgttcaggtgactggtgtgcaaaggcaagatggtgcacatcctcctgaccaagcaggtactgaattctctggaattgcccacaacataatggtataaggtataactaatctcttttcccattaaaaagctggcaatgccagaccatgagtctaattaattcagagttgttccagggcacaagatagccagtaatgtccaaatggggagccttgtggtggtggcagccaggattcctaaggccaggtgctccttcacctctctgggagagccaagctgtccatccgctggatccccaggatgctgggctcaagtgtcagctgggtttacctctttggaacagaagtaatggacgaccactccattggggtatcttgcaaatgcactgcagggaagaaaatggcttgggagtgaggactgcttctaagtgaccacttctctggcagcggcacctcctacagaagaggcacattgctggggggccattccaaaagcagcccacccaaacctcaaagaacagcctgcctgaggggctctggatttctgtagccatcatctctgtcaaataaccaaacagaggatgaggtgcacacagttaagagtgcatggggtatttttttattatgcaaaacacaaggcatattaaagatgggcagtgcaccagcccaaagctcagccctggcttcctgagagccaacaatgttcatcagaacaggtttcaggctaattctgaaaaggacggcgagtttgtctttctaaagaaaaatatttttccagctacataagagacaaatcactctcctttgaagaaaaggggactaactagagtatatgtcttaacacagtatgagtctggctcaggatcctacttgagtcacaatgcagtagcttgaaagatctttttcttccttcactggatcttccttataagaactttctgcagacctacatctcttgggcacccactatatcaggttctagcttca

SEQ ID NO: 307908 - DNA, 1000 bp, Homo Sapiens; identical to SEQ ID NO: 119879

SEQ ID NO: 307909 - DNA, 1000 bp, Homo Sapiens
cccgcgtccggcgcccgccttacgctgccttcgtagcgtagcgcccggcccgggccccgcggctacggcgcgcccggggcgcacgcggcgctgtgaatcgcgcgcccggactacggctcccacagggctgcgcggcgccgacggggcggaagctcggggcggtgcctgcgcgaggcaggccgggagttgtagtcctcgggtggcgccctcccagtccgccgaccgcccgggccacttctcctgccctcgctgctggagacggccgggcccgaggcctcggtccccgggaggcgccgcgctccaggattatcagggagtggggcggcccgaggaggagctggaactacaactcccagagggccttgcgaggggcacggaggggcggggcctgcagccgcggcgtctgcgcatcagcggcgtcacagacgcgtggggctcgcggggagccgggctggggccgtccgtgtcccgcggggctctgggcggccgctcgaccgaggacccacgactccgccccgaccccgccgtgttcgcgagacccggagaccccttcgcgccttccaggaccgcccctttcgcgacgctgcgtgctgtgcttggtcctggcggccaagagcggcggtggcaaggggaccgccctggcccgagacgcggcctggcctcgcagcgtcgcttgggcacagcctctctaggccccttcgtcctcggtcgcggagggacgccattaaacggccacgccgggctcaactgggacgcggcccacggcgcccaaccagggcctgggggagggaagccggggcgactcctgggtccttccaggacccttgcgcaggcctcattctctccccggaggtccccttcccgctgccctgaggccactctcctgccagcagctgctgggccggctctcgggagaatgccttggcgtcaagcttatcaggctgcagggcgggacgcgagtgctgagggcagccagactcccgctcttaggtgcacttga

SEQ ID NO: 307910 - DNA, 1000 bp, Homo Sapiens
ccgtccctcatggtgcccgtgcctcgttgtcagcctagagctctcaaaggggcacctgggttcctgtgggcttgtgcaggcctggggagcagtcacctaccagttcccctgccgtcagcctccagaagacccagatcgggggtcaagtctcagcttggccatggagctggcttgttgggcacccatagcatagctgtggtgcagggggtggtggttccacagctgaacctgagctgcaggtcctgccaagcaggggctgagtctctcccaagatgagagctggggtaggtgggccaggccagggctcagcctgggtcacccagcaccctgtcccagtgaggggagaagcctggcaggtgggctgggaagtccctcctgtgtcttctcctgccctggcctgcctggtggagcccgacagtgcatacttgggtgctcttgcctgcccacctctgagctgcggcacccacggaatggccgcagccgtcaccattcctggcccccgcattgggtactcgtctgcctgatgtccccgcagaggcacacatggtggatctgtgtccgtgctcccgggcacacagaccaggaggcccgagaggcacctgtgcacacgcaggcaccagcaaacacggcagactcaggtgcaggcgcacgacatgacccctggggcacagacgctgcagagcagggccccagtgggtggggaggggtgtgagctgggcagctgccagccgtgagctcagcctttgctctaggggaagggagtaggtgcccattgtgcctgaggtccccaggggctgacgcggtgcatcgcctggcacagcccgggcctcccccacaggactgcctggcgggcgtcaccgtgggagtgggactgggcggggcgaggcagtctcatgccgcctgccaggccaggcatggaggtgagcggggaccccggcatccccgccctgcaccgcctctgcacccgggcgctcagtggtagcggctgacgcacttggcg

SEQ ID NO: 307911 - DNA, 1000 bp, Homo Sapiens; identical to SEQ ID NO: 119880

SEQ ID NO: 307912 - DNA, 1000 bp, Homo Sapiens
tgggggtgtcagaggccccttcccagcgagatgggcttctgtgctcactgtggttaggggcccagcagggagaggccaggccctcagtgtgcatccttctgtgcagagctggggttgggaggcgactcctcccagctctgggggcttcagagtccctccttttcttttttttttttgagatggagtcttgccctgttgcccaggctggagagcagtggtgtgatttcggctgtaacctctgcctcctgggttcaagtgattctcctgcctcagcctcccgagtagctgggactacaggcgcccgccaccatgcccagctgatttttgtatttttttgtttttttttttcaactggtaatcaatttattaaaatagttgacttaagcatctgcaatggtgacttccacttcaactcctggctcaatactgatggaagtaatctgcttaacaatctcagaaggactgtgcaagtcaatgagttgcttatggatgctcatctggagtttttttttttataagtttttttttgagatggagtcttgctccgtcgcccagactggactgcagtggcgcggtattggctcactgcaagctctgcctcccaggttcacgccattctcctgcttcagcctcccaagtagctgggactacaggcacctgccaccatgcccagctaatttgtttgtatttttagtcgagatggggtttcactgttagccaggatggtctcaatctcctgacctcgtgatctgcccgcctcggcctcccaaagtgctgggattaccggcgtgagctgtaacctggcctcatctggagtttttcttgtagtgattctcaaagtgttggtaggattcaaaccggtcctttcactttgagattcttttcctttgtgcctctgatcaagtcagcacacaccttttcaagtgattttatgctgtagctcgttagagtgattcagatttggtgaattttggtgaatttggtgaatttggcgaatttg

SEQ ID NO: 307913 - DNA, 1000 bp, Homo Sapiens
aaacaatatatattttttaatttaaaggtttcttttgctattttaaattgcccaggttttgatctggagtgtttgtttgttgttcgggtttcttttttttttttttttttttgaggcggagtcctattctgttgccaggctggagtacagtggcgcgatctcagcttaccgcaacctctgcctcccaggttcaagtgattctcctgtcttaggctccggagtagctggaattacaggtgcctgccaccacacctggataaccttttgtatttttagtagaggcgggtggcgttcgccattttgcccaggctggtctcgaactcctaagctcaggcaatctgcccacctcggcctcccaaattgctaggattacaggcatgagcctgtataattttaaatggtggcaaacccggctacaagtatgttcttctctgccagttaacttccccaaattgactgaggtgtaaaaaagtgagcagtaaccagaccgtcactttatttatcaccctaacccgcctgaaaagggacgatgtgtatatcttttccagatctgaaaggaagaatgaaagagagagattaagttcacgtaagtgatcaagctcaacttctcacagctgctgcggctgtgcattcttgactctctaatagaggaagacttctgtcttctaccacctgtgagtcagaggtaaaagacagtctttgattttatgctttattggaaattcagtactggttttttttctgtaccagtactcttttctggagcagtttgcatttattttgtttgaaaatgttgtttaaaaggcagtggtggcccacggctgtaatcccagcactttgggaggccaaggcaggaggattacctgagccaggggttcaagaccagcctgggcaacatagtaaaaccttgtgtctacacaaattacttaaaaattagctgggcatggtagtgcatgtctgtagtcccagctacttgagaggctgaggtgggaggatcact

SEQ ID NO: 307914 - DNA, 1000 bp, Homo Sapiens; identical to SEQ ID NO: 119881

SEQ ID NO: 307915 - DNA, 1000 bp, Homo Sapiens
gatcacctgaggtcaggagttcgagaccagcctggccaacatggtgaaaccccgtgtctactaaaaatataaaaattagctgggcgtggtggtggtgcgcctgtaatcctagtactggggaggctgaggcaggagaatcgcttgaacccggggtggggcagaggttgcagtgagccgagatcgcgccactgcactccagcctgggcaacagagtgagactgtctcaggaaaaaaaaaaaacaacaaaaactgaactgggcattttcccggttcgttccagagatggtgaatttgggcatctcggccatcaccccgacacttggtcatctggcagagagacatttgagagaggcctgaggccagcggtgcagtggaggggttcccggggcggcggggggcggagagcagtgcggggtcctggggcagtgggcgctgggtgcggcagggagggaagagtcctgggaagaagcggggcatcccggggtgcaggggagagtaagggatcctgggaggtgaggtcctgggtgcagtgggaggccaaaggaggcgacggagctcggaggtctccgggggtggggagttgtccccggggtgcaccgggggggcggtctcagggagacgggaccccggaggcattggaggatccaggcagggtgtgggatccaggggtccccagaggccggcgagggagccccgggctggggcttcgtacctctcacgagggtcacgggtcggtccacgatgaggtcgaacgctttcatcatgtagacgatgggattgggctgcaccggcgtgcggcgcgggggctcagggtacacatccttgtcccagctgtccggcatggcggcggcgggcgcggactccgctcccggacgcgctgccctggcctctacctccgtccgggtcccgcggcctaggtcgcccgctacagaggacgccgagggcggctgcgtctgcgcgctggcgccgcgatgcaccatgggacttgtagttccccggc

SEQ ID NO: 307916 - DNA, 1000 bp, Homo Sapiens
  misc_feature (705)..(725): n is a, c, g, or t
aattggcagctagtgtataaaagagtgatctaggcgggcgcggtggctcatgcgtgtaatcctagcaccttgggagaccaaagcgggtggattgcctgagctcaggagttcgaagaccagcctgggcaacatggtgaaaccccatctctactaaaatacaaaaaattagccgggcatggcagggtgcacctgtaatcccagctactggggaggctgagacaggagaatcgcttgaacctgggaggcagaggttgtagtgagctgagatggagccactgcactccagtctgggcgacagagcaagaccccatctcaaaaaaaaaaaaaaaaaaagcgagtctacatttttcagaaagagcacagtgtgaaccaatgcttccagcctcagcactattgacattttggacgagataaatcttggttggtgatggagtctattctgaacattgtgggttctctagcagtgtccctggcttctgctcattaaatatcagaagaaacccctgttgtgacaaccaaaaattattctaacattgccacatgttcctcaagagtgatgggagggaagggaggggtggtgaactgtccctgggtaagaaacatgggtgtgaaccatctgaaaatatctgtgttgaataagtcactattagttatggagcagctgagaactgcattgaaaaatatttgttgaaaatcttggtcttnnnnnnnnnnnnnnnnnnnnngaattctggtcccagtacagggctatctttccagaaaatgaacttgttcagaaccaagatttactgattcccttgccttaccaaatcatataatttatctctcacatcatcttcttcttaattctctgccactagtccactaattgtagtaatgaatcacaaccacagctatttattcctgtttaatgccccaactaactcatttatttcagtctcccattcccaacaatactagcaggcatcaaatttccagccttggccagaggtagaactct

SEQ ID NO: 307917 - DNA, 1000 bp, Homo Sapiens
gatctggaggggcacagggtggagaagttgcagtctcctcatggaactcaccaactggcggggaagacagatcacataaaagtattatcatcgcaacaaggaaggctgagtaccatgacagggatgtgcagagccccacagagctctcaggaccccccactctccccattcaaggcatggagggaccttccccagaagatgtgtataagttgagacctgaggatgggagtgcaggggaagcagccacggagtgttctaggcagaatgagctgcttgagcaaatccttcaagacaaaagaacatgattcaggctgggcacggtggctcatgcctgtaatcccagagctttgggaggccgacgcaggcagatcacctgaggtcaggagttcgagaccagcctggccaacatggcaaaaccttgtctctactaaaaatacaaaaattagccgggtgtggtggtgtgcacctgtaatcccagctactcgggaggctgaggcaggagaatcgcttgaatctgggagacagaggttgcagtgagctgagattgcgccactgcactccagcctggacgacagggaaggactccatctcaaaggaaaaaaaaaaaaagaacatgattcaattgaatccaaagaagttcggtagacctggagctcagagttcaaagcagtggggagaaagaaggccagagctgtggtggggccagggggaaggacatggcaggccatcccctgatgaaaaagggaatcgctgaagggttctaagaagagagagacaagggcacagggcactgtggaatccggccgctgtgtaaggcctggtttcagcaaaggcaagacaggaggctgctgggagggtcaggagatgatggtggcctgggctcaggtggaggcacagcaggcagtggcggaggaggtgcaaagggcatcatgggagaagggcagggcttcgcgaggcacggagggtgtgggaagggcaggggtcagctcttgggctgggg

SEQ ID NO: 307918 - DNA, 1000 bp, Homo Sapiens
ggatccacctgccccagcctcccaaagtgctgggattacaggcatgagccactggcacctgcctctattggttttctttttccgagtaagaagagcactacttgcctgagatccgcatttgaatgatgtctccagtgaataaccttgtgatcttgccaacctactcggcttctcagttccctccactgcagtgttgcagagaccaggaggataatgaaccacagccacggttctcaagctttggtgcacacaccatcacctggggggctcctggaaaaagactgctgggttccagccccagggtctctgatacagtcggtgtgaggtggaacctggtcatttgcatgcctaacaagttcccaggtgacgctgctggcccaggggcaacactttgagaaccattaaaacaatatttagacataataataattgcgtaattctttgtctcttctgttgccttgactgacagattaagaaagggaaacagcatttactgagtatcaataattatgcaagtcatctcattttatttaatacttacccttaaagtacttatcacgttatggatgagaacattgaagctaaaaaagttaaatgacttacccagaattttacaatgaggaaatggtgaatctgggattcaaatacaagtttgtccaactccggaatctatattctatttgttacaccttgctgcttgccaacagtgtttggccgtggtaattgcataagtttaggggtttaactttattctacttctttctatatgatagtttgtcttctactttgtctttctatattttttccaggtattctgttttacagagttcagtccactggtctaaaacaagttatttgggctcttcgagcctcattttcctcaaatgtaaactgaggaaacatccaccttgcagtgttgtggtgagagctacagacaatatgcataaaccacctggcaatgtgcccagccagtgttaggcacataacactcaacagctgc

SEQ ID NO: 307919 - DNA, 1000 bp, Homo Sapiens
gatccacccaccttggccccccaaagtttgggattacaggcatgagccactgcacccagcctttctaatttttttctcttagtgatcttttaaagacaacttctgttttatagggataacgcctataatcccagcaatttcataattgaaagattttattcattgaaaatccagtttttaatattatttaaattgtggtaagacatacataacaagaacttaccattttaaacttttttttttttttttttgagatggagtttcactcttgttgcccacactagagtgcaatggcatgatctcggctcactgcaacctccgcctcccaggttcaagcaattctcctacctcagccccctgaatagctgggattacaggcacccaccaccaccatgcccggctaatttttttatatttttattagagaatggagtttcaccatgttggccaggcttgtcttgaactcctgacctgaggtgatccaccttcctcggcctcccaaagtgctaggattacaggcgtgagccactgcgcccagcgattttattttattttatttctttatttattttattttatttttttgagacggagtcttgctctgtcgcccaggctggagtgcagtggcgcgatgtacgctcactgcaagctccgcctcccgggtttacttacaccattctcctgcctcagcctcccgagtagctgggactacaggctcccgccaccacgcccggctaattttttgtatttttagtagagacggggtttcaccgtgttagccaggatggtctcgatctcctgacctcgtgatccgcccgccttggcctcccaaagtggtgggattacaggcgtaagccaccacgcccggcgattttaaacatttttaagtgttcaattccatggcagtaagcactttcatagtattatgtaaccatcaccactatttcatcatcccaaatagaaactctatacctgtttagcattccttttcccctcctct

SEQ ID NO: 307920 - DNA, 1000 bp, Homo Sapiens; identical to SEQ ID NO: 119882

SEQ ID NO: 307921 - DNA, 1000 bp, Homo Sapiens
tgctatttcctttgtaactcccaaagagttaggcataacatttagcataaaatgaggactcaattactactgatggttgcccaattgtaattggtaaattggcaaaaagtggtggtttttaatggtcaataaaggtaccatgtatctagtcttaggaaacaaaaggtttattgaaatgcatgtagataaattatcatcagcataaaactgttatggagttttcaacatggggtcttttgctcttaaaatgaagtgaagctttgcaagtccattgtccaataggaaaaatattatatctctctgttcagataaagtcctttaaaaaagtaaatctcttttgaaacggtcttttaaacgtctccagcctgtgaatatataacaaaacaaaaaccatattaaaaagacataattttctccatttaaaaagaagaattaaataggaatgatttaggggtaataaacaaggaaaatacctgggaatttgaaactctaaaatgttctcctattttattaagtacatactaaaatatttgatataatgaaaataatttacgaagacaaaataaatgacaagtggtcataaaaatgcaaataaagtcaatcattttattattatatatttaggaacaaagttgaaatgttatctcctcaaataaacaatttttaaataactctgatatcagtaatttggaaatacagtcctaaatgagttttaatttccattgaaggctaaatgtccttaatagaagacttgaaatcaataaatatagtaagagaaaaaaggaagaaactttcagagaatttctgaaactttgtgggtcaatagaaattagcagttaattttctacaaatcatcctcagggtaaagtgagtcatattctgtttccgcagggtgctctggtctgacctgtttggctccccccaggtggtgttgctgtccttctccaattgtgagtctgttgaatgggattatcttcatagtggttttcttcatggaata

SEQ ID NO: 307922 - DNA, 1000 bp, Homo Sapiens
atagtaaagatgcctcgggaaagtcagtgaaccagaatagtgctcttgcaccactgagggtgctagactggctttgtgcatcttatttcctaagaatatcagtttttattatgaccttaattataaatacctatatataggagtaggattttctctcacccaaccctactttaatcattatcacttaagtgtaaacctccacctccccctctttccctttaccgaaaaaaaatgcactttaattcctaaggagagtggctgttcctggccctgaaaccagattacttcaggaggagagttaaggagggagagctcttaccagaccctgtgaaatgaaccaaatttcttaatgtaaacacacaagtaataacatccacttttaagtggcccccactccatgccaaagggaaaaagaaccgccaaattgaaaaagggttctaaatacctgtcctgattttggaagtttcactggggaaaaactacctaagattattttcacagctaccaatttgtcagaaactttggtggtgttttgtgggaggctgagattttttaaattaaaaatcaagtgaaaacacaaagactctaagacacgatcctgatttgtgtcatttctaagtatcagatttgttctcccttcatttgacaggtgttctcagtctctcctcctgtaagattctgtccttcccctgatgacaagccaatagttcttggtggggttgcatgtctcctagagccccaggacccctgtcgtgtcggggaaggggggagggcaggagggtgggcagagactcgggttgggggagggagttcaaagaaagagtgaaaatatgggtttatataaacatatttaaagcagtttagcaaaagctttctcgttgaacagctttaagaacaatgtgaatgaaatcttagcaacttggttagtaatctgaaaagtctattaatgtatacttgaaattctgtttgtataaaaatgcattttcccctttattttaac

SEQ ID NO: 307923 - DNA, 1000 bp, Homo Sapiens
tttttttttttgtttcaacaacatttatacatctttttaattagattagctttacaagcaacttgagagctctttcataatgaaacactgcttttcaaattacatgactttatagtctatctgtatatgaatcctgaaaatctttgcctactcttgataaaggtctgtgttttacagctggttaatgtgttgaataaaaacagcattatgaagctttatctttaaccaggattaaacacatataggccacaaacagttttaaattttgtttgaaatagagtcctgcttggtgacaagttaatagtcccactaacatgaaatgaatggatattaaataaatggccatcctgatttcttgatcttttcacaatgattcctaagagagtatataaacttttccaaaaaatatacaatttaagacctgtctggcaagcacaacccacagatagtagaatctaatactttttacaactgtagaggtacacatttgaatgacaacaggggctcccaaattaaaaggctgtggctgtacattttgacaatcaaacaaacctcccatcaacataaaacaatttctactaaccctaaaaaagataatgcttttgagttgtggcctaacgccgcgcactgtactatagaccagatggcaaagacaacttgcgctcctgggttgggctggcagaggcacttactgtagagatgtgatgttatcatctggaaggaaggggaggaagtagaacaaaactgaatatgggcgaggaaaaaacaataaactatcactttctcctgcaaattctcctaagtgagatcactatactgaacattcaatcccatcctaagtccactgttggcttcactacacaattttttttccatgttttacatgaatagcaatggcaatcttttaataaaaattactgagcttcccatagaaaaggtctcaaattgaatacaactatacagatgctaaaaatgtcttaagttgaaatatacagaaaat

SEQ ID NO: 307924 - DNA, 1000 bp, Homo Sapiens
gatcatctaggtgatgtaactcttgtctatactctgcctgcagggacattgtgagatatctctgcactgatcaaccaggtgatgtaactcttgtctaggctctgcttacgggggtattgtgacatagctctgcactgatcacctaagtgatgtaacactggtgtaggctctgcctacatgggcattgtgacacatctctgaactgatcaaccaagtgatgtaactcttgtctaggctctgcctatgggggctttgtgacatatctctgcactgatcaccttggtgatgggacttttgtctacgctctgcctattggggcattgtgacatatctctacactgatcacccaggtgatgtaactcttgtgttggatctgcctatgggggcattgcgacatatttctgcactgatcacccaggggatgggactgttgtctaggctctgtgtatgggggctttgtgacatatctctgcactgatcactcaggtgatgtaacgcttgactaggctctgcctactggggcgtagtgacatatcactgcattgatcactcaggtgatgtaactattgtctaggctctgcttaaaggggccttgtcacatatctctgcactgatcacccaggcgatggaacacttgtctaggctctgcctacatgggcattgtgacacatctctgaactgatcaacaaagtgatgtaactcttgtctaggctctgcctacaggggctttgtgacatatctctgcactgatcacccaggtgatgggacttttgtctaggctctgtctacgggggcattgtgacatatctctacactgatcacccaggtgatgtaactcttgtgttggatctgcctatgggggcattgtgacatatttctgcactgatcacccaggtgatgtaacacttgtgttggatctgcctataggggcattgtgacatatttctgcactgatcacccaggtgatgggactcttgtctaggctctgtgtatgggggct

SEQ ID NO: 307925 - DNA, 521 bp, Homo Sapiens
ctggctgtgcacctgtctgtctggagtgcagtttggcagcccttctgtcaggcggtctgcagctgagtatgaggatgtgagtaagcagcaggctggatttcaggcactgcagattctatctgaacaactcaaagattcctggaatttatagccccagaattcagaaaggttggaggagggtttcagaaaaggcctcacccacaacttgggaggaaacctaggggaagtgcaggacttgttgtctgaataatattctgcagaatgctgcacataccacttaacaagcataaccagcaaaagagtccagctgcttgctgcttgtggaaagacgtcaaaataataatagttatgataagagggagcaagatgtctttattatccatgctagcaggggaagagtagaaagcaattccactcttcaatttgtggagggaacgtaggagttttcaaagaaagggtttggaatacagaatatgactaattatatagtattaataatataataataattaaattattta

SEQ ID NO: 307926 - DNA, 1000 bp, Homo Sapiens
aaacatatgttctcaccataacttgtacatgagtgttcacagcagcattaattacaatggccaaaaagtagaaaaaaatccatatccattcactgatgaatggataaacagaacgtgacacatatttaatattatggaatattatttggccataaaaaggaatgaagtacttatatgtgctagaatctggatgaaccttgaatatattatgctaaaagaaagaaccgtcagggaggaccacatattatatgattccattcacacgaaatgtctagaatacgcaaatacatagagacagaaagtagattagtgcttgccaggggctgaggggaaatggcaggtgactgctaatgggtatggagtttcttttggggtgaggaaaatgttctaaaattgattatgataataattgcataaagtgaatatactaaaaagagtaaattgtacacttccaatgggtacattgaatggtatgtgaattatatctcatttgtttcaaaaaaagaatgagtagataaacaagcaaatatataaaggactgacaaaatcaggagcctagaaatgccctcccctttgggtttacaattcatactaccgtttagtgataaaatgctggatgtacactcatggttcctcgggattcaacttttgcttataaagttcaatgtaaaatcacaaaccagtggtatcaaatcaaccaaaagaaactgtaaccttggaaagtacagacttttcacactgtaactataactttaaggcaatcattcaagttgggtgaagaagtcgcagacagggacacccagcagggggagaagtaacttcttgaatggtacccttccacggtgtgaccattccgtacggtgctgttaagtatttcacgttcctcagttgtgttggggaagaaaaattgagaacgagtattcttctaatatttctaaaaacatcagcatagctactgcttaactacgattaaaatcaacttgggaaaagcagcactgaa

SEQ ID NO: 307927 - DNA, 1000 bp, Homo Sapiens
gagtagaatttttcagatgtgctttacttcaaaatgtcatatatatcacttctatttaataaacacaaaacatgaacaattagcatgctaacaaatatgtatatattatatgggctttttaaatagtgattttttttaggttggatgtctattcagtgtgcattttacaaatatatcttaaggctatatctctgccacctaataacaaatatatgttcccatttagaaaaagaaaagagatacatatgatatataagataaaagttagtgcagaaatctgagtggattgataaataccagttattttcatacatgtgaacaatttacaaactgaaaggggttgcagaactctgcttctcccattttctagctatctcttttttggatatcctttatctgactaactactactgtatgtagattggagagaattttaaaattggagatgattttaacatcctaggatagctgaggtaatatttattttcatatcctctctcatgttcaccaaattagcagtaaaagttgactacttattattactatttttggagacagtgtctcactctgtcacccaggctggagtagtgcagtggtgcaatcatagctcactgcagtttcgaactcctaggctcatgcaatcctcctgcctcagcctctagagtagctgggactacaggcaagcaacactatgtctggctaatttttttctttttttgtagagacagggtctgtgttgcccaggctgatctttaactcctggcctcaagcaatcctctcaccttggcatccaaaatagttgggattacaggtgtgagccgccgcacctggctaaaagttgatttaaaattgcatctgtaaaatcataactagcaacttttaagacaaagaaattaagaattcaaagtcattaaaatcaattcttttaattgctgaaattaacatacataattgatgtaggtgagagagatcacaagtagttggatgaaatttatagtaa

SEQ ID NO: 307928 - DNA, 1000 bp, Homo Sapiens
gatctccacgtccctcactgctttccaaaatagcaaggctggcttgttattgtcatgagactgccatggggacagctgttatggggaggtgaaggagcagggtgcctgacttcccaggaaacccagctcttgcacaatcaagtccttccatgttagcagctgacgctgtggtctcccctctatcggtcagtccagggtggcagggctgggcagcactgtggtggcacacagtgccatgagactactcagcatgggaaaaacagcttcctgggagtcaaaacagctggtgcccttgaatgtcactagaataaaagaggccatgcccttggttcctccaactaactacccacagcactgcctccctccagccttgctgggatcaaggggatgctcactcgggaggccgagtttcctctgcgcctcttgaagtattttggggctgtgctggaagagccccatctcaaccatgactgaacgcaagcaccctcctcagtaggtatgaatctcacaagatcccagcctgtaggggtgcacagctgagcaggtgggacagctggctccttaaacctgatgagtgtgctcaggaaggggctgaacatggagaagagcaggtgacactccctcaatactaattggctattctgggaaaacagcaataacccataaaatgacactgacttgtcaggaaaattccctggggttgccaggttcctaagaagtagagtggacacagggcggggcctctgcatgggagggcagggagggtggaaaacaggcttgggataaacagcatgagcatgcacacggcccctccctcctccttcactggggatccgtttctccacactcagattttggatcatcgttttgttcagaaatctaaacaccaatgagataaccattatgtaactatttttcacttatgaagaagtccagtctgccgactgggaataagcctcatcttctgcagggaggaggccaggacgtgtaacatcctggg

SEQ ID NO: 307929 - DNA, 1000 bp, Homo Sapiens
cgtggaggtcttcaccccgtggtgaagaagcttcccaaaccatattcgtaaagatgctgctgaatgatttaactatcaagttattcctatttctaataatccaaaagctatgttacaacggaaccaggtggcagtgccaatggatttaaagcccaacgaggaattcagcagtatttttactacaggccaaggaagaccatcagctgatgagcttccaggagcctcgggccacaacggcggggctgccgatcacacaccacacccagggagaagccccctggaaagtttttccagattcatttgaagtgaaacaagaaaaaaaaaataaacaaaccccaaggatacatatttaaaaaaagaaacagaaaggtagaaaaaaaggagttttcatgatgacaamgaaaaaacgcttcattctgcacatgtaggtttcattgcactgattcagggtgtccttgattaacacaaaccgtgcttggttctaatatgccaaaaacctgttctccttgctctctccccccacctttttggaatgaaacaaggaaaaggctctctgaccgttcctcacggcaggttaatgggcacctgtgttctgatttattgcgctcgctgccttccctggccccgtgttaggtagggaaatcggcacggaaggtggcacggcaggagtgacctttcgctaatcaccacacctcagttactactggcgcagctcattagaagaaggaatccttcaacgagctggctttcaaatacagtcacactttgattttctccagaacaaagattccactttcacataaaagcttctgatgcatgattctgtcaactggggcactacrgtaaaaaggcaccctgttaattgtctgtcgttatcaaggggctgcaaactgcatcaaagataggcctgcaatcctggctttcattacggaggtcagaacatttttattgactgtctattattaaaattttagagggctgtcaatcatttggctgccct

SEQ ID NO: 307930 - DNA, 1000 bp, Homo Sapiens
cttccctgcagtggcaaaacccacaaatttccatagtatttggacacagttgcctttcattttgaagacatagtgcaaagaatgtggagaagtttttccttgggacctgaatggtgtttggcctatgaatagatgtttgggattacaatttgtgccatgttgtgctaagtgccagatcttgtgtgacaaaggtgccttgtgctctttaatcgatttactgtgtgtgtgataaatagggccttctcaaacagtccaaaagtacactttttgcccctgtcaaagggatgatattgtggtgaatatctctgaacatatggcatttaatttgtggtggctgcaggatcgattccttaaaaatccaattgtgttaaagtgtgtagatattttaactgctgatagatgttaccagattgttctccttagtggttgtggcaatttacaatttcattagaaatgtaagagaatggctatttccccacatccttgttaagagtgttttatcaaacattacagatctttgcccatctgttaggtgaaaaataatatagagctgcagtttgaatttacgtttttcttatcatggataaggtgagcagtttttcatgtatttacattgctatttatattttgtctagtaaattgttcatatgttttgctaattgttttctattggattattcatcatttacttatttatttgtagatgctcttcatatactacaaaaattatctttttgttatgagttgcaaaaatttttctcaggttggttttgtaacttgttttttgttctatatggagactttaaatattcttatgtagtcaaatgtattaataacttttgggttttttaaataatccttagaaatgcctttctgcacttgaagataataaaaaataaaaataaaatgcctcttccttttttcttataattcttttaaggtttcatttttcaccttcaaatcttttatccatttgggagatatttttgtggaaattgtg

SEQ ID NO: 307931 - DNA, 1000 bp, Homo Sapiens
aaagagagagagagaggagagagagagaagagagagagagaaagaaagaaaagaaagaaagagaagaaagaaagaaagaaagaaaaagaagaaagaaagaagaaagaaagaaagagaaagaaaaaaagaaagaaagaaagaaagaaagaaagaaagaaagaaagaaagaaagaaagaaagaaagaaagaaaatagagggtggtatgcccaggcagatgcaattggaagaacagtgagagacgatggaaaggaaagcaaggaggggtcaactcctgaaggccacactaaggaatatgaactatattttggatgctatggagaaccacacagtgattttgatgtagggcttcagcatgatcaaatttgtactcgttaattaattcagtgaacattcattgaatatctacttggtggcagtaagtcacagaagtgggactacaaagacaacacattccctgactttaaggatcttacaggtttaggaggtttctgtaggagaagatagacatgaaggtaaaaaaagtaccaaaagagcactttgggctaacgtaaaaatgtggaatgaattagaaggtgatgagaccaaaagtatagtgaagggtgtcaagggggtgagaggagaccagttgtttctcttgagcacattatttttaatctttttaaaggaaatacataaacataacagttgttaagactgtgatggaatagtgttaaagtaatgcctgtataaagaatatcaagaaatatctttaaaggacctaaaagatggcatgcttttgtctgctagccctccaccaactatcagtgttagctccattccctgccacattagagccaagcagcaccttgggtgagatcagagccagtgtggcgagttaagaggctattaggcaattcctgggatgtgatgcttgcctgaaataaggaagtgacaatggtgatggaggaagaaagacaggaagaagagctaatagggagcctgatgtacaaaactcggcaa

SEQ ID NO: 307932 - DNA, 1000 bp, Homo Sapiens
gaattccccttcccggatgtccttcggctgtgggaggtgggccagccagtttgggcgagaggcctgaaggggtgggctcacctgccctgggaggttgggcggagagggacagaccctggtgggacctcaggcccaggctgggctatgacctccctccctccctctgtcccgcaccctcaggtgctgtggacagggctccctggccccaatctgcacctgctggtggcctgcgccatcctggacatggagagggacaccctcatgctgtccggcttcggctccaatgagatcctcaaggtgaggctccggccccgcccccgccctgtcccccctgagctgggcgctgcccagggccgcagtacctccggggagcaggtgtttagtgtgggattattgaaagcctggttagttgggagcgcagtgggggtggggccgcgtaggtttcccttctgccccatgccatgcctgctcccagcaaggtcctccgggcaggtgggtggggaccttccctccccgagtacgtgctcagaatgctcccggaggcctgagaagcatgtctcgcccagcgcacttctgagcccccagagggccagcccggtgtgtcttcattgtttcccagcacgaagcacagagtgggcgctcgggcggaggtggttgagtgccgactggcgcctgacccaccccctcccgcagcacatcaacgagctgactatgaagctgagcgtggaggacgtgctgacccgcgccgaggccctgcaccgccagctaaccgcctgccccgtgagtccccgtccgccccgcagcgccccgcccgaaccccgaccgacccccgcccccttctcaccttcaccttccgcttttcgcttctctcatcccgtgcctccaggagctgccccacaacgtgcaggagatcctggggctggccccgcccgcagagccccacagcccctcgcccaccgcctccccgctgcctctgtcgcccacccgggccccgcccacc

SEQ ID NO: 307933 - DNA, 1000 bp, Homo Sapiens
  misc_feature (40)..(40): n is a, c, g, or t
  misc_feature (50)..(50): n is a, c, g, or t
  misc_feature (74)..(74): n is a, c, g, or t
  misc_feature (86)..(86): n is a, c, g, or t
  misc_feature (234)..(234): n is a, c, g, or t
  misc_feature (584)..(584): n is a, c, g, or t
  misc_feature (780)..(780): n is a, c, g, or t
  misc_feature (853)..(853): n is a, c, g, or t
ctgcagtgagccaaaatcgtgccactgcacttcactccancctgggtgrnagggcaaggccctgcttcaacaancaaacaaacaancaaaaacccacttagattgtgctattatatggaaatgtttatttttcagttacaactttttttgttttctgcttttatttkttgagacaatggcctaaaaaggcattgaaatcccaaaataacataaattatcactaaatcttgatanctaatcataatatatatattttacactaattttttcatgacatatagattccatgcatataaaatacttccaatatttgttttttgttttctttaatagaggcagggtcttgctacgttgcccaagctgcttgtgaactcctgggcccaagcgatcctcctgcctcagcctctgagcctggcattacacatgcacctggcttcctttttgtattttttgaatgttccacagtgaggaggaagaaaactaaaaattaacttatctctagaagacaaaacattttttctttcctagatcagttaagttactgtgacaagaatacccaaccataagaagaacagggtggaaancaaagatctgtgtctcatgctcaccttatagcacctgtatttatacagaaccaccaggaggatagtcatgacaacaatgacactgatcatgatggcagcattcagaattgagtgcagggctctctggcccacagtctcggtatcttctgtgaatggggtatagattctacaataaamcaaacmcmaaagccctagntcagtgttaatgragatcaccamccacattaccacctccaacacagaattttctttttcttaattcaattcgnatcttataagtcacttttccccaactcaccaatcctagctaagaatttttaacctgagaaaaacagctacactctaaaattgcttcaaagaaaatgtctaacatatggaaagaaggacttaacatgtgaagcagacactggctccat

SEQ ID NO: 307934 - DNA, 1000 bp, Homo Sapiens; identical to SEQ ID NO: 119883

SEQ ID NO: 307935 - DNA, 1000 bp, Homo Sapiens
tgatggctatcgtgagtagttagataatgatgggtctcctgatgatgaggataatgggcaggtttttgatgtgggaaatattgagagggaaaggagtgaaggggagggggagagggagaggaaagcaggggaaggggagagggagaggaaagcaggggagcgggagagggacagggcggggagaggagagttcactgaaacaaacgcgcttgacagccccgagcacatgcactcagctgtatgacaaaaggcccccacatgtgcactgcgaggtcgctcaaggctgagcccaaagaacagtctgtggacatcaggaccctgccctccctaaacagaaggccacgtgtgggatgagaaagaagcaatgacacccccttctccccacctagtaaaacagcccaagagaatctggggtcccctctcctgtgcagcctctgctatgacttttccccatggaaggagaagcatcactgtaccctgagtccagagggccaacagcagtgagtggtagtggggatgatgctgactctcgccagcttccccctaggtgttccttggtcatctcaccccacaactccacacctccctcccagggacaaggcccactcaccatccaggccagccctccccaccctgcacttacctgcatgctgccgcttcttcctgcccacagcagccccaatgattctcagcagctcctgctcagaggccccagctcgcaggtgatcccgcagggatacctcagagtttccaaagaggcagacctacatgtgggtgaggacaatatgccttccttacccctgagccttggcctcctggcctctgaggagctaactccttccctggttctccctccgggaggagcaccagggcccaggcctcccatggcagggcccctagcagtgagagacagaggtgctgtagggaggtcagagaggctagaagagcaagaggcaaaattcgacttcccaatacctatatgtgagttacagtcatactt

SEQ ID NO: 307936 - DNA, 1000 bp, Homo Sapiens
agacaccagtttctgttctgtcagaaggtaggtattaccttccaagctgtgaagtgagtagagtcccttttgggaataatattgctctctggagaaagaatataacttctaggaactcctctgtactacttctgcatgctgttgtactcttttaattttcatagtttgtcagcttgttttttaaaaagaaactcttccatgctttagaaggagaaacgaaaacaatatacgtaccttgagtgtatactaattaaaggtttactcatgtatgttcgtttaatgatcagaataaatcttcagaggcttgtaaaaggcagagctaaatttaaactcaggactttttatctgattccaaagcattttttttctaacatactttgctgttgtgtccttttcatcatttcactgaaacatgtttgttgaaatttcacacctggtaaatgaggggaaagaatagggactaagcagtttttaagaggcagggtcttgctctgttgcccaggctgaggtgcaatggccagatcatagttctttgtaacctgaaactcctgggctcaagctatcctcctaccttagccttgcaagtacaagtagctgggaccataggcaagtcccaccatgcttagctaattgttaaagggttttttttattttaaaggatggggtctcgctgtgttgtccaggctggtctcaaactcttgacctcaagtgatcctccttgccttggcctcccagaagcactggcttgactcttacgttgttttttaaaatctcctcttctgactactctttgagattacacagctgtagctgaggatggaaatgttattgaggatgggaggtggaagagcattgaaacttttgaatagggaaggagttgaatgggaactgcagaagcttataacacctttctcttcaaaattttcataaagctgttgaagttctcatcttaatagggttttttaaagcactttagacaacttatcttttccaggtagcc

SEQ ID NO: 307937 - DNA, 913 bp, Homo Sapiens
cctttggaagtccctccagcagtggctacagatccagagcactctttgggaggattatgaaatgaggcctctttgttattagcctagccccagctgatttgtcacgggactggggcacctccagagtcagcagtgctggcatgggcatggctgtctacttcaaatgtttataatgtccaccaccccacccctggccatgtcctggacttcgggaactacagggaaacaggaggaaggacccctgaagaatgagaggtccaggatccaatcttaattctaaatccaactgcatttatgttttcaaatctaattccaagtaggacacagcttctataatcatacaactcagccttgacccctatcttgcccctgaagcccacctggcctggtaagcaaggggtagcaggtgaagaagttagaaagcagaactggaggacacaggaggatttccaggcacagggaaatttcaagggctgcttcagcagatggacaccagcccagagagggcccaggaaggtgactcacatctgaggttgcacttctctgtgagggagatccgcaggtagctgtgctgccggccgaagctgtctgtgaggaaggcggagaagggggccgcatgctcccgcaggaactgcctccgcctggacacctcctgcgaggacagaccagggaggaagcatgggcccctgctaccgggctgggaagaggcacaaggagaaccgcctgccccctcccttactctgacatctgtgcggagcttccaactcttccacatgtttgggctctgcaatgttggggaagctgggattgtccctctcgttgagaaatcagcttgatgggaaggacccaccccttaagtattcagcttgggggtcgggggcggatggtgatctctactgggaagatttctggc

SEQ ID NO: 307938 - DNA, 1000 bp, Homo Sapiens
tttttttttttttttgaagttaaaggacactttatttactgacagattgaaaactgtaactccaggtagtgcaaaatgcaccacaacccaattacaaagaacaggtgttaacacacaatgtttaaacaatgctacactcatttttggcaaagtgctgtattgttcagtctgtgtacaaaactgaccatctatgaaccaatcagtataaaaaatttctataaaaacaaaatttagaccgtggctcaagaaaacaagctgccatttatgcatagattgatgtacagtaacctaaccaaatgtcccttttgaattttcaagttactgaaaaaaaatgtgtcgagaaacacattaagaaggcacatgtacagtctacaatactcttcagtctccctaactcatgccctgcccctataaaggaaatatgttcacaattttacttgagaaaaaaaaacaaagccacttaaaaaaaaaaaaaacacacacgcaattattaaagttcaaaatctctggaggaaaatacaagcaaaaccactcatacactccaagcctgaaacacacatctaacctccccaggtactggtttggttttcagaggtccacctagaaaacaaatactaaaacttcaggcaaaacagagcaaaactggacatttaacaattacacaatttttaaaagtgtcgtaaaattctcaactatatacaaaacattgtccacttaagctgcctgcctttcaagagtaactctcctcccatgcaaaggatactgttgcacataaaagatatcctcatctgcatgttttccagtacctctttctccaccctaaacagttgaaatttaattggtctcaaatttcaagtgaaactgatacatggcaaggctgacaccactgtatcatgtaggttttctaaataaagcattttatgtataattttaagcattaaagtaagtagatagggatgccatttctaatatatcagcatggctgatggcagtgaaacca

SEQ ID NO: 307939 - DNA, 1000 bp, Homo Sapiens
ttgtgaatacaatgatgtatttctttattttcacatacactctagctaaaagagcaagagtacacatcaacaaaaatggaaacaaggctttggctgaaaaaaacatgcatttgacaaatcatgttaatagctagacaagaagaaagttagctttgtaaacttctacttcatttgattcagagaaacagagcatgagttttcttaaaagtaacaagaaaaggaacaaaaaaaatgaggtttgaaatcttttaccatggcaaaacattaacatctttctcaaaaacatagagaaatctggaaaaatcaagaagataaaattctggaccagttagtgacattctttcaagcatacttgtaaaatgtttccttaaagtgttcttgggatgaaaatgattgtcatgtctccaacaacagtgaactgatgttgttccttggaataaaagtcaatccccaccttaaaaaatgtatggcttctttgaggaattcttatgtcttaaagactttttacattctagacaattaaattgattgaggtcataaattaagaagtgaatagttaccactacacggtaaggtaagcagcctgaaagcatttgtatcatatatgtgtgtgtgtgtgtgtgtgtgtgtgtgtgtgtgtgtatatataaaataaaaaactcctctacttgtactttggcattcaatttttagaaattcagtctcaaatgccattatggtatttttcaaatgatacctttaagtcaatggtttctttcgactgcaatagagaagatatggcaagaaaaatgttgcagtaccatcttctgggagaacattcatgaaatccttcagttctagttccacagcaacaattgacaatgtttctgtgtagaaaagaatatctgaattagaattgaaagtctgtctttcattcaatctcttcttacttaaccaaccaattagaagccagttcaggccaggcgtggtggctcacgcctgtaatcccagcactttggga

SEQ ID NO: 307940 - DNA, 22 bp, Homo Sapiens
cagtctctcagtcatgccctta

SEQ ID NO: 307941 - DNA, 21 bp, Homo Sapiens
gtcacatcctaaaagtccagg

SEQ ID NO: 307942 - DNA, 21 bp, Homo Sapiens
catgaggaccgacatttgact

SEQ ID NO: 307943 - DNA, 20 bp, Homo Sapiens
ggtgaccgttggacaaactt

SEQ ID NO: 307944 - DNA, 21 bp, Homo Sapiens
ccaggttttatacgcaggtca

SEQ ID NO: 307945 - DNA, 23 bp, Homo Sapiens
cctgtctagtatcactgcaggct

SEQ ID NO: 307946 - DNA, 22 bp, Homo Sapiens
gtgtcagctacagagatggcta

SEQ ID NO: 307947 - DNA, 22 bp, Homo Sapiens
aaggctaaatgtgtggtagagg

SEQ ID NO: 307948 - DNA, 22 bp, Homo Sapiens
ctacagcaaagtatggcaactc

SEQ ID NO: 307949 - DNA, 1000 bp, Homo Sapiens
gaattcggcacgagattaattataaagggagggaaaatagtaacttggctgtggagaagcctagcagacacccctttaatcaagtgatcaaagtgaacgttgttggtatgggagaagttgaaatcacatgccttctgataggatgcactgggcagaacacaaattgagagacagccttcaaactcaagtatcaaggtcacaaaagtgaaggaaagttgacaaactgttcctaaactgaaagagacaaaagagacttgagaactagatccaaggcttgattctggtctagatccccttgctatggaggacatgataggaactcccagtcaatctcaagaatggggtctgcaggttggatggtggcaacatgaccggtgcaagcatcctgagtgttgcaagtgctttggaaaacggcagcatgcttgaatgtgcacagatcaccagggggtcttcttaagacgcagactctgactcattgagcctgggtggggcctgaggctcatgggacctatccaatcagctccagctgtgcccattctgctggcccagggatcgtacttggagtagcaagactctagtgaacctatgaagagtatttgctatttacctcccaaacacgcaccttccccttcttttgattctaaactctaattttcctttgggaacatcctctcctgccctctgtgcacctgttttgggtcagatagtccccaacactcaggcaagaagtgtgcaacctgggcctctgcctccccatcctctggccactgtgaaaggttcaaggctggttctgaaacccaggcagggccagtgtattcatctgctctcacactgctatgaagaaatacccaagactgggtaatttataaagaaaagaggtttaacttgactcacagttcagcacggctggggcagcctcaggaaacttgcagtcgtggtggaaggctcctcttcacagggtagcgggagagagaatgagagccgagcgaagagggaagcc

SEQ ID NO: 307950 - DNA, 1000 bp, Homo Sapiens
ttttttttttccttcgaaagctttattttgtgagactttaaaccatgaagtgtctgaaacctatttctctaattcatcacattaaattgggggcatgtctttactttcaggcttttgaggggaggtatgctacattttcaccatttgtatgaatgcagccacggaaaacttcacatcagctcagccctcggtttagttttcttcggaggagacattagttacagcttgagttctcagcctgccccactcgaaggcgccagcagggactctggatcacggggccatgaactatggagtgagtcttctgtcatccaggctggaatgaagtggtgcgatcatagctcattgtagccccaacctcctgggttcaagtgatcctcccatctcagcctcccgagtagctggaatcacacgtgtgtgccaccatacctgggtaattttttgatattttgtagagatggggtctccttatgttgcctaggctggtctcaaactctgggctcaagcgatcctcctgcctcagcctcccaagatgctaggattacaggtgtgagccaccgcacccggccaagtctagaattcttaatccagccatcttcctggtcatctccttattctgtctcctgtttgttggaagtggcaggtgaaagtttaataccaggacaataattgtgtaaagatttgagcagtttggtcagatgatccagccgtgtccaaaacttttgttggccccgagatggcatcactcgagatggttagtcctagctctgcctcagcccagtctgtcacccttcgctggttctggaatgcagtttgcatttggccatcactgtactaacgctgtcagatacgccccagtttactctagatgcatgtgtgtcaggaataagtctttatttttatggtgctgttcctaagactgctctgtagccaagtgggccaacatgacttccaaaatctaactgcctcgtaactgttcccaccactgtcaccatggact

SEQ ID NO: 307951 - DNA, 1000 bp, Homo Sapiens
taaagacaggagaaccagaagagtaagggatcaaaaaagtcagaagaggatagagatcaggaaggagagaatacaaagtaaagagaaaacatatgcaaaatattatgaaagtaatgtggaacttggcaacaaactgattccttcctatctcatttctcttacatgtaaatatgatgccaaattgaaagtctggatgattagaagaatagtctaatcattagaagattagttaatctatgattaacagaaataaggaacacagaggaagaataaattgattgggaggaaagatgatgaatttcagttgtgacacactgattctgcaattagggcattaatggctaagaaacagatgggaaactgcgacaatctcaggagaaaggtcaaagttggaagtaaatattggaaatcatctgcacaaagattttagtgaaatccatgaaattcccatggaaaagaatatcaaaagtgaagaggcaaagaagatatacaaatggtcaataagcacatgaaaatatgttcaatgtcatgagtcattatggaaatacaagtcaatcataatgagacaccagttcacacccactacaatggctataacaaaaaatactgataacaagcattggtgaggatatggagaaaacggaacccgtctacactgctagtgacaacgtaaaatgccactagcaatgtaggaggcatggcaatataaaatggtgcagccgctttggaaaagttgttcagttttttttttattttttttttaagagttaaacattgagttatcatatgactcagcagttctactgctgggtatctactcaagagaaatgacaacatatattcatataaaaacttctaccaggccgggcacggtgactcacgcctgtaatcccagcactttgggaggctgaggcaggtggatcgccttggtcgggtgttcgagaccagcctgaccaacatggagaaaccccgtctctactaaaaatacaaaattagccag

SEQ ID NO: 307952 - DNA, 1000 bp, Homo Sapiens
cagctgtttatctcccagaacactgggaaaggctgtgggtgggtaagatgctcagcggcccttgaaactcatctcagttttgctccaaatgtgcagccctgccactcctgtgaacaggaagagcactggaatgagaatcaagacactgggccctattcctcttgacatctgaatatcttccccatcccagcatttcccaggggcctgggagagggacagttgtctcatgtattgtcctgctttgtctgtgtattgagcacatactctgtgctggatgccttctagatgcgtggccggggttgtagtcctcattgacgaggcaaggttcgagcaatgtttgcaggaggtggtgggtcacccaagcagatatcttggcagagagcattccaggcagtgggaatggctcatgcaaaggccctgaggcaggagcatgaccggcatgcctgaggcccagaggggaagcctgcatctgtcctggtgtgagcagaggcaagcagcagagagctcagggacagaagtcccaggttcaatggctgaggctgttgcaaggctctagctgtcactcagagcagccagggagccagcagagggtcctagccagaagtgggttcagctgcggctcaggtgttaacaggccacaccacaccagcagggaggagaggggggccagctggctggtccaggtaagtaatgaagggtgctcaaactaggtgggagaaggcagatggtgagtagagtcacctcaggatcattgtgaggatgtcacctacatgatttgctcatggacttaatggggatggggtctggagggaaaaggagagaccagtccacaggccccatgagccatatagaagccagactgaatgggttttaatttcaactcagctagcagggagctatgtgactgcacaggagccgatgcaaactggacagacagggacatcctccctggactactgtcccactcatccatccattcatccattggcccacctctagt

SEQ ID NO: 307953 - DNA, 1000 bp, Homo Sapiens
gagctcgaggatcgcgccattgcactccagcctgggcgacaaaaacgaaactccatctcaaaaaaaaaaaaaggaaatccactagatcgaggtgcttggaaaaacaacccatcactaaggatccttcccttcctcttctccattaataccacctttgtaaagattccctccggtaccaccccaaagaactgaagtgcagataattatttcccagaatgttgtttttacgctggtgaaattcaacggcaaacattttactaacactctcctccttttcctacctgaggtattaaaacttggagtcagcctgggtaatattttataggaaaatgctcttcatcactgtacacctgtgcctaccatggtacctggggcatctagtaggtgccagataaatatatatgtacattttatatatatatatatatatatgtatgtatgtatatatagttttttttttttttttttcccgagacagagtcttgctctgtcacccaggctggcatgcagtggcgtgatcttggctcactgcaacctccgcctcctggttcaagcaattctcctgcctcagcctcccaagtagctgggattacaggcacgcaccaccatgcccagctaatttttgtgctgttagtagagacgaggtttcaccatgatggccaggctggtttcaaactcctgacctcaggtgattcgtccacctcagcctccaaaagtgctgggattacaggcacgagcactgcaccctgccacagacaaatatttactgagggaattaatgagaagaatctgggagaaaagaagaaagcagagatttctaaaatggaagaatttcccctagaattatccagaactgactgtgtaataaaagtacactttttccttctttgcttagctaagtattggggaaacatttaaaattattaaaaatagagggagtttcgggagcctgaaaagtctttagaccccaaaactgctgggatcctaggccttaagattc

SEQ ID NO: 307954 - DNA, 1000 bp, Homo Sapiens
ccatatgcccccggccccccccaggaaaaaaaaaaaaaagggggtgcccctggcaaatcaggtcccaggggtttttccaggtctggcccctgtgtgggtaaaaacccgaaaaaagaaggggaaacaggaatcccttaggaaatggtccgtaaggcccaagagcctggggtccccacaaaaggggaaaagtttgcctttaaaaaggacaggcaaggcctttttttttttttttttttttggagacggggcctcactctgttgcccaggctggagtgcagcagtgtgatctggctcactgcaacctccgccttctgggctccagcaattctcgtgcctcagccacccaagtagctgggattaccaacgcaccaccaagtctggctaatttttggatttttaatagagatggggttttgacatgttggccaggctggtctcgaactcctggcctcaagtgatccgcctgcttcggcctcccaaagtgctgtgattacaggtgtgagccaccacgcctgactagggcaggcatttcttaatagaggtagagatgtctgagaaaatgttccccagggcccaggtcctgtctaaagagaatagatcaaaatcatctaaagcagggctcaggaaacattttctgtaaagggccagatagtaaatagtttaggctttgtgggccctatggtgcctgtcacaacagctgtagaactctgctgctgcagtgtaaaagcagccaccgacaatgcgtgagtgggtgtgctgtgttccaataaagctttcgtttcaaaaacaggcagtgattacaatcgttaattttatgttatgtgagtttcacctcaattaaaacaaaagcaggccatgggtttgatttggcccatggggctgtagtttgcaaacacctgttctagacagtggggcaagaggggtgaagggcaggatggggaggagcacttggggacttagagaagacaaggactgtgctggcttccatgggtcccatgaa

SEQ ID NO: 307955 - DNA, 1000 bp, Homo Sapiens; identical to SEQ ID NO: 119885

SEQ ID NO: 307956 - DNA, 1000 bp, Homo Sapiens
atggtaaaaatggtttccttatgcatccctttgcttaaaatcagagtttccaagaacttatccagatgttaaatgaggacttttcaacatattggttttgccagtaagactgtgaacttcatcattgttgttgaactgctgggtcaaaactcaaatgaggtgaattttgcctttaaagggattatttgctaagaaccaaccttaaatagtcacagaaaatcaaatattagttgtcagtataagtcgttcatatatttaaccatttagtttgaggctctatattacttgattcttttttattgatacataataattgtacatatttatgggaattattgagtcttaaatgaatgtggttttaatcaatggtttacctttgaatggttgtaaatattgtagataatcttattgagaactgtgcaaacatgaaggtgtggtatcaaacttcaggtttaagctgtttgaagcattataaacattcatttcacaaccagattgcttaaggatgttggctgtggtgagactcactgggttatttttttcaggagtgagctttattaaatccgcattccattcggcaggcatgtgctgaaagagcattatcattggtgttaatggacaaatgtgttttttcattgtatttgggccttttgtattgtggtcttgatattaaattaagtgcacctaaagaaaaaaaaattgaataaagcaattctacatgtactaatgtggaatagctgccaagatacattaagtgaaaaaaatcaaagagcaagacagtgtaattttgcatagtaccatttttattttgaaagattatattaatgcttggtatgcgtaaaatagctctggaaggattcaagaaagatctgcttggttacctctgagaaaaggagttagatgttggaaacaggggtgggaggaaaattgtttatattgcataatgtcttttaacgtttggattttgtgttgtggctaaggtagtacctattagaaataa

SEQ ID NO: 307957 - DNA, 1000 bp, Homo Sapiens
cttggagtagctctggctctggcacctggtttcccctagaaacttccaccagaccccttcctaatctggaggagggcacggtccaccgtcgcctcccgcagccctccccagggcacagactgaaacccctgcggggtgaaaatgtttttattataactttggtcagacggggcacagccgggcgggggctctgagggtgctgggaagctatccagcccccaactcccccctcccccgggcgcgccaccccggagggagccgagggcagctcatctcagagcgcaggaagcaaacccgccgccgcgacctctccccaggctggggtgggctggcaggcggaggtgggcagtaaacagtcctattgtacaaatatatagcgcgggctgggcgggggcggtcaaccccggttccctggcacggggacagggcgcgctgggcccggctctgcagcgagccggtgggagggcctagctgtggcccaggcggtgttgagcacgggccgggggcgtcatagccggggagggccgggcagcgagcgggtgggcgaggggcgagtcatcgtctgccccgcccggaggggaccccggcgggtgagggacgtgggtggagggagacgtggggagctcagtcggagtagatgatgaagccagagaacgtgctgtatttgttgctgttgccgccgtgtgctttgcctccatccagcttgatgaagacctcgtcgccggcgtccaggtgcaggatcacgctgttgctggcgtagtcgtagttctggtccgcgtcctgggcaatagcactggcccgcacctgcgggtgggggacacgggagggagggcgagaggagagagaggatgagaagggagggaggtgaggcagtcccgtgggggaggatcagcagacccagaaacctggcctccagcctcgcctcatccctgccacgctccccctcccccgcccccttccaatcatacaggacttgtttcaggaaaggggcagagaggat

SEQ ID NO: 307958 - DNA, 1000 bp, Homo Sapiens
  misc_feature (951)..(951): n is a, c, g, or t
ttgacaatttccagagaggaaaaatgacaagacaaagagaacagacttggtgtgcaaaatacatgaacaagtgtgctggagtttaaagcattactaataacattgttataataagaatgacagcttactccagggtacttcagcattcctgaggaataaacatgatttctcttttctcccactgcgatgttgtcaggtggtcactgctcctgtcctttgacatgttttccatgtagaagacatggaacctggaaatcatgctgactgctggaataagccattcctaatgccatgccagaaccaaaggctaatggccacattctttttttaaagaaggtaagtgagaaaacaatccctaatccaaaaccggtacttatctaccacatccagcaggcactggtcccacttcctgctgagccccacctctgacatgttccccacccacagctccagctttcctctcactctaactgcatttaagagacatcttgtaatgattctacatgcaagagttcaaaataagaactcctgaatctttcagctactctaacaatatgggttctgacctgatagcatcttatcactattcttgcccaagacttgacaggccagcccatattacagtaggtagggttaggtggaagtggtgtgagatgttcataaaaattaaagtgaactcctgcttctcaaagaaaacaaggtctcttttggtcaagaaaaagaggggtttcattaaatgacactcttggtaacctgccatccctttcaaatggatgtattcactttcagagtgaggttcagattttccacaatacagagagggaaaacatgagttgaggagaacctcattttcccctaataaatgctagtgctttttaatgggggaaaacaaacaaaaaccccaaagaactctggctcttaaaggaccagggtactctcatgtactaactnatagaagggataaaccagtctactcatctttctttacatcagagaggcc

SEQ ID NO: 307959 - DNA, 1000 bp, Homo Sapiens
tgctgtggtctgaatcttcatgtcctccccaaattcatctgttgaaatcctaactaactaccaaggtacctttgggaggtgattaggtcttgggggccccacccctgtgagtgggattagtgcccttttaaaagaggcctgagagagacccctcacccttccaccaagtgaagacacagcaagaaggtgctgtctatgaaccagaaagtgggccctcaccagatgcctcatctgccagggccttgatctccccagcccccagaactgtggagcaatccgtatctattgcgtaccaactacccagtctacggcagtttgtcagagcagccccaaaaggactaaggccagaactcagctgtggcttaatatttcagtatttgtcctactatcaaatggcagacacattttaattttccataatctcttccaactggaaaacatctgacaaaatcacatattatcacatacagtgcctgtaaattagggttgggtgtggtggcttataattataatcccaatgtttgttttgggaggcaggggcagtagacttgcttgaaagtccgggagttcaagaccagcccaggcaacataacgagacctcatctctacaaaaaatttaaaaattatccaggcgtggtggtgcatgcctgtaatcccagctagttgggaggctgaggtgggagaattgcttgagcccaggggtttggggctgcagtgagccatgatcaacccactgcactcagcctgggcgatagagtgacagagtgagactgtatctctagggggaaaagaagccagtaaatcaggacgaacgaaagtagtttgtgtgcagcccctcctatgtctccctataggtttacaatcatttccattgcaaataggctgacgacgccattggattcctctggattgggaatgtgattttctagtgtgttcattttaataaatttcagcaattaagaaacgacctggttgtcttttacagtttcatataaagaca

SEQ ID NO: 307960 - DNA, 1000 bp, Homo Sapiens
gatcccaaacactctgtccccattaaacaccagctccccactgtcccctgcccagcccccagtagcctcccttgtactttctgtctctaggaatttttctcttcgagaaagttcatatccgtgcaatggcacaccatgtggcctttggtgtgtggcttctttcactcagcatgatgtttccaaggctatccatgctgaggcatgtgtctgaacttcattccttcttaggactgaatacgtttctgttttatgtagacaccacatttggttcctccatccctctgtctgtggacagttgtttgcacatcttggctactgcgggtgcgagtgtttaaacctctgttgcacgctagacactgttgattggcacagatggtctcaggatgctgccgctgggtgattcccactattgggaattacggaataactggggacctttaggctcctatgaggggaggattggttcagaccccccagaagacaggataacgccctaagatattgtgactaaaaggaaagccttaagctctctagagaaatggaagcattttcctggggcttatgtgacacaacccctttgtgttctcatcgagccctgggcatattaatttcccacttcggctctttgaagaaaagtggctctcagtacccaagaccacatcatcacccgcatcaggatcgctctggccgtaggtggaagctgcacgtggcaacgatggtttcccaggctttgggcaatggggccgggcaccatgtcctcgaaggaggtggtcctcaccatcttggtgatagattttcaagaacagatgaaagagagagggatgaagggattccaaggcaggcgaggctatggtgcagtcagtcctgggggccgggtgaggtcggggaaagagggagggctggggctgggggccctccttgctaggataggagacgttagctgtaaattaaactgaaaaacttgacctcactttcattctttaacccgcttccctttctg

SEQ ID NO: 307961 - DNA, 1000 bp, Homo Sapiens
tttgttgacatcattatgtcgtggaatcaaccaccctgaacatgctccatctatggatgtttctttatgtgagttaatacctctccttctggttcaagtcaatttgattgagaatatcttggttccaaaagcatgctcctgaagccaaagtacagcatggagtagcatatttgctacatttggtaacctgaggcttcataaggaatgcaagtagtctggcattttgaagattttagaagagacatgttctttattaacaaatttctacggacaaatctcacagctggatggcaatatacccagaagtaataccattaatctttagggaaagcaatgtctttggagttcagaccacttgaatgcacacatatttgccaatcttgtacacaactcaaaattttggttttaattcatcatttcaaagtacaataaaatgttcaccagagcaaccaaataaatgagaaaaacttaaatttacggcttcaaaataatataggttataaattatttctcttagctcagcatttgaacttcctgtactcattcatcccgtaaatacttattgagctcctattatgtgctaggtgtacggaatatagaaataaaaagggcaaaaatcagtcctttaagggaatcagaggctatcagagtcctgtacagtaaacctttctgcaatgatggaaatgttctatatctgtactgtgcagtacagtagccctagccacctgtggctaaagactacttaaaatgttgctattgcaacttaagaacagaatgtttaatggaatttaattttaattaatttaaatataaatagtcacatgtacctcgtggtttccatattggacagtacagtctagatggtaatgcagacaagaaaatcaaaggtgattatatactattatctgtaccacaaaaagagatgcacctggctctaaaaagtaggaatccaggggaacagtgcctaagtaattcagcctggggctagagggcaggataa

SEQ ID NO: 307962 - DNA, 1000 bp, Homo Sapiens
ggatcctttttgctctaaaatccttaagtgagatgcaggtttccatctcagttgagagaaataaagatgattatagaatgtggcatctcgtgcttgtggctgtgaagtgctaattctctcatgccttagaaatgcttatacctaatgatcttgtgatgcacatggtttttagagaatataggttattagtttcttgtcttggtttttatgatggtccatataataagggacctcctttcctagtaatccattgcaaattgagatagaactctacagctctatccctatgaaatgtcaatggaaaatatttcagactttctgcatatggaaatggaataaattcaggattaatcgtagaaatctggaaagaatatgtgtcatgtgctatctgttgaaactgcccatgacatgttctgaaagaacaaccaaatataaaatacaggaagtaaattgtaaagtagagatggtgaaaaaactaaacagtcattttagtagagttgcttaggaaaaaaaaaactaaacaggatttaattgtaatagtttatgtgtagggaagttaagatactaaaaatagcatattgcttatttttaaattaccaatgcaaccaaaagatacagatatgccaaataacttacaagtgaattttgtactccagtattttttttaacttactacaaactagaaaagccgaagttgaagaaatgacactcttgccactttcatgattcagttgtgtctttgcatctacaagcatatgttattgaccactgccctggtcacgactctgagactcccctcaaaaacacagtcctcccaaatccactctgccaaattgaaaatgaattttgttttggaatgtagctaaggagatgcatgaaaacaccttgatcctgtactcttgttgcaaattatttcaaaaactgtagacccttcaagaattctaatagtacacaagtgactctcctattgtcctcagagcatctctttataccatgtaga

SEQ ID NO: 307963 - DNA, 1000 bp, Homo Sapiens
agcttcatcttacactcaaatagagagagagagaacaaagcaaatgtggcaaaatatgagcaattggtgaatttaggtatatggttgtttattttgctattattgaacattttctgaaatttgaaaaacttaaaatgtcaagagaaaaacggcatatgtcttttttaaaattgaaagtgacatcttgaggagaaggaaataatttgctgattgattagagggaagtgtttaaagccttatttaactgctcaaatgttcaaataggactgcagccagattggagaaaggcagaggagatttttttttttttttaaataaaaaaagcaaggagagtgaaccttggtgggccaatgcattttctccgtctttctacttcatggtaatttcctgtttgctcagaaacacacatcaaccttcccttgagattgactctggctttaagactctttgcttaagaatcttattcttagaatctgggtcgggtgctgtggctcacgcctgtaatcccagcactttgggaggctgaggcgggcggatcacctgaggtcaggagttcaagactagcctgtccaaaacatggtgaaaccccgtctctactaaaaaatacaaaaaattagacaggtgtagtggtgcgtgcctatagtcccagctactcgggaggctgaggcaggagaattgcttgaacttgggaggcagaggttgtcgcgagccaagatctcgccactgcactctagcctgggcgacaagagcaaaaccctgtctcaagcaaaacaaaacaaaacaaaaacaaaacaacaaaacaacaacaacaacaacaaaaaaccttagtcttagaatctgacaatcagtcctaaaatcttgactatttctcctagcaaaccccaaagctgactaatttttgtttaatatcccaaggaactttttacaaccacagtttcctgggcccattcctagaaattcaggttcagtgtgtttgggttggggacctagaaatctgtat

SEQ ID NO: 307964 - DNA, 1000 bp, Homo Sapiens
cactttattttcaaaattttatttttatggaattttcagcatgtttaaacttaatttttagaacaaaatccaaaagcttaaaatcagatatcttataatgtgtcacaattaagtatggagagttctgtcatttttgaggaaaatctttcataattcttaaaatgcagatatttacaacatttttaaatacagacatatacaacatggcatatttaaatgtacaaaatagttgaaattatattttatcacagaacattccaaaattcaaactaatttttaaaagtccacaaacactgatagcatttggaaaaaaatagcaacaagtttatcaataaccatgccatatgtttagtaactaacttacttatacacaacacataatttacatgtcaaatccacaaatctaaaagatatatgactaatctatttaactcacgctagaatctaaatactattttataattcataggtttaaatacatgtttcacagtaatctatgaaacaggaatataaactatgaaaacatatttaactgacttcttaagagacgaggaaatgtcaaaaatagcaaatcaggcattttttcccctgaaattaaagttcttatgaataccttcataaaccccaaaggaagaaaataaaaacaactcagatactacaacttaatttttaccttctcaaacttctgtttagagctcttggcataatcacagctcccctgggatatttttattttttcctgatttagtggaggcaactatttattccctcccttgttccaggaaaaatgtaaggtggcttagaagatagactcagaatatactagaaagtataattataggttaaataaaaaagaaaatagagaaagcagaatttgggggaatagcacatgaagccatttaagaaaaggtcaggaaatatatcctaaagtatattacattattctcccacagtgattttctggaaatattgcaaaatacattaatttgtaagaaaacta

SEQ ID NO: 307965 - DNA, 1000 bp, Homo Sapiens
gccattttaaattacagcgtttatttaatgcttctaatttgagtatattctgcaaatttatcttccatgggaacggtaacagatcatattccaatttgtttcctaattctatcaatgtcccttttgtcatttacttgccagcacaacaaactttctacacattgatgtatgatattccactgagcggagaggcaccctcctggcttaactgaaggggtgtaccacagaaggacatggtggacatcacacacagattctgtggcataggatgaactgctaaactaggatattttaaagtcctccaacatctgtaattgttttccgtggtgaacaagtgtcgtgtgtctcaagaagacaggccacagtgacctctttgaaagctttctgtcaagtctcttatccaaggggagcaaaatcacaaaggtcccaggcgattttttttcctctttcctcttttcttcataaatcttggttttgcttttatttgacgaaaacaatctgatgcctgttctcccttctatacaatggtaaattagcatgcaagtagctatccctttattattgtttgatagatttttgcagcggctatgtccgtaaaaattagcccacctgagatatatcactggagccaacagaaccctgcacccaacaggcaccttgtgcagacctggacccttacagctgttggctcatgttcctttggttcttctaatgaatatcatgagtagaaactgagctctttggcttttacccactaccatgactctagtacattttctctctctcgtttctctcatttttgtatcatgattttctgccatcaggggcatcagtgtgggttcctggttttgatggtatggagtgaacttctgggatcgttttatgactgtataacagttggtattcttctgttgatgaagatttgtgttgtacccagtttttccttagtataaaaaggaggttaataagaacatttttgctagaagtcttgttggatgta

SEQ ID NO: 307966 - DNA, 1000 bp, Homo Sapiens
gctataaaattatctgggtttaattattatcaacatcagaactatagaatattaacgtactaaacctgtatttacaattacatgtacaaaaaaaaatgttctttgtgaggagcaattttcagcaaatctgacaaacagcaagagtcattcctattttgggtttgaaaagagaaatggaaatttccaagacgcccccctcctccctctcactccagtgaccctctgaacatcaatttgcaaaggcctgaggtagaaagggaggtattaacaatatcaggcactcattcttcccctcttatgaaagggatgaatttttaggaaccgttttccatcatttattatactgatgtgccatccatctgcatcattaggttcagtagttaccatgacaatatgatgcctacagcaatctaacttgatagccacatgccagaatgtgaaaaaataggaccagctaagaaagtgagagaaatataattaatctgaaccacattcaaaaaaatgtgcacaaaactaggaccaagagggaaactgctgaaatatcattgaagaggaaattataaagggcagcaataatcaagtttcagtataaaaactttgctaaatagagccatgtattggtctattactaagacaggaagtagtcaaagttggtctagaatattgttctgagcccctgcccctccccctgcttcccatttcttgctacagggccctgcggtatcatctttgattctagctgttagggccctaatttccccaaggctctcaagccaccaccataagtgccaccaccatgtcactctgctcatgtgcagtctgctattagacccagactttccacctgatgaaataatttccatcattgtgaagttaatcttaagagactgaattgtgctgtgtcttgagagatcctgtcctcttgccttctaagtgcccggtggaggcatcgggctagcacaaacctcttgagggtcccaatatggtagagaggggctgg

SEQ ID NO: 307967 - DNA, 452 bp, Homo Sapiens
ccgctctgcctcttaagagctgtgtgagtcaattggcaattattcagcctgtttcagtttacctatctataaatgggataaatagcgccacaggttattatgcagactttacaactgtacatggctatatataacacgatgtaagtgttctgtacaattaagtccccataaaaagccacgtaataactgtgtaagaggcaacttggtaaataaatttaaatcaccttagaacggagtgactctggagactcgagcatatgaagaagttctgaattatcaatctccaacaacatgccagtgattttaccagcaagagtagggtgcatggcttgaataagaggaaacagccgttcacctaaggaacagaaacattcaaaaacctcccttcaataaaaaaaagtttttaactgcattgaattaccacattaaactggggtttaagaaccatactt

SEQ ID NO: 307968 - DNA, 1000 bp, Homo Sapiens
gagctccggagcacccactggagccacggcctccctcccactgcacactcccagcactgagctggggagccagggcgcctacctgtcccgccagccctcccacccacctcagcccccccacccacctcagccccaagacacacacaggccggcctggggctgcagactgagttattttatttcgctatttccagtttgaagctactatcatgggcgtttagagttatacaaatgacacttacaaaaaataaaagaccaagacacccagagtgagatgcatgttggggacgggggaggctggcagcaggggggccccggcggctcaccccagggctcccggagggggcgacgcctggcttcatccacccgggaggcccagggagcaccaatcacagcaggggctctggcccaggtgtcggcagcccaggcccagggctggggctggacgggaaggacggaaagagggggctgagatgcaccccctggggagggtgctgagacgccccccgccagatcactcgctactacagccaggcttgcctgggacgcctccagcaataatatttcattaaaaaaaatactgatttggtcattttctgcttccagtcaggctagggtgaaaggaaagagacaggaggaagacggcccccacacccctacccgcccgccaccaccaccttggcagaacgtgcagcgggcagaccctgtggccgtcacgccctgccgctccagggaagggagccaggctgagcctctgccacgtgggagaggggctgtttccagccaccacccaaaaaaacaccacaagggtcagtcctagcccacccgacagcttcccttcccaagcaggggtttcggggacagtgcaccagggagggccactgacaggcttgggacatgtgcccagctctcctggggggctgggaggaggtggctgggagaggcaaaagattccagttacactacacgcccagggctcccagcccccaaccgtccctta

SEQ ID NO: 307969 - DNA, 1000 bp, Homo Sapiens
tcttgttatcctgcaccttcatgttcttgtcaattgtatttgtagccacgtgcttactatgtttccttcctgtgattgggaacttccagaggtgagggatggaattttcctttctctgttggtccctcagaacccaggataggggtctgccaaccaaaggaacggaccctgaggataaaggcaggcaccatggttgtggatctttgccaccttcaagtgcatatggagagtggatgtggacagaaatttgataacagtaagtaacagcagctgctatttgttgagcacttactagatgctgagtgttatgctagttctttatttacattatttaatcctcacaacaaacttctaagggaggtattattattggcaaatgagaaatctaatgctcagagacatggagttaggatgcaaccacatctgtctgactccaaaaggatcacataaatagtagaattcaatttaaaaaatatgtaccgggcgtggtggctcacacctgtaatcccagcactttgggaggccgaggcaggtcgattacctgaggtcaggagttcaagagcagcctggccaacatggtgaaaccctgtctctactaaaaatacaaaaattagttgggcgtggccaggcacggtggctcacgcctgtaatcccagcactttgggagatgaaggcgagtggatcacctaaggtcaggagttcgagaccagcctggccaacatggtgaaaccccgtctctactaaaaatacaaaaattagccgggcgtggtggtaggtgcctataatctcagctactcgggaggctgaggcaggagaattgctggaacccaggtggcgaaggttgcagtgagctgaaatcattccagccctggtgacaatagcgagactctgtctccaaacaaaacaaaacaaaaattagccgggcgtggtggcaggagcctgtaatcccagctactcaggaggctgaggcatgagaatcacttgaacccgggaggcggag

SEQ ID NO: 307970 - DNA, 1000 bp, Homo Sapiens
gatccttgggctccgtaagttaccaggccaaagtgagaacaaatccacatttgctttggttcagccaacagaaggtaggcctgtttcagaaggagctctaattggtatctaaggaatatccgacaccaagaggcgaagcttcaaaagaacatcaaaggagatatggtcacttggcctttgggctgagctggtcaaacggggtgcttggcaagacccgagccctggccagggagggccacatactttttctggagtatgagtggcaatgtcctggggagttgtctcacctgtgaccacagattggccagtcatactccccgtgccatacctgatggcaagcaggggaagctctcctcttttaggccaggctgcttccctcaccccagcaggtgagttctccattcccatctgtctgagggttgcctccaactcagctcccttccctgtgggtatccagtccccctttccctttcccccacacaggataatgcccaggtatgtgcccctcactcactcctggcatctccccttcctccatgactgccctgagcactggttcctcacatactcctggtcaaactgtcctgcctgaatggatatacatgcccctttattatcatactagctaacatatgttccaagtcctatgctaaacagctcacctgtgtgatcttacttaatcctctcagcacattgtaagggtaggaccatcccactctcattttgagaggagaaaatgaggctcagagaggttacagcgttaaaaagtaacgctaggatttggacccaggcaatctgactcccgagcccatgctctcaacactaaaccataaataaacacaggagtagacattttaaggtagaagcatggaagggtttatgtcacagaatcccgtcctgggaaaactcaaggtcaggtatggattttttggttacgtgatatgaagagatcattttttttttttttttttttttcaggcagagttttctctgttgcgca

SEQ ID NO: 307971 - DNA, 1000 bp, Homo Sapiens
gtcaaagatatatcagacattagtcaaatcgatgaaaaccaattttattcagtaactactgaccgtagaggaaggggctggttctgttcgcatttgtgcagaggtgatggcattctaatgggagagagaggcaggggagagggcagggggcagggcacaagtgaaacattacaaaagattggtcattttaaatgtctgcctcatcaggacagctgtgtctgccagctggcaatattagaagttaggattctaacctcccacagagactggaagacagaggctcagtccttcctgagaactacacctcaaaagtattgcctttcagatcctgggcaaagatacattgaagtccctaggagatacacacatatatcaaagggatggaggaaggattcccttcttagtaagtgctataagaaagaaagatcctgaaactgccatcatcaagtattggctagactaaagtaagttcccctggcagccttgagctttcttaggtaggcattgtcatgggagcctagggtcattcgtgagacatggtctcatgctactagaagccatgatagactctgatcatctcttagcacagaggtttaaactcagtcgttttgtgctgagtttggtggttctcactttctctctccccattccattgtcaggattttactggactctgttagatggacaaggccatgggccattttcaatggtttttaagcagctgaggcatatctattgagaactaaattaaaataaaaccatgagattgagagtgggccccacaataggtatccattacccatattcaaggagatggagaaaaatatttctagactttgtcaaaatggaaagtgacttatgcagccaggatgaaattcaaacttacattactgaagtatagagcttattgatattttttaaaagaaagtcatggcaaaatgacaatccacaagtggcaatggtagataggggtagggagaaactctgtaaggtcaaaatt

SEQ ID NO: 307972 - DNA, 1000 bp, Homo Sapiens
gggtgtgtgggctcatttatttgttctttggctcattcattcattcatcattcatcagtttcttgaatgcttgtacacacttatacatacacaggatagagaaatgaattggcaaaggaatataatcgacaagcatggggattaagggagcatggaggaggagcatttgtttcagtttgatatatcaggaaagacttcctggaggaagtgagctgaaactggccaagtgaagaggaggaggaaggtcatggcatgtagacatgtaggaagagaaatagaagtatacaccccaaactacacacagtttgggttggttctattctaacagtcctacccctatctgcaccccatcaactctctggaatcccaggtagcaaggccatagagaaggcacagatgcccaggagtcaacactttattttgttcaggccaaccacactgggagcccagcatccccgcaggatatgcctctgtgggctcatctcgcctcttgagggtggccatgctggctggctctggccaccggggaggcctggccagtctctctgtctccaagttattgtagagtcgggaagtcttcaagggcagcttcaaggaggctggaagcaaacataggtcagagttgatgaatgggacaaaggatgggtaaggtttttctttttctggaggcagggtctcactttgtcactcaggctagtgtgcagtggtgcaatcatagctcactgcagcctccagctcctgggttcaagtgatcttcctgcttcagcctcccaagtagctaggattacaggtgcatgtcactacacccagctaattttttattttgtatttcttgtagaggtggggactcactatgttgcccaggctggtctcaaactcctggcctcaagtgatcctcctgcctcagcctcccaaagaactgggattatgggcatgagccactgtgcctggccaggaagatgggtacattttgatagagacaatgaatggggtggagggc

SEQ ID NO: 307973 - DNA, 1000 bp, Homo Sapiens
gacagtgtgcctctgtgaaaggtttttgcactggggtctgaagtggcaggccatctcctcccctccttgtccctgccccacatggcgcaagccatccccttctaggcctcagcctaaggttgggcttccctctagtgggcagagggagcagcacaggcaagcatagacccataagagagggcctcgctcacccctcgcggactccccagctgccctcggcaccagaaaggagcaagcacctgcatgcacctctgtgcctgcaggaggttggttaccccttaacccacaacccaatccctactttatggcacaaagtagatgctccataaatatctatgagtgaatgaattcatgtcaggcttataggatcccatgccccttcctctagaaaatccaaggttactcacctccaaggcccccgcccacagaggcaaacatcagtgtgacaaacagcccgaagagctggtgcatggcctgtgacgtggcactgcgctggccctcggctatgagtggaaacacactctccaggctgcagggagaccagatagaggaaaggcaggggtagggagagagagggatgcagcccggggccagggctgctcatggcactggaactcacaatggggaacaggaagtggccaagagggtctcgagggtgcatgccaggctgaatctcacctccaggccactgctcaagccaggcccacagcctggaataccttcccacccttgtaggccagcagacacctaggcaccttttaagactccatttgcgggttgcttttgcccacccttgatgtgcaaaaatagatcctaaaggtcattatctcttactgacccttcagtaacaagtaacactcttgaagtcatttgttccatgaccttctgctgcacttgatagaggaccaggaaggcagtttctgggttggttttgttaactccaatttcctttgctcccagaatatggatgaatgaatgaattcattcttttttcttggtc

SEQ ID NO: 307974 - DNA, 1000 bp, Homo Sapiens
ggaaggttccagacaggaggaactgctgtctttagtgctaatcccctcctcctgttatctgttttgccttccacagaacaatcccagacggccttactactgagtgttctggaaatacatactttctgaatgaccaaccgtccctggactgtggaatgttccggcctgcatttctgcccaccccttccgttgtcacgagtgccgtgccgtgtaataaagtcccagtgctcatccaccacagatgcctggtcctgttgcaggaagcccctcctgttagcagcgggatgcaagatgctgtctcggggctctccttattggcctgtggagtctccatccccgctcagcctgggttgcactggaggggaggaagaaagttgttttcagcatagtaaagctggaaggccaggtgcagtgtctcacccctgtcatcccagcactttgagaggccaaggcgggcggatcactggaggtcaggagtttaagaccagcctggccaacatggtgaaatcctgtctctactaaaaatataaaattagctgggcatggtggtgcacacctgtcgtctcagctactcgggaggcagaggcaggagaatggcttgaacctgggaagcggttgcagtgagccaagattgcgcctttgcactccagcctgggcaagagagcaagactctgtctcaaataataataataataataaagctggagacttggccacacctgggctaaaggaatgtcaggaacctccgagcctagcactgtgctgcagagggaggttggggaggggtctccaggcagggccccaccttccctcagacctgtgggggcaggtggcttctgggcacacccatgtgctctcctggcaggtggtgctggcacggcccagcacacaggtgttggctgtggcccttcaggtcccaccagtgtggtaggcacacgagtccctggggcttgtgtcgttaggggacagccgcatggatgcatggatgtgccatgccaac

SEQ ID NO: 307975 - DNA, 1000 bp, Homo Sapiens
gccttcaagtccagcgtcgcaagcatggcaataccccttcttctactaattggttcaaaaattagcagggctattatggcggtgagactgtaatccggccactcaggaggatgagactggagaatcgcttcaacccgggagatatttgctgcagtgaacccagtgcaccactgcattccagcctgggtggctgagcgagagtccgtcttaaaaaaaaaaaaaaagacacaagaaagaacagaccaaaatactccattgtttcagaacatttccccagaagaccccaaacgccctgagtcaggtcaaggaggtggtgctttattttacttgtctctctctctttctctctctctctctttcttccctaactgttatttgtttttgaagcatacatgtgcaagattgtttcataggtaaacttctgagtagggggttcagtgtgccgatgatttcctcacccggattctcagcgcagtcccctacagtttttgtgttctgctcgttttgctttgtcctgaagctgtctgtccttccacacgtcctccctcaggtaggctcctgcgtctctcgtccccctagttcttcgcatgcattctcattatgtagttcccacttatgtgtgagaacacgcggtatttagatgattattgtttcatcttcggtggtggtgatgaaagaggcatgacactacatcgacccttaggacgctcccctccatccccaccctacaccccctccccacgcacaccgtctttcctgcaccccctcctgaaacccaacaaacgaagaaagacagaaattaaagtaagagttcagcaccaaggcggtggtggggggggatgtcaaacggtgagcaggcgatgggagtatggggatgtcatggcctaggtagcaacaataggggaccgactttccagcccccaccccacactccctaatcctcagccatcactttggagttcatccaaggaaggctggtctcagggactacatacctaac

SEQ ID NO: 307976 - DNA, 1000 bp, Homo Sapiens
aagcttattctccttaccctccttttaatagatgaaggtcagaaactcagcttaacttacttggcttaagtccacagaactgaaatgtgaacccacccttctgagtggctgtcttttcaagtttcacttccggtgcaaaaaaaaaaaaaaagtcaaattttgaacatgttgatttttgtggaacttcacacttcaaattactcctgcccaagagtttttcttatttcttttcttaaaaggactagtaattattacggagccaactaacttttcaaaagtctctttccatagatacagaaaaactgccccaagttattatgtcccctgactaactgcctgaagacaattaacttcctgaattgttaagttcagcactatatctggtatattcctttaggttccatggaagatgggttcctaggaagatggggagggaaaaaaggaatgggctagagcagtgggtacagcatggccatctgccgcctactggcaaggagctgatttgcttattgcaactttttttttttttttttgcttttctacttagcattttattggttacagagtagttttctatacataatcttaaggaacagctgtgtacagttacctaagttttacaaacgattatactgagaccaagtttgaatatctgatgagtaactggcaaagctggaactcaaaagcagttccttctagtgactgtacccatatccaaggcttattgcaacttttagtcttgcccctgctacttacacagtccagaatcacttgggtgagcattccagttaggacggtggcattttaagattcagaatattaacctataaacctgtcatttgattcttgattattaatgtctggatcgcctgtggtaggggtgtaatcccaggaaggcattaaatatatttgaattaatgtatattttgagaataaaaggctatttctagaaaatattacacacttgtcttatgttaaataaaaatttgctatttattga

SEQ ID NO: 307977 - DNA, 1000 bp, Homo Sapiens
ccatagtagtactgcttataatttttaaaaacctgagaataatgctaatgatccccaatattaaaactgatacattgtgctgtattcatacaatgccagactacagagcagtgaaaaaaaataatgcacctatttgcatcaccatggatgaatctcagatataatattgaacaaaagaatcaagtcatagaagatgtatgcagtatgagtcagtccatttacataagtaaaaaagggtatatgttgtttaaagatacatacaaaggtgataaaacagaaatgaaaggcaaaggaataattatcgtgaaattcaggacagtggttgtccctgggaggggtgggtagcaaggaagtacgatcgaggtagacaatcgaggggtttctcaagtacctggtgacatttattttcttaacctgggtagtaggttcatgggtgttcacttatccttttttaaaacgtacattttatacacacttttgtatgtattctgtattttataaaaaataaaattaaataagaaattattcttatagtccttttctaacccatggggccttctgctagaattttgtgctgttcacattctcaatgccagcttccttagccataaagtaaaagggtccagggatttgtagcagttcttcagggctgccgtactctataatcttcccgttgtctaggaccattaccttgtcactgtccatgatggtatgcagcctgtgggcgatggtgatcactgtgcagtgggcgaactcgttttggatggtcgtctgaatgaggttgtctgtctctagatccaccgcagcagtggcctcatccaggaccaggatcttggatttccgaagcagagccctgcccaggcacagcagctgcctctggcctatgctcaggttgccaccagcctctgtaacttcgtgggataacccaagttgcaggctggccacaaaagacttgaggtgagccagctccaaggccttccaaatctcctcatctgagtag

SEQ ID NO: 307978 - DNA, 1000 bp, Homo Sapiens
ttattgaattgccatatacggccagttaaaactgctgccggacagtaacatatcccggatgagggtttcgatgggggttttacctaccaaacggacgaaaaacaattgctctatgactgaggaggagacggtgcggagggaagggaggcgaagcaaaagctttccgaatctcgtcggctggttggggtactggctcctaacgtattcttccaaagcacactgagacttttcctgcaagctttccacatgggctacatcagagagaccacaggcatctggaagaaagtttaaaaacagaagaagaagaagaagaaaaagaagaagaagaagaagaagaagaattcagtcatcagattaagaggtttgaattgggtcacatgaggtgtgtgcacagagctctgtcaaactgccccaaccggagttggagcaaatgtctatgtactgaaaacttaagggggggaggcgggttgggggaagaaagagcaagagatggtcctgaggaagtgtttgctttaaaataaaacatagctcagtgtgctacaggctttcactgcccgagtccttagcctgggtcattgagaggcccaagcaaaagtgcattgggtctgtctggcccaagtcagtaaacagaagaaaccaaaactaccagcactctctcccctcctcctctgtaaataatagtttggcttataattatataggggttgggggttgggggtggacaacctggccagtccgagtatggcgtccacgatccagcctcagattccccccaaagagggcgactcatttttctccagtctttgaaactgatttaagtggccctttaaaactgatcttgtcagtttagcctattgaagggcagccatgcaaaccgtgatctctctgttcatttgagctgtttcttttccccctttttcttctctctccctttttctcctacccccctttattttttaaaacccaggtccctccgagaagcatcccccctccctgttat

SEQ ID NO: 307979 - DNA, 460 bp, Homo Sapiens
ctacaaagggataaacagggcatcaaaattagagaaaaacatccatattggaaaatgtgaacagttagtgaaacagacaagctagaaattagtccaccagatcaactatgcctccgtagggtcagatgcattttcacatgctagcccatgaagatttctaccaaacttttatctagacccaagctgaaaatcactgtaataatagaaatagccaatacttattgaaagctgtgtgccaagcaccatgctaaacactggatagatttctctcaaagaaattgaaatattaaaaatggtcacaaagtgggtaccagaaaaaattccatttgatgtggccccatcaactcacttaactacaagataaattcagattctaaaatctcctctctctcttttttgcctgaagacgatggtttctacagagatttggcatgtgtaaaataaccacactggacttctc

SEQ ID NO: 307980 - DNA, 437 bp, Homo Sapiens
ctaaaagaaaagacacattttaaggctcaattatgttaaaaaattttgcttctaatagtcatactggcagaaatggaagtgtgttaagttaataataaagaacataagtcaaccacaaattaactagtttttgactaaaatacatatatcaaaaacgataaggaagagcccgtttaagatgatagcatttgaaagtgggacaagacagacttagacttgagttcttccaattctacaaccatgaacaagtacactaacctctctgcctttcaatttcatcatctctaaaaatgtgcttcatggataagtggctagaaataaattagtgtgtgcaagtgcttagctctcaggaaagattggttactgtcattggaaaatgctatcttctgaagatatttccttcctaatattttgtagcaaattacatcccataaact

SEQ ID NO: 307981 - DNA, 1000 bp, Homo Sapiens; identical to SEQ ID NO: 119886
  misc_feature (508)..(508): n is a, c, g, or t
  misc_feature (523)..(523): n is a, c, g, or t
  misc_feature (539)..(539): n is a, c, g, or t
  misc_feature (541)..(541): n is a, c, g, or t
  misc_feature (550)..(550): n is a, c, g, or t
  misc_feature (552)..(552): n is a, c, g, or t

SEQ ID NO: 307982 - DNA, 1000 bp, Homo Sapiens
taaatactaataaactatcctcttccctagaactacaacacaggaaaaaacctgaaaggttttgtgtaagtttcagtttctagtattttggttgcattcttgtaggcaatttgtaaagcaagagggacagagtgcatctctaaaacctcttacacaaattaggaaaaagttgtacccaggtggttacaaatctaagagcaaaatcttaaaaaaacccaagatttatttttggctcctagaccagtttatttcactttccagcattcaaagaaatgtgatctgcaaaaaactagatacaaaggccttttacttctttacaaactacggttagttctcaatgaatttacatgcctcactttttattccaagaaaaatccccattatgcaatacaagggtgaaacagctgttacaaatacacagaaacataataaagataaccaacactgttaagaggaaggggaagaggaaaaaacccaagagaaggaaacttttccacagtgactagcagaatgtcttgtagatagcaataaccgaagacaaacaggttgctcacttcatcctatttatcaagtcatcctatctaaaatgagaatagttcatgcctaggataggctaactataggctttgctagtcctccttcctaatagaatgccctcagattattcctgagctatcactcaagtcacagatacttcagaatataatcttaggttttgtaaacaggaacatggtcaaaatgcaatacaatggaaaatctctacaagagaatgagatttggaaagccatgcttagagtctctgagccacacaaccataagatcttcgagtacgtttaatctctcatccaggaacattatccatttaccttgtaaggttgtgagaaatgaatagcataatatgcaagaagctatcacatgatgggtattctacaaaggacaattttctcatctgtaaaatgggaataatacccatttcccaggagtgtttttaggattaaat

SEQ ID NO: 307983 - DNA, 1000 bp, Homo Sapiens
ccagggccaccggctcaacatcgcctgccctgcgccctccttcccaagccccggccccgctcaccagcctctccatccttgctcctggaggcgcgcgcgaggtggctgactgcggatgtgcgcctggagctctgctaggcaggcgggaggagcgtcacctgtgcccctgccgcacctcccgcctcttcctcctcgctagcccccttctcccactccgttttccccacgccctcacaggagcggaggctgtctgtgtggggggaattaaatgatgtttatattcagctttgtctattttcagacatttttcccttttcaaaggtgaccgctggggaaactgacaaagtgtttggaaaaaaaaaatcatttttttttttccattttcctgctacctggactgagaaaggaaatgaggtgggaggttgtggagatcagttgttgacctgttagctcttgatgtagtggcaaaggattcaagctgaatttaaccaatggacttttttttttttttaaagaaaaaacttacatttattatttttaaatccagattcaaattatatatttaagcaattccgtaatgatttcacctttcatgatgtgatcaattctttggtgaagagtttccttccacttgcattaatgatgaggattcttttttcccttctccttctccttcttctccttcttcttcttcttgagacggagtctcgctctgtggtccaggctggagtgcagtggcgctatcttggctcactacaagctccgcctcccgggttcccgccattctcctgcctcagcctcccgagtagctgggactacagacgcccgccaccatgcccggctaattttttgtatttttagtagagacggggtttcaccatgttagccaggatggtctcggtctcttgacctcgtgatccgcccgcctcggcctcccaaaatgctgggattacaggcgtgagccactgcgcccggccctcctcctcctcttcctccttct

SEQ ID NO: 307984 - DNA, 1000 bp, Homo Sapiens
tcaatatcctcttttaattttttttggccgcattttatgcatttcataatctgatgttttatcatttatatgaactaagcctgatgaaaccattcgacgacttgtaaactttccactgtagctttctcgttgcttgttaacctccggagcagtatatggtcttgcagagtgtctggcatggttatggatatcatctgagctttttcctaaaagccttgatcttgattttacttttttaaggtgtgtaaatgaggtcatgtcatgtaaatcctcaaatttatctgaacaatcatgtatagttcttcttgcagtccagtgaagcagtgtccttggaacagacttctttaggtgaattcttgtggtgggcagtgtggttggtagtatcctgactatcttgttaaatgacttttttggttgggcgacacggtctctttcttttcggaccttgggttttagatcttctatcttaaataattctgggaagaggtgtggtttcaagtttttctcatcttctacaaccttatattggaatgactgtatttcagggaacttggcacatttttcactgcaaatttcatctggttttatataaagagtttgtatttcttttttgtattgtgcaaatgttactaaatgctttttattattgttattatttcctttcaatgtctgacaatactggtcttctaattttgatttttccccagtctctgtattgaaatgagttaaagtgctactttgccaggaagggaaagtgattctgtttaagtactcatcttcccttggcattctggcattaggaattcttggatacgatgttaatactgcttcaggtttttcctgaacagtccatttatagatgtttacatgctcctttctatcaagggacttcattttcagtgtcttttcacaccaagcttttgattgagttatttttgatttaccaccccaactatatgggtcttgaatctctgttttatgaacagaattttctgcttga

SEQ ID NO: 307985 - DNA, 1000 bp, Homo Sapiens
ccgggagccgaagcagccatggcggtgggtggcagatggagacagaaccctcacgctttgggcaaacttgccctctttctgcttctaagtagggcttgctgtgctttcttgctctcaatgcaggtgctcctcgagagtgagaaatggcagtctgcctgcctcggggacactagtgacagtataaagggcaaaggaaaaccgagtatctggccttcacgtaaatcctggccacattcaccaaccaaagggggacagtgattttcaaaaccagctcccatgtgctgagaacaccccagctgcatttcttttgcaagattcctttccactccaaccagaagtgaatatttgagacaaacggcctattggctattttcccatgccagttttggaagtggggaaaactatggtggaaatttgtgggcttggggacagaaatgccactcaccaacccagggcaaagaacacaaaccctccaggcctcagtttcttcacctgtaaaatggggtgaagctgtgatgtgcctactcccaaggacacgacacacagtagggacctgccctgtacatgctagttcaacagaaaggaatggcctttcaccttctcctggtggcaggcaagcagatgtcctctgcggagataccgccagctccccaggacgcagactgactcctgtttgctcgctggaccaaccccaggcagaaggtggaaggtgggaacagaggtttagctgcaggacatgtattcccattgcaccgagacctaactgccgctcagagtgtagaccgagatggtgcagatgcctgcagtgccactaaaatgtgggtgaaggtgacatcaggattatgtgccccaggccgggctcagtggctcacacctgtaatcccagcactttgggaggccaaggtgggcggatcacctgaggtcaggagtttgcgacaagcctgccaacaagctgaaaccccatctccactaaaaatacaaaaattagttgggcatggtg

SEQ ID NO: 307986 - DNA, 1000 bp, Homo Sapiens
aatgatagaacactgaaatttctttagacacagtattttcaagttatatttctgcctggagtacagatatgaaatagcacaaactgtactctgaattaagcaaacagaatgaataaaaaaaaaatattctcccaacctaagtttccgttcctcatttccacttgcctcagactctttctattgaacatatctagttaaatctctaatggacggcctgtgggaagatttactgccaacagggatgactgacttctttccggacactgagcaggggactgtgggctctgaagcagtttacttcctgtggaaagccagtcccatttctattttacttcgatccaggcctattcagataaagcaccactcagtagctactgaccatttaagtatggagagaaaagcaaagtagaaaaatggttttcacttaaagaaaaagcaaatggaagaccagccataatagctccatggcacaagagacatgacagggatctcctccccagatgtcccctgatgtttgtcagcctctcatatccctggccctctggcttctggctctgtgattacagttgccacagaggattcatggacagcaaaaagcttaaggaacctggaggttttgtacaacatgtacattctgctgacagaaacacatacatggtatggactattattaaaattgatagcctgcttgcactcagtatacaggctgcttaggaacactttattgggagataccctgctggtgttggagcagcacaaaatgatgaggctaacttaagtagtgacaagaatgatcctcttataccatatggccaaagaacagctgtccatccccaagtctatgggggatcagatgaagtgtggagtttggttggttggtcagtgaatttttggtcagtgaatacatacatatggcatagtgaagtacaattgcttttcttttctttttttttttgagatgaagtctcgctgtgtcacccagtctggagtgcagtggcac

SEQ ID NO: 307987 - DNA, 1000 bp, Homo Sapiens
gggcttcgtcatcttagccaggctggtctcgaactcctgacctcataatccaccagccttggcatccccaagagctgggattacaggcatgagccaccgcacctggccgtcttaccaaaattttcagaggaaaaaaatgtgggattttttcaatttgttctcaccctccaagcatgctgggtgctgcgctgagccctgtgaggggctggcagcatcgcccccaagaaactgaggcttagacaggaaaggccacctgcctggtcaccgggttctcctacctggaaggaggcagttttagctgaggaaggatatccagatgggccctccatggttccttcccaccagaacttctcagccatgggcaaggaggcagccagggacccagcacctttcatcccttggtttcctgttccccttctgggtagggcacgaagtgacgcacaggtgtgggcatctctgccaagccagctctgcccaggatttaactagagctgtgaggcttgttgacccagaaaacgtgatttgggagacgccaaggcctcccctcccctgacaggactgggggcagaagttctggcctttcgagtgtgcagggagaaaggttttacctgataggttcctgccctcatcctagggtcagcccagggacttagcctccctggcgggtttctggagtggagcatgggactggtcagaaccttaccgcgagttaagtaacaactgggtggaggttaaaggtaagcacgcagacaggcaggtgggtgggaggggagggggctatgcttgggaggcttccagaccttggggctggctttatctggcctcttccaggcctccttatcccagcccacccaccttacagttagggcccgcttttgcccttgccctgccagggtgagatcctggccagggagaggcgtatacaaagtacagcgtggacacacgacacccctgacttaagagtccaagtccgctggaggaagaggctttgtttcaccaa

SEQ ID NO: 307988 - DNA, 1000 bp, Homo Sapiens
acaggagctcctgtgttgctgccgtgttcgccatgtgtattgctaagaggatcacctgcagctgcacagtttctccaggaaaatgggggccaaggctgagaaagaggaagagggtgagctgagtgacatcattgtggtcttcaagttgctgacagccagctagagccccgaggccctcccctggcaggaggctcccaaaacctgtgttcagagaccccacgcgttcagaacttgggatcaggatgtggtgtggcttgcaaaggttagcatgctacttgtcatgtcagtgccccctgttctttctccagagccagggccaccagagaagacagaagatgaggtctaccaggcccagctgcccagagcttgctacctggtgttggggactgaggaaccaggcacaggagtgcgtctggtggccttgcagctggggcttcggcggctgctgctgctgctgtctccccagagtcccacccatgggctgcgaagcctggccacccacactctgcatgccctcaccccacttctttgactacctagcagtgggtgatggacacagacatggggctgttagcgtctctctgtttattcgctcacaataatacacagcccctggatggggagggggtaggaggggctacaacagggtggggtgggaggggaggagacatccacttccctggcccctctcccctctgtgcttgggggggaaagggagggagggggactccccctaaccccccagaatgtaaacagcagcagatgaacaaaaataaaaatacaaaaggccggaggaaagtcccaggcatcccccaaaccctggtgtcttctctgtcaccagtggaggtcccccatccaccaaaactgcctcagtccaaggggctgcccagtgccggccacatcccccggggcagagtccagggctcagaactgctgtgccagcagctcacacaggtgacgggagacgggctccttgctggtgcgcagggtcagccggtac

SEQ ID NO: 307989 - DNA, 1000 bp, Homo Sapiens
ggaaggatggtttctcaagaagttgtgattagtagtgtgttatattgaaaattaaaagcattcacttctgcacagatgcaaatataatcagtttaactttattttaagcttctattacattgtaattaataataatatactaagttaagccagtttaactgtctagcaaaatgcatttcattttaaaattggatattgggagacttggcaaatgctgtgagattacttagtaaagttaagtatgatgtatatatagaggggaccagctcaccctcataggttagtgctgaaggctcaggaacagtctcaaaggcttagaaatgtggttatatagaccagagcattccattctgattttgcccccagtatacttatcactgttcattttttgctaagaatcacagtctactgacctaaatcacaccctagacatatcagagggaaattctgaccataaatcagccttgcaaatacatagcaggcagccttctctgtagtagccttggaacataatacaaatgatgtcagcatcctctgtggttgggtcagaactagcactggctatttgcaaggctgagtccatattacccttcagcacctgagtgccaagctgaggtctcaacatgggtgatgtgaaggacaagagagaatcagtggctgcagtccttctatatatctggtcactagatccgccagcttcttcaacttgttgggcttattatatctctgaaaggggacctgaacctgcatcattctgcaaaggagatgattcctgagagatgggtgaaatataatcactaactaaagagataaattcttcactttacttcctagtattgcatcccagaaagggttaaagtaagggatattggctcctgctgatcaggccacagtgtgacacattctataaaatgcatcacaaaactacattattcaatagacttgagtgttgcacctgctttcttatctccttgtaggtggttaagtttcccacaaatgc

SEQ ID NO: 307990 - DNA, 1000 bp, Homo Sapiens
cagctccctctcctttgcaggcataactgggcatgtgccatgcatggtcttccagagatccccggcaggtaagcatcagttgctcatgctggtaatctgttgaataactcacccttttgtcagaggtttatttaaactggagctttgaagaggggctgggtaaaatgaggctgagacttactgggctgcattcctgggaggttagggcattcttagtcatagaatgagacaggaggtcgtcaccgatacaagtcataaagaccttgctgataaaacaggttgcagtaaagaagatggctctaacccaccaaaaccaagatggcaacaagagtgacctctggttgtcctcactgctacactcccaacagcgccatgacagtttacaaatgccatggcaacatcaggaagttaccctatatggtctaaaagggaggcataataatccaccccttgtttggaatataattaatcaataaccataaaaataggcagccagcaaccctcagggctgctctgtctacggagtagccattcttttattcctttactttcctcattaacttgctttcactgactctatggactcgctctgaattctttcttgcatgagattcaagaaccctcttttggggtctgcatctggacccctttcaggtaacactttcttggtttgtgtccttccctgcctcagttccccactaccttagcagggtttcccgggattacttcctaaatcaactatttgaatccttgtatggggaacccaaacccagatggcaagtttcttaacctcttgcatcctggttcctctggatgggtgaattccaggagttaacagagacacagcactcacagcagtgtctggaggtatgtttggttaatacataaaaaataaagagacaaagaaactttatttatacaaaactccaccccttctgttccactctcctcagcaaacacagataacaggtgatgaaactaaaacacacagacgagcatt

SEQ ID NO: 307991 - DNA, 1000 bp, Homo Sapiens; identical to SEQ ID NO: 119887

SEQ ID NO: 307992 - DNA, 1000 bp, Homo Sapiens
tcatacggttagatcgtctgacctggctcggctgctggctttgcttagcctgctcaggggtctggcatcatctgttgtcagctctggacagagtgaaggtgtcttctcagctggcagcccttgctttgacaccttctccgactgcggctcttctttttcaccctccttatccactccgggggtctctactttctccccctctggcacggccaccttctcctgctcctccgtggtcagcctctctgcttcctccttcttctctcccacctcgggttcggctccctcctctgcaggcggcccctcgccctccacttcttgtgcccccacctgagcgtaggaaggcagtgtctcttggtagccccgggacaagtcccccaggggtcctgtgctgatcttctcctcgaactgattgaaaggcttggcaggcagtgggctggtctccaccatcccaacctcggtcaaggggaaatagtgggaaacgattttctcttcttctagaagctgatagcccttggctttctggatggaggagacagcaatggagtggagggatttctcaggaatctcccccaggggctgctctacaggcctcttcaaggcagaccggatccccttcaggcccaggtggctcaactccatcacgttgaggaatagggacacagaggccacagacaacatgaacaggatgaagatggttttctccgtgggccgggacacgaagcagtccaccacattggggcagggccaccggctgcagcggtacagaggcaggatccggaacccgtacaggaagtagtggcccacgatgaagcccacttcaaagagggtcttgaagatgatgtggcagatgtaggtcctcagcagggtcccctccagccggaacttcttagtgcctttgctgccgctgctcttcttgacgctgccctggtccgggccgccgttagtccccgcctgctggcccagctcctcgtcgcggcttttgcgcttctcctccatgcgg

SEQ ID NO: 307993 - DNA, 1000 bp, Homo Sapiens
tggggaggcctgagaacaggaggattgccttgaagaccagggagtttttaagacaagctggggcaacaattgtgaagaccctgttcttctacaaaaaagaattatccaggaaacggtggcaatgcacgtgtagtcccagctatgtgggtgagagtatcgcttgagcccaggagttcaaggctacagtgagctatgattgtgccactgccctgtagtctgggcaacagagtaagaccctgtcctcaaaaatttaaaaggaaaaaaaaagaaatttaaaatctcaggtccatattaaagtcacttggcctagagaagtggcccattccccccattaatagttggtagttctctagtgttgaagatgatacgtaagcctctaatttggaagacaacttaagcctcacttatggacaccacaccaataactaacattactcttgattttttaaaaagatatcatacaccaaagcacgtataagacataaacatcgggtagaggcgggatttgagaaagaatgtaagggccacggtcctgaagatactgtatcgaaaaaacagaatacaaagttggaaaattttaatgatgtggatacactgtctcgtgatattgcaatttaataccatggtaagaaccctgagaaatagtgctgacatgggagacagttcttagaaatgtgggaagagcaatagccaatgctggggcagaaatgtcagacctcccttggcagacagtagaagaaagcacagagaagtaagcatactatattgatagacgatgttagcctagataagccaatagctgactatattctataatattctctatatccccttaggacactctgcttactaaagtgataaagaatggcctggtgagagggtcttacactttccaaatcagggccctgaatttggtattgttgagtagctctgaggtggttgtcctctatgggctggaggtaatagcggagacagtgtaaacccgctattgctaatagta

SEQ ID NO: 307994 - DNA, 1000 bp, Homo Sapiens
gtgacaaatcatctctttagttaatgctcccagttgttgttaaggcaaagatagcaattggtggagagttattttcaatgtcctttaataaataattgtttaaatgcttgtgtggataaacattgatgtaattcttacctataaatgaaattaaaatatctgctgtcttaagaaattgagtatgtgtccaattttatgttacagcagatatgatattttaattaatttcttgctacttagcaaattacattgggcaagtatattttgtattgaaaggaagaaattatttgtttcaaaccttttcaactttggctattgttaatagtcctaacagagtaacaaaaatcacctttcagcaaaacctaaggaaacttcacgtcatctaacttgtttttcagctgttgaaggaggatgttcccatcttggtcagtcctatgcggatagagatgtctggaagccagaaccatgccaaatatgtgtctgtgactcaggatccgttctctgcgatgacataatatgtgacgatcaagaattagactgccccaacccagaaattccatttggagaatgttgtgcagtttgcccacagcctccaactgctgtgagtttaaagataaactgtacatcttcaatattcatatttagacacatgaatagctcctatatcataggagcctaaaagggagtgaaagtcatgttcatcaaatagccatgtttgtattacgagtaaaaagtgaccgtttcaatttaaagataaggattggttagaatctgggttactaaataatatgcaaattctgtgtcttgtttaacttgtttcttttccatttattagcctactcgccctcctaatggtcaaggacctcaaggccccaagggagatccagtaagtaaacattcttcagtagaataaaattaatactaatgataattctagtaagagtttgctttttctagatttgagctttcatcatacattctcttcattaccacatatttg

SEQ ID NO: 307995 - DNA, 1000 bp, Homo Sapiens
aatgcccaaaccaactttttattgagcttatgcagctaacaaacttgtaaacagtgccagtcgacaaagttttgctgaatattacagcttgtgcccactaaacacacctctctctgagattaaaaacaaaaaaaccaaagtaaacaaatactgagagagaatgaagagacatatcttgagtcttccagaaaggcaaaataaaaaacgccacatggcttggtcccaggcgttcaccatgcctagagtgctgctgctatcaccactgtctcccctccctgccagtggctaggtagaggtaggggagaagggtcatcttggacatgctgcaaatacagcatttgctggtgttgacaccctcctggggctgtggtggcagactgctgtgtcaggagcccatttcctgggagtagcagagggagcccaggtcctcaagacagcctgagatggcagcccatacacctcagcaggggtaccttgccccttttctccagtgcggttcagcattgaggttgtctattcccagtcggtgataaaacctgagctgtttttctcgtaggttccccctcctttccccaacttgggggagtagtgggagggaacagggaaggatcactgagggggcagggggataccccggggatcggtgacctggccctcttgcaggttcttcaccagttgtgcaagccagcgtttcgtggtggtgtcatcttttagcacctgggcgaaggttgtgtctttcagctggtcagggaggcactgtctgagtgcttcacgtgccctggggttatctgaaagtcgaaggtaacatctcactacatgcttcagcagacgggcagaaggctctttggatagctgcaggaccatcttacccaagatcatggcaacatgggagaaacgctcatacgtctgacatatataagccaaaccagtgtcatctaacaagatcttctggaggatgaatgtggcaactgttttagaaagttcacttccagattccata

SEQ ID NO: 307996 - DNA, 1000 bp, Homo Sapiens
gccctggcccattgaaagagatgctccgggcaccccccaggatttgccaacctgcagttgggctcttcagatgtgaaaagtgatttccgtatacttagaggtaaaggatttaaaagaaaagggagagcatggggcctccaacggggcaaataatgcaagccatgtctccctgtttcctaagcactaggagctggccagaatccaattcgaaggatcagagagaagggtggtgtctattatctcagcagtatatttaccccaaataatcccctctgactagccagccagtttcaaacatatgaatcaaggccaggatccactctcctggactgttctagaaacagagaccaacatgagggcttttcctttttatgtaaaatagaagacttttttttgagacagagtctcactctgtcgccaggctggagtgcagtggtgtgatctcggctcactgcaacctctgcttcctgggttcaagggattctcctgcctcagcctcccgagtagctgggattataggcgcctgccaccacaccaggctaatttttgtatttttaatagagacgaggtttcaccatgttggccaggatggtctcgatctgttgacctcatgatccgccccccttggcctcccaaaatgctgggattacaggtgtgagccaccgtgcccgacctaagagactttttatataaataagaaacgctgacacactcacatagccatgtgcctatgaatacaaacacatttattctaagatgcacatacacgcgtataatctacggcctgaccttgcagtgtaaatcactgagttcaaccaaagagatgctgagaggcacggagggctgctcaggctggctgctcccacactcagggggcatgggaaatgctttaacctgccccttgcctctctgtgaggcccaacacaacctgcagcctcctggtgggtgaacctgagaagctccacccctagttccaacctttaactcctcctcaccactc

SEQ ID NO: 307997 - DNA, 1000 bp, Homo Sapiens
gagacgttagaagcagctgcgaatgattcatctcgctcggcccccaccccaccacctcaaacataccctggggctgataaccaagttccagcccctacagccctgcagcctccagacctctgacacctctcggtcagccacaaagccctccctacccagccccactctccttagaaatctagtccatcacccccatcacccctggagctgggacacgtcccattttcttttatttatacaaaaagttacttttttaaatataatttaagaacccctccaagcaccggcgtccgtttctgggttccaccaccaactaccgcccttttcactacctcaccccacaccccttcataggacacagcttgggggtcccaggcggggtccggggatgtgggatgaccaaggcactgttctggaaacagacatgatgatgggcccctgtttcaacttgggcaaaggaggccatagtgaaacaggttccctccaacacaaagttatgacaaggacggtagaaaaacaaaacgaagaaacaaaaagggaacggggagaaaaattaagaccaaaaacaaaactcaaaaaccttcaatatgaaggcagcagctgggggaggggcatttacaagggaaaaaaatgattgagtttggtggtgacagcagcaagttgggactacaaaccccaatgattttgtcactgggccctgacaccccttcttgccccctgggacagcccccccactctggagctggcaagggagtcacactctctttggtctgcgggaacgcacccatcaaggtgaggggggcacctggggaggctgggagatgttgggcacttccttttcctctggtcacacccagtcctgagggaaaggcgccctcacccttggtctggagttccccgaggtggctggggggtgattttcccctcctattatggcagaacccccaaatcctgtctctccaaattgccaactcctcaccccacgggctcaaagtgcaat

SEQ ID NO: 307998 - DNA, 1000 bp, Homo Sapiens
atgtggtgagaactgcattttgtggatgaggaaaataaggccaagtgaagtgacgtgatttgtgaagggccaggtgtagaaagaagccaggcctgaggactttcactacaccaaactgctaaaggagaaagcccatgtcagaagaaacagtggcaaatgttacatctggaaaataaaaaggattttcaatctagatcttgcccctgcctaaggaggatgcctgtggccttccccctcttgctgagtgaccccttcatcagatgggtcttctcaactccaacttagttgtcttataaacccattcgcaatactcctgtgttctgtggtaagttttcctacaggccctgctggcaggcatcgccttgaaattctgtccatggctttctagtgggtgccttaattaaattaccttccgtataaatttatctttatccccagctcataaaattctacataatggagacgatgtatgatgctcacatctattattcccagccctggcctgcctcttgttttagatgtccaactgcagatcaggacaagttttcttgaatgtcctggcattgcttgcttaaaaatgaactctaaccactacttccaagtcagctccccatcttagctagccactttgtgcctgagtattattttgatctcactgatccagtctgggcttcactgcctcccattaggatcacagcaaggacactctaactagctttcctgctttaagtaagccaatgaatctaccctacgcactggtggaaaatgtctgttgcaaaaagagagctccaatcatatttccctgatcaaaactttccagtggttccaattacctgtaaaataaaacccaaacttcttaacctgggtactctcaaaccgggtcatcattcaacctacatttgttgagtgccacctggaagccatgccctggtgttaggtactggagacttggcgacttaatagaacacaatcactgcccacattgaactttccactctag

SEQ ID NO: 307999 - DNA, 1000 bp, Homo Sapiens
agtggttgccagggattagggggaaggaggcatgaataggtggagcgcaagattgttaggccagtgaaactattctatatgatactacattggctgatgcatgccattatacatttgtcagaactcacagagtgtacaataccaagagtgaaccctaatgtaaatgatagactttaggtgataatgatgtatcaatataggttcattaattgtaacaagcaccactctggtagggagagctgacagtaggggaggctgtgcgtgtgtggggtcaggggagtatgttggaagtctctgtaccttcttcccaattattctgtgaatctaaattgctgtaaaaataattctattaacctccctgttaactgataatttcagttttctgaattttatgtacatttcatgtcatcaatgtacatgacaaatgaattatttctttataaaacacaattttacattctaaaaatattgagttctgaaaatattgaaaataggatacatttggggattttgctaaacattctagtttgggtttcactaaggctacagaagtccactaagagaaccttatgaatataagttaggaaagagcaagtattttctcctggatttatttttttaatttgatctggggaatatgtgtcttcctttttagaagaaagaagcacattttcggaccctctgcttcctggattctcaccctggtacagatttatattaggtaaaggtgagaatgggctggctgcccagagagctaagcatttttttttttttgagacagagtctcactctgtcgcccaggctggagtgcagtgtcacagtctcggctcactgcaacctctgattcgtgagttcaagcaattctcctacctcagccacccgagtagctgggattacaggcatgtgccaccacgcctggctaattttcttttttttttttttttttttttttttttgagatagagtctcgctctgtcgcccaggctggagtgcagtggca

SEQ ID NO: 308000 - DNA, 1000 bp, Homo Sapiens
ctttagtcctgtttccacgggcttctcgcaagagcatcagcgaggataatgatctctccactgaggaggaggtgggcgaactaggatcctaaattcatactttcagcaattccctattttcaagactttcatttctataaattgtattgattcaccttttcttactcaaaaaaagccccaaaacccaaaccaaaccaagaggtggtctataaaaagtcacactgccttttccactaagtaagtaaaaaaatcagtggatagacttagctttgaacagctgtggctagcatctggcgcagccagcgctccaggcgggctggatggagatggccagcccctctgcagtcagcgtccctgtgtgtgggcggccctgacctaacgggaacccgataacgtcagagccagcttgctcaacaccatggctaaatttagtttcatgatgagcaataaaattcacatgttctttatttagtccatatgatacaccgttttttagagtttttgaaaattagataaaagagcatattaaatggcaagtgtatgaagtttctcttcataaacaatgtcaaaacaaaaagttttgaattacaaaatgttaaaaaatatgtcggtacttaacatttcactaatgcataaagttacagatattttctaaagaaaaataattgtgccacttacctatatttgctgtttctatgaacttttttattctgtacataggacattttgtacaaaatatgaagtctacatttttattacttattaccataaaacaaagatacaatgtatgtacaatattaaaaggaagccatactaaagccacactaaaaagacacttggaatagtgacatttctgatgtacagatacattttggaaagagtgaagatgccaaacgcagaactttatgaagaaaaacagtcaccggtttattttcaatgtagtacttttgaaatcagtttggtacagaataaacagtctctatacaatgatatgtaagct

SEQ ID NO: 308001 - DNA, 1000 bp, Homo Sapiens
ctgaattggggaaaatctcactccaaaatgttgcagctctcttggaataagtaacctgtgttattacttcaattcactgttgacttgtatgacttcacttgtccagaacccattcgttcaatattctcttcacagccatatgccatgaaaactgttggtttccctttccctgtctcataaatgattcaaatctatttccacccacctgctacctcttgtactctgagagtgggatatttcctctaaagagaacctgtcagtgctaattatggaggaaagcctatgtggcaaagatgtgtaggtttaaaagacaagaaagtcccccacagaggttctgtgaaacactggatacactgacaacttaataaaaagcttgattcagtgacagttttaacacactggcatggtaagtatcattagaagtaaagtgactttcaagggaaaaaatgttttatggaactgtgtgaagagctatgattgatcttaaatttcctctgtttcatggctcctgaagtggtgcatcaaagaacaactggtacgggagttgtatttctcctcaggtcccacacctggtaacagcttctttgtggcattggggagtgtcattgtttgtgaaactcattcatccagagaaaacaggctgagtgttctgctttctttctcttccaaacccacattcatatagagctaacttggagggtgggtaagaggaaaggcaaaaagaagcagggagaggatgagccatgtggacatagttggatgtgtgtgtgctctggattggggcaaacacagtcaggggaacatttggtaggcacagctttgagaaaaacaggcttgatgttgtttgtttcagacatgtgaaggatcgttggatttacaaaaaattttttctctctcttttatcgttctcatggaaatagtaggaagctattactgtgtgctcgagcttcaccagtgttctaaaaatttgcctgataaatcaggcacatggtagccaaac

SEQ ID NO: 308002 - DNA, 1000 bp, Homo Sapiens
ttatttcattcattaaaatttttattttgaatagcttcaatcaaaaaaggtttcataagattatttacaatgctgaatgtacaattatgaatgtatgcctttttgacaagagggtaccattcttgagcagcaatacaattttaaaaatataaagatgcagtatcatttctgatataaagttacttaaaaaaatccaaggtcttagggaattcacaaatcataactagaagtaacttttattaatttaatgtacacataattaccaaattttaatacattaaaaatgtgtaaatgcccacagactgtacaaaaattaacaccccattttgttaaaagttcccaaccacctcccaccataaatatacaaaaacctatttttagatatgtcaaaattgcatgcatgaatattttctaaagcttgaattttgctcttcactggataatgttatctatagctgtttctgtaacagactacataaacattgatatattatttaccatgcctttgaaactgtgcaggactttcataaacatggggaacaaaataaatagagtaaaaactgcaacagttttgtttagatgcaagtgcaattgggaaagctttcgaatttcaggattataaaactactataaaagtatttattctgttgttggcttagccacttgtattcaagcattatttgcagcattgctttacagcagttggtgctagaagatacaaaacatatagttaccactatttatacttgagggagaaaaaaaactttaaacaaccctgagggagacacacattaaaaatcttgttatttatttaaaaagttaaaaagttacatatcattatttaacaattactttcccagacatttctgtcctttaagtatgtgcataaataaaatttaaatcagcaatattcatcttaatacatcaaaataatatatgtacagattttaaaatttaggtctgtataaactcaaataatttaatgtgaaattcagaatca

SEQ ID NO: 308003 - DNA, 1000 bp, Homo Sapiens
cctgagtagctgggattacaggcgcccgccaccgtgcctggctaatttttgtatttttagtagagacagggtttcaccatcttggccaggctggtctcaaactcctgacctcgtgatccgcctgcctcagcctcccaaagtgctgggattacaggcgtgagccaccacgcccggcctaaattcttcttcttttttttttttttttttagtagagatggcgtctccctacattgcccaggctggcttgaacttctgggctcaagggatcctcctgcctcagacttccaaagtgctgggattacaggcgtgagccaccacacccggcccctagtggcacttttcttttctttcttgggatattcattctggaggctgctgtggggactctgaagtagccctatggagaggcccatgggataaactgaggcctcctaccagtgaaaccgtgccccaaagagttaaagaaaccagtgactagcagaaattttccagtttgcaggatggcagataaaaaaagaaacgacttgcagaaatgctgaaattcatctgctggtgggattaacacgctggctgaaatagattgggaccaatatggccaactgcagtttgcacagaacaagcttgctgatgtcacagcccgaatttccagtgcatgttacatactaaccacccccggaatttgcacatgccccccatgagataacatgaagagggaactgcgcatgcctgagcactttccaggcctcccctttgcttccgccaatcacctaatatcagaatccaccccctaaacctttcctaataaaattaccgccttaaagccagcacagggggacagatttgagctagacttctgtctccttactggttgacttgcaataaagctattcttttctgaaaagcctggtgtcagctgggcatggtggctcatgactgtaagcctagcactttgggaggtcgaggcaggaggatcacttgagccttggagttcaagaccagc

SEQ ID NO: 308004 - DNA, 1000 bp, Homo Sapiens
tgagctaaaggagcctgttctaacccaaagcaaggaagctaagaaccttaaaaaatggttagaggaattgctaactagaataaccagtttggagaagaacataaatgacttgatggagctgaaaaacgcagcatgagaactttgtgaatcatgcacaagtatcaacagccaatcaatcaagcagaagaaaggatatcagagactaaagatcaacttaataaaataaagcatgaagacaagattagagaaataagaataaaaaggaacaaataaaaccttccagaaatataagactatctgaaaagaccaaacttacacttgattggtgtacctgaaagtgatggggagaatggaaccaagctggaaaacacacttcaggatattatcaaggagaacttccccaacctaacgagacagaccaacattcaaattcaggaagtacagagaacaccacaaagacacacctcgagaagagcaaccccaagacacataattgtcagattcaccaaggttgaaatgaaggaaaaaatgttaagggcagccagagagaaaggttgggttacccacaaagggaagcccatcagacttctccttctctctgcagaaatcctacaagccagaagagagtggaggccaatattcaccattcttaaagaaaagtattttcaactcagaatttcatatccagtcaaactcagcttcataagcgaaggagaaataaaatcctctacagacaagcaaatgctgagagattttgtcagcaccacgcctgccttacaagagctcctgaaggaagcactaaatatggaaaggaaaaactggtaccagccactgcaaaaacatatcaaattgtaaaaaccatcgacattttgaagaaactgcaacaactaatggtaaaaataaccagctagcatcataataacaggatcaaattcacacataacaatattaaccttaaatgtaaatgggctaaatgccccaattaaaagacacagactgg

SEQ ID NO: 308005 - DNA, 1000 bp, Homo Sapiens
cttttcaaacattttcaggcttaaaagaacttgaaacatttaaattcctgtcaggactaaggaaatggagcagaaatcaatgaactagtgtgtggtctcgacaacaaggcagggatcaactctctacacattctctctctatatgccctaccattcattaacccatttctgatttaataaaaaaaaaatctaggcatctagaatcatttctttgggaagctttacatgcccccaacagggagtctagtgtcattatgtatctaagcatttggccaaaagggactaggtagggttggactgtgctgataagaaagtgagaattctcagggatctggccacatcccagttttggtctctttggtgttgtgagatgtagcagaaaaagaacattccctagaaactttaattagagatatggctggtgagagaatttttgcagattctctctcgttcctctaatccacctattttttacaaaaggtagttcatatctggtcccctccaggataagcacaaaagcctcttgagagttaaaaaatcagtctcagaaagtacctaacacccatgtctctgtttctcttctcattccttccccgtctgggttttggctcaaggtttgcctgtctccagatggcatttgccttcatctccattcataactgagtgttaaaggcctgccctttgttcattcatggattcacctactaggccatgaaggtctattcagtcaacaaacatttattgaatgcctactgggttactgttggaaacaagtcaaatttggttccagatgatgcagatcttctaatctggaccacaatgaaatttacacagaagtggtatagtaacagttgtgttctgtgtcccaaagaagaaaaaaagggaagcaacccagcctgagaggtccgagaagaatttactgagaaagcagtcttgtatctaactgctgaagaatgagtaggattgagctaggtgggaggagaggaggaaataaaggaag

SEQ ID NO: 308006 - DNA, 1000 bp, Homo Sapiens
acaagtatctacaaaatctttataaattcacatatttttctgaaagtgtacaagcagtctcaatttactgggacaaaaatgaacatttttgttctttagtaatgaagtcaatgtacaattcagagcaggtgtccatagaaacaactaggtttgaaaaaactgtaagacaattcacagttgaaatcaaacaaacactgtgaatgtgttaaatactgccatataacaacactttaacattgatcttgctaaataaggctatgattcataagatgcatgtatttccaaagctgtttaacattcttataaattaattcacaggattcaaatagttgctttttagcttcaactgggtattagcaaaaataatacaaaatgatccccgtgcaagcacaaatttaccttccttcctaaataaaacatgacagattatattacaacttgatagcctctcttttaaaaagtctgtgacattattaaagaggtgacggaatgcttgttttgcaaaccccaacacatctttcactgtggaccattgctattacttcattaacacagttgctcagatctcaaggtactcacggtctgaaatatattttacaattagaaggtatgcacaggtcaaaaagagcaatccaagggttagaagtccccagtgccccacactggctcattgccgaggtgacagggtgcaggctgtgtgagccaggcacacttacccctcaactgggcttctgtagctttacaatttggataactagttagcggacagtagttgggacatgtcacatacagatttgagtcctccaataatgtacactttgccaggttttatccctttgttaaagcaaatagaacagagagggaatatagctgccagtaaaaatcatttcccccctcttaatctcccatccttcatctccatgaaaccgactattaagataacctttctctctctgtgcactagtggaaaaagtaaagttctatagaaactcacagttaa

SEQ ID NO: 308007 - DNA, 1000 bp, Homo Sapiens
aagcttcgaggctggaagttatgtgtggcacctccacttttatctcattggccagagctgcaagggatcctgggacatgtagtctggtgatccagtctcattgctgccccagatacagttgggattctgttaccaaggaggaaggagaggctagtcatggggagcagcctgcagcatccgccactcagactttccgccctccccgggctcatcctagccatttttcctgagtgctgaggatttcacagcgactttttgggaaaactgagtaagtgcatcaacactccgaactccagcaaggatggagccacattttaccaggcagctagccaggtgtgaagtcagctagtaagatgaagattgcttatagtcaaagttgcttttgtaaaatccctttgattgctggaaactgggccctcagacattgagaaaagtaagaattcacgtttcgtacttcctgtgtttgggccctgttttcctttcctggaggtgtcagtggtcaaggtctggttgagggcagggaggatggtgtgttttttcctggcaagtgagtggagttgagttttcagagagtgcagtgccccttgaaacacctctctactgtgctcagggcattgaagccaggggattagggcagggtccctgtagagacagtcctggctttgagctggcagggtgaccctggataagtcagttacttcctctttggcatcttgggggatcctagtttatcacctcacctccccctaccagatcctcccaagttgaaaatacagatgccaggagccaaccagggaattgcaatatcaacactttttttttttttttttttttgaaatggagtcttgttctgttgtccaggctggagcgcagtggcacagtcttggctcactgcaaccgcaatctccgcctcccaggttcaattgattctcctgcctcagcctcccaagtagctgggatgtcacaggcacacaccaccacacctggctaatttttatat

SEQ ID NO: 308008 - DNA, 1000 bp, Homo Sapiens
agtgtctttaacatagtctcatatttggaaaagcagttttaaaaaaaaattgaaaatacaagataaggtaagggttacttatataagttttaaccttatattgcttggccatttttacatataaattattgcttactagcttcgataaatacacagcacagtcatatacatatatattatatatatacacagaggcagaaagcatggaatatgggaaagaaaacactgttaatggcaattctggtaactcaacaaatgtttcatatttaccagttctttaaatggtggaaaactaccaagtgtagtccctgagaagttaggtagacaccctgatggcgggttctctatcttctaattgttaatgcaagctgacaatatcacagcagccctaattaatgatacattaaaaggcaagatttcttgcttcaggtcactgatttcatcccagtatttaataacagtgtaatacgaatacaataaatagactatgcaaataaatattactctgctaaaaaatgtttagtatatacagctttgctttatacagtaatacatttgcatctaactttttggcaatttttaaaaacttcccccccgcccccccaccagttttaagcaaaactggcccactcgctaagaagcaggctgaaattttaaggacatgtttttgaaacatttaaaagaaatcctgtgttggaccactgcggaagacccgatcgtccccattttaatgtttttgcccagtttctgaaaagcctggattggctgcgccatttaggaacattcagttccggatctgcggtgtctgtgctggctagaacagactcgcagggctgggatatgggtagcagtgaaagcccagctccagggataagaagtcatcactggtactctctctttcatgccacgatttctcctccactcagaggcaagtatatattcatgcagcatcctctccctgtggactaggcagtgtgagcactgaccttatccacatgct

SEQ ID NO: 308009 - DNA, 403 bp, Homo Sapiens
  misc_feature (122)..(123): n is a, c, g, or t
agtatatgccacaactaatcatcaacaaatcaactagacagtttaagtagatttaacaccaatgcaaccttgctcccagcatatattctatggtacacatagcattttcatattagtcaatnntttcactgagtcacatatgattttgaaattttcctgaagggagaaacaaatggggatgctgcctgcgaatagttaatttgactccttatcttattaaaatcagtggaatcagatgtttttaatacaaaccttcactgtttccttaatcttccatacaatttgattttggagggatgcttcacagagaatatagtcgggtgcaatgcaggtttggccacaattcatgtattttccccaggttatgcgtctgaggggaaaacatccagaacagctatataat

SEQ ID NO: 308010 - DNA, 1000 bp, Homo Sapiens
  misc_feature (635)..(636): n is a, c, g, or t
cggccccgccgaggggcgtggtcagtgtgggcggagccttgggggccgagtccgctggtgggcgggacccaaggggagcagccagtagggaagttgggcgagttccagaatcagggggcgtggctgtgtggctgtggcctccgtggggtgggcggggcttacatgccgggcaccaccccattggtctccatgttggtgaggttaccccgcaggttctgctcctcctcgaaagccttgaacagtgagttgaagttgccggctccaaaaccctgtggcgggaaagagaggagatgagccaaggacccagaaaaccgagtgtgctagctgcctgtcccctcgggcctgccggggacaagcagtacctggtggttgtggcgctggatgacttccaggaagagcgtgggccggtcctgcaccggtttggtgaagatctgcaggaggtagcctttctcgtcgtagtccaccaggattttcagctcctaggcgggagacagggggctctgctaggggaggctggcacggtgagatccttggaaagtccacaggggctcctgcaccccaaaagtctggaaatgacctctttttctggcagttcagccacctccaaatatatccccaaactgtcctattactanncccctactacagttcctaaggcaccattcaagactgctgcccgcttctaatcttgtatccttacaatccatcctccccgcagacattatcaggacactttctttttcttttttgagacggagccttgcgctgttacccaggctggagtgcggtggcgcaatcttggctcactgaaacctccgccttccgggttcaagcgattctcctgtctcagcctcccgagtagctgggactacaggcgcaggctaccatgcccggctaatttttgtatttttagtaagacggggtttcacgatattggtcaggctggtctcgaactcctgacctcaggtgatccacccgcctcgacctcccaaagtgttgg

SEQ ID NO: 308011 - DNA, 1000 bp, Homo Sapiens
aagctttggtctgttctgcgtgttgtttatcaagctgagcacattccagaaaagttttgcaccggggttgaaattaaagattgctggtttgcacgcggttatgagaaaattcaattagccagaacccctctctcttggcatttcagcttcttgaaattttacccatccatcaaccaggaaccacagcttgctaagcagtatgttcatgtccctgctgtcaggctaatgaccttgtctgccagggatgcctgcaggatcatgtctggagagcagcctgcaggcagcttcaggatccaatccatttttcatcatttcttggcaaggccagagggaggatacttaatagaaacatcatctcagctcattaaggaagaactgtgtgtttggagggtgaggttctgaaaggtgttcaagattcctgtccccagctctctcctctttacctgccatggccaatccattgccaagtcaggtccatcacagtgtctcttagattgattccttatttttccatggtccctgacattgtcttgcctgagaccctgttagcttcttccacagcctaacccctcctcttagctatcctgtctgtgttacttggtgatactttctaagatgccactcaagtcatgtcatctttgggctcaaatcctgcagcagccctcccattgccttcaggatagagtccagaatccaggctttttgtggggtacccaaggcccccctactctctgatgcctttctaccatttgagcttcatccccagtcagcctctcacaggaactcactgctccagccagcaagaccccttgaggccttccaagcatgaccccctgctctcctgaagatccccacacacttacttgcctatctggtgccctgtagaccttctattcaacctccaagacctatttcaaatgccaccagctacaagaagcctttcaggatcctctcagcttaagactttctccaaatcttgactagtgtttactctttctgg

SEQ ID NO: 308012 - DNA, 1000 bp, Homo Sapiens
gatcatcactggtcgttagagaaatgcaaatcaaaacctcaatgagatgccatttcacaccagttagaatggcgatcattaaaaagtcaggaaacagatgctggacaggatttggagaaataggaatgcttttacactgctggtgggtgtgtaaattagttcaatgattgtggaagacagtgtggcaattcctcgaggatctagaaccagaaataccatttgatccagcaatcccattactgggtatatgctcaaaggattataaatcattctactataaagacacatgcacacatatgtttactgcagcactattcacaatagcaaagacttggaaccaacccaaatgccatcagtgatagactggataaagaaaatatggcacatatacaccatggaatactatgcagccataaaaaggatgagttcatgtcctttgcagggacatgggtgaagctggaagccatcattctcagcaaactaacacagggacagaaaaccaaacaccacatgttctcactcataagtgggagttgaacaacgagaacacatggacacagggaggggaacatcacacactggggcctgtcgggggttgaggggctaggggagggatagcattaggagaaatacctaatgtagatgacgggttgatgggtgtagcaaaacaccatggcacatgtatacctatgtaacaaacctgcacgttctgcacatgtatcccagaacttaacatgtaatttaaaaaaagagagaaagaaaatgtggcacatatacaccatggaatactatgcagccataaaaaatgatgagttcatgtcctttgtagggacatggatgaaattggaaatcatcattctcagtaaactatcgcaagaacaaaaaaccaaacaccgcatattctcactcataggtgggaattgaacaatgagatcacatggacacaggaaggggaatatcacactctggggactgtggtggggtgggggtaggggggagg

SEQ ID NO: 308013 - DNA, 1000 bp, Homo Sapiens
aggcagttccagttccccagcagcgacactcaccctccggcggcagagctccaacaccacgaacacgaagtcgttgtcctcgaaaaagccgtggaatcctacgacgtgctggtgggcgaggctgcggtgaatggatatttccatggacatcttctccctctggtgcggcttgagcagcagagacttaggcacaatcttgcccgcgaacacctccttggtgtcgacgtccgagatctcgaagcacttggcaaagccgcccttgcccaaaaagcggccccgcacatagcgccgccggctgcgtgggtccactaggacctccgggatctctttcgccggtggagccgccgccggagctccgggagctgcaactccggggaccccggctttcccagggtcggccggtgcccgtgccagcttccctgcagtcactgcagcactcatgctcccgaagctgcgctgcagacctcgatccgagcagagcctccgcaccgctccgctcctccccgaattcaaacgcggcgctgggaacgttacaaaagcctgcgcgccactgattggccgcggggatttaaaatccaaacccgcccgccgcgcggcaccatgggagcgccctgcgagcgacagcctttaaacccggacccagccgggaaaacctgattgacacggacgcccgaacacgtgggatagcctgggaaaccaaacccggcgtggatgcggagacccagccccgagagaggaggaattcttcggggtttctccctttctcgggcgtccgggaaagctctgcggttcacttgcgcctcctccaggaagcttttacttaaatcttcctctacctcggggccagggaacagtagcatcgccatcacctgagagcttgttagaaccgcaaaggcaaacgttcaggccctaccccagacctcccgagtcagtgtccgcctctcaacaagactgctcaggtgattcctacacatcctgaagttggagaagcacagtacca

SEQ ID NO: 308014 - DNA, 1000 bp, Homo Sapiens
aaacatttgaaatttttattgatttttaaatttaaaatccagttttaaccacaaaattgtttgaatcacaagtggtaatacaatgtcttcaatatttttctaaagttatttttctatataataataagacaacagcatagcatataggaagttttcattccagtggcttttttatatatttatccttcttaggaaggacaaattaaattttttaaattaaacttttaaaatataacaacatctaacagaactgtacaaaacaaagagacattttttaaacaacttgccaaacttacttatgagtgtgttttaaaaacaactttgtaaatgtctgggcaaagaagcaagctgtcctccctttaccttcatagtgagtttgtaaggctttgtctttgtaagcagaaagagtagactgtgttgttttttgccaaaaactgtttatacttaatctcactgaagtattgctatatggagaacccatactctgatcaacttgattttttgtgtgtaatgcttgatctaccaggtaacttcccaactgctcctaatgctagcgggctaatcccacattattattccactatcatccctgcagaaaggtcttggttttgatgaaaatcagccctttccttacctgctactgcctcaaaaagggaccaggaagattctagctggctaattcactgttccctttgagcaagaaaacggcacagggagaaaaggacttatctggtgagagatttggcatataccttcaatgtgtgccctataacacaacattgtctccgatctcatctttctatcaaatgacttccaacactcttaagtctcaggtattcttaaatctgtatcatcaaacatgaagcttctcttgtttgttagagtaattaatctttctttggattaaagtttccctttgaaataaaaccacctacctaatctgactgctaaatttctagcttctttgttttaaatatgctcaggagtcaacccaaattct

SEQ ID NO: 308015 - DNA, 1000 bp, Homo Sapiens
cgaggggacttcaaaaagttcgtggaaaatggaattaaaagataaaaattaaaaatataaactttatttctcaacataagctccatcaagttcaagacacttttgtaagcgatgataccagccatttagtccatccctaaagaactgagggtcctgggaatttaaccatgtcaatgcagtcttttttacattattaactgaagaaaaatgggtgccctttaaagattttttaagattaggaaacaaaaagaagtcagaaggagccaaatcaggactgtaaggtggatgcctaatgatttcccatcgaaactctcgcaaaattgcccttgtttgatgagaggaatgagcaggagcattgtcgtggtggagaaggactctctggtgaagctttcccgggcgtttttctgctaaagctttggctaactttctcaaaacactctcataataagcagatgttatcgttctttggccctccagaaagtcaacaagcaaaatgccttgagcatcccaaaaaactgttgccatgacctttgctcttgaccagtccgcttttgctttgactggaccacttccacctcttggtagccattgctttgattgtgctttgtcttcaggatcgtactggtaaagccacgtttcatctcctgttacaattcttcgaagaaatgcttcaggatcttgatcccacttgtttaaaatttccattgaaagctctgctcttgtctgcagctgatctgggcgcaacggttttggcacccatcgagtggaaagtttgctcaactttaatttttcagtcagaattgtgtaagctgaaccaattgagatgtccgtggtgttggctattgtttctgctgttaatcgtcggtcctcttcaattagggcacgaacaagattaattttttcctcacaaattgatgtggatggtctgccgctgcgggcttcatcttcaacatcgtctcgtcccttcttaaaacgagttatccatttgtaaactgctgat

SEQ ID NO: 308016 - DNA, 1000 bp, Homo Sapiens
gtcagcttcgggtgggagcatagtggtcatactggtcatctgagttgtgggtttctcatttgtcctagcagaggatatctgttgggcctagcagtggatacagtcacctgagagcacgtgttatgaaaacagaatccccgggcccctctgccgacctctggagtcaggattttctggtgccctgggggttttcaaagacctggacatcagtctctgttatttgatgactagtatgctcccacccaaagctgatcagatcatgctgtgagtcacttccactagacccggggttctcaggggtcagcattctcagagtcaccaggagagcttaggaaaattcctgtgacaatcccaatgcccagattgtccccctacagccaataaggcagactcaaaggttgaggaatggcaagcagcagtagtttctgaggctctcggatgatgccaatgtgtgtccgagattgaaggccactggcctagaatattctccacccaagtctgcatgactaggtccttcttcctatggcttggccctcggtggctcctcctcagggaggcctcccctcaccacttggtctgaggaaacaccctccctgtgagttgttctccacgtcatcacccttgtgtattttcttgtatcgctatttgaattttattttatctttttttttttttgacatagagtctggctctgtcacccaggctggagtgcagtggtgtgatcacagctcactgcagcctccacctcctagactcaggtgattctcccaccccagcctcttgagtagctggtactgcaagtgtgcaccaccatgcctggctaatttttgtactgtttgtagagacgggttttcaccatgttgcccaggctggtctcaaacttttgggttcaagtgatccgcccacctcagtctctcaaggtaggactacaggtgtgtgctaccatgccagactattttttccattttttttttttttgtagagatgaagtctcgctatg

SEQ ID NO: 308017 - DNA, 1000 bp, Homo Sapiens
ccaaatatcgaggccagtaagatttatggagaaaaaaacttgctttgccaaaaaaaaatcccccaaagctctataatactttatataggtggggtacatgctgatgaagaacataggtttttcaatcaaattgcttaggttcaaattctggttgccacttaaaagctgagtaaccttggacaaattgtttaatcttcctatgtgttggcaacctcctacgtaaaagggaataaaaaactatctatctgtctcatatacattttaatgagctttttggaagttactgttccttttaggaatatggaaattaatcactgctctcttgaaaagtatttggctatcccatatcccatttagaaaagataaggaattcttggtaagatatgtataaatcactggccaataacgtgctttgtaaaatttccctcgaggatactttttaggtatgctatatgtattttagaaaaacagagactagctagcattcttaattagttacagaacattctgttctattttctaacacaaggctaatgtttccaacttgatctcttttgttgaaagactccactgaagtaaattcatattttattttaactgtcttaagtcttggcaagtaaatgacttttcagtggatactgaactacatgcatatgttttcaataagtgattccaaccaagatacaaaggcttaaaaaaccagacctgctatgtttaagtcatttcccaagtattttgaatcatgactcatgatccaggttctactgcataaaaagtgtaagtaaccaatatttcagaccaaaggtcatggttcttcccacttgcccttagaaaaagaataagatgttaccattgatgtaggcacactggttttccctcaagactctttcagacttcttgaccatctcattggattttttgtcaggccaggcaaataatgtctcctttagatttccctgtagcatcttcagaaagcagtgggagttggtatgatcatgaa

SEQ ID NO: 308018 - DNA, 1000 bp, Homo Sapiens
gaagatgcatacttccccaccccagaatttcacagaaaacaaccagccacacattttgaggtgcagatagcttgctttattttgttgttactatctcaaggaggtccaacaattataactaacaattgaatttatacttgcatgaaaagaactacatcaaattgacattttgggcaattagtaatattgtttaaaatttaacaacagctttattttgttgttgttctttactttttgctgtggctcattgcttaggtgcccaggtttttcaggtgcaattaaaatttagaactaccacacaaaggcattggctgcactctgggacctccaagagttggcactgctctggcataggaatacttgatagctttggttaaatgaagggatggcaggagatgttacttttccaagctattcaggcactccttatgtcagagacagcgtaaaatgagcgaacaaagtgttggccgttacactttgctctggtaatatttgtcatgataattttgtgtgacatcatcagagaaaatgtaagacgttaaagtgttgcttacaggagggtaaatgcaaacatcaccaatgccttacatttctgattcagtaggtattggtgcacatatcaagtgatatgcacagcatcattctcttttaggtggacaggacatcttcaatggggattttctcaacccactgaggcatacttagacatcaacagtatgttgaggcacaaagattgattaaatgttgagcagggtattcgttccataagaaactttctcctaccaacagttagtttcaaaacttacattgtaaaatgtcataaaataaatggtacaaaactttataaccgttaatccggctatatacagtatgtacatgtcactagcaaatgtattatattcttaggtcaacaattatgaaaagattgaaatgaatatttttgaactttgactcatttaggttgatacaaaactacttttttttctttaaatatttacag

SEQ ID NO: 308019 - DNA, 1000 bp, Homo Sapiens
agcaacattccacagacaagtgcaaaacttggcttggattcactgttgagaataggcacaattaggtctgctagtcttgtttagtaaataggaagacaccaaagaaatgtacccagcaacttcaaagaacttgtcttgtggtaggcagccatagttggcacttcatttgcagttaggaatgtgcaaataaacagtggtcaggatctgctcaaatcagctggacaaaagcttcctcttgcccagggcagcccactcaccccagaaataccattcttggtgtgcacaaagggtgccagatgttcttattcattcaagatgtccctgctgacctaatccctaagaagtacattccagtcgtggcgacaagccctctccttccagtgaatgaagaatggataggtgcacttttaaaccagaagtaacaccctgtgccattcatactttgttggccctagtgatcaggattgtaacttagcagggaaatttagactaagagcataataaaagctattaaaaaaacccaaggtgtcaacttcaataaaggttagtggtcactttagcatattattgtaatcacttctatggccatcaagacttgtccttttaggatatagtatgtcttttcccaggaacacattacatattttttctaaccacagaaaaaaatgcaggacagcttcagagagctgtcttgagactcttgcatgttgcattaaaagctgagctcttatggatatgaataaagtggatgtcagtattttaaaaactggtatcagcagccgggcgtggtggctcacgcctgtaatcccagcactttgggaggccgaggcggccggatcacgaggtcaggagatcaagaccatcctggctaacatggtgaaaccccgtctctactaaaaatacaaaaacaaaattagccaggagtagtggtgggtgcctgtagtcccagctactcaggaggctgaggcaggagaatggtgtgaacccgcgaggcggagct

SEQ ID NO: 308020 - DNA, 1000 bp, Homo Sapiens
tctattttatatagttttagtatttaatgagataatacatataaagtcattaaaacagtgtctggctcataaaaaaccctcaataaatgtcacttattactgtatctggtttttgagctgctctattgcaccattgagttttcagcccagtatatgttaaccctgatcattatctgcagaagtccccgtgccacactctacatcatccaaattctctccaggtggactaagtagattaaagaactttaaacataactaccatattttggctctatctacaaaatgtccaataatcagttaagaaaggaacaattctcttggggcccacactttgagaagcaaatgcagctgaacttttttagaggaaagtgagtgaaccaactggtagctttgccactgcttaaaaaccagcatcctttccagctgggtctaagacagaataaggtaaatttagatatgtctctaatatatctatagaacagtggttctcaacccggggtgtttttgccccttaggggataatttgcaatgtctggagacatctgtgattgtcataactggaagggggcagtgctattggcatctagtgggtatagagcaagggtgctaccaaatatcctatggtgcaacagagaattatctggtcaaaaatgtaaatagtgctgagggtgagaaaccctgctataaaaacgaaagaaatttggtctacagagttgtttggatttagacaagacgttgccccaatagtggtgatagaaataagaggaaccccgtgcttttgcaaagcccatatctggggtggcttaaataatcatgctcctccccatcccccgacctgatctttgtagttggaaactccagggctggctgcctgtagtctttgtgactacacttcctgcctcccatcacttcatctcagaagactccagatataggatcactccatgccatcaagaaaggtattttaaacattggaacacatatagataatttaagtagg

SEQ ID NO: 308021 - DNA, 1000 bp, Homo Sapiens
ctcgagatccattgtgctctaaagtttttaattaaaacagcaaccaggtaactgccccaacccatcagggaaaggacccgggatgggcagtcgttttttcaaaaaaatatattttctttttttaaaaacaacacccatagcccctgtcacgccagtcctcagggagagtgagctggaaggctccccctgcacttctctgagcagagattttgggcccctcccactggaccccagcctgagcagagggcaaggctctgcctgctggtaccctagggggtgggggagaagcgatcagctccaaaccatgcaagaaaaacaagccaaacccataaagcaaaagaaaaaatcaacagaggataaattaaaaaaaacacgaaaggtgaatgacaccgataacggtggcgggcaggactgggtgagccagtgtgctccgcagaggccctgtttgccagtgccaggggaaggccttgggcggctcatggcatctccctcatgggagtcttggggtattcacacaactcatcccctcttgtgtaccccgcaccaaagccgggatagaggtgtggccaccctgggccaaagtgtgcaaagtccattcagtcgagagattaaaaaaatatacaacttggatggcatccaggctgggcaaggcggtggcccatccacccaggcactggcagcctgctgtgcaggggcagcagcatccacagggggcatccaggccccctcagtccaggatctcagcagctggagacgggtcctaggagcagcagggagaggcactggtggggccgacaagggcctggctgggagccccaatggtctgcttctttggcacttgggacaaatggctcgccacagagccaggtgggagcagccccctcggttcctcccagatgccctgggccaggatggcagtagcttatggtgtgggtgagcactgcccccgcagatggggctgtggggctctggagggccggagtggggtccgaggcccagc

SEQ ID NO: 308022 - DNA, 1000 bp, Homo Sapiens
ccatggttgctctagttcacgccctctttatttgttgcagtatcctcctaacagatcttggctcttcaaacatatcttaaactcttaaacattgcagtcagaatgatctgtctaaatagatctggtcatgcaccttccctatttaaaactcttcaatggctctctagtgctgcaaaaaacatgtaaaaggcaccggaagacgccccagccagcctctggcctcaccaatcctcattatttttctatccacgaacactagataattctgatgtgttttactgctctgtcctttgcatgttgtcttccctgtacctgcttctcttcctggccagctctttctttccttgaggatttcacttagacatcaccttttccagaaatcttccttgaatgctccgagctaattgtttctttttcaggcccttatctctttttgttattgttgttgttgttgttgttgagacggagtctcgctctgtcacccaggctggagtgcagtggcacaatctcggctcactataagctccacctcctgggttcacgccattcccccgcctcagcctcccagagtagctgggactacaggcacccgccacgaagcctaatttttttttttttttttttttggtatttttagtagagatggggtttcatcgtgttagccaggatggtcttgatctcctgacctcgtgatccacccgcctcggcctcccaaagtgctgggattacaggcatgagccactgtgcccagcctggcccttacctcttttgaggcatgctgtattacaatttttacttgtctcctttattcaactgaagttcctctagggcagaccccatttctcaattcatttttatctgatcagcacctccgcagtatctaacatccagcagatattactcgttaaactgaaccaaaccacttttaaggctgactttcctaaaacaggctgcattgtgttactcatctaaagataattctctaaaggagggtttggca

SEQ ID NO: 308023 - DNA, 1000 bp, Homo Sapiens
agactcattcatggaaccccaaaccatatggagaaaattgagccagagatgtgttatacttcacagctgccttgggttgaagaatcttggctggtttctgaaagggcagaagtcttgtctatgtttattcttgaacagtcagtgcctagcatgatgactagaacttagtaggtattcaataaatatttgttgactgaatgaatttaataaatctttttgtcttgctgagttgtatgagatatatatatatttttatatttatatgtatttatatctatatttatatataatatatattatatatttatataatatatatttatgtattatatatttatataaaaatatatattatatatttatatataaatatataatatatatttatatgtataatatatatttatatataaatatataatatacgtatgtatattatatatttatatataaatatatattatacatataaatatatattatatatttatataaaaatatataatatatatttatatataaatatataataatacataaatatatattatataaatatataatatatattatatataaatatagatataaatacatataaatataaaaatatatatatatctcatacaactcagcaagacaaaaagatttaaatatttaatatatttaaatatttaatatatttaatatatttatattatttaaaattatattatttaaaatatttaatatatttatattaaatcccaaagtgctgggattacaggcgtgagccactgcgcccggcgtggatcctctcattttcttatctttgttcttacttcaatctctacatgctctccctttctgaactatttctttactctctattcagtttttatttctactatcttttttttaatttctaagagtttttgttattgttattctgtgaaggtctttttatactatcctgttcttgtttaatcaatgtaatcttttcattctctgatgttattaa

SEQ ID NO: 308024 - DNA, 781 bp, Homo Sapiens
ttttttaaaaaaaaaaaaaaagatacggggtcttgctatgttgcccaggctgatcttgaactcttggcctcaagcaatcctcccacctcagcctcccaaagtgctgggattacaggtgtgagccattgcgcctgcccctgggaactttttgctgggagaggtttctcttatctgtcctggcttcaggagggcaggaccccaaacaaagggtttctccaagtgaacagcactttggggatgaaagtggcgttagtactcggggtggagcagagctggctgtagcccacagggtctgctggagcctaggacagcacttcgtggggaaagcttgggctttacctgcccaggatctctttgggctcataattctcatagaagtcctgtgcagaatgagagtccggcagtgcctcgtcccgggtcatgctcagatcttcagtgagggaactctgggtggctctgagaggggaaaagaaagaagctgtcagccttcctgacccaggggctgttctccttggggtctggaactgtttctcactcatccttacatctcctggcactacactggcctatagtgaatgttccaaataaatgtttgtgaattgaggccgttcgtggtggctcacacctataatcccagactttgggaggctgaggcagatagatcacttgaggccaggatttcgagaccagcctggccaacatggtgaaacctcatctctactatacaaaaattagccggatgtggtggcacacgcttgtagtctcagctacttgggaggct

SEQ ID NO: 308025 - DNA, 1000 bp, Homo Sapiens
cgtttctacttttttcatttgtggtttgtactttttcaatttcattgtgtgatgtgtaatatttatattgtgattcagtttaaagcacattcttacttctgattttagttttctcggttaactcattgattattgagaagtctgttgctttaattaaaaaatgtagggatattagttatttcgactgcagaatcaagtgagtcccaaagttcccagcatctcctcatggtctttgttaggggtccaggctgactggggttcattggtgtccactgggggcagctcccgtgccttcagcagtcctgagtctccttctactgagtgtggagtctgcgtaccctccgggctagtggatggccagggtggcgtagatgctgggctcagctggaggttccctttcctgggatggaggaggctcagttgccttccgtctgagggtcaagctgtgcagctgggcgtaggtcacatcctggggggcttcagatgcagcagcccgagtgtccatctccaccccatcttcaggctgtgtgtccttcacggcagcatagaggttttcttcctgggcgtcggcagctgggctggacctccactgcaggcctctgtctgtgggctctggccccacagcccctgcaggatgttggaaatcagcctttctctgggtcgatgtccagtgtttgccctgacgtcgatgtcggaggatgaggaagaggaggaggaggaggaggagcagtaggacgacggccaccaagatgccgatcacaacccccaggtgccttcccagaccactttggggatccgacccagtgggggtgaggggctggtcctcagggcctgcaggtgtggagatgggaccggtgggtggggggctggaacccatggagggtcctgagaccacgagctccaggggctcactggggtgagacagcaggtaggggtcggagttgagtgagccgtagcacctgtaggtccccgcgtgggctgaggtcacaggactcatggg

SEQ ID NO: 308026 - DNA, 1000 bp, Homo Sapiens
tttttagtggtaataacattccattgtctcaaggcaccacagtttcttcatccatttacctactgaagaacatcttggttgtttctaaacttttagcaattatgactataaatgtaaaaggagtagtggttgccaggattagggagagggagagatcaacaggaagagcacaggggatttaaggcagtaaaaaaaaacctctgtatgatagtgtattagtggttatgtatcattgtgaatttgtctaaaagctatgaaaagccaacaccaagagtgaatcctaatgtacactatttattttgggtgataatacatcaatgtagattacttaattgtaacatatgcaccactctgataggggatgttgayaatgaaggaggccatgcatgtgtggaggcagagggtacgtgtgacactcttttgccttcctcttaattttgctgtgggcataaaactgctctaaaacaaagcaacctttaaaaaaaaaaaacccagacgtggtggctcacacctgtaatcccagcactttgggaggctgaggcgggcagatcacgaggtcaagagatcgagaccatcctggctaacacggtgaaaccccgtctctactaaaaataccaaaaaagaaaaaattagctgggtgtggtggcgggtgcctgtagtcccagctatccgggaggctgaggcaggagaatcacttgaacccgggaggtggagcttgcagtgagccaagatcacaccactgcactctagcctgggatacagagtgagactccgtctcaaaaaaaaaagaagagttggacttcatcaaaatcaaaaacttctgtgcaaaggatactatcaagaaaatgaaagtcacattttgggaggccaaggcgggcagatcacttggggtcaggagtttataaccagccgggccaacatggtgaaaccccgtctctactaaaaaaaaaaaaaaattagccgggtgtggtggcacttgcctgcaatcccaactacttgg

SEQ ID NO: 308027 - DNA, 1000 bp, Homo Sapiens
  misc_feature (629)..(629): n is a, c, g, or t
atgaaagtcatttttaaaatcctttttaccatatttaaattaaaataaattattcaggcctatttttaaaataaaacaaagatatatctaagagattagaaaactttttgataaaatcgttaaaactttttgataaaatcattaaatgtttgatctctaattaggtatagcttcagctatctgaaaaattgaatcatgacaaattaaatcatggagtgaattcactccccagtgatgctggataaaatgaagcctgactatacatggatttctgtcgaaacaagcaacatgcctattatgaggagtagcatattggttcaaataagaggaaatctgatcaactaatcattccaacttattagctcaaatacattctttagggaattaagggaagcatctttctaaaaatcttcctcaacatatgtttccctaaaatcaataaatttagtgactccagagcctggttagtttctcattcatattatcacaaaagaaaaatacttattttgagaaaaatggacagtatatatttgcaggcaaacttcacctgttgaagtctcatgttatgactgatgttgatgctgctaattaatacttaaaatcctattctaaaggggtagctgctggcnaatggtttattttaacaacatacttttgtatgacctgccatcacttcccaagttgaagccagtcctgcagcgacaagtccgagttttgtaactgctgctgagtagacagatgtgtgaacagccccctggcattccatatggatcgacttcacatgcatggcttctgactacaacaaataaaaaacagcatgcgtgaaattcaagttcaaagataagataactatgtgcatcagtatgtcaaaatttctatagtgtaaaaacagggaatcttagcaaaattttgtatactcaactatttagcaccataatcgaatgcaaaagagtgtaaaccccatagaagaggagacagggatttgacaaaatcctcctaa

SEQ ID NO: 308028 - DNA, 415 bp, Homo Sapiens
  misc_feature (339)..(339): n is a, c, g, or t
tatatgccacagagctctcagaaacgaatgttggaaaagttcaggaaacacttagcacaccaatattctcagattgatggaacaagtatttactttacaatctaattcatcagagttgtctccgcagtcattttctccatcacataacttgccatgaggaatgcagcggcgattatagcatggcttgaagcctcttcgacagcttctgttttcttataaataaaagtagaaacacacaaccagagatcatatagaaatatttgtacaaaatgaaaatcacagataatatttcattcataatgactggattatggatctataaaacaaagtgctgtgccntataaaagctctggattaaaatggttatggtggtggcaaagaagaggtcattcagccaagggccctttttgactta

SEQ ID NO: 308029 - DNA, 1000 bp, Homo Sapiens
aatgtaatttgagtcatttgtggcttctgctatatccgtgtcatgtttaactatacgtgacatcttctctgttatatccttgtctgtactattttgtatgttaattattgtgctgctgtgattaggtaacaataactttagtcatgtacatagcttaaccgataacttataaaactatacttttactcagttttttaagaaaattgaaatcctagcagtttgcagtaatagcctcatatttacaagcaaataaccttctatttcaattcagttgggatgcatgtggatattaatttataaaactactgcccatttactagaaaatctatttagaaaaatagattaaagaaaacattgatagtgtaaaatatcttgtgcataacatataatttttgaatacatctaattctaatttaccaatatttttataaagaagtataataatgtaaccttaaattaaatatgttttatgagagaaagcatataaaataaatatatatttttaaataaatattttatgacctggtaaaatactagaatatttatgttactggaccaacctttgtgtctatgagatccatccatgttgctaaattcaatgtgattttcatcggcccagtagagtctacgattaacataatctattgttagtgccataggtctagaaatcttggtttctatgacaacactctgattggttccatccattccaacacggccaatatgaggatactcgcagcagtcaatccaatacaaatatctaggaaagaaaatcaatactgattttgtttacagattctctgggagcaaaacaacaaacaatatattacttttttgctcaactgttcccacattaatcttgccatttttctgaattgcagcttttaagaaacatcctttgatgcaaaatttcttatggtgttttattacacatctagtatgatttgaaatattcttataactttaaacatatgtttattttagaacacaaactcatata

SEQ ID NO: 308030 - DNA, 1000 bp, Homo Sapiens; identical to SEQ ID NO: 119888

SEQ ID NO: 308031 - DNA, 1000 bp, Homo Sapiens
taggtgagcttgtagatgaaggcggcgtgcagggtggggtggcggccaggaacccactaggatggcctgtgcgttatgagtagaggtgggcaccgcggcagaggtcctggtggcagacctccacagcagaagaggacgcgcgggaccagcgtggcccgctcagcagccctcgacgtctttcctacagaaaaaggcctcgacgaagaaggtggcacggcccccgccacccacgccctgcgtggccacccgagacagctgcaagccgcctgcacccgcctgctgcgacccgtgcgcctcctgccagtgtcgcttcttccgcagcgcctgcacctgccgcgcgctcaaccccaactgctgaacgcacttccgcgctgcgcgcgcagcctccgagatgggtgattgggcggggcttcaaggctgagggaggggtctcttcgtgggtgggcgtggtctagggtggtgggtgctttccgatgacaggtgttcaaggaaccctaatggaagctaaaatcagaatacagtatctttcggctgctgggaaagtgtggctgtttctttaaaagagccgaaagcttccggcccctttaccgagctctgatccttgcggagaccccgaggatcgcgcgtggctggtacctttgcttctagcagtaggcacgatgctgcccggttccttccagactttcagtaccggctgcctccagtctaggagaaagggagctttagggaacggccttccagtattttcaacgctctcctcccggggaggagtacaaatatcccaggcgagctagaaatccacaggcagtctcagccgggtaggggcggggtggtgcatttgttgtgggtttctaaagccagaaagatctgggttgaggatcctacaacttttaagagtctcccaaacaaaggcactaatgaaacccactcctcccttcctcccaagggcatacagatgtttggaccataagaattttccgggcattagtccccatgcatt

SEQ ID NO: 308032 - DNA, 1000 bp, Homo Sapiens
gaattcaaacaattctcccacctcagcctcctgagtagctgggactacaggagcataccaccatgcccagctaatttttgtatttttagtagagatgaggtttcaccatattggtcaggctggtctcgaactgacctcaggcaatctacccaccttggcctcccaaagtgctgggattacagacatgagccaccacgcccagctaattctgtattttaagtagagacggggtttcaccatgttggtcaggctggtctcgaactcctgacctcaggtgatccgccagccttggcctcccaaagtgctgggattacaggcgtgagccaccgagcctggctgtatttttaaatacaaaaatttgccaggtattgtgatgggtgcctgtaatctcagctactcgggaggcagaggccggagagtcacttgaacccaggaggttgcagtgagctgagatcacacccactgcactgcagcctgggtgacagaatgagactccatctaaaaaaagaaaaaaatgtattttttaaaatacatgatatggcaaatcataaaggtggtaagcatctgaagtgtgagaaataatcatgcagcttatgcagtttttgtctctaccaatctttcaaaccctcaaactgcaatgcttgctcattatagaaaatctgggaaaatacagtaagttctaaatttccataaattctaaatagcatctctttgaaaactaactccttgggcatttatcccagtgaaatgataataaacagccagcatttgaaatgtatatttcaatgactcgtatatgaatactatgttcagatcacaataaaggacatttccagcaccctcttagataatgcctcccatctgattatcaccatagattagttttgcctgtttttgaattttttgtaaatgggatcacacggtatgtgctgtagtgagcctagcttgatttgctcaacgttacgtctaaaagaattctctattttgctgctatgcagca

SEQ ID NO: 308033 - DNA, 1000 bp, Homo Sapiens
ccctgttcagtgagagccccatccttcaggtgggtggaaaagggatacctgccttctgctgggcagggaggggctggggcataacaaggtcttacccactccagggtgaaatgatgactgctgcaagtacagcccttggaatcccagaatcacaggacattggggactttttcttctcagcattacaagaggcttgagagagaggaggttaaaatatcccagggctgggcacggtggctcacgcctgtaatcccagcactttgggaggccaaggcaggtggatcacctaaggtcaggagttcaagaccagcctggccaacagggtgaaaccctgtctctactaaaaatacaaaaattagccaggcatggtggcaggtgcctgtaatcccagctactcaggaggctgaggcaggagaatcacttgaacccaggggaggaggttgcagtgagccaagatcgtaccactgcccatccagcccaggcgaaagagcaagattctgtctcaaaaaaaaagaaaaaagaaaagaaaagaaaaaagacgtctcagggttccaggtggagaaaatgggcttcatctaaagcaggaaagactgcagttagacatgaggtaggaatactgatcatccaagtgtcagcatgtggaatgaactcccgaaggcggctatagattctgcattcccaggaccgaatgcaaaaggacctgccctgactggtgaggcccgaccagaagggccagctttcctgagtctgacgacccctccttcacggcaaaagattccataatgagggcacttttagtatgtgttaatagcaaaataacaaaaagccaacataacccattcagactttagagcacatacaggaagtccaggaacagaggaacagcctgacagcacaaacaggcactgtcgagtgggggaccctcttacaaatcaacttcatgtctgcaccagccaaggacattttatttttatttatttatttatttatttatttattt

SEQ ID NO: 308034 - DNA, 1000 bp, Homo Sapiens
ccttctttcttctcatctatcctactgtaatgggctttacattttaaacacagcttgaaataacaaatcatgactataatacatgaaaacggtttgtattttgttttatttttatttagaagtagagaatacagtaatagtgaggcaggagaacagggaattaggatagccaggggtaggggcataggcaaaggaatagcaggtgcagccagtttgcataaacaagagaacagcaggtgcagccggttctaggcaagatcaggcagcatgcaggccacatcctcatgcctgtgataaaaagacaagaagttcccacttcagcctctgcttgaccatgagctaagcctccacttcagcctccgattggtcacaggccaatccttcacaggctgtagccaattggaggcttctaaagggtacctaggggtgttgccaagatcttttggctttataaaaaccctaattagggccgggcgcagtggctcacacctgtaatcccagcactttggaggccaaggcaggtggatcacttgaggtcaggagtttgaaaccagcctggccaacacagcaaaaccccatctctgctattaaaaaaatacaaaaattagtcaggcatggtggcccgcacctgtagtcccaaccactgtggaggctgaagcacgagaatcacttgaaccagggaggcagaggctgcagtgagcagagattgcgccactttgcactcgagcctgggtgacagagggaaactctgtctcaaagaaaaatttaaaaaagcattaatgattcaaaaaaaatcactgatgttaagaattcatgggtggaaatttgtaaaatctgtttcagaacacgagagaattaataaaggcagaattttattttatttttatttatttatttatatatttattgagacatggtctcactctgttgcccaggctggagtgcagtagcatgatcacagctcaccgcagccttgatttcccaggctcaagcaatcctc

SEQ ID NO: 308035 - DNA, 1000 bp, Homo Sapiens
tttttttttttgatcttttgctgattttattatactatatagatttgtatttcttgtgatctgagaaacatcaaaattctattttaaatttgttcttaaaaatatacaatattgcactttaatttttggcagcttaacaggaatgaatgagtacaaaaaatcatacaagaaactagaatttttattttgcttcataataagagctttgtgaaaaacaaaacttacagtagtgccaaataaaccaaatatttacagtatagatattaaagtcttacctctaaaggaagattcagtgtattggatgtaaatattattaatataagaaaagtcacccccactgcccaattctgctgaacattttaagccaaagagtattggtgagaaatgcttctgtgatttctttctcaagacatacatggaagggatgcttgttcttggagcatctaaagtgggtcattaaacttttacaaaaatgtttcctccataacttaaaaaaaacctctactctaagccaagaatccaaggtaagcttattttttattttttaaagttcttctgtagttactctctcttttttttaaaataaatagaaatgaggtgtcactacattgcctaggctggtcttgaactcataggctcaagtgatcctcctgccttggcctcccaaagtgctggaattttataggcatgagccaccgtgcccggccagttattctcctttacttttataagcatgtaagttagttggtaggttacaattttaaggtctgtttcctgtgctttttctaagatatatctgaaattggataaattccgggcccgattttcaacttttgttacattgtaataaaactgtatacatttactttgacccacaatttgtttttactttttttttctcttaactagggtctcgctgtggcacccaggctgaaaagtgcagtggcacaatttcagttcactgcaacttccatctcgtgggctcaagccatcctccaac

SEQ ID NO: 308036 - DNA, 1000 bp, Homo Sapiens
cctcaagtgatccgcctccctcggcctcccaaagtgttgggattacagacatgagccactgtgcccagcccaatcttttttttttttgagacagagtctcgctctgttgcccaggcagctagagtgcagtggcgcaatctcagctgactgcaaactccgcctccttggtcaagcaattctcatgcctaagcctcccaagtagctgggactacaggcgtgcaccaccacatccagctaatttttgtatttttagtatagatgaggttttaccatgttgaccaggctggtaaaaaaatcaatcttctgagagtaaactatttataaccaggagttctttaaaaaagaaatatcactgaagatactccagctgaacagaagtatttattgaagatctactatgtggctggtagtaggagacttgatatctccaatgagaagcctctcccaggaggaactttaccactgtgttcaaaaacatcacaaatgcacactcatccctccactggttcaccgaggccaacagcagaggtgggtgtaccagtggcagctgagccaagttacctgctggccatctcaatggcatccttattgggtggggggatgaggaagcagactgacggcaccattgcctcgttccctgtggggctgatcactttccatttggtccgctgagaattatcttctagcacacattcatcatttttgcaaatagtaatctgaagagataaatttaccagtgattgctaatggataaaccaacaacccattatttcctggtgcctcatcccaaagctatcaaatccttaagaaaaaaatctgcttaagaaaagatctgctatcacttagtgagggcttctgatttttgccaaaagataatgggtataaatctacaacacaggaaaaactgtgacaccaaataaatcaaggaaataagtatgtattaaatacctgttacatgtcaagtaacccagactatgaaagttataataagactataaag

SEQ ID NO: 308037 - DNA, 1000 bp, Homo Sapiens
tagtcccagctactcaggaggctgaggcaggagaatcgcttgaacccaaggaggcggaggttgcagtgagctgggattgtgccactgcactccagcttgggtgacagagcaagactccgtctcaaaaaaaaaaaaaaaagataaatatggatattggtttgcctagcagggaaataaaattgatacaactcaaaggacaaagaaaatgtgcttgagtttacctcatactgttggagacagaggttcaggctgtcaacatctatttcactgttagatcccttgctgttcagaataagatttttattgccaacccaggctctcagatcttgaagtcggccttctagctgtgtgtgctgatttaacactttagtctaagaaataaatggaaaatcacattatgaaaatctcccagccacccagactttgtgagcctttatgaataaaagcaaaatgctaccttttctatttccacagcattctggaagtggagtagcctggaattccaagtgtcactcacagagctgagagacttctgaagattcttggcatctttctctagagccttcaacagttgagcaggaacttcttgaggctggctgatgataatctgattcacacactccagctcctgactgaccaaggtggtcagatcctttaactccctttctaatacctgagggaataaagtggagttacctataaaagcaagactagaaaccctctgggaatcagctgtgaacacatttctctctcaccccatgtctacacacactttagggcttagaaaatgtttttatgtacattcattagtttacttggttctcacaatcactaattcatgaagtaggcaaggtagatgttactgttctggatttacagaagagatgcctcattgcttaaaaaaaaaatgtgaatggtgtccaaggtcacccagctggtaagcagtacagccaggacttggattcaggttttctcactcagtgcagtgtgctccctccac

SEQ ID NO: 308038 - DNA, 1000 bp, Homo Sapiens
tcatgctcaccgctccacagacttgccacaaacagtatcccatttgtctctgacttctcctaggaaattgtcaagtttctgagtatcttcgggaagcaaagtcttttctttcagtgctctgccagttctaattgtggtatcatacacaggctgcttgccaccaagagtcttctgaaactcctatgtttccagaaagaaaagaaaaaagtgttaaaagtcagacgacatcttgatttggaacaaaagaatttgagttttcaggctagaaaccaaataaagtatgaatatcaccactttttttgaactaaaattaaccatagcttatccttaagaaatttataattttttgtttatatcatatatagaagtgcctgacaatttgtgaaagcctacagttttaactagttactcccataactactttccttaaactgttatttaaatgagcaaatatcatgattagaccatctagatataaaatggaaccctggcttcatcattttgacttttaaacattaaccaattggttttctttttactagctctgatttttatttttggcaagatacaagctttagcgaatactatggcttgggacctaagagcaattaactgctttaccttatgcttagaaagctgaagtttaattttgtctgggtcattggatatctctagttctgagtccaggtgactctctgcatcttctagccagtcaatcagttttttccaagcttcatggaactaaaattacataagaaataagttaacaggaatgaatatacacactatacagcacgtttgagaatcatcccagagactcaatacatgcagcccaagactcttcagtgaattagtatctttcttccccaacttacttgttttgcccgcttcctggcatcatctagtgatcgccctctttcaatagatcgctggacaaccttctcccatcgagactgcacgctcaccaacaaattcttgatcagaacaacatcctgctttt

SEQ ID NO: 308039 - DNA, 1000 bp, Homo Sapiens
ttttttttttttttttttttttttttttttttttttttttttttttttttttttttaaaaatgttttcctttttattacattaatttttttcaaaaatacttttctttacaatagaactcctagaaaatatttacaaccttcctctaataaaatataacagcagttaaatatatttgaaaataagatgggtttttccataaaatatatctgttaactttttatatacaagctttctcaaagaggtctaaattcactaatgaaaaaccatctgatagtaaacagtaaccgagttgagacattaaccattaggaagaaaagatctttggggtggggtaaggggagaagctaaaacacaacacatacatgcaggcagaattatttcagaaaaaaaaataagtgcaacattgtactaggaagtccattctttaagttgatagtcaagaaatactaattcaggaatttgaactgtctcgttaaggaggagttctttggttgtttcaagtcaaaaatccttatgctatactgcatggaaaattataagtaagctgtgcattctatttttgccatggcaactgagtttattttttaatgtttaaaactggaacagctgggcaaatctctaaacagaggcaatacatttgctttataaacacttttctggatgtttgctcctttgatagataagcttccatagacccaatagcagcacccttctaggcttaccctcagacactaagtggagggcagtagtccctgggagagacgatcagccaaggatatgacagctgtaatggttcggccacaaagttgatgcacactgcccaggcagttcctgactcacaactgcttggaaaaaacaggatagcataacctttctgaaatggcagcaaatgaaacctttttttcccctctaaacaaaagatgtaggaaaacgccaagacctctttgaaaatagaatgatggaaaagaattttatttttttttctgtccatggctttc

SEQ ID NO: 308040 - DNA, 1000 bp, Homo Sapiens
tttgacagactagaccacttttttattacagcttaattggcacatggttcactgaagatacacttcacttttacataggcttgtaaatagaaaaatacattgatgcacaaaaaatatagtacttcaataccaaacttaaatgatttccaaaaagaatacaggttatttcaataattaaaggtggcttttgtgtgtgcactatatcatgtatacacttaattgtatgtttaaggccagtggaatctatagctaattactcatttggttcttgaaaactgaaacatgcaaacattcttatttttatgtttaaagacatttaatgtgttattctaacacaaatacaccatatagaatatgccctgatatgtagctgtaaaattatgttgtactgcactgaagtcttatggcaactatataaggcactgctgtgtgattatgaccctgctctttttttttttttttttttttgagacagagtctcctctgtcgcccaggctggagtgcagtggcgcaatctcggctcactgcaagctccgcctcccaggttcacgccattctcctgcctcagcctcctgagtagctgggactacaggtgcccaccaccacgcccagcccattttttttttttttttttttttagtagagatggggtttcactgtgttagccaggatggtctcgatctcctgacctcgtgatccgccctcctcggcctcccaaagtgctgggattacaggtgtgagccaccgcgcctggccaaccctgctcttgaaatgtctaaatcttttcctcactagcatatacaattcaaatgcacaggcctccatgacttctttggaatttaaaagaagccttcatttcaaggatagaaatatgtaaaattttaccaaccatggataagtttgttatgggagtagtggaaggacagtggaaaaaaaaataggttttttcatgatacttttatttttccttttttaaaaataaatttagggggtacaagta

SEQ ID NO: 308041 - DNA, 1000 bp, Homo Sapiens
gatcttgtctcctatcagaatacagaattaaaagatgaggacaagtgaagcctttgttcagtgttatcaagatttcacttaggccatggcaggaaactctcatgagtatagacaacattcagtttgtatttttcaagtgcaccataatctttggtttggatgaggccaatttcgaactaaaccaagtatcatatgtaaaatacttgatagaaataaaagacgaaaaacaatagatgttgacatgggtgtggtgagaagaaacgcttatacactgctgctggtgtgaatgtaaattagtacaacctctatgaaatacagtatggagattctctaaagaactaaaagtggatctaccatttgatccagcaatcccactactatctacccaaaggaaaagaagtccttacatcaaaaggacacctgcatgcctatatttattacagcacaattcacaatttcaaagatatggaaccaacctaagtgcccatcaaccaatgagtggataaagaaaatatggtatatattcaccagggaatactattcagccataaaaaaatgaaataatgtcttttgcagcaacttggatggagctggaggctattattctaagtgaagtaactcaggaatggaaaaccaaataccgtgttttcacttataagtgggagttaagctatgggtatgcaaaggcatacagagtgatataatggactatggagactcaaaatggggagggtggaaggtagggtaagggataaaaagctacaagttgggtacaatgtacactactcaggtgatgggtacactaaaatctcagacttcaccattagacaattcaaccatgtaaccaaaaaccagtatatactttaataaaaaaagactactgaaataaaatttttaataaaaataaaagacaataataaaattaatatgatacaaacattatacctgctactcttcctagtgaatttcctaatcagtctaaaatcttgcatggtaaatt

SEQ ID NO: 308042 - DNA, 1000 bp, Homo Sapiens
ggtacccacaggatgaacggcttccaggatctgagggaacggaggctccacagctcctgtctgtctcctcctgggtgtttgttcaaccaagggaaatattgggctgggttgccccttgtctttctgtttgctgctgagcacacacttaagttcatgtgggttaaacatgcttatcatgagccctcgctgtgcggcgtggtgttttcacactggggctttgcagtgaggtggaaaagttgtgctacctgccaagctgtgtggcttctggctagtcatctaactctcggggtttcagttgcccctatttacgaattagggagaataataccttctcagagtgcccttatgaggattgtatgaaacaacacatacctggcacatagtaaatgctacccaccgtcatcatcaccatgttgatgaacggcagttactggtctctctctgccccaggtcctgtaaactccccagcggcaagggccaggctccattcctttctgtgcctcccagagctcagcacagagctggctctataagggtgcctggtagtgatgattctacattcccgaaccccgtatcccagaatgcagccggtgcctgtgctgttggtgggcagataggccggtgtctccagattctaggctggggctctggtaataatgcccagccgtgtggctgtggtgggcacagggacactggaagagccatgattaacactcagactctgaagctaggctgtatttaagtcccagcactgtcattatttagctgtgtgaccttggctttttacttaacctctctgggcctcaattttctcacccatgaaaatgggggttggtgtgagacttgaccatcccccagcctcatctcctctcaaactggacctcccttgacctcgcgagccgtgcagtttcttgctgtgtcttcgctcgtgtcattcccttggcctggaatgcttttccctctccacgtcggtggttcactcctattcatcctctacaac

SEQ ID NO: 308043 - DNA, 1000 bp, Homo Sapiens
acgccactgcactccagcctaggcaacagagcgagactgcatctcaaaaaaaaagtcatgacagtgtaagttgctgtatgcatctctgtaccactccaaaaacatcccagacccttttctgacaatcaaggtgtgcaaaatggtctctaaagggcatgaaagctcatgaaagacagaacagtgaattcccgacagatgtaaacagtaatttcctacttcacctttgacagctccaggccctggaagagtgcttgagtaaataaagacaaactgaatctaccataaactctctatcccacctactggtatcctatcccacccactgggaagaaaaatacaatcattagtccctggtgaacacaagagcattgatgtcgggcaaatcaagaagacaaatgaggaagagtaattatttcataaattgcaaaactatccacagcttttaatgtagctgactggtaaagcctaaaataccagcacctttttcaggagtaagagtgatagaattttctggattaaatcaaagatattttaagctgtcttataacacaatggaattttactttgtgtccaattcaggggtgaatactaaccctgaagattttcttgtaaaaagaaaatatgtgaatcaacaaatacttccactgtggactaaatgtaacgtcttcgaatgtttagtctgactgtggctggctgtgtctgaagaaaggctgacaaactctctgtatatgtatgcaaagactgtttctttcaaattcttcttttaatggctgagaagaaaaaggttgaaatcatccacttttgttcaatcatatgaacataatgccccattttatctttattacagaaaagattaagacaagaatgtactctaatttgctattacatttacatcaaacttgatcgagatcatcttctctatgcatcctctcttcttcctatcacccacatacacattcatatgtacatgaaaatacacacacacgtgtgtgtgtattgc

SEQ ID NO: 308044 - DNA, 1000 bp, Homo Sapiens
atgccttgcagctttctcccaaaccacactcctttctctgggagctgcctgccaagaaggctgcgcatggaaaccttaaaccttgctgtaagccctggccacatcaatggtgcaaaagtagcccctatcaggacctgtcaaggggaaacctgagctgcaagagtaactggagactcaggcagctgacctgcttacgatcccttagttgagagtttaaaccaactgtaactgggcagtacttgacaaccagcttccctaatgagaccaagagttaggagagctgacacacagcaccctcaggtcaggggtgggggagggagtatgccaccactgcacgggtcagagaacatagggtgactttaaaggccctgttcttcctctgggcacccccgagagtgtaggtccggccctcccagaccaggactcctatgctcttcctggggactctcaatgacacctggccttgtcccaaggaatactcgttgtaaagatttttgatgggtggtccaggtagaagctagtgaaataaaagctttctcaatggttggtgatgccaccttgtcttgacatgtgggcccctgcagttggggaaaagaaagagcagaggccaaatttaccaatgtgttggtcaaggagaggccaggataggacaaaggaagagaagggaaccctgatagataaaccccgtttgatttttaaggataacgagattcaagtaattaatgttcaccaaactcctactatgtgccgggtaccacgctggaataaaaggcaaagaacaggtgaacagtcctgaaaaaactcacaaaggtcatactttataactaaggtacattttctttttcatttagaatggattaattttgtcacaatatggcttttgaagagcaagaaagaatggaagggaaaaaggaataactgaaagtggaagaaagaaggcaagcaggacatgggaaaggagggagagtgcgttgtgggtattaaatgtgataatccttgc

SEQ ID NO: 308045 - DNA, 1000 bp, Homo Sapiens
attggggaaggggtctgcagggaattaaagacaaaaacgtatgctcctactactttagaagactatgctaaatgcaaaaaacataagtcaagcaactactggtttctcaagttcaagaagtaattcctattgttaccaggagaaagggtgatttgataccacctacattcttttttccaaaaaggaaataaaatttgtcagtccaatcaaacatccattgctctagtaacagacacctctagacaggtgcatcctgtttcattgaaaaggtggttcatttacatataaccacttaggtaaagcctccctctgtaaataggacatgttgctgcctgccagtaagtaaagactaaagtgggttatttggttagcctttacatattattttattatgagactgccctttcccttcttacccacttttcaacaggctcagaaatgaaaaaaactttcatttttgagttttcacagcacagttgcaaactcagccttgagcctcacctgctcactgtctaatgagccctgaaaacttaaagattcctgcccagggttaccgttttctgaccgtgcatgtattcatttaaagtcaatgtggatctgtctgtactttaattcactctaccaattttctctaccagtacacatttctgcatgtgttaaataaaaagtgatgttggcgtatactaccaaaatccaccactatttagtgtgcatttattctctttgaaattctttaagatcaaaattaagtagacgcctgcttctgctacaatttgcaattgaaagtggtttctactgagctgtaaaaagcaatgtagttacatccgatcacaatcaatctcatgcaaaccacacggtcttttcatggataactttacagcctaaacatacttggcaaactgacgtttgtgaccctcagaatctgtctgcatctttaaaacctagaatgaattctagaaacccaagataatcttcaatgtgacaattctgtttgactgat

SEQ ID NO: 308046 - DNA, 1000 bp, Homo Sapiens
ccctggattttcactttgcaattagattgcattggaatggtagggggatggggtctgatcttattacactatgtatgtgccagggctctgaaagggacagtatttaccaggagacagagcaagggactagggagagtcatatagttcactaaaatctggatatataaaccctgaagttttgggttgtggtagatgttttctgtggggtagctttaaatttttattttagtgagttattctgtttttctgaaatttgtgaagctttaaccacagtcagatctcaaaggggaactcaacactattcttcatgttcttaaagtgaagagattaggcaatagggctttggcttctattggaaggcaaggtgtatattggatggacctgtctcccacctaccacctctgtgactctggtcaagttccttttcctctttaagtttgactcttcatcagtaagatgaggataataaaacccagttcacaggactgcctagagggttaaatgatacaatacatgtgaaaagcgcctaccataagcactcaataaatggaagttattattccacatggagaactacaaaggatctttcccccaaattctgcacacctcctccctgtcacacacacataggccacccagctctggtagctccttccccaagggtcaagattttcctgaccacttacttcaactcaagacttggattaccatgccctttatacatctgcaagatcttggcattacgatcaaacgtgatcatccctgaagtaaagacatttagtgagaatggttgaaaggcttaaggattcagatttatactcccaaattcactactcctgtcaaagaaatgcagatgacttgcacattctcaaatcgccagtgtactagaggagacctgaccttctttggccaagactgatgatggcaatgtcttgagagcaatggccacgcacagtaagtagcagactgctcatcctggcctcagagctccaggctcaca

SEQ ID NO: 308047 - DNA, 1000 bp, Homo Sapiens
caggatacttgcataatagtcacacccctatttttggatactggttgaccttggagtaatactagttgaccttggagtaaaagattacatgaagggaacagaaagggggtttatgagatgctggtaatgttctgttccttgatctgaatactggttacatagtacattaatttatggaaattcatcatggtatatccttatgatttttaaactttgtatataatttaacagtataacaaactcaaactctaatcagtgattttcagaaaaatatttggatgttgtattagtctgttttcacactgctataaagaacgacctgagagagggtaatttataaagaaaagaggtttaattgactcacagttccaagtggctggggaggcctgaggaaacttacaatcatggcagaaggcgaaagagaagcaagtcacgtcttacatggcggcaggagaaggagcgtgttgaaggaagtgccgcacttttaaacatcagatctcatgagatctcactatcacagaacagcatggggaaaatctgcccccatgatccaattacctcctaccaggtccctcccctgacaggtggggaattacaattcgagatgagatttgggcagggacacagagtcaaaccatatcagatgttaaaaccttttttttcctttttgagttgtcagttttgaatataattatttcaaaaatttcattttgtttccttttcaaattctgcctagacatttttaatagcattttgctcatgttttcaaatccatcttttatttctagaaacattttaggacatttcatttatattctgactgataattcttaaattcaagttcttgggaagtctaattctactgtttgttgtttccactgatggcttgtttactctgtgtaactggaaacttttcattgtgaagtcatatgtggttgattttaatctgtgagaattctaaagagccccagctgtgggaacattcctacaaagctgattc

SEQ ID NO: 308048 - DNA, 1000 bp, Homo Sapiens; identical to SEQ ID NO: 119890

SEQ ID NO: 308049 - DNA, 1000 bp, Homo Sapiens
ggatcctcctgccgcagcctgctgagtagctgggaccacaggcatgcaaggagctttttgctaaaaagagataaaggaaaactgaaaataaatatcacctacttcatcatttgagcttggactagcccttttagaaaaggaagatggcaagattatgtttccaaagatacttcaaagggacaaagtgctgaatatacagcaagcaggggattaattttgatagaaaaactgaaaagtaaattcccaaatgttggtagatggtatagatgttttagaagagaacaccaaagagaaaagttattcatcattgattatcctagcaagagcagcagactaatttggcatggctgttctctgagcaacatgagatttgttcttgactgaaacaacagtcctttgtctaaaagcattttcttattacttggtgaaactgtcagtagtctcctcacctttattaggtaagatgtatgagtagaggccttaaaatacttcttaagacgttatgctggggatttctgatctagaaatttcctggtatttttatttatttacctaacaatttaagcaaagtgattagaacttaacctctatttaacaatgtctggtcttccgctatagactataatctttttgtttggttggtttggtttctgttttgttttatttttatttatttatttgttttgagatggagtctcgctctgtcatccaggctggagtgcagtgtcatgatctcagctcattgcaacctccgcctcctgggttcaagtgattctcatgcatcagcctcccgagtagctgggattacaggcgcatgccaccccgcctggcttatatttgtatttttagtagagaaaggttttgccatgttggccaggctggtctcaaattcctgacctcaagtgatccacctgacttggcctcccaaagtgctgggattacaggcgtgggccagcacactggccgtgttttattttgttttagaaatggtgttttgcta

SEQ ID NO: 308050 - DNA, 1000 bp, Homo Sapiens
cagagaaaacatcccagggatttacagatcacatgcaggcagggaccagctcaacccttctttaatgtcatccagggagggggccagggatggaggggaggggttgaggagcgagaggcagttatttttgggtgggattcaccacttttcccatgaagaggggagacttggtattttgttcaatcattaagaagacaaagggtttgttgaacttgacctcgggggggatagacatgggtatggcctctaaaaacatggccccagcagcttcagtccctttctcgtcgatggtcagcacagccttatgcacggcctggaggggagagaagcagagacacgttgtaaggctgatcccaggcctcgagcaaggctcacgtggacacctcccaggaagcgctcactccccctggacggccctggccctgcacatcctctccctccctgtcacataggccttgctcctcctcaaggctttggctgatggggctggctcccctctgtccatcttcctgacaagcgcctctccccctgctcaggtgcacccacaactcagaacagggaagagcatcgtcactccacgtctgcctccagggctctctcctttctagtacacggcttgaagctccttgaggacacggaccctggcagtgaccttcacagtgcccagaccccaagataatgcagccattcatggaactgcaggttgttcattggtcgcctttagttttccaaaataagtgtcactttagctgaaatcattcattaattcagacaccaaatctcacagatcgaaggagtcagaaattcctttgaaacaacttagcccaaacctttctgtgtcagtatggataaatcaaggcccaatgtctagaaggtcttgggcaaagttgaaattcagggtcagtgacacaacctcaagggaggccccgaaagtgccagctgcacagcagcccctgcctggctttgctgtttgcccaccgtcccgtgtcagtgaatcacg

SEQ ID NO: 308051 - DNA, 1000 bp, Homo Sapiens
aaatacaataaagagcacaacacattttggtcactttattaaatgacattaaatagtttaagtttcaactactaaacagcactttgaatggtgaaaacacagatagtatattgtcatacttgaatgcttttctttaaaaacacaattccagtccttatatatattacaaaacagccttaaaggaagaagtgacatcttttctacagtacttaagatactcaatacagaactgaaaagcagtctaacagaaacaaaggcaagtcttcacagctgtatgatttcagcagccaaagctggatgatggactgaaacattactatacaactgggacaaaacatatacaatatcacaatactaagcaaaaacgctttacacccaaagaaataaaacaggttacaaaatgtggagaatttagcaggcaaaactgtattacaagcaacattttaaatcatcatttttaatccattgcaactatttaaaacatctaaaacaaatataaaaatgagccttttagtattttactgacgtgatttttttgtctttaaatatttgttaaagcttgatgttatactcaaagtacatattatatagctaaaatgtcaagtgagaagagtgtatacaaagtggtccaagttttatttcaaactctgatttccaattaacccttctaagtattatctttaagttatagtttcatccatggtgaaaagatttagaaggttgcctaaatttcacatctatgtctttgagtaaataattagaccatgttgaaaattcccaggtctagtaaatcaggtttaaaatattctgaacttgtagaaataccaactggtaacagttggccagagtgtactgccttcaaatatttctcataaatcttgtctttttcattttttctaaagtaaatacacacctgccccacccaattaaataaatctgattacatggctagcataatatctaaatatacaggatttattagtgatatttcatcatggga

SEQ ID NO: 308052 - DNA, 1000 bp, Homo Sapiens
cttcaattgattcacgcaggataaaatgacctgcctgtgacttgacgtttttattttaaacagcttgtggttgtgatagaacaagaggcccagaccaaaaaggactaggaatgcttgctcaggtgccagtaccatcggcaggtcaggaaacactcccatcccactgccatgtgatttcctatgaaacagcgatttccctgaacaccagagcaaactatgcgatgataatgctccaagcagatgtttggagaagatgtgggttttcacagcttatgctgtgatcaatataataatggtccatgcctttcacttgccctatcaaggccttgagtggcagcgatgatcttgagtaactttgcctcacctcaaggaaatagcactggaaggagaacttgagaaaagggcccaaatagtttaccagaaactgggactttctcatttcctgagaggtttttgagatttggtaatatggcaaattttctagtgacagaggtttggaatactttttcctattttcttaaggaatgacagtgttttcagttttgaaacagactaacccaaggaagagagattcttgtgctaagcacataccagctacctacttctcaaacccattcctaaatttgaatactttcagtgaggctgggctctcctaggtggtacctggacaatgttctataacctgagcattggggagccacggcttttggcccatttcagggcaataccaggagcaggagaagccaccatagggaatactgagaccacaataattatgtgttcacaaggcagtgaaactggcgacttataactaatttattggcaaccactttctaaataaaatatccaagtacctgtcaacagaaattagttaacaggaagctaaccactgagtctgtagattgaacagtgtattttacaaagagtgtgttaacctaagttatgttaacttaaaaacaaatcttgagaattgaggaagaataagggataaactgggata

SEQ ID NO: 308053 - DNA, 1000 bp, Homo Sapiens
ctgcaggctcttttttgattccatatgaattttagaattgttttttctaaggtaaaagccatgttttatattccttacctataccatggtttttgttcttttattcagaattatcataatgtcaaaatattattttgaatgtttataatccataacttagaagagtattaatgatttatttaattagcccacaagaaactagaaatcctctaccgaagtggaataagagagaacactggaacttccacagaacctacagaattttcaggatagcaacacatctttgaaaaataacagtgctgtaccactctattagattctttccattttttattaattgaagcacagagaaaagaggcaaaatgattaaagaaatttatgttttttagacagggtgttggctttacaccaacgaaaaagaaaaacagatgaataagcttttgatcttcattttctttctcttattctcatggtaggctgaaaaacaaaaggacaaatataagtcttatttgtaaaatggcatgtgtttttcaaacctattaaaataaatgccaaattacttagatcatctttctgcaatttacaccagtgaaaacaatttaagcctgtcctagacttacggctgctgaattcttctgttgggctaggcaaggggacacaccaataaatgttgtcataagaagataagtcctattaaagctcagcatgttgacaaattggaaatgtaatagcagattcttcactataaagttcacagaaggtagatccatcatattctccaatggaaaggatgagttgaactattaggttgaaccatgtgaaatcactgatattcaactgtttttgccctataaagcactctttcatgtggttcagcctaattcccagagtattccactgctgagccatcacttacttggatggctctgtgtaccgcatcatataagtcagaacaggacaatgggcaacactgaaaccttggtttcaattttgaattttg

SEQ ID NO: 308054 - DNA, 1000 bp, Homo Sapiens
ggatcccaagtctagggtttctgatttaattgagctggggtgtggcctgagcatctcagtttttaaaattttgcggcttgattccaatgactagcaagagttgaagacctttactgttgaaacccagtcatgtctagtagagtcaaaagtaatgaaatacactgagtctttggacagcaagagcagaaaagtgaaacccgatagcagctgaaggtttatagaatatttatttcttttttggttgcagctatctccttcccaacctaccactgctaagactgtttcataagatgcacttctctacactcagctaatgaggtgtttcaatcagcagttgttctttggatgaggagccgatattgttttaaagcctattattttcttgggtgggtattctggagcatggggagctgaaagtgttgcaaggaaactgctgtgtgaaatttgatcaggtccttggtattcatttttatgtttcaataactgatttattttttcccccttgtacttaagatttaacatgtgttgtatttccagcagttcaaatctaattgtgtcgaatttccaggattagaggaaaagttgctccctttcagccctcctactagaagcactggagctaggctggcgggcattggaccctagtaggtatagcaggctgtgaagagcgactgggtggaagcagccccagaagaacccgtgtgaacatactgtcctttggccgcctggcagttagcctagaagacaaatatgagagaggagactggttagagtaaatgtgaccccaccttgaccctgtctgcctctcatgggaaaccagtcaaaccttcactcagattttcttctttttacagcaatgttgctgaatattgctggggataccatccccttctataaagtatctcccctttttatcccagttttctgagcatttctttggtaagcttgaggtttgtgtcagttactggggaaatctctgttcagtaccaacaatattgca

SEQ ID NO: 308055 - DNA, 1000 bp, Homo Sapiens
gggtgacagaatgagaccctgtctaaacaaccaaaaacccacaagaaaagagtattagtgtgtgtagaatgctatatatcgataagtatgctctcatatagaagatctctgaggttcgcactttctatctttaagaagacaacaggtttatattttatttaaacttacttgggaaaattgcattaagaaactctatttcttcctggaaattccggtgtgggtacccttggtgagaaggcttcatgaaattcttacgagaataaaagaagctctttattaaaaaagaaaagaaagaaaaaaaaagatgactttagatgtagaattctatcactttcctaagctaatcaactattgtccacatatcaaaaactcggcaaaatcaaaactcaaatattttagcttggcatggtagcatatgcctgtagtctcgctattaggaggcaggaggatcacttggcccaggagtcagccttgggcaacatactgaggccccatctctctctctctctctttttttaaagccagtctagtgatgatggtactaacaccattaacacgtatattcctttctagaacagtagtttctaaactgagcttattaatagtcatataagcaaaaatttggggggaataacagattagttttaagcatcggttaagcacacattgctttagatttcttacaaggatcaattcataacaacaaaaactgtattgagtactaatgacaatccatcctttccttatgaagttaaagattaaaattcaggcccaggtgcagtggcggccgtcacgcctgcaatcccagcactttaggagactgaggtgggtggatcacctgaggtcaggagttaagagaccagcctggccaacatgaaacacggttttttacaaaaaatacaaaattagttaggctagcattgggaatggtggggtactctagtccacccagttacgtggctgggtgcgggagacttattcgaaggtggcagagtgctta

SEQ ID NO: 308056 - DNA, 1000 bp, Homo Sapiens; identical to SEQ ID NO: 119891

SEQ ID NO: 308057 - DNA, 1000 bp, Homo Sapiens; identical to SEQ ID NO: 119892

SEQ ID NO: 308058 - DNA, 1000 bp, Homo Sapiens
ttctgtctagttttcaggggaagatatttcctttttcaccataggcctgaaagcgctccaaatgtccacatccagatactacaaaaagagtgtttcaaacctgctgtatgaaagggaatgttcaactctgtgacttgaatgcaaacatcacaaagaagttactgggaatgctgctgtctgctttttatatgtaatcccgtttcaacgaaatcctcaaagctagacaaatatccattgcagattccacaaaaagagtgtttcaaaactgctctctcaaaagaaaggttcaactctgttagctgagtagatacatcatgaaaaagtttctgacattgcttctatgtagcttttattggaagatatttcctttttaaccatagtcctgagagcgctccaaatgtccacttccagatactacaaaaagagtgtttcaaacctgttctatgaaagggactgttcaacactgtgacttcaattgaaacatcccaatgaagcttctgagaatgcttctgtctagagtttatatgaagacaatcccgtttccaacgaaatcctcaaagctatccaaatatcctcttgcagatattacaaaaagagtgtttcaaaactgctctttcaaaagaaagcttcaacactgttcgttgagggcgcacatcacaaataagattctgagaatgcttctgtctagttttcaggggaagatatttcctttttcaccataggcctgaaagcgctccaaaggtccacatccacatactacaaaaagagtgtttcaaacctgctctatgaaagggaatgttcaactctgtgacttgaatgcaaacatcacaaagaagtttctgggaatgctgctgtctgctttttatatgtaatcccgtttccaacgaaataatcaaagctagacaaatatccacttgcagattccacaaaaagagtgtttcaaaactgctctatcaaaagaatgcttcaacactgttagttgaagggcacatcacaaata

SEQ ID NO: 308059 - DNA, 1000 bp, Homo Sapiens
  misc_feature (954)..(954): n is a, c, g, or t
cctagatttgtcagactcgaaactcgacctctcacccacagcatacgtgtctgtcgaactgcatgtactgatcatcactattttctagaagcctccactttacttataatacactgatgttcctttatggtctacaattctcaaattgattcgaaattatcagatactttcaccaatgtgtgcctcacctacaaatatgtagatgtgttgacaaaatgacaaggaaatatcttgaccatttgcctcacctacaaatatgtagatgtgttgacaaaatgacaaggaaatatcttgaccattaatagttggcaaaatgaaattaacagttggtaattatctctgagagtctaaaggtaatcaacaaagttaataatcatcataattattggtataaaataaccatatttactatggcccaggtggctctatatgttgctcagttaattctcaccgtaagttcacgaggtgcgtgggagacaagacctgtgagacttatgacctctggaccagagagtgagtttcttacaattatttcagtgactcctatagaaaacagagctagtggctcttgtgggtggaaggagaggatacttatagcttcaatttacatgactatgggaaatgattgggaaaataggaagatgagtgaaatgtgaaggatggaggagagcagagcaggtgaggagtggcatcagcagagatcaggacacggagaatttcaatcaccagcacagcagtgacactgagcacgcgaccactgctaacagcgcacaaagctgcctttgctgttacaaacagccgacagagggcgccggaccagcggtaacggacccaccagcgaccctaacccgcggtcgccccttcctcaaggagacccgcgcttggggtccgcagagtcgaggcccgggcgcttggggattagaggtccgcagcctcgtgagcagcgagtaaacnccgcctttcacggctctgactacagagggagagctctaccgccgcc

SEQ ID NO: 308060 - DNA, 1000 bp, Homo Sapiens
caccatatttcaatatcacgatttaggagggaggcaagtataaagtgtagaaatctgaattatggaagagatttctttttttttcataaagaaatgccactttattattttcaagtagataggtagtacctcaaactaatgtcttacaaaaggtcaccaataaagatcctgtagatgtttctttaacaaatacataaagattgatgataattagcccatgcactcgctgcttctaaaaggatatttctaaagtgcctgaaaagtattgtttttggtagactaaacatgccacctctagcaatattgtttatgctcttaatttactaaaaaaatgccatttttattgattgtgcaaagataaacttttgtccacagttagtaatctccaattaatcggatccaaattaatattgtctcccacttagattcccaggcccaaggcaatgactcccttacttccttgcttctgataaagcaaaattccagtgcaatgaaatgacagcctttgggaggtggtttatgggtctgacccaatgcttgtcttttgtgcttccttcctgtctgccttaggtcttccattttcctcagatgtctttctcacttgcatgacctatctaggtctctctctacaggacattcccagtgccttctaagccaggcttagagaatgggcaaggctgcctgcagagcaaaagtgttagatagggagtaagggaaagaaagctatctcctgtaggaacctgaaaccaactctccagcccagggtaagtgggcacaatgatcgtcggtttgaagggcatttgcctggagggaacagccctgccacctaagacgtcaaaagcaaatcattttttttttttttgagatggagtctcaccctttcgcccaggctggagtgtaatggcacgatctcagctcactgcaacctcttcctcacaggttcaagcaattctcctgcctcagcctcctgagtagctgagattacaggcgtgtgccacca

SEQ ID NO: 308061 - DNA, 1000 bp, Homo Sapiens
gttttgaacaggagacaatctgtaagattcctgtctagactagaagtagaaaagctttattatacccagcgcagcatttctgctaagttgaccaggatggttacagaaaaacatcctgtaagcatttctgtctcataagtaccacatcccatatccctcatgacctatatactacagaagatgcctgtaatcccagtactttgggaggctgaagcaggattgcttgagctcaggagttcgggagcctaggcaacatggctagaccacctctacaaaaaaacttcaaaaactacccaggtttggaggtgtgcatctgtagtcccagctacttggaaggctcaggtgggaagatcacctgagcctggggaggtcaaggctgtagtcagtgtgccactgcactcccagcctgggtgagagcaagaccccgtctccaaaaaaaatcaggaccacgtgtcactaaattctgagtaccagtcaagaggctcaattgtcaccagttaggtccccgccttggcaaactgctgtaacattatacctgaagcagcagctggtgggagggttataggagactgaaagtgcttttccagttaaccgtggtggattacctggaagagcaatttgtacatcatcctgttctttttggacagaagttacaggatgcaatttaggcatcccgtaagaatctgtgtaagaaattcatctggatatttccatgcatattttctcaattctcacaagcatcacatggaataacttgtcacctaactttacaaaagcaaggctaagaatgactacttgtggcttgggagccacaagcttcttcaagtgtctcagaacctacctggtgtgagggccaagtctgtacccctcatacccagcctcaactggagatgactaaggctagtctgtgcacttgaggccacattcccctgttcaaggactgagtgtcctttacaaatcccctccaaatgggagattccaaaggggcttaagcaaaaga

SEQ ID NO: 308062 - DNA, 1000 bp, Homo Sapiens
aggtggggggatcacttgaagtcaagagtttgagaccagcctggccaacatggggaaacccggtctctactaaaaatacaaaaattagctgggcatggtggcgggtgcctgtaatcccagctagcgggaggctgaggctggagaatggcttgaacccaggaggcggaggttgcagtaagccgatatagcaccactgcattccagcctggcacacaagagcaaaactccacctcaaaaaataaaaaagacaggaatccatataatcatcaaaggccctttcaaaaaggtgagggaggggcagcacatctgcaagatgaagttctggagattgatgcacaatgagaatatagagcagtcttcctgcagtaccaatgattggttccatgacccccttcaaataccaaaatccccagatgcttaaactccttatacaaaatggtagagtatttatacctaagataacctaggcacatccttagactttcaatcttcactggattacttttaatacctaatgtacatgctacatagctgttacaactgcagtgtacaagaaaataagtgacaagaaaatatagtattttgaaaataagaaaaataagtctacatgttcaatacacacacaaccatcctttttgattatttttgacccaaagttggttgaatccacagatgcaaatcccttggacagagggctaactctgtcactatagaagtgtacacttaaatggttaagatgaccaatttatgagtcaaaaaggaagggggggtcagatacttgtcagtgtacgccctacataattacctcaaatattaagcccttaccatgtgccaagcaatataaacaccatgtgcagctcagtctaattgagaagaaaaccaaatcatcacagcacctgctaagccatctgtggagccagggttatctcatcagccaggctgcatcaccaggaagcagccacctgataacagctttccctggaagtcccctctgtgatca

SEQ ID NO: 308063 - DNA, 1000 bp, Homo Sapiens
tggacttaactattgatgatctgggattactcagaaatcgtccaagtgcaccaaccacttaacttaggaaagattattcattaaagtaaaacttttcttaacctatgacagcattttggatggggaaacatttcagttaatcttttttagctactcaaatttggtaaattgcaattctgggtatttaaccttgttacctcctaagcatactagaatataaaatgcaaacaatgtcctgagaatggaattacaaaacttgagctttctaaacatctagtactagaaaggaacccagtgcagtccctttacaaaaactgggccaggagcagtggctcacgcctgtaatcccagcactttcagaggctgaggccgggggatcacgaggtcaggagatcgtgaccatcctggccaacatggtgaaactccgtctctactaaaaatacaaaaaaaaaaaaaaaaattagccaggcgtggtggtgcgcacctgtagtccctgttactcaggagactgaggcaggagaatcgcttgaacctgggaggcggaggctacagtgagccaagattgcaccactgcactccaagctgggcgacagagcaagactgtctccaaaaaaaaagaacaacaacaaaaaaaccctggaaaacagaaatcaggatgtgtaactttttttttttttttttgagatggagtcttgctctgtcgcccaggctggagtgcagtggcacgatctcggctcattgcaagctctgtagctgggactgcaggaacccgccaccacgcccggctaattttttttgtacttttagtagagatggggtttcactgcgttagccaggatggtctcgatcttccgacctcatgatccgcccgcctcggcctcccaaagggctggaattacaggcgtgagccaccacgcccggcccaggatgtgtaactctttactgaaaagtcttgccaccacatctgcctcatcctctctaatccaaccttcaggaaatt

SEQ ID NO: 308064 - DNA, 891 bp, Homo Sapiens
ctggaacaaaggaagactcactcccatggatcatggtgcagctgaatttgggtttggaagtgaggccaacctggtttcctcactttttagctcagtaacttcctttgtgggatatgatagggttcttctaaggattaaaagaaattacctgtgcaaggggcctgacacattgcctgatttccttttagactttgttcccataagcctaaataaaatggcaacaaatggcaatcattatgaattattttcaactgttaagaaacctctgtattcttggctttggaggccttttaaaaatgtgcactcatatgtgtataaatataaacatcttcttaacagaatgcatattaaattacacttttaaaggaagtagtagtatacattcttactcccatgccttaccctgtttctaaggaggatttgaggtaactatgttactacttagtcctgtatgaaaactttggttgtggcttaatttattttttattacaaagccatccttctatattacaatacataagaggcttataatatcagaatcatatattttatttgatgttatgtttgattttttatgttatgagcattgtatatgtattcttgatatataaatacgcatataatatattcatattccttagatagatactggtgttatcctcattttatggatgaacagattgaggcatagggaagctgggtaactttcccaagctcacatagttggtaggttacagctgagactcacactttttgcaggtttatcttccctctgagcctgtacaaggtggaggttgctaatagaagttttgtttctttttaattgaccaacttagaatactctttggaggggaaaacttatctacctcacaatagattcctgatacttac

SEQ ID NO: 308065 - DNA, 1000 bp, Homo Sapiens
ttttgtatttttagtagagacagggtttcaccatgttggccaggctggtcttgaactcctgacctcaggtgatctgcccacctcggcctcttaaagtgcttggattacaggtgtgagccaccacaccaggcccaagaacttccttatattcctttgctgatgcccagaagaggccagaagggcaaacagggatctgacacaggaggcagaattctttttttcctgttgccaggacatgagacaagtagcagggaatgagaggaagctgcacaattacttgcgggtgttctcgttcttgagcagagacttggcctgctgctcactgatgatggtggccttcacctggggggggttcatgtgcacgttcagcttcccgcccaccagcaggcgcacagtggctgcaaacttggtctgggtcttcaggacctgaggaggctgcttctcaatgatgaacgtgctgcaggggacacagggacagatgcatgatgaggggctggtgcaggggaaagggctctcagtccctctgtggtgggggtggggctgcctcccgaggggctcaggaggtgaagagctcgggcacagcctctgttcctggggaagccgtgagagtccagggagaggatggagaggggagtgagataacacagaagctggcatgggctgcagcccaagggcatctcttgcagtgtccacaggagaaactgggcaagggccacagcaactggagatggagttgggagggatgagaggcaggaagtggatctgctggtctggaaggcacctgcggctccccccacgcaggcaggagctgccccaagctcctgggcatggcaaacaggcagcagtcacctggtcaccagggctgagataatgtccgtgatggtggcgttgacctcggccagcatctcctccactgggccggggatgggcagctgctggcagaggtgctcagccctgcggatctgctgccggttctgccagatgatctcggccaacttct

SEQ ID NO: 308066 - DNA, 1000 bp, Homo Sapiens; identical to SEQ ID NO: 119895

SEQ ID NO: 308067 - DNA, 1000 bp, Homo Sapiens; identical to SEQ ID NO: 119896

SEQ ID NO: 308068 - DNA, 1000 bp, Homo Sapiens
tttattatatagaaagatcaaggggactggttaaactagacatatcacatccagccgctgctaaaaactaaagggaaatagtaggtgacaaaagcaggggtcctgaacagtggtgggctcaggggattggagttttttcctttatgtttttctgtattttccacaatccacgcttttcattgccattccatcagatgatgttaaggaggaacacagatccagtcacctgaggggatacttcctcactgccaccttctcagggtttagaccaacatgtgggttctagttcccccagccccaaagctgttccctgcaaggaagagatcagtctttgagcaaattttggctcaagactaaagacacagaaggcgaggctcctgcatgcacagcacacggccatctgatcctgtgctgcagtggacgctgactttcgccacgccgtcctctctggcccagcaccggcctcctggcctcagaggagcagacactcccagtcccagggctctcagggtctcttgtccctgggtccattctgggacaggaacttctcggttggaagagaggggctgtacccctcgggtggtggttctcaatccagggcgcaccacagaagctttgaaagacatcaaaggctgggctccacggccgccaagggaatccaaatctctgggccagggccaggggcttgagaaccccagccctagggcagacgccagccaagcatgaaggggctgggacttagcaagggcttatcagcactgacagaagggtctagaagcactagcatgttgggcttcagtgataacaatgaccaacatttattgagcacctaccacactgggtaatcctcacaccaccctgggacggaggtgccatcgctttaaacgtggggaatagaagaaacttgccaggaggtgcagagaggaagtggcagcgctggaattcaaacccaggcaaaggagcaccttttacctggggtaggagagagcttgctgggtgg

SEQ ID NO: 308069 - DNA, 1000 bp, Homo Sapiens
acaccactatgctccagcctgggtgactgagcaagactccgtctcaaaaaaaaaaaaaaaaaaaaagagaaaaatatttcctcccatacttgtctctcatctgctcatttcccattctctccccgccatccctgctccagccccacaggttaaccctggtcttagttttgcatgtatccttccagcctttttgtgtgattacaaacaattatgaatggagattcttatttcctttcccctttatttataaacaatatatagtaaattaaacacactgttctataccttgcttttatttccctggacaataaaccttagagatctttcaatggcagtatatcttttttttttttttttttttttgagacggagtcttgctctgttacccaggctggagtgcagtggcgcgatctctgctcactgcaacctccacctcccgggttcaagggattcacctgcctcagcctcccgagtagctgggactacaggtgtgcgccaccacacccagctaatttttgtattgttagtagagatggagtttcaccatgttgaccaggatggccttgatctcttgacctcgtgatctgcccgccttggcctcccaaagtgctgggattataggcatgagccaccatgcctggcccttttttgtttttatagctgcataaaattccattgtgtgttccatcattttgtcaccattattctactggttgaaatagttccacccccaattcttttgttgtcacaaatgattattacattgtacatatatgcatgtgtaaatatatcttacatataattgggctgggcacagtggctaatgccaatattcccaacactttgggaggctgaggagagaggatcacttgagcccaggagtttgagaccagcctgggcaacagagcaagaccctgcatctattaaaaaagaagaaaaagaaagtaagcaaaaaaagcataattgccaggtgcaagttatggatatttaaagattgtct

SEQ ID NO: 308070 - DNA, 1000 bp, Homo Sapiens
gcggccgcattgcagctcctgctccccctagttcttccgctcctgtgaggaaaaaaaaatgtttatttctttgtgggagttcttctatgggcacttttttcgattttggatgaaatggctattacgacagatgactgggaagtgtgaattgcagcgaatatttgatacctatgtaggtgcacaaaggacacacaggatagaaaattccttgacatactccaagaataaggttttacagaaggcgacacatgttgttcagagtgaagtggacaaatatgtagatgatattatgaaggaaaagaatattaaccctgagaaggatgccagttttaaaatatgcatgaagatgtgcttactgcagataactggttataaacagctgtatttggatgtagaaagtgtgaggaaaaggccatatgattctgataacctacagcatgaagagctactcatgaagctttggaatcttctaatgcccacgaagaagttaaacgctagaatctccaagcagtgggctgaaattggttttcagggtgatgatcccaagacagacttcagaggcatgggcatacttgggttaatcaatcttgtgtatttcagtgaaaattacactagtgaagctcatcagattctttcccgttcaaatcatccaaaattagggtattcttatgcaatagttggaatcaatcttacagagatggcttatagcttactgaagagtgaagctttgaagtttcatctctataaccttgttcctggtataccaacaatggaacactttcatcagttttactgttatcttgtctatgaatttgacaagttttggtttgaagaagaaccagaaagcattatgtatttcaatttgtatagagagaagtttcatgaaaagataggtttttattcatcaaaagttaacagcaacaggcacatattaaaatgagtatggcaaagccttttacaaatggctttacactcaagctttctcccaagaaaatggctg

SEQ ID NO: 308071 - DNA, 1000 bp, Homo Sapiens
gaatttagtatacgataaaagataccagttaaaattagtggataaacagtggattatgtgataaacattgaggcaagtgagcctccagaaaataataacctcattacctacaccaaaaagaatttcagacaaattaaagaacttaatgcaaaaacaaatacataaagatttaaaatatgcgattgatttacatatacatacatacacaattaggcatctcataatgatatttaggtcaacaatggacaatatatgaggatggcccatcagcctataatggagctgaaaattttctattgcctagtggtgtcatagctgttgtaccatcatagtgcaacacattattcatgtgtttgtagtgatgctggtgtaaataaacgtactgcactgccagtcatacattagggcatacagtaattccctaggccttcatagtcactcaccactcactcagtggctcacccagagcaacttctggtcctgcaagctccgattcatggtaagtaccctatacaggtgtactggtttaaaaaatcttttatactgtattttcacggtacattttctatgtttagatagctttagatacacaaactttatttgtgtatactgtttggttcaagacttttataactgtttattgtccagagtaccttatgttaataatcatagctactgttaggactatggatgcagctgcttgtataaagaatcatttagtagtgggttctgtgaagtggggagttgcttttttaactaggataggataggaataatgtatagtatatttacttccagccctatccagacttgtaatcagtgcaagataaatactgtgattgtagttcctgtgaagagggtgaagaggataatgataggaactgaggggttgattagcacaggaaggatacaaaccaacattttttggggtgcaggtttgatattaattgcttgttttgcttacctaactatagaatatggtgtattgagtatggtgtgt

SEQ ID NO: 308072 - DNA, 582 bp, Homo Sapiens
ccccactggctgtcaggaaatgagcagtatccctcaccatttagcaggaaaaaaatcctgtttggaggtagagaaggaagaaatcagggcagcagattcacaaatgcttcatattgatgcatcatattgggggaagtatttaggcaaagtagttcctttagttatatcttttatatatggcttctagaattactacctggatattcaccttcattttgtagaacggtgtaagtggtttccattccagcatgaatgtggtcggtcacatggcagtggagtaaccaaattccaggtgttcttggaaacatttctagggtttggtatgttccagggaaaatgtcaaagacatcagaactataaactcccctgtgcttaattagaaaaatgacaaataatgtataatattgtatatgagagttcactcatgtcatttgttaatgttcagctcaggatattgaaaaaatggaataaatctgtttttaaaaaatcgagctcgtttctgtgtttaatacaaatggtaaaatgtggtttttgtattcctaataagtctttggtatccacatcaagtgggtgtgaaagaaa

SEQ ID NO: 308073 - DNA, 1000 bp, Homo Sapiens
cagtgcagctggtgtcgccaacggtgacccggaaggtgaaattaggctggtgggcttggccctcggctttgagaaggtcgtacacaggcgtcttccctattctggtcccatactcctgcagaaggctgatcggggtcttgcctgggttggcggccagcatttgctctatactgggggaaggggcacagacccacatcacacctcccctctctgcacccacctagccaagcacttccataccagacctaggcacattatgggggacatagggtccaaggaaccccagacagtctagcatccattggctgggttccaagtggaggtgcaggctggaaaagtagggcccactaccccaaagcaaggggggaagaatgcattgctcctgcctcagttaaggtgggcacgatcctgtgccccaatgcaggttgaaagtgcataccccctgacacagtgcaagccaggaacccagtacccaccaaatgcactgaatgtgggggcataaagcccagtgttccagtgcagtctgggaaccgggccaaccccaaactatttagagctggaggcagcagccactgccccggtgcacgccgggaaccactgcccactgccccagtgcttgccgggaacaaccctcaggccaggtgcatgctggggccgcgccgctactccctccgcacggccccacgcttttcgccctgaaggaatcggtacgagacggctcacctaggcagcccgcagcccgtggtagtgccggagccttgctcctcttcactcattccctcctccgtccccgcgggcgccaccgtgactgcagcctccacgcgccccaatacacagccgacgagctagggccggggccaagcccggagtcgcggccggtagggcccgccgcggggcacgctgggatatggagtcccccgcccaccctacttcgtgagcctccatctggaggggagctatccgccccacaaccctctgcgtgcgtggctcgcccgggcag

SEQ ID NO: 308074 - DNA, 1000 bp, Homo Sapiens; identical to SEQ ID NO: 119898

SEQ ID NO: 308075 - DNA, 1000 bp, Homo Sapiens
ttttttttttttttttttcactgtaaaatgtactatttttaatgggtgtgcatgtcaggattttctttagaaatacactggtctggtctaatttatttaagcaggagcactttaaagtatcccaccctaccccattccacccccagtggacagaaaggaaattgactgacttgaggggatgcagacatctgggttattccaacagaccagtggttaggaggagggggtgggtagcattatggcctcgggcaggcccccccaccctgagcctctgaaagctgactttatctgtaagagggaggtcaggctcgccttctcaatagcgtgtatttggatgagatgagtttcttctggagtacacttaggcagagcagggctggcttagggctggagcctcagcgtttcacaacttctcaccttctcttccatgtcagtcagaatggcatccagctttgccaccacctgccgtgcattgtccaggctgaagcacattgggggcttaaacttcaggatgttcctcccagggccatcagtgctcagcaaaacgtagttctccttcagccttgataccaagtaggcagcctcttcagttgctggtgtccttgtggcctcatctttgatcagatccacaccaatgaagagcccaacacccctgacatccccgacgatgggatgtttgattttttgctgcccgaggagctgcatcaggaagctgcctacactggtggcatgatcctggagctgctccttctccaagacattcaggacggccagccccacagcgcaggacactgggctgcccccaaactgagccagggacaaagaacatgtcagatgccctggcagagtgggccatgccccagagtgagggtgaggcagaagaactgccacacatgttccaaggccagtggcaagagcagaggccccaaaccccttagggcgcacagtcctcagcagtagtaagtggggttcaacatgggctgtcctggctttccaggag

SEQ ID NO: 308076 - DNA, 1000 bp, Homo Sapiens
ctgcaggccggcccacgccgccgcctcccggcgccaaggggctgcccagggcggatagggagcctcgccaccaggccaggcactgtgcgagctgggctcagaaaacactgctggagcttcggggtctctctcagagcctccctgctggagaccgcccggagctgcgcggagaggcgggaaatggtgctagcgcacccgggctaggagcgggtgcccaactccggcttggcttccctccctggctggctcaagcagcagctccgggcccagcccggggtagctgcggccaaggcgcccgcggcttcgggggcatagcgtaggggcccgcctccgggacagccagcagcccccggccccaggaaggagcagctttgaggaggccgccggaacaatcggcccttgacttcactcagggggcggagagacccgggggctgccaggctggttccgcggcctcgatgcttctgaggtccctcctcgacccctcggtctccgccagatcctttctttctctgcttctccgagtctctggggctcggacttgccccctccgcctctctccaactggctctccgacgtctcggacgaagttgcaaagaacttcctctccggcagcgcggggtctggcgggttggagatcgttccgcccctgacgctggggccgcgactccggagtccccgggagcgtgcagccctccaacactgagacccgctgccttcaaagttcccgcggcccccgctgctcgcccatcgctgggaccaggaacggggacaccagcgacggactcttcctcgccggggtgtctacctcgtgccaaccaactcttcgagccccgccgccctccctcgtgggtctgattccactgtctttccgctgcctcttccgggacggccgccgtgcctgccccaggcgtggagtgaggaacagaggagagagcagagggtcccagccaccaaggccgccggggctgccggggctgagatggagccgcagtcggct

SEQ ID NO: 308077 - DNA, 1000 bp, Homo Sapiens
aattaaccaggcctggtggcaggtgcctgtaatcccagctgcttgggaggctgaggcaggagaatcacttgaacccaggcagaggaggttgcagtgaaccgagattgcgccattgtactccagcctgggcaacagagtgagactatgtctcaaaaaataaaaataaaaacaaacaaacaaaaaaagattgacaatggaagcagagagagaattgaagatgctacaccactggtcttgcagatggaagaaggaactacaagccaaggaatgcaggtggcctctagaaaatggaaaaaacaaggaaatggatcctcctctagatcctggctgacacttgatttcttctcagtaaaaccaatttcagacttgtgatgtccagaattatcagattacacatgttgagccattaaattcatggtaggccaggtgtggtggctcatgcctgtaatcccagcactttgggagggtgaggcaggtggaaggcttgagctcaggagtttgagactagcctgggaaacatagagcccatctcgattttttaaaaataaaatgaaattatttaaaaagtttggctgtttttttcttttcttttcttttttttttttgagaaggactctcactctatcacctaggctggagtgcagtggcatggtctcagctgactgcaacctccacctcccaggttcacgcaattctcgtgcctcagcctcttgagtggctgggactacaggcgtgcaccactgcgcccggctaatttttgtatttttattagagatggggttccaatatgttggccaggctcgtctcgaactcctggcatcaagtgatccactggcctcggcctcccaccgtgctgggattacaggtgtgagccactgtgcctggcttggcttggtttattttttttttttgaggtgaagtcacgctcttgttccccaggctggagtgcaatggcacaatctcagctcacagcaacctccacctcccgggttcaagcaat

SEQ ID NO: 308078 - DNA, 1000 bp, Homo Sapiens
aagcttgcatgcctgcaggtcgactctagaggatccatatttatctcaaaactcttgttttgaaattacctactttcttttctgtgtgtgtgtgtgtgtgtgtgtgcatctgtgtgtgtctgtgtgtaaactttatttttccagtaaatgaaattggagaaactatcaaaaagtcaactagatatgtgttaaagtacagcaaaatgttatggtagaatctagctttattttaaattatgtttgaatgtttattatttatttttaagtatttttatttattattatataattaatatgtttgaatattttcaaaataaattataggaaaaaatcagaacttaataaaataggtaatctattgagtaacagactgactctatataataaactatatagctaaactaatgttcatgcatatcatgtctcatagatcctttctctatagacggttatagaaaaggtgttccatagtgtttcaaacaatggcaatactctcgggtcaactgtgtagtgttaaaaggagtatcacttctttggagctagaaattcctgaaattgtattcattatagagcatggaggcaacttcatgacttccttcactagccagaaatgcgagatggatgggtagccccgagtagtgctatcatgcttccagtacagcgtgccttttgaaaggactacgtaggcaggaatagagatttgatcaaacatgtggaactgattgatgctggcattcagccctgaattcatttaaattatgataccaaatacagtagagagggaccaagacttatgaatggatacttcctgcctttgaatggcactgaaccccaagaggtcccctaaaccataagtcttgcaaccacaaaatgtactcttccttttttctgttcctttttctcttttggaacccaccaaattctctgtatatagctatttctctgagccagctctggtgtaacacttaaaaaccacagaattatgctgggaggttagcac

SEQ ID NO: 308079 - DNA, 1000 bp, Homo Sapiens
ctgggaaaggaatctgggagagaaagcaagtgaaactccccaagatgcacaattgggagagtctctagccagctctccaggaagctctgggggcgctgctcttgggaaacacccccaagatagactgagctggaaggagccgtctgcagtgattctgtgacactgtcacggagccctcctctgcatggctttggcatcaaatgcaaccacacacacacacacacacacacacacacacacacacagagcaggcactatgccctgctggacagaatgggctgcagggatgtgcatgaccaaaatgcaccccagacagcatgtgcacgcggaaggacactcagcgatgtgcaccccagatagcacgcgcatgcggacggacactcagtgatgttccatctccccaggccaggccctgccatcctatctcaaacacactttgcctccaccaaggcaggcagtggccacagaccaccaggtggtaccaccaagtgataacactgtctgtcaccacgagggaccctctcatggataacggaacctctcccagccaggagctgaggctcagcgtttacagacagtgcaggctcaaggacgactcatgtgtcccccccacttcctggaggcactggtgagctttccctgtgtcccccccaccccaacatctgtcccatgagcaggcagccacctcctcctctgtccctgctgggatcaactctccacaaggaaccaggaggtggctgagatcctgcagagtggccctgtgtgcaggctgcactggtgcccctaaaagcatctgtggatcctggccagggccctccttggccctcagtcgtgctccaggacatgtggccctctgaagcgcgtggcctccccctcagctccggcctccagtacagcagcctctccacgcctgcttcccacaggggtctcatgccagccgagcaatggtgccacccacagcatgagctctgaggctggcaggttggagggacccaggctt

SEQ ID NO: 308080 - DNA, 1000 bp, Homo Sapiens
agacccgccttccacatgcaccaggccccctcaaacccctgtgaccagtttcactgccaccatcttggtgagtgtgtgtttgacctctccagaaatgcaaattgacccccagtcagcccggcgactttgtcacctgtgctcaagtgatgtatccccttcccttcacacccacctgacctggggacatctgaggccaatgtgactctatctaggcctgccccctagcccccagcacatgtacacctgctttctgatcagtcccaccatctcggtacctacctccctgacatcttgtcatcctagatcagcacctctcccactccacacacgcctggcctggcaacgctgtgaccacatgtagtctcctggctttttccctgaagagcctggtctctaaatcctctgggctggaaggaatcagattttcaaaccctgtgaacaccacccctgacccacgatcctttttgtgtctttcttgacccagtaaaatgctctcatgtaaaaaaataaaataaaataaaataaaaaataaaataaaataaaaagtggtgtcccatgaaaagcagtttgtaagcttccccgggagttctgtcagggcagggctaaaatttatagccactccccagagagattcctgaagactgaattagaggaaaatcaaaacacatttatgctttggagaaaacttgactgttttatgctgtttgaattgtcttctaaaaatgagttttaaattataaaaagtattaaaataaatatgtcatattccttcactcagttaattgtgaaagcacatggattgactcttcactggcacatatagtaggtatattccattgtggtagtttccttgtttttctgggatcacaactagcctacactttccagtttcccttgtagtaagttgggcacatgtcattgaacgccagtggaatgtgagcagagtgatacatgccactttcaggcctggaaaatgccaaggcccaaggaaaatgctaaa

SEQ ID NO: 308081 - DNA, 1000 bp, Homo Sapiens; identical to SEQ ID NO: 119899

SEQ ID NO: 308082 - DNA, 974 bp, Homo Sapiens
ctttccaggtcactagttcatgatcctttcggtcacccgcgagccctgagcacagccgtgtttacaaagcacccctggaggaaaaggctgaacggcactttaaaggccacgggctcccacaggcttccgtcctctctcgcgagatcggactgacaacccccgcccgctcgccccgctcccggcatccccaccttccttctggcgcccctccccttcacccacacgccccttcttgccttccttctgagggagcgcctccgagtcaggtgattccgtcaggcttaaggagaagaaggcgggtcttcggcagggcgggtagaggggacgggcatcaaagagcactcgggcgctcatgattggacaaggagcccgaagggcgggaagcagttctggagggggcgggaccagagggcccaaggagcgttacttctgtaaactcggagctgtggaagactgtgattggctgtcggctggaggagggcgcgggtgcaggcggcggtgaagggctaggcagggctttggcggtgtgaggggaggaaaggtggtgagctccggaaaggctgctagagggaaagcaggatgggtcctccgagtccagccccaggagccgggtgtctccgtttccgtcacttcccagcactaggtagggaggtgggtaaaagtaggctgcgttcctcagcccaccccttggctccccgggagcctgaggcggggagcttcgggttaggtgaggtttgggggaggcggagtttgctggtaattgcccatccctcccctccaaaaaaccccacacaacttaaagattttaatattaactgtaaggatgttggttattcaataaataggcacaagttgaaaagtatgatcagaggcctctgtgagaatttacattattcaataaaagattttcagtgtcttattttttccatttattaaatactgatttctagtctggaacaaaattatgaactagt

SEQ ID NO: 308083 - DNA, 1000 bp, Homo Sapiens
tcatgtgagtcaattctcctaataaactccctttcgtatatacatctatcctattgtttctgtccctttagagaaacctgactaatacaaattccccacctcaatatgattctgacactgaagtggtgtgatcctagatggaagagcttttcaataacatgaaaattatgttataacttaatattaaagtaaacatatatatttaaaacctctctctggctgggcgcggtggctcatgctgtaatcccagcactttgggaggccgaggtaggtggatcacctgaggtcaggggttcaagaccagcctgaccaacatggtgaaaccctgtctctgctaaaaatacaaagaattagctggcatggtggtgggtgcctgtaatcccagctattcgggaggctgagggaggagaatcacttgaacccaggacacagaggttgcagtgagccaagatcatgccactgcactccatcctggtcaacaagagcaaaactctcaaaaaaaaaaaaaaaaaaaaaaaaacctctctgtgagaatcacttaaacaattaagatattccatgacttaacatatagttaaaataatcatgtgatgatttatttatattctgggaaaatatttattttcaaatactcatatgcaaagaaaggaatcagtttgagaaatcctgacctcaaacaattcgaaatcttgtttgaaagcggggggttcagggtgtcctccacacactcatgagcggggaatgacacagagtttgtaacgtggtgggatacagccaaacccaatatgtatagggctgaggtcgatatcctttgggtcaacgagaggcttcaaattaaaatgctgcaaaatggcacacaacaaaagaaacaactccatgcgagccaggccttctccagcacacactcgttttcctagaagtaacaatggtattgatgagacactgagggagtttcagagacacgacactgttaacagtgagactaggggaagcggggagg

SEQ ID NO: 308084 - DNA, 1000 bp, Homo Sapiens
tttttttttttttttttttttttatatttcctttggggcaccataatagaatgttccaggttcatctcatatttctccatcccaggagccattattactctacttttgagtatgtcctcaaaactggtctaacaagtcatttcagaaaataatttcacttcaacaatacactgtttgttgattcaacacaaactgcatgggctgcttagatcaatttacacttggttcatcgccatctttggctgtttcaaacatacactgctaaaaaaaaaaaagattgtcattaagaatattacaatagaaatggaagttttgtggaggaagaaaaatcccccaaaatgtaagcaatggtaataatgcatttaaagtatagtctcacaaagtctcacttaagagagcagcacacccaggacacacatattgatctgctgacaccacttctttactatacttcatatagatgtcctcacatcttgatttacatggttataactgcttaaaaactggcaaagagaaaacctaaaataatgctttataccagtttgagtcagaaccagactgttccagactagttggaaaacgacccaggaactcacctgcattaaatgctgaatttaactgagctaaaaatgtctaggccatcccttcttagaattcccatgactcattctagtcaaaagctataagaacatattccttaatagttcagcaaactttagggaaaactagctcattgtcttgggttctaaaggccttttgtttgattatttttattataatgaaattaaacttatgactattacagtatgctcagcttaaaacatttatgagtactgcaaggactaacagaaacaggaaaaatcctactaaaaatatttgttgatgggaaatcattgtgaaagcaaacctccaaatattcatttgtaagccgtaagaggataagcacaaccatatagggaggagataaccagtctctcccttcatatatattcttttttat

SEQ ID NO: 308085 - DNA, 1000 bp, Homo Sapiens
attaattcctgtttggaaactctatttctatagcaacagattatcgtaaaagaaagaggatgatatagtctttacttttaacaatgagaaagagaaggattctgagaagaaaacttgtaattgcaaaattataaataaaatgaatgaatcaagaagagggtaacagcacagagaaggataaatcatttctaacaatgttaatagtattgttttacttcaagatgattaaactagccagctggattagagactcaaacattagtaatgtgataagcttcagaagctgaaggcaaaaagcattaggtcagtcccatgggtccttgctggcttcaaaggagtggcctctatttgatcagtgagggcagaggtacagaacctaagttctttaatgatttgcagtatcatcaagtccccaataagcctctatttgaaagttgcctgaggtgactttctctttaatttgcaaaaagtgttcaatatccaagtagtgacaaattgaatctggcccataaagaggggagaaaataatgtgacataaaacaagcttgtgtttggagaccacaaggaaagggcaggacaaccttcagcagctggaattcagtgggtattcctttaagctttttgtggtatggtttatgctttatgtggcaaatttatagattaccatcaaacagactttcttgtcattgaacatgctcatcttttttttttttttgaagctgagaacttttggttggagaaaagaagtgccaaagggatgagaccacgcctgaagctcaaaactgaaccagacttaggggtgcagagattcagaagaggaagcagtgtgggtggggcacagggcatgccgtgcagcctgccctgggctccttggttcttggcgtgctcggctgtgaaataaagagattgggtagtcagcatgatgatctctaaagagcactgagttcagcgattccacagttctaataaaatcgaaagctattattctccatattgctag

SEQ ID NO: 308086 - DNA, 1000 bp, Homo Sapiens
ttcctctggaagctttgtcccagaagggcagccacctgtatgaggtgtctgtcagcccctactgggaggtgtctcctagttaggctacacaggggtcagggacccacttgaggaggcagtctgtccgttctcagagctcaaatgccatgctgggagaaccattgctctcttcagagctgtcagacagggatgtttaaggatgtttaagtctgcagaaggtgtctgctgccttttgttcagctatgccctgcccacagaggcagtaggccttgttgagctgtggtgggctccgcccagttcgagcttcctggctgctttgtttacctactcaagcctcagcaatggcagatacaccttccccagccaggctgccgcctcacagttcgatctcagactgctgcgctagcagtatgcaaggctctgtgggcgtgggacccgccaagccaggcacgggagagaatctccttgtttgccggttgctaagaccttgggaaaagcacagtatttgagcaggagtttcccatttttctaggtagtctgtcaaggcttcccttggttaggaaagggaaatcccccgaacacttgcatttcctgggtgaggtgatgccctgccctgcttcggctcgccctccatgggctgcacccactgtccaaccagtcccaatgaaatgatccaggtacctcagttggaaatgcagaaatcacccgtcttctgtgtcaatcacgctgggagctgcagactggagctgttcctattcagccatcttccgtacctcattttctttatccagcccaccactgatgggcacctaggttgatttcatgtcttttatattgtgactaatgctgtgtttaacatgcaagtgcatgtatctttttggtaaagtgatttattttcttttttgtatatagccagtaataaaattgctgggttgaatggtagttctggtttaagttctttgagaaatctccaaactgcttttcacagtggttgaactaa

SEQ ID NO: 308087 - DNA, 1000 bp, Homo Sapiens
tcctagaagccatatatccaagtgtggacaaacgagaatatattattaagctagaacccatagaaactaatcaaaatgcagtatttcaatatatttcgaggactgataatcctattgaagtcacagagtcaagcagtactcctgaacaaaccgaagttcagatacaggaaactagcactgaacagtcaaaaacagtaccggttacagatacagaggtggaaactgtagagccccctcctgttgagattgttacagatgaagttgcacctacatctgatgaacaacctcaggagtcgcaggctgacttggaaacttctgacaattctgattttggtcaccagttgatatgttgtctttgtagaaaagaattcaattctagacgaggtgttcgccgtcacattcgaaaagtacacaagaaaaagatggaagaactaaaaaagtacattgaaacacgaaagaatccaaaccaatcctctaaaggacgcagtaagaatgttctagttccattaagtaggagttgtccagtatgttgtaaatcatttgctacaaaagcgaatgtaaggaggcattttgatgaagttcatagaggactaaggagggattcaattactcctgatatagcaacaaagcctgggcaacctttgttcctggattctatttctcctaaaaaatcttttaagactcgaaaacaaaagtcttcttcaaaggctgaatacaatttaactgcatgcaaatgcctcctttgcaagaggaaatatagttcacaaataatgcttaaaagacatatgcaaattgtccacaagataactctttctggaacaaactctaaaagagaaaaaggccctaataatactgccaacagttcagaaataaaagttaaagttgaaccagcagattctgtagaatcttcacccccttccattacccattctccacagaatgaattaaagggaacaaatcattcaaatgaaaaaaagaacacaccggcagcacagaaaaa

SEQ ID NO: 308088 - DNA, 606 bp, Homo Sapiens
  misc_feature (80)..(80): n is a, c, g, or t
tggccagagagaaggcaaggaatgagcggggtggtggggaaggaaggatgaatgagtagcggggcggggcggggagttgngggaagaatgaatgagcaggagacagaaggaatgaatgaatgagcagagggagcctgcagccccacacatgcatggatgcctcctgagctctcctgctggaggcttagccgaggtcccacagcccaggtcagcccccgccctacctccactgcccggcctgccgcatgtgagaggaggctcagcgttctccagctgtagggtttccagggcttcctgggcacacacgctcctcacagtcgagggtccgggggacttgggtctgtggcagagagaagactcggtggaggaggtggccaccaccgcccaccctcgcccgcaggcaccaggcccagcctgactcagtggttatccccctctgtggagtggcagtcccctgggagtcccgctcctccgatgcctcatccagaggctggccctcaaacgcagacacccacaccacccctatccaggccaccatgcgcccagctgggtccctgtgcccgtggatggccctgcacctgcccactcaccaggaccccacgccgg

SEQ ID NO: 308089 - DNA, 271 bp, Homo Sapiens
agctgttttatttttataatgccggtcaacctttttgtttgtgtgtgtgtgtgtgtgtgtgtgtgtgtgtgtgtgtgtgtgtgtgtgtgtctacgatgtgcttatttaataattgccaaaatatttagactagagtaacttccggtgggtcaattggattgtgactttcttttgtggttttttggttcttcgattgctctctgttaaatattttcataattcccccacagaatacgtgtgtatatactgcaacttaaaaactaaaagcagt

SEQ ID NO: 308090 - DNA, 1000 bp, Homo Sapiens
gaggaaaattagctagactcttaacacaggggactgtcaactgcttctaacgcaaatttctcacacatgacaaaggctaaatgacagtgaaaacatttggaaagaaaagacttctttgttttgtggtcaattagcattcattcctgtctgcaataaaataatgggaattgcctgactgaaatgtgggtctgtttttcactgattattgacgcattccttgccacacaattccctctggattttaaaaggattccttttcattacaggtcacttttcaccccttccctttcctttcaggagacatttctgcaggtgtagatgtcacgtcaataaagacagtcatgactgagggtgtgtgggtgcctcattcttaataagattatgtgattcagggtgcttccttttgtttcaagctgaagaactctcagcctctgtttgggttccagtggtctggacggtaccaattgggcatgcataatgtttcacccacatgacagcacccagctcatacatactaagcaccttctctgtatctatttttcaatttaaatagagacctcaggttgtaagactaaaatgagaaaatatcacacgtatgaaaattcttaatatctgttgaatctcgaagcatgtaaatcctagcgtgatctgatagccctgcacatattttatgaaaactgcgtacaaaactttgtcaggatgattgcactttaatgctttaaagtttaatctcaacgaatctcaacaatcaaatgactccacttgatttatatatgtacattttattagaattcttcagaactgtcaacaattggacaacatacaggaataaaacacgtggaacaccaacatcctttaaacttacgccgcttatgtatttacacataaagttactgtatatataaaaaatattttcaaggactcatgggcttgggaatattcaaaagacattattgctacatttcaatatttacaaaaaaagccacaaaataatttcaaa

SEQ ID NO: 308091 - DNA, 1000 bp, Homo Sapiens
gatcttgtgggccactgccatgttggccaagagcatgaactcctccacgagcctgcagagggtgggtgggatgggagggaccgctggggtttggggacaggtgcgcaggctttcccacgctgcagccggcctggctctctatcaatcacccttcaggtctcagcttaaagacaacctcccagctacctcatctcatgtgttccgccaagtccctgtcttgcccagcacccccatggtctccctgcaccagttggtctacaccgccttctcctctgactggttagctcctgtgctggctctcccagagggggaccctggagagcagggaagcacccatctattaaataattcactgcagcagccccagagctcagcagcccacccaatccagagaaggcaccgaggaaagatctctgctgaatgacaggatgcctggaacactcgggcagcccaggctgtaagagggcaccatgctcgcccagggcatgggaaccctggggccccagctcagcccctgctctgagggctccctgaggcatgtggcagtggtgagtggaccaaggaccccacagtcccaggagtgctgggctcccttctcctctggggacggtgccttgttggagggaagcctcccaacagggtctctgagggtagacaggacagtctgaggcagcaggagggaagccctcaccagaggacagggcaggagtggggatggggtgagaccccagagtcaccctttcaggggctgctgctctggctttgcagcacttgggtgtctgtcattagactcaacagtcactgtgaatggatgtggctccccacagaaggactgagcaggccaaggtcccagactgaaggagcggggaccgataggcgatgtgggacatgaaccaggcaaaggctggggggctggtatcacacagcactgaggtcagcaccactgaccctaccaccaaatctggggcaggaggccacgcacttctttttcccgcctttg

SEQ ID NO: 308092 - DNA, 1000 bp, Homo Sapiens
tgaatttgcaaagtcatatggaaactgcggtcatacggagatatccacatgtcatgtccaggtagtagggctagaaatacaggttggaacagagataaaaaacaggatagccaaagccagaagatgagatgtaaacaaaggtgaggtcagagtgagaaagagaaaacaataagcctcaactgatgattttgacacatgagaggaataaaaaactaggaatattacagaagctaaagggttacagactttaaaaaaaaaaaaaaaggaaggggaatatcgcagtggtattgaacaagataaaatggcagagaagccaatggatttggcaaatacattattgttgattttgaaagtttattctacagctatttaaggaatgcccattatgttccaagcactgttccatgttctaaagatacggcagtgagctctcatggaatttatgaaggcaacataaaataaacaactaagaaaaccgatgcatgatacaaggtgataaagaatatgaagagacttaaaacgcagtgtaaaggaagtggagagtgagaacagcaggggattactatattactgtggtcactgtaatgggagctaatagacactcctgagggaagttagagggtaagacgtgtggatagctgaagaaagaaggttgaatttcagcaggaggaatcaaaaccaaatctatagagagaggatagtgaaggatttatgttggaatgacttacggttttgtgtagctagtttttcttaaagaataaactggcttatcctcttgataaggaattagtggtgaaagaagctttgaagacatttaatgttaggaagcaagaaatcagagttgtgaagagatatgttaaaattagggcattgcctccatgagcaggccattaaaactatctggaaatgttgaaaggactatgaaagcactagatgatgatgctacgtttctgaagttatccctcatcattggctccaaatatgcattgcacttaaaatt

SEQ ID NO: 308093 - DNA, 1000 bp, Homo Sapiens
  misc_feature (408)..(408): n is a, c, g, or t
  misc_feature (746)..(746): n is a, c, g, or t
gaatccatctggtcctggacttctttaggttggtaggctattaattactgcctcaatttcagaacttattattggtttattcaaggatttgagttcttcctggtttagacttgggagggtataagtgtccaggaatttatacatttcttctagattttctaatttacctcgatagaagtgtttatagtattctctgatggtagtttgtatttctgtgaaatcagtggtgatatcccctaatgaatgtaatttaacttgagtatcccagtaaagaaaccatctttaagtagaatagagatgagatgttaggagtcggattcacgtatttggtgtgggagaggcaggggggggcacaactgaacaaatagaacaaaggaatcctgagttgtagatgtggatatctccagngcacttttataataacttgtaaaccccaccattcagtagcatgtacaaacttttaagggacttcactgtcagagaaacgatgcgactaacgttggatagtcctcaaaaatgaacgcctttctgtagtccatcagaaggagcttagcaccctccaggagagacaaaacacaaaggtgctttaactttggtagactcctgtgatgtcaggtaaatgaatgggggtaagggaggatactaggggaagcatccctgagtagcccaggcatgaagggcgcaatgtttgatcaaggagtgggaatacatgtctatatttttaagacctaaatcacaagaattcnggataccttcaggactctccttgggattatgagggtgaagatttaggatacagagccacctcagaagaatcattacttatttttattctgggaaattaagcaagtatcatgaaacgacttggaaaaacttttttttttcctaagcagaccaggagaaactaccacaattcaactgcaagtcaatccctctggtggtgccttgaatttgtcttaaactattggaaaccaaaggatctctgcgggcatgtgcacac

SEQ ID NO: 308094 - DNA, 1000 bp, Homo Sapiens; identical to SEQ ID NO: 119902

SEQ ID NO: 308095 - DNA, 1000 bp, Homo Sapiens
  misc_feature (162)..(162): n is a, c, g, or t
  misc_feature (224)..(224): n is a, c, g, or t
  misc_feature (238)..(238): n is a, c, g, or t
  misc_feature (255)..(255): n is a, c, g, or t
aagcttggagtctctagacccattctgaaaagaactgggtcacgagtaggactggcagcatctcctgaggtttaaattctttcaggcaaatattcctcgtagctctgaaaaacaggaacaggcattgaacaagggccttgaccaccacccatgcacttgaanggagatgacccccccatttggacccaacttatttccctttgccttacctaccactgacccantctggccctctaanggtcccacttgcccaanaacctccatagagctcacccagcccagtacaccatcgtctgatatttgctttcagcagcaatcccatatgatgactgatcatgctgtctgattggtgccatctggacacccacctcccctacaacccaacctggttcaattgtcgaacacagaaggcatgctgatacagaagtcatttcttatgtttccaaatatgcctagactcccaacacactagtccctgctccagctccatcctcagagcacctacaggtcaaaggtttttatccctcccccagccatagtcagcatttatccctcagtcgagcaaaatagctctgaagtccattagactgtgagttctggaactgaaaagctgtatctagtgcttagcagagactgaataaatctatgataaatgaatgaatgaatgaatagagtccagtccatggcagttttattgggggttctcccttcccatattttagctggagttgggaatggggaagagaagaagggtgggacaagagagtgagactagaatataaatatccgtaaacagcatctgagcattagtctttaacagggaggaggaaccactggtgtatattaatttaggacacaggatcattataggggtagggccagctggtgttaatggcatgcaggcatatgtgatgccaaccatgagggctggaagaaccagaagccaaagaagaatatgaccgcatctattctaaagctactgtggtggtttctcatgctt

SEQ ID NO: 308096 - DNA, 1000 bp, Homo Sapiens
tattaaagggaaatcattcatttattaaggatcgcaagacaacatcttaatttctgtagtacgatttaaatgttttacttctttgataaagcagagtacaatagaaaaaaaacaattagtttccagtaatatctatatctctaatcagaattaagtcttccaagacatattacctggaaataaaagcctgttacaataagcaaagcttcaaccagagcggctacttttcgtgccaggaaaaagttcatccctataggaggaatgatgtgctatgtaaaatggctgtaaggtcacagccttgagggcattggaagtatattatcctattccacattaagtatttcagcgaatttcaaacatcagtttatctgcaaccatgctggcaacctttaactgatatttcaatcaaccggtaaaaaataaattaagaaatcccttcacggatattccgtgatttacactgttaaaaggtacactgttcattaacatgtaattctggttcagaattacctttgagactccttgctcaaaatttggttaacagtaagaatcttccagaaattcaagttcttattaatcaataatttgtcagctaggatacattcaggcatcagctgcaactacagaataggtgcacagcctcagcgctttggaaagacataatctagaacactactagcagacaaaaaattacctgcaactggatagcgtaagtgcagtatagcgagacaaaacatatattcatatgttggcttgtttaagcctcaaaccctcgaccctttgttgagatcccataattttattcctatgattttaataactcaagttccaggaggactataagtctaatttgtactccaaaccaaacagcagtgcagttcgctactactgaggctgaatctgtacagacttcaagaccaagtccagaagacagttattatctaaaaaataattacttgaatacatagatgatccttcagagattttacctataacctat

SEQ ID NO: 308097 - DNA, 1000 bp, Homo Sapiens
acctcatggtgtgcccgtccagctggcctggcctggtctgcagccctacgctggtctcacctttgatctgtttgtccagtgacctgcccctgcccccagcctccctgactctgggattctgggaatcgactccatgactccagcctgctcagagttccaggcaggcaggacaggctgctctgggagccaggagtcggacctaggtaacaacagcctggaaacaaatcctggctctgcccctcacccctcccttttttttggatcttgttctgttgccccggcttcagtgcagtgctgcaatcatagctcactgcagcctctacttcctgtgttcaagcaatcctcccacctcagcctcccaagtagctgggattacaggcgagcaccaccacacctggctaattttttatttttggtagggatggggtttctccatgttggtcaggctggtcttgaactcctgccctcaggtgatccacctgccttagcctcccaaagtgctgggattacaggtgtgagccaccgtgcccagcctcaggctggctaatttcttaaaccctgtcagaaggacctggtgccaccaattcccgattcccttgcaggcttagaagtcgcttttggctgggctcggtggcttatacctgtaatcccagcactttgggaggccaaggtgggtggatcacgaggttgggagtttgagaccagcctgaccaacatggtgaaatcccatctctactaaaaatacaaaaatcatccaggtgtggcagcgcgcacttataatcccagctactcgggaggctgaggcaggagaattgcttgagcctgggaggcggaggttgcagtgatccgagatcgcaccactgcactccagcctggacgacagagtgagactccacctcaaaaaaaaaaaaaaaaaaaaagaagttgctttccaggcagttatttcacacctgtttatctgttcttccagcttccagaactttgaggctgctgcttcctc

SEQ ID NO: 308098 - DNA, 1000 bp, Homo Sapiens
ttaaaatgagatcctcctggattatctatgtggaccctaaatactgtacaatgacaagtgtccttataagagacagaagagaagacagggacacagaggaaggtcatttgaagatgggggcagagaccggagtgatgcagtgacaagcgggggattgcctagagccatcagaagctggatgaagcaagaaaagattctctccaagagtgttttgagggcgtgcagccttgctgacccttccattttggaattctggactctggagctgtgagaaaatacatttctgttattttaagccaccaagtttgtgataattagttatggcagccataggaaacgaaaagatgtttatcatattatttttgtgacagtagctactgacagttgttttcatctctgttatttgtttgagaaattgatccacaaaggcctgggtaacctgactacagtcacaaaaaaaagatatcaagcccctgataacctgaattttcttacttctaactctctttgttttcttttaaaacctactatttcaaaaacatgatttttttctgacaaaatacttttctggggttttacgctctagaagtataagagtttaatattcttatggagctatcaaatactcttctagagtttgctttccatacagttgcatgaactgtattggcggatacagtgcaactgtattggatgggtttgtaagaaaaaaaagacttggtagataaaagattttcagtatgtagcctcttgttcaaaattgggggcttagttatataaataatgatatatgcatacaatgaattctatgtgatcatcaaaacaaaggatgtagaggtatattgggacagaacgaattgagatccttcctggaatgtgctggagaaatgataaggtgatctatctatggctagggcctccgattttctcttgctgacccggtagttactagatgtttgttttgctgggtggttggaatatgcaggctgaggccatttgt

SEQ ID NO: 308099 - DNA, 900 bp, Homo Sapiens
caccctccagacctgagtccccagcccggccttcccaaaagccccctccaaaagcgcagtttcagcacccccgaagcacctgctcttttaggatcattgaattggaggttaagaggggcttttctccatcactgaggaccagatcgggactggccttactcgagttctcacagccagttgacttcagactgctgtcaccagagccactggacatggatcacatggaccctgtcagcacgccttcccttcctcaggggctgagcactggggacacagggctgttaagggtggtgagcagcagaagacccttcccttaggaaactgcctttcagaggagtgggaagggtgtcagcctcccccaggcacccaagttttagaaaaactgagtaactggcttgggggcagtggctcagcctgtaatcccagcactttgggaggttgggtgggaggattgcttgagcccaggaattccagaccagcctaggcagcatagggagacaccatctctaccaaaaaaaatttttcttaagttagctcggtgtggtggtgtgcacctgtggtcccagctactgcagaggcagaggtggaaggatccctcgagtcaggcaggtcgaggctgcagtgagctgtgattgagctactgcactctaccttgggtgacagagcaagaccctgccttaaaaaaaaaaacacaaaaaaagaatgtgggttttgttgcagaaaatgactttttttaaaaaaaagaaagaaaaggccgggtgcagcggctcacgcctgtaatcccagcactttgggaggccgaggcgggtggatcacgatgttaggagatcaagaccgtcctggctaacacagtgaaagcccatctctactaaaaatcaaaaattagccgggcgtggtggc

SEQ ID NO: 308100 - DNA, 1000 bp, Homo Sapiens
caaattctgaaaatttaatgtgattttaagatgagccatgaaaatacaggagtggcaagtaagcacactcattgtaatgtaggcatgctaatatgtaattagggtgactaattacatatattgtttggctaaatatactatgaaaggatgcactaggtgtgaaagtatttacctttatacacatgaagaaactgggcagatgaagggcatatgtagcaccattacttctcactgggtattttattttttacacgagtgaatgtacttctggtcaacaatattatatttaaaaacttggggctgggtgcagtggctcacgcctgtaaccccagcactttgggaggccagggcaggtggatcatctgaggtcaggagttcaagaccagcctggccaacatggtgtaaccccgtctctactaaaaatacaaaaaattagctgggtgcggtagagcgtacctgcaatttcagctactcgggaggctgaggcaggagaatcgctggaacccggaaggcagaggtttcagtgagccaagattgtgccactgcactccagcctgggcgacatagtgagactccatctcaaaaaaaaaaaatcgggactgggaggaggggctcacacctttaatgccatcactttggccaggagtttgaggttgcagtgagctatgattgtgccactgcactctagcctgagagactgagggagactctgtctcaaaaagacaaaatgaattaaaaaagaaaaagaaaaagaaaaagaaacaaaaaacaaaacaaagcaaatgtaggcaccacctgtcaaagagtctcatctactcagtctagagtctgtaggggttcccaggtaatctgatgtgcctagggctgagactcgctttgaaaatcatgtccttgatacgataaggcatgacctctgatgccaactgctcagattcacccccgactccacccttcactgagtgaccttgaacaagtgagttcatctacaatctgtaagatc

SEQ ID NO: 308101 - DNA, 1000 bp, Homo Sapiens
ggggtgaaggaatggggacagatgaagagggaccaggtcgggcagctgctgccagaagatgggagcaggggacctgcactgaggctggagcagaggcggggagggagggagtgaggctgagctgtgagcagcaggaggtgagaagcctggaggcgccgggctgcagagcaggggcatcttggggcagggtggaagcagggcgtcaggctgtcctaacaatccctgtgcagggatgctgggcgcaggcttggtgaaagcgataagagtctagacttattctgaagggaggtgggaggggctgaggagaggaacagaagggcctgggaagaagaggttccatctgacctgggagttgggttgtgggagttgggatcttggtctgggcatgttaacacatctgccagccaaggggcgatttgttccaagtagcagttggccatgtgaggcccgagttcagaggagagtctggctggagaggtagatgtggagccatcagtacagagacagtccttaaggccactggcctggacatggtcaccagggtgtacaggttggatagcagtgggagaggcggagctggtcaggcagggctgccaggggcaggatgctgtcccttttatgcagtgagcagtgctttgtgaccccacctccagaacgcagtaaaaaaggcaggatgccttctagtgccgcctttggcagatgtggactgaggaactgtctattccagcactgggaggggccggctggtggagctgtgggtccctgaggaaatggccaagggccagggcagtccctgggcagatgctgcaggcctgggggctccagagcccatccgagtgccagatgtccagctgtagcctggccccctccattcctgggccctcaggtggctatgtacacagaagtgagtggccttgggctagtgcccacattctcctgagggacagaatccctgatccaccaacccctggaaatgccatgcagagcccccagagagcca

SEQ ID NO: 308102 - DNA, 1000 bp, Homo Sapiens
ttttaatttttaattatgtgataacaaaatatatacagcatattttatatgtttgttttttatttgtatatcttttttggtgaagtgtctgtccagatattttgtctatttttaatcaggttgttcgttttattttgttgaattttaagattttttttgtatatttcagatgcagtcatttatcttaaatgttttgtgcaaatgtattcccaagtctgtggcttatcttcttatttttggtactatcttagagcagacatttttattttaatgaagattatttctttcataaatttttcttttttgtgctggatttaaaatatcattaccaaacccaaaggcatggagatgttacatgctaggagttatcttttattgttttccattttacatttaggtctataatccattttgagttaatttgtatacagagtgtaacatctgcatccagattttttttctttgctttacatatccaactgttccaatgtcatttgttataaaggcagatgtttatttaaaagaaacaaatattttctccagtttattgtttttgattcttatcaaaattacttgactgtttgagtatacttctgcttattttgttacaattttttactggtctttttcttcacaaataccacactgattggtgactgtacttttataataaatctttagaatacatagttttagtccttcaggtttgtctttgttcttcaagattatattagctattctgtatatttgttcctttttgtataaacttaaaagttagtttgttggtatttatataataacttactggaattctaattgagattgtttttaaatgaatagatcaacatagaaaaaattgatatctggacagtattgaatcttttcttgtatgcacattaaatatttatttatctgagttttataaatttttagagttttttgtttgcctaataataatcttgtacatataatttatttctatgtacttaatttgtcggtg

SEQ ID NO: 308103 - DNA, 1000 bp, Homo Sapiens; identical to SEQ ID NO: 119903

SEQ ID NO: 308104 - DNA, 984 bp, Homo Sapiens
cctgggcctggtctctcctggaggtctgggtgttgcagcctttcaggactgcggctgctgtggcctacacacctgggcctgtgtgcctgtcccgggctttaggctgctttccctacccggctcaaccagtctttagtatgggctatcactcagcttttaaggcaaggttgccagctccacccctttcccacacccctccacagaattttctccttcagctcttgttctgcctctccgcccttccttcatttgcccattcctctgtccttggcccttttacagttttgtttttcgctcttttgttaccctgaaacaactttgtatacttaggtaaagttattttagatatgaagcctttctttttacatacacagaaataaaattgagatcgccaatattcttacaacccagttttccagagtgaacatttgccaaaaacccttctaacctaaataggattatagattaccttataaattggattaattagtataatgttgggcatatcaatccataaaaatataatggatgaatgaataaattgttgatgagagggaaactgatgacttttctgaatccaggtaaaagataaaatccccagtaacatcatttaggcttgtgcagtaatgtctttaatttacaaaacatttctccattggactttccttccactcctgtgggagaagtttgatgtaactagttgtctaaatattttaatttaaaattctagtctatgtctctggagactggagaacacaccacacacacagagagagagaaagagagagagaaaagaagaagagaaagaagaaggggaaaaaaagcagtggacatcccacattcccagaaataatattttgataacaaattacagcacaaggatatgttcattgtttactgtattttgtgtttgctgcacctggttagaggtgattctttttttattaccaccacctaatttagcatttaagataccacacagtt

SEQ ID NO: 308105 - DNA, 1000 bp, Homo Sapiens
taaattgcacacagagtctgtcataggagaagcttcaaattctatttaggttgtgctaagaggaaaaatataaggctgttctcaaatattacccccaaatcagagaataccactggagaaattcaaaaaaaagatccctattagtcttcataaagcacgtgcaacataaaaatgcatgcccttccacagcaacatggatacacagaacactactgaactgtaagatggtacattttaggttatgtatttttttttttaccacagctaaaaaaatgcacgacttcttttgactgtgccttttaccacttgggtgaaacagaacttgtcctttgcaatgcactttggcacttaatacaactgggatttaaacggccagttacataattccaacaacaggcttcactcttgaattccattgcatgtgacattggtactgcgtttaaattcattttaacactgctgtggtataaccatttccaaataacaggagctgccacttagcagtgtgatgttgagcaggcgtgatacatacctatagatagatattgatctagttatgtcacattagtgggcaaaaaaatattaaaacagggtactgtgatgggaagattttttaataaaataggttcaatgactctgaagaccaaaatgtcagcttagctgaaagcatgcatgtaaaaacaaaacaaaacaaaaagatcctacctcttggttaatctacacattttttttaatgtcccactatttgtgttcttaggaccctaagggcatgatggtttaatatatagatgctaaaagatacaccatttttgaatgatatggtaaaccgttgtttcagcaagttgtgtgttgctaatcacagtttattcaccacattatttctatttttaaaaaatagacgcacgtaacttcagctacataccactaaaccagaactttacaacaggttattttaggaataccactgggcctaacaacaaagttttaaaatatgtataat

SEQ ID NO: 308106 - DNA, 1000 bp, Homo Sapiens
ctcccacagcggccgccggtaccactgctcctcgaagccccggcgtcggttgtcagagaagtcggcgcggaagctccagaggccgtccagctccttgcactcccgcgacgggctctcctgggggtacagcatcccgccctgcagccccagcgcgcagccccacaacaacggcccgagcgccgcccaggcaaccgccgacccccgggccatgcttcccggtcccccgctcggccaccgtctgcggcgctaagaaaagcgcgggaggtgcccgtagggcgggtcgcgtgacgcgccggtgtcgtgatgcgcctgaagccatccgcgccatcttggttgaggacgagtgccaggcctggaggggcggggccgggcgctcccggtagggcttcgtggctggaaccccaggctaggcctttggggaaacgggaccctcaccctcagccccagccgataagggcgaggtctgctccccaccccgacccaggctggacgatccagggccgcaggccagaacagaacccctgagatcggtgggatccccctgtttcttcaaggagcacctccacttgcttttcccagcaggaattcaaggaggccccagcggcgcctcttccatgcctgtctgatgcagcctcttgcagggatgcacgtccttgggatgcggccatagccttgaccctgggcttctggagccctgaccttaacccaggggccaagagctccctcttggtgttgcaggcacataaagatgcagggagagaggccaggtgcactttgggaacccgaggggggcagatcacttgaggccaggagttcgagaccagcctggccaacgatagtgaaaccccgtccctattttgtaaacatacaaaaaaaaaaaaaaaagaattagcggggcgtgatggtgcgtgcctgtaatcccagctactcaggaagctgaggtaggagaatcgcttgaacccgggaggcaaaggctgcagtaagccgagatcgcaccact

SEQ ID NO: 308107 - DNA, 1000 bp, Homo Sapiens
atttccaaatgtatcccagttgaagtcagttcatttatttgctttaagagttatataccatgagacacacagttctggtgttgttgaacttttggatgtttgtacgcagtgctcacggggagcaagtggacaggggacggtccagatcgatggccacccactgagccgctgctacgtggcccctggggctcttccggtgcaccccttcctgcagctgttcttctttttgttcctgacatttcagctcttcttctaaatgtctgtcttcttgaaggctggaaattaccttcttctcatgaccagaatccaaagagatttctaaattccactttttctttcttttcagttccttacgtattgtcacccagagaacagtgttcactaaaaacattattcccactgccagatagaaaaggacatgaaaccagacaggagttggtaactggaggcctgaaacagaaaaagacaaagagaagagatactatttagagaccagaggggtctggctgagttatgtttggaagggaaggttggctgagacctgatgtgcctgtcctcagggaggcactggtcatttcagggagcaggaaggaactggcggtacgtctaactggctatatggtgtatagacaggacagctctgagactatgctggcctgtcagtggacttacttctagttccagagacaactgatatctctgtgccatttaatacttgaaatgaatttgggttgaagatgaacttttttcccccccaaggagactttgttctagagctcacaatccctctgcctcagttaaatagagatacttggggaggtggtgatttgcagtttacaaaatcactgtctgataatcactgtgagctctgagcagactatcggagaaaatgaattactgtctgataaatccaccttgtgagctccttgaagcaagaactatactcaaatgtctttatatccccagacgtatgacaacagataggaagaacttgataaat

SEQ ID NO: 308108 - DNA, 1000 bp, Homo Sapiens
agcattccagaattgatgaattataaaaattacagatacttctgtttgggtaaaaatctatcttttagtttctgatagtaaaataagcaatctaccagccagggttgaaatatatagtattttaactactgttctatatatttcaaaattcatgttttctatctgtcctagagaaacttagccttctatgaagtgaatcacttaatgatattattgctttggagataaaattggcctcagagtatgatagcctgtaagtaaatgcttcattacccacatatccctacccaccccccccaaaaaaaacctaccagtagtctagtacagtagtgagcaatcttaaattaaaagctattgttcacacagagcagaggaagataattttcatgttaaagcagttttcaacatcaaacatctaaggagttataaactataaatgaattacctttaaaccctggtcttcacagttacattgctttctgaatgctttttggggtgacattatgctaccacatttttaaacggtttaaatgacaagtattttatatttcatgaatgataaatgaacaagtttaattatatagatattagttcccttagtctgggaaccaaaatgctgtagggttgttctgttgcaaagtaaatgatatagattaagtttgtctcagaatgaagattacccaaataattatagcctgaaaagagtgatataccttcagatgtgcttaaatcatggcccaaatacagattactttgtgtagaatccagcctactgaataaattttattatttttttgtttgagacagagttttctctgtcacccatgctggagtgcagtggctcagtcttggctcactgcaacctcttcctctcaggttcaagcgattctcctgcctcagcctcccaagtagctaggattacaggcatgtaccaccatgcccggctaatttttgtatttttaatagagacagcgtttcacatgtttggccaggctggtct

SEQ ID NO: 308109 - DNA, 1000 bp, Homo Sapiens
gatcaggaggtcaggagatcgagaccaacctgggccaacacggtgaaaccccatctctattaaaaatataaaaattagctgggtgtgatggcgcacacctgtagtcccagctactcaggaggctgaggcaggagaatcacttgaaccgggtggggcagaggttgcagtgagccgaaatcacaccactgcactccagtgtggtgaccgagcgagactccgtttcaaaaaaaaatcagataaagtgtgcccgccaagcaccagccagggcaagtgtccagcagcgccaatgcggagacccagcagtgtcaaggcagcagctctggcacgcgggaggcgcatgcagcgcgggagggaccacgcctactgccaaaagcagctccctgctgggagcccaggagacgacggggattgtgagtgctgggcagggaagagaccctcgtgtggaacatgcatttcctgcaggaaggaaggcgttagtcaggtcatcaccgacacgtgtgttggcttccaagatgccagcagggccgttataacaatctcccataactgagtgggcttcaaacaacaaaagtttactctcacagttctggaggccggaagtccaaaactgaggtatcaacaggtgcctccttctggaggctgagggggaacctgttccaggactctctccagtttccaggggctctgggagtcctcggcagttcctggcttatagctgtaccactgcaatctctgcctctgtcaccatgcggccttctccccagcgccacagagtctctgtatcgctatctcttcttataaggacaccaatgattgggttagagccgactctaatcatatgacttcatcttaatgtacattaattgcaaaagcatctggccgggcgcggtggctcacgcctgtaatcccagcactttaggaggccgaggcaggcaaatcacaaggtcaggaaatcgaggccatcctggctaacacggtgaaatcctgtctctactaaaaa

SEQ ID NO: 308110 - DNA, 1000 bp, Homo Sapiens
gatcccccttactgcctcaagctcccatggacctgtgggcggggagttaaatccctgttccatctcgcctgttcccagagtttgaggactttcaccctgtccagttcccagggaaggtgatgtgggagatgaatattgagatttgtgccgtgtctttcagtctctggtacccctgccaagcaagagttgagggcatgcaatgggctgcccagctttgagaccagtggcaaggaagggctggttggggctcaagtctcagcaggtgtgtgtggggggccgggacctttgctcctccattcgacccccaccctgaactctcagcagcaactccaggagctcttgcccccctggagggaggggaggctctgaccgctgggcttccatccgctggcactggaggagtggagggagagggagagctttggtgagggtctgagaggaggaggttcttgagaggatcaagggttggtatggggaggcatataggaaacctgtgaaggcgatggggtgcctagggagaaacaggagtagagccccaaagagaacaggggccaagagaccaggaggcctgggtttgcctcctggggggatgtcttacctggtgactgaggatagtgctgtaaagctgttctctgtcctcgagaggacggagtggggcaggggctaggcttgaggggttttggggggtgtagaaggtggccctctgctcctccaggcggcgggactgggcttcagccaccaggtccagaaggagttcagtctgcagggagagcagggaggccgagcggggtcccagggctggggagaggggtgtggagggctcagagacccagagaggttggcagacaggagccgtgggggagtgtggacagggtgacgtgattagggactttggatcagaggagagggggtgcaatggggaatcccaaggggagtctggaggaggtggggagagggcccacaatggagtgggccttggtaatggggtcaggatgtgggc

SEQ ID NO: 308111 - DNA, 1000 bp, Homo Sapiens
gatccacccacctcggcctcccaaagtgctagaattacaggtgtgagccaccacacccggccagtgttactattttcttagtgtttatacaggtttaggttatatgcctacatgcagtatggcattcaccaaagtctatcagtaactaattttgtttcaactagagggtcagaggcaaaaaaattcttgctaagtctgattaagctgtgagggccccagtaccttcaaggcctgtttactgtggtaccagagtgattatttctatcttatctcctttacagcttggtgcggagagctgccttagattgtccagtgaatctattcaaacagctgcctctgttaccttgacttgtctcagatatcgtcgacccgagacgagtcctggcactaggaatgtaaggctgtctctgttattttgacttgctccagcaagggagaagcccatgcaaggctcttactcaccatgtgtttcatttctagctttgatgtctgtacaccaattcccctaggtttaactatttgctcaatgttaaggcaatgctgtggaaatctgtctgtgtaactggggtgctatgcaggcctgtctgtgtgactgtcagggagaattggcctgccacaaactgacccttgaccattgggtttagaaacttggaggtcatttgtgactctgacatgtggtttaagtaaagtggtggggatgagagcctgattgagagaaattcaagagtgaatgagaggtgagaaagtagaggcagtgagaagttttgttaagtggagagagaagtggaacactgagggagtgagctgggtcagggaagagtttttaaatttaaaaataaatgcattattttatacatataaaattataatttatatgcataaatatatatgtattacaaagaataattttgtgaacatcaggcagcttatgaagtaaaatcttcccatcagggcaaggtggctcacacctgtaatcccagcactttgggaggctgaggtg

SEQ ID NO: 308112 - DNA, 351 bp, Homo Sapiens
tatcatgctttaggtaataaatggtggctcacacctgtaatctcagcactcggggaggccgagacaagaggatcgcttgaagccaggggttcaagaccagcctgggcaacacagtaagacccccatctctacaaaatgcaaaaaataaaaaaattagctgggtgcggtggcatgcgtctgtagtcctagctactccagggtgactatagtcaataataattgtatattttaaaagagtgtaactggattgtttataactcaaaggataaatgattgagggtatggataaccccattctccatgatgtgcttatttcacattggatgcctatatcaaaacatctcaggtacc

SEQ ID NO: 308113 - DNA, 577 bp, Homo Sapiens
ggccttctcatgccctggtggggatctatgccacagacaggtagcagaacaagctgccctctaagcccccagaagcccctcacctgccatgatatggagccgagaagacccagggcagataaaggccgcatccacagagtccaggataatcccatgaggggtcccgacttccttctccagccgcttcggataaccgcttactagggtatagcctccctttgtcaggaagacatatacctgggtgccctggaggacaaaggatggtaataaatacagagttggatatgcttgtcccagtctctacctcaagcctctcccccaatacacacctggaccagatagagtttttcttcccaggaaaaggcagcatccactgctgaaggaccctggggccactgatgagcaatgggccagctatgccagccatcccggctggtgtccagacgccagtagtgggtccctgtggaataccataggttgctctagggccgctggcagaagcccaggcagagaagaggctagtgatgaatgcagaaatgagtcatgagagggagagaatgcatccagaggccaatat

SEQ ID NO: 308114 - DNA, 1000 bp, Homo Sapiens
ctctcagtagatatctgttgagtaaccagaatgtagggtggtcctgatggtttctgacattgaatagaaaacagctccctatttgatcttaaaataatcactataacctggacatactgtactagatgctgtttttgtctgacttctactctgtcaatctctttgcacctccatttgttcatctgtgaaatgaagaaaatgctcatggagttcagtgaagattaaatgaatgaatataggtagactgcctaatctggcacttgccacgcagctgacttcaatatagtagctctaatattatggtccttgaggatcttactgtcttatggcccagaactgcatttgattaaagaaggctcccctaaaaaaagagtcatacatattccatttgtcctttcagaaggccgtgaagcatttacactctttaagacaaattcccatccaaaaatagttaagatttctaaaatattttgatgctgaaagaggtgtgcttcagttgggtggcaaatttgcttctatggaagatttttaatacaggttgtttctattttactttttctggctgaaaggattttacatttattcaaagtcaaaagggaaaagaaatccaagaactacagaagagcagttgaagtgatttatgcttgatttctaaatgcaacttatgtttatacataatttaaaactcaaagaaagcatgcttatacaatcatgtgcaactttaaactttaagaactctggatgaatacatggtggcaacagtccatgacacctgaaaacatcatttgtggagtggcgtagagttcagtgttcgcagtcgcatattacaaccatgtttcacacagccctgctcggtttgattttctccacgtggttgataattgtcttcagttgctgctaagtgattttgcaaatttcatttataatcctcgccctacaattacctaagtactgtttctgcaggttaacctgtatgctacgctcagtcatatacctttca

SEQ ID NO: 308115 - DNA, 1000 bp, Homo Sapiens
gaattcatttgcatgagcagcttctgaaggaagatatcatagtttctttgaaatcgggtgagagacctttcgtgccctgaaagagcaaagattgttgctgtcaccacttaagccgaggaagctgggcgagggttttgtctctttgggaacatgggcaaatactttcattaacagcttagagtactcaaaatagtaagatgcttatgatcctttttgctttctggatacgcatgataaagggtttaagtcaaggttggagcttaaattgaatcatgctgagcgtcaactcgagaaatgagattcgggacagtagttcaagacagaaaaagagaaagcttggtaactggtgtgcttaagcttttgtgataccccagcggacacaccatcactcccgcatagcctgttctcaaatcagcgtcctttggattctcgtgggaagcaataatttgagtttatcctaagatttttgccattgataggatcgtgaagatgggactagccacccaacattcattggagccttatattttcttctacacattgaaaattgtattttcttttaaaaattggtgacaaggtcttgctctgttgcccaggctggaatgagtagcgcaatcatagctcactgcaacctcttggctcaaacagtctccgctagctcgagtagctactaggactacaggtgcagcacatgctggctaatgtttcgttttcgtttgtttgttttgtagagactaggtctctccatgtttccggctagtctcaacctcttggcctcaagtgatcctctcacctcagcctcccaaagtgctggattataggtgtgagccactgcacctaggctgaaaaatgcatttttgatgcactattttgagagggtctctggttcaggtgtttgaacagaaatgtccttctctacatttgggcctcaagacctatcaatgccacatatatagtaggcccccagtaaacgtttatggctcaatgaatctgtgtatga

SEQ ID NO: 308116 - DNA, 1000 bp, Homo Sapiens; identical to SEQ ID NO: 119904

SEQ ID NO: 308117 - DNA, 1000 bp, Homo Sapiens
tcttgagttctctaacagaggcatttcaaactctgctatacagacaaatgaattatatggtacagatattaaaaagctgagagtgtatcaaagcttaaattttatttcaaaatggcatattttgggtcaaagtatgaaaaaacaagggcatagttatgtttttgttaaagtgaaaaaaattaggtaaagtttatgtaagtagactgatgacttttgaaaatatatcattaagcatgtacttaagtgtcaaaaacctcaagtcaaatcttacaatgtatttcaaaagcaaagctaaaattcattcactgtggttaaactgcatttcataaaatatctgttgaaataaacttcattaaaacataattacacagatattttaattgtatatatatcaggtacacggaataaaagtcctactctctagaacatgagaagtcaataaatagaaaagatatacaaagtggaatgaacataaaaatgactaagcatgtgatcttcacattcatacagtttttcaactaatcttttacaattaaaaagtcatttatttgaaactgtagagttgatatatgccatattagtttggaaccttacaaaacaactttagtggtgttatttatgtgtggagagaaaactgtgtatgtaactatcatgtttcaagggacatgacttaacagtgaagttttttatgttatagggaagaaaacaagtattagtatcagttatcttagaaatgctatctaaactagaatgacatttgttcagtatgatatgttctttccctaactccattctaattgcttaaaaactatcaagtgaagttacaaaagttaaaccactaaatgtggcatcttttcttacacaaagtatcttctcttagaaatgcggtatttaattaagtaaaccttcttggtgaccccagttataatcaaaagaggccacgaaactacagactactgacgaaaagtgtcagtgcagacactttccatcaatcaacagg

SEQ ID NO: 308118 - DNA, 1000 bp, Homo Sapiens
actttgcctatgaagtatccattttaggactggaatattatttgttgtatttacagataaaaataaaagctcagagataaaaacaacttgtctacgagcacattttagtgttcttttcccagcattaatcacaatggctccatgtattctttccttctaagtgcacaaatgagttctttcagtatcaattcctcaaagtcaggactatgcagattgaacccagtcagcaactccagatatgtgaattaccatgtatctgcaataatatgcctaggtcatacttttcatgaagcacaaaaaatgtatttttatttgctttttaaagattagatgcaattattaattaatgcagaagaatgttattttcagaaagtttatataactgaatacaactaattttaaagaaaaaagacttagttaccttcttttgtaatctaataacagatgtccattttttttccaaaagaccagcatactttttatctaattcttcattctagagaccataaatttagaatttttaaaaaatggcttaactatgatcctcaagacaaagatcattcatctttaagtccaaatattactaaaaatctgattataaaaaaagggagtggctgggcatggtggctcacctgtaatcccagcactttgggaagctaaggcgggtggatcacctgaggtctggagtttgagaccagcctggccaacatggcgagaccccgtctctactaaaaatacaaaaattagctgggtgtggtggtgcgtgcctgtaatcccagctactcggaaggctgaagtaggagaatcgcttgaatctgggaggcagagtttgcagtgagccgagatcacgccactgcactccagcctgggagacaaagtgagactccatctcaaaaattaaaataaaaaataaaaaaaaaaggagtgaaaatcaagttcagtaccaagtagaccacaataacaaatgacaaaattgtgcgtaactgttaactacagatac

SEQ ID NO: 308119 - DNA, 328 bp, Homo Sapiens
taggacggtcagcttggtccctccgccgaacacccgagagtgctggtgtctgtatatgagtgtagtaataatcagcctcgtcctcagcctggagcccagagatggtcagggaggccgtgttggcagacttggagccagagaagcgattagaaaaccctgagggccgattactgacctcataaatcatgagtttgggggctttggctgggtgctgttggtacccggagacatagttacaaccgcaaatgtcactgttgattccaatgcaggagatggtgatcgactgtccaggagacccagacacggaggcaggctgagtcagggcaga

SEQ ID NO: 308120 - DNA, 1000 bp, Homo Sapiens
ttttttttttttttttttttttaacaaaaatgaactaaagagctttattgacatcacagtacattcaagaataattttaagaacattacagctgaaagagaatggcatgtttatagtcttattatgcvctatattttttgaaaaaaacgtaatacaaagaaatcctattaagtaacttggagcagcattggaaaaagtacacctatttacagattaaaaaaaaaaaagattctggtttcacctacacagccacaatgtgcctctataatgagacaagcccttaaaactcatggaatttttttaaagaacatcatggcattcttgccacatcattcctcagcgtttacgacggggaggggttgttgatctgaaaaaaaagggaaaagacaaaatttaaaaataaaaatgtattttaaattaaaaatctgcaattttaaataaataatattatataggatttctaacatttaagactatgattatttatcaagtaccaaactgagtttattaaagagagagagaaaggacactttcaactttgaataaattcagtcaattttttttaaaaatcagacaaaatactttaaaaagtatactaccttgatcgggacttagacttgtgtttgcggcttgccttcttaccagacctttgagatttctccgcggatcgcgatcgactatgtttaggcttcttagccttcttttctttgctacttcctggagactcagaactgctccttccactagaatcagagcctgaatgttttttactatctttggtagtacttttcttactatcctgtctagaatcatgtcttatgattttaacagatatagaaccactcctagaaaatgttctttcactttctcgtttcctttttaatctatcatcctgactactgaacttaaaatctttttcttcccttttttgtttctcttttcttttatcctgttcacgttccctttctttgtctttctttttcctatctttatctatact

SEQ ID NO: 308121 - DNA, 1000 bp, Homo Sapiens
  misc_feature (312)..(312): n is a, c, g, or t
gcgaacctcctagaagacaagcaatcctggctctcccagcagaggcctcagcacaggagtgaggctgttcccggaagaaccacccaaccaacacatagaactgtaagaaataggccaggcaccgtggctcatgcctgcaatcccagcactttgggaggccgaggcggcgagatcgcgttgagaacagtagttcgagaccagcctgggcaacatggcgaaaacccgtctctacctaaaatacaaaaataatcatcataatgataataataaggctggtgtggtgctcacacctgtaatctagcactttggagntgagcggcggatmacctgaggtcaggagtttgagacgagtctggccaacatgatgaaactaaaaatacaaaattagctgggaatggtggtacacgcccgtaatcccagctacttgggaggctgaggcaggagaaccgcttgaacccggagacagcgttgcagtgagctgagatttcaccactktcctccagcctggttgacagagttgagaytccatttcaaaaaayaaactaacaaaaacaaaaacaaacaaacaaaaaawtgaaaataaataaacatttgctgttttaagccactcaagaaagaytattcaaaaggctttcaatcccatggtctaacccatggtcactcacctgtcaccaacctgggacaggtctccactcccaggatgacattgaaatacttaacatatgagtttccccgcatgtcagaatagagcaagctcttgaaggttcattggtattctcggagtgaaccctttagtggttggaccatggggaggtctgggagcccttggggaagcgcttacttaccaaatggtatggaaatagtgcaatatttaaaccaccagtttggccatacaagtatgtccctacgagtcatcaactctgctggtagcaactatttaacctcccttttcatgtgtggaagaagtctaggtgtttttctcctctaaaaaaaggcacct

SEQ ID NO: 308122 - DNA, 1000 bp, Homo Sapiens
agaggaagtagattggcaccagtcaaaaattttactgacacctggccgggcacggtggctcacgcctgtaatcccagtaccttgggaggccgaggtgggcagaacacgagatcaggagatcgagaccatcctggctaatatagtgaaaccccgtctgtactaaaaaatacaaaaaattagccggacatggctgggcgtggtggctcacgcctgtaatcccagcactttgggaggccgaggcgggtggatcacggtcagcagatcgagaccacggtgaaaccccgtctctactaaaaatacaaaaaaaaaaaattagccgggcacggtggcgggcgcctgtagtcccagctactccggaggctgaggcaggagaatggcgtgaacccgggaggcggagcttgcagtgagccgagatcgcgccactgcactccagcctgggcgacagagcgagactccgtctcaaaaaaaaaaaaaaaaaaaaaaaattagccggacatggtggcgggcacctgtagtcccagctattcgggaggctgagccaggagagtggtgtgaacccgggaggcggaagttgcagtgagctgagattgtgccactgcactccagcctgggcaacagagggaggctctgtctcaaaaaaaaaaaaaaaaattttactgacaccaaaaaaatctatgtgatacaactattatgaattgttttaaaaagaatagaacataagaaattattttaatagtgcattaaatattttatttaaattaagaagtataacaaaatcacatacatttgttccacggtttgaataaaatttccaataactttcaaataatgcacacatagtatcgcatggatcaaattccgtacatttcaatatggtcatgagataggctgtattccaaaatttggtatataaatccatacataatatatactatatacattgactttaaataatctaactatgtcatttttaaaagtcaaagcaacttatttctaatga

SEQ ID NO: 308123 - DNA, 1000 bp, Homo Sapiens
accaatgcctcagtgacatctatgcaaacatatatatctgtaagttttaggtcaacagggcatgaacatttcaaattttgatagatattggaaacctggtttctaaaaagttacaggaaaaatttaaacaaacttctctgttacttaaggaagtgtgttgtttatctgtgttgtgtgtttaaatacaatcaggatcatgaagtctttggatctgtattagtctgttttcatactgctataaggaactgcccgagactgggtaatttataaaggaaagaggtttgactcacagttcaccatggctgaggaggcctcaggaaatttacaatcatagaggaaggtgaaggggaagcccttcttcacagggtggcaggaaggagaagtgccaagcgaagtaggaagagccccttataaaaccatcagatctcgtgagaactcactcactatcacaagaacagcatgggggaaactgcccccatgattcagttacctccacctggtctctcccttaaaatgtggggattctggggattacagttcaagatgagatttggatggggacacaaagcctaaccatatcaggatctgacctggactttagtacttcttagttggagcaggttatgtaaaaactcattccacttttttcctttcctcctcaagatgtattcaggcttagtgacagtcctccaagggcttcccaaatttttggacatgtgatgagtcctaggatgttgagtagtgggagacctaggctgcagtggataaatttgaaaaaggcaagtgaatacatatgcatgggaaagaaaaacacgacttagcctttgttgcctctacccttcctgtgataatactcaacaaattccagtttgcagaaaaattgaattaaacaggtaaaagcattagcgcccccattagtgtccctcaatgcacagatgccactaagaacaggatactgaataaccctcagagcaatgagtaatttctgtcctggaaatgg

SEQ ID NO: 308124 - DNA, 1000 bp, Homo Sapiens
agtagagatggggttttgccatgttggccagggtggtctcacactcataggctcaagtaatctgcccgcctcagcctccaaaagtgctgggattacaggcgtgagccactgtgcccggcctgacttcaaatcctgtgttgaatagaagtagtgagagcgggcatccttctcttgttcctgatcttggaggcaaagatttcagtctttcatctaaaatgactgaaagactttcagccatgggccttgcatgactggcctttattttgttgcagtacattccttctcttcctggtttgtggagtgttttaccaggaaagggtgttcaggctgggcacagtggctcaagtcacacaaaagtgtcaagtcagccctgcccaagggccccagtgcccatcttcctgctgaggggctgggcctcaccttggctggctgggcccctcccacctggatccctgcagaccccaccgcactcagcctcacttctcatccctttctctgtccaaggccagcgcaggctctttcagggagaggaaaggcgggcctgagtctgtgctctgctgcaccccagattcagtcctcagagaggagaaggaggaagccagtggaggtcacaggcgctcagcccccagcccaagcaccagagcccccagcttgtcctctgtccctctccctccctggcaggggctcccatgcagtccccaggcaccaccacagcccagctggcctcttcccaccccaggcctgctcccttggtgcagggaccacagtcttgctcaaggggtgagggggctgacggtcccctacacagagactggtccctctcgaggccaccccttgacccccagacatgagactggatctgcagggtcccctctgacctccctgccctacacaggaggggacagagcttggagaagccctgtcccaggccacatgacttgcagggcagtcccaggactggagccccctctacctggatctctgggcctcaacttctgag

SEQ ID NO: 308125 - DNA, 1000 bp, Homo Sapiens
gagacagtcttactcggtcacccaggctggagtgcagtggcgcaacctcggctcactgcaacctctgcctcctgggttcaagcgattctcctgcctcagcctccggaagagctgagattacaggcgaccacgactgcctaatttttgtattttagtagagacggggtttcaccatgttggtcagggtggtctcaaactcttgacctcaggtgatccgtcccccttggcctcccagagtgctgggagtacaggcgtgagccactgcgcccggccccaaaggacaatttcttgagacccccacacaccttcagaaccacacattctgttcatgttaaaaacaagaaattaacaacctctaaagctaaggacaatgattctgtaaagtgcaagaatggttcattgtttccgcttttgtggatttcatgttaagaatactttaaaagaaagggtgggcgggagtaaaccaggaccccagtcatatatttgatcaagaaatgacccgtatggcaaaggtgagacgtggaccagccctcaggtgtctccaactctgtgcacaccactgaggtaggagctctagaagaaacgcagaccctctcaggggggttaaggtttcctcttggcaaatgagctgggggcctgagacagtcatacccacgggctgcatgcaactttgcatgcaacttcacgaaattctagagctgtatcacatcagcgatggagaagggcaagatccaagacaaagccacatgaggcgaggtcctggtgctgccatttgttgtccagcacaaatcaaggggccggaggaaagggatgaggtggaaaaccctggcaggcattctacaaaacagttattagcaaattgtatcaaaaagtatcaaaacatttcaaaaaactctaaaaactgccaggcttggcagatgcgcaggacagggtctccaagtgcccgtggcgctgccctatactccaggcatttatcctagaggccaggatgccaccccct

SEQ ID NO: 308126 - DNA, 1000 bp, Homo Sapiens
caatgttcagtttcctttaatgacccccatctccctgaagggcaggtgcaggcagctaggtgatggcaagagatgttcacttgaagatcttgccctgattgaaggctttgcccacatgctggaaggccccctcccaggaaaagtactctcgaaccagcgtctgggtctcctcgctgccaggatccagtttccgccatgtgtatgactcgtagtccacctgccaatctggactcagcggaaaggcaagctcctggcctcggaagacccagactccagaaatggagctgctattgttggttccaaaaaggatgacactggcgaaggcattcttcctcagcttgtccagtcgctggaacattccagtgatgagattgcagctcatgaaggtctgagtgagttcttcagggaagcgatactctgagtaccacagggaccagccgtccttatcaaagtgctcccagaaatatggcagtgccacagagagtgtgtcctcattggagtacttgcgcttaaattcatccaacacaaaggtactcttgggcaggtgagcgaaggggtccttggccttgggctcagcagccagcgcctgctcacattcatccatctcctcctcaggagcaggggcagccgcctttttctcctccttccgctcagcctggggcttctgcttctcttcccgtgaacccttctctttccgtggtgtgtcctttttaggttgggtctctgcaaactttttagcatcaaactgggccatcttctcacacagtttcacttcccccaagacagcccggaactggggctggttaatgcaggtgaggaaccagcggttggtattgggaaaggcctggcggaaagaaggctctagaacctgcttatagagccacaacagggtgcagacaactgtgatgtcagccaatgtcactcgttcgcccaccagaaaagtcctcgtcttcaagtaagcatccagcagccccagaattcgcctcacttcctcctttgc

SEQ ID NO: 308127 - DNA, 1000 bp, Homo Sapiens
ctccaaagagtatttttgggtttaatctgattctcaaaaggatcctatgatccaagaaagtttaagaaccattgaaacagtaatttattcctgagctatttgactggcatcaatccatttgttataaaactgaagggaaaacacacatttgaatcacttcttctaaagctttagtaagtgatctgttcaaataagcaattacatgaaagaataaaaccaaatttccaacctaaaattctgacaggagagtcaacatgatggttaaggcctatttcatattcaaacttcagtctatgaaagagtagagagagaagggtctcctctttcaaattaaatattataaaaacaattaaaaaaaggtatcaatagtcctaaaatgcagcaactccatctcaaacaagcatgacacacttctgatcagatgaagtatttacaaaggtagcttgtgttttaagcatgtaacactttgggtgacgacagaagtttctcctctttgggtgaaacctgcctaaggctgtagagatgaccaacactctgcaggtgttagttctgaataactactgtgggcttttcatgatcttccctccagtaggagaccacaattgagtctaaagtcagatccaccgttgtctatgggtaggcagggttgattcaaacttaatccttgtttgtattcttttggattactgcaaaaacatctagggaccagagtgaatgtctggtgaggcataactgcagaggtgaaagatgtcaaacattttcaatttggcagtttcttcaaggtgtgtgaaaattcacatacagaaggtctggcagtgtcttctgtaagttttcgtgttgccgtatttctgaaggagctcttgggcctgctgctgcatttcctgggccagacagccaggaaagtgggacctgatgagaagcaggacgaggcagcactccagcacatctgggaagggccaggccttaatgctctcaggaaattttgccattctctgatttg

SEQ ID NO: 308128 - DNA, 1000 bp, Homo Sapiens
atttaacagtagctttaatgaattaatgcacaatattttgaaaaatctttgaccttgctcataagcagatgcctgccttgaagaaacactccaagtctgccgtgattccgagcgaaatgccaaggcagagtcaagacaatcattacctttagggctgaaacctgggcatgaggctgccccttctgggatgcctcctaaccagtctgatgtactggggaaggaggagtgaggtggggtcttcctcgggtcccagaagctgaaaacccagcccttcctttgccatcagttctgtgccaaggctggaagatgctgctggagtgcagggcttcccccgtgtgggtgctgcagctcacacaggagcttggtggaggaatgaaggatggattctgggggtagctggagggcagggggctcactgggagcccagagaacatggctggacctccctgtgaggagccagatggtgtcgcagccccatgtgggggcttgagcacgtggagcaggaaggccgaggcctggaaccccaagaactggtcctcagggttggcaaaatgtaccatgcagaaccaaaagaggcagccactgctggcctgggccacagagccctgcctcaggctgttgggatataagccgcctccagaaggcagagcctgctgtccatcagccaggcaggctggtgggcttcactcctgtttccaaccctggattgtgatcactggccccagtacttgttagttgcatcagctacagccatggtatcaatccacctggtgtaaacgactttcaggagcctctggtttttaaagcacaatactacctgccatggttctaagaaattacatggttatcaaaattgatcttaataagctccaaagtatgaagcagggccaagggctgtgatctgacccagtccacatccctccccttcctcttcctagatcttgcaagatggttcccttgtttacaactccactggatgatcccttttatagccagcagc

SEQ ID NO: 308129 - DNA, 1000 bp, Homo Sapiens
ggagttcttaaagagttttatgttgactgaatattgcacattgagtccccattgagtccctggtgggaaaagtccacaatttcccattgatagctttttactgttgtgaaaaagggaagcgtcagccacacaaaagcctgcatgaccgctgcttcggagaagctctcgaccctaactgcagtcactgttacttggatcagatcaagcgcagtgactttttgggattcagtggttattctccacacttcgtagccatttcaaccaactctgagcacaaaatgcagccatcctctatgcagcaagccctgcccagtcagtgaccctactggacagatccaaggccagccctggttccctgctgcagccaccgtcctgacgttcatcggagcaggccggggcctggccttcccggcacaagtggctgttctgacaggcccccagtttgtcccatctgaactgctgggaggtttccgggtggccagaggagcaaagctgccttccaagtgcctgtctgtgcctgggagaacagagcaggagcgtcgtgcggtccaccgcgcagtgcatggcgattccaggcgctgaacaactcccctggacccttgggcctgcatctgactcccagctgcagagtcagaagctgagtccaggcaactgcttggccactcccgatcgctcctccctggacacccggttaccaaagtcagcaaagaagatgcggtaatcgccgcctgatctccacatggtgaacacaacactcccaccaacacctccttgactggtcggtcttcagcaccgggggtgggcaggcaggtgttctgtgttgacgagaattgcacaggtgtatgccaggtgcactcaagacctgctgctaagtgggaagctgggttcagaggcacatggaacagctcgcccgctggatgccctgggaagagctacctcttctgagcccctgatgcttgttaagagctgcttctacttctcagttacttctcaagttttg

SEQ ID NO: 308130 - DNA, 1000 bp, Homo Sapiens
gctgattaagtttaccgtgttatatgggtgcggttcatggcgccccgaaacaattacaataatatatcaaagatcactgatcacagatcactataacacatataataacaatgaaaatgcttgaaatattgcaagcaattaccaaaatgcaatgtagagacccaaaatgggcacatgctattggaaaaatggtgccaacagatttgcttaaagcagtgttgacacaaatcttcaatttctctgctttgcttttcttaacctattgctgtcacatatatgtcccaaaaccttcaatttctttaaaaattctgctacctgtgaagtgcaataaatcaaggcatgcctgtatactctctcctgttatcctttctccagcctctgcacccccctcagcctcagcccctctgcacccctgcccctggcaccttcccacacctgagctctgcgttgttaccctggggaaatgccaccctttagggaagtctccaacttattcagtctgtaactgtcagagcatacagatggctcatctatcttagcagttactgcatgtcactggtacttaattcagtcagccactcagccttttggggagcatttgttgagtgcctactctgtgccaagggagagctaatattgagcataagcacaggattcttgccttcagggagcttacagtctagtgggggaggcagagattaatcaaataatcacataaagaaagaacacattaaagaagtgcctggcaccctgtaggccttctgcaggtacctggtgagtgaacacagctgcaatcagggctgtgaaagatgtacggagggtgggcacttccctgaggaggaggtgtaaaggaaaagcaggggtgaacaggcgagtgggggaggaagggcactccaggtgtgcaggtccctgtgccagaaagaagagtggcctacaggaggacctagaggccggtgtgactggcgtgcagtgacaggaacacagttcaaggtgaggctgg

SEQ ID NO: 308131 - DNA, 1000 bp, Homo Sapiens
ccatgttcatttttatttaaagactcagaaacacaggcatcatggtttgtcatcactgacaagtcttccaaaatcacacgctgacatttgtgtctaacaaaaacacttgggatagggtgtgtgtgtttgtgtgtgtgaactgtgcaaagtacaaaggatctcccagtcggctgagcctgttttgaagtgcccggcctggcatcaccccatgaggatgccaggagagcacccgtggccgccatcctctctgcctccctctgggcagaggcccctggtggcctgcagtcctgtcccctcggtgtccactgacttcagccatggctgtggactctaccatgctcctcaaaggaaatctctgtggccccccaaggccactacatggctaagatgtgtacatcatggggccaggatgaaacataagggttagtttcatcttaaccgccaaacatgtgtaccctttgaggcaagatggcctgaagaaagggctaattctgctcctgctcttctctgcgagctacatcatcatgaaggctgcagggcctgaacgagtttaaaatactcagaaatgcacatgggccatgcatttcctctgctctcaggcagcccggcattggctccagagctctggccagacccacgcatcgctctccttcctaaggtggcaccaacgcccacccgactctgccctgaaagcggccagctgacatcctccaaagacatggagatattcgccccagctctctaccatgctgcatgcagtgggctgtgtcctcgccccccaccaggagggtgaagcacatttctacctgaagcaccacgtgggccatgcctgggagagtaagaacgttcaggttactctattctgttgcttggtacctgcgcgccttaaaaaaaagacttcaaaaaagttacctggagacttgacttggtctggtttccctggagaacacctgcgtcatccaggttgttgatctgtgcacctctttggtgacaacgtgaa

SEQ ID NO: 308132 - DNA, 1000 bp, Homo Sapiens
gttggtacagattttaaattacaagcttgatttgataccctcaaatacagttcttaaggaagattagttacaaatagttgtcagtactttcaaatgacagaaaaaattacattttagtaaaactggatgaatttttcatgtgtgaaataacaatcctttcaccaccaggtggaattactccagttcatgcaatagataactatgacatttttaaaaactgccctaatttctagttgcgatttcatgcctattgtaagtcaaaacatcgttatgttcccgagctcacctcaccctccctgggaagtggcgaggacacccatggtttctctgagacaccactgggcccctgcttagcaagctattgtctcagtgctttcctcttgctgcgaaggtccccaggagatgttgggttcagaggaagtggctctggttgcctatgggcaaatactacaccagaggttacacaggatagagacccaagaggtgaacaggagggaagttttaacttattttgacataaaattggcaaaaataagcatcaccaaatttctgtaactagaaattgaggataaaacagaggaggtttgtctatgatgaggatgtccatcacagtagaacttgtgaatagcttttatagaaccacttaatatagtaccgtcaacattttacatattttacatacaatttgaatacaaattcttaaaatttataatagaacattaaaataatcttctaataaaatcagccttaagtataaggaatctaaatttcattatcttgtacatttctaaataaatatctttgatctataacccttgaaaatattacagtttatggtgacatgatagagacaagtcaaacagtattataagtgaaaatgaaacatcaatttaaaatgaacaagtgtaaaaacacgcggaactgaaattatagaaaatcaaaacactaaatacacagtaattaaatatctagcactggaatcaccaaatgcatgcgcagt

SEQ ID NO: 308133 - DNA, 1000 bp, Homo Sapiens
gactccacattgtttatatgaaagatggatctgcagctacatacatttgttagatttctgttctgataccctcatttcctagagcttgtcaaaatgcctgggtcttgatggtaggaatgagggaggggagagagaagagggtaacagggcaggagggtcttgtcttattctctacatgatttggtctcaaggtaagcacagccaaaagctggatcagagctgattccaatccactctgaccccagtttgccccagaactggtccagaacacgagtttccaggaaaaaaacagaaaagtgtttgcctcactttagacaaagaaggtagaggctgggctgggtgtggtggctcatgcctgtaatcccaacactttggaaggccaaggcaggaggatcacttgaggccaggagttcaagaccagcctgggcaacatagcaagaccccattgctgtgaacgaaggagaagggaagggaagggagagggaagggagagtgaagggaaggggaggggaggggaggggaggggaggggaggggaggggaggggagggaaagaaagggaagggaagggaaggagggagagaggggctggtgacacctttgattctctctctggagcaacttcaaacatgaagtcagcaaacaggccagcgatgtgggaaactaaacttgagtcaaaatcctgcttctacttccctaaattcttgagtctctagaccatctcaagaaccatccccagcccctctgcggaacccaggcatgccagccaactgccacgctatcctctgcctctccaggtctctttcagctccccaagtgtcagagctcctctctctcacctcctactctctgccccttctccaccaggccccactcaggttcctggccacaaagagccaacctcatgcccaaagactgaaaaagaaatgttttaataaatacaaaactctccaataatgactctgctcagctcaggggcagcaggagtggagtgtcggggg

SEQ ID NO: 308134 - DNA, 1000 bp, Homo Sapiens
agatctacagacatatatttgagagtcaatgaatattgctagggattttatagtctcaagagatgacagtagctccttccttccctcttcgcagctcctcaccagaagtggctaggtgcaggtcctccagcaagaagaggagggagggtttagaatcctggtgatgcccaggctgtgggctggcttgtgtttggccctggattcctctgctcagcaggagacggaggtgggaggaactgaaggcagggtggatggggctgtatatgtaagggtgatgtggctctaccagcacctccacaaaggctgacttccctgttgctgcctctccagccagcaacactggctgtccccctgacagaagcaggtccaccacatacaagagccgttcagtctggatagaagggtgaaaggtgcccaaagttcctttgatgtggctgctcaggtattggccagtgaaggggaccagtgttccatcttcagggcttacatgtagatcaaacaccaaggctgagggtggtggctcagggtagttggagaggcgactaatagaatcccttatgaaggtatcaaagatgggccagaacctgctcagatggacacacaggcaaaagcgtcagacagttacaacacttccatttatgacacactcacacactccaccataccctaacagtgatgtcatgtgggtttttacttccatgggccagtccatctcagccctctgcatctcccatcccccatcctggtaggtacctggagggaaggtgggctccaaagccccagatcaaggcaaaaagaaaactgctgacagccagcaagtgttccctgcacttatctggcacatcgtcactgtcaacctgggaccggtttagaaagctgctttttgaagacctgaagctttgggccacaggatcactatagctgaggtcctctgggccaggggccttctcctcctttaggcgaaggtggaggtcaagcagactatgcaagatgcgtgcca

SEQ ID NO: 308135 - DNA, 192 bp, Homo Sapiens
tatctcacagttctggaggctagaaaatccaagatcaaggtgctgctggtccaatcgttcctggtgagggctctctcttggcttgcaatggtggctgctttctccctatgtcctcacatggcctttcctgtcctgtgtgcaccatggagagaaagaaagatatcttttctctaaggcttctttaaggcatca

SEQ ID NO: 308136 - DNA, 1000 bp, Homo Sapiens
aaaatctttacgagtacaactgcctggtttcattattcagaataatatattttacttcttataatgtaaaaaatataatcgtttgagtggttttcagcatgatctgttaattttgaatacagagaatgaacaaagcaggtaaatatatgtatatgctgaataatgtaattccatatacaattcacagttagatgcacttaattgtggaaaataaaggaagacaataacatcaagatctttttccaaaacacggtaaaaataacgttcacatgcattaaacatttcaagccatctcagtatatgtctttcttgagtaagtagtgaaccaatggaccagtggttattgttggagaaaacaattaggcaactcatcaatgcgctatttatacaatcttagtgactatttaccacttcacctaagtagactttcccactcatttgaagctattgctatctataaataaatggcaacaggaaatgtttcacaagggcctttgatttccaaaactctcaaattccacagcaaagactcaatttaaggcaattatttatgcactgaatatttgaatgaagatgtattattttccttaagtgaaaaaagctgatactattttgtaatgataaaatttgtataccatagtagaaaatgatttgcaattatgtgttaggacttttcatattccatattgaaacatagtgattctgtagctggcatcagctgtaccctgacttcacatgaatggcctggaggggatcatatttttaaacaggaaatcagtgtgaattagctgagtaattaacattcagtgtacagtgagcattcttaactaaatcaaagtagtcatgaaagaaagtactgttggtaaatccaaaaacatacatcaaaattaaatggtgaggttgaaggttgtagttaagtaccaactagtgtgagttctgggagcattttgaaatggtggaggaatgtactaaatttctgaggaattaatactgatgggaa

SEQ ID NO: 308137 - DNA, 1000 bp, Homo Sapiens
gagagagggtcttgctctgtcgcccagactgtgcagtggtgcagtcacagctcactgcagcctgacttcatgggctcaagcaatcctcctacctcagcttcccaagtagctgggaccgcaggcaaacaccacctcacctgcctagttcattttttttcttgtagaggtaggatctccccatgttacccaggctggtctcaaactcctatgctcaagcaatcctcctgccttagcctcccaaagtgctggcattacagtgtgagccactgcacccggccctgtacacactttctacactgcactttttttcaccaacttgaagactgctccaattaatccatgtggtgcttccattctctgagtactcagccaatagaacctcccagatgtatctccctcatcccccttggatggacagctaggggatcccgtgttttgctgctgcaaaggacattgcagttggtagccttgtgcagatgacttcgggcccaggttagagggcacatgtaatttgcatttgggtccatattgccagaaagctctccaaagaggtagtaccattttaccctcccatccccaactagattgggcacctctttccccatgccctcaccagctaggcagatgctctgtgccaagaaaaccaaacagctgcttcccttacaaatactcaagggcctgggcatgtgtgggggcctgagtccagcctgcacccgttaccaactgcaagatctcaggcaataggcttcaccccgtggggctcagtttcctcatctgtaaaacagtggtgattggattatggtgagaagtttgtagatgcaaatgcctaggacagtgcctggaacatcgaggccccaggtcagaagtggctgttcttacgagtctgcatgagtcttgtaccccatgactgcagtcatgggatgggggcccagcccctaggatggatgctcaggcctcagacctgtgttttgggaagggatgaagggaagggaagagcaat

SEQ ID NO: 308138 - DNA, 1000 bp, Homo Sapiens
gatccgcccacctcggcctcccaaagtgctaggattacaggcgtgacatgcaaagatatttttcaaaggaaatgctgagtgttttgccatgttagctaccccttcctatcgccagtgggaaatcaatttacaatattaatttctccctatgcacagacataagaggactgctgaaggtgagttgggagaaatgtcgaatctgctctaaggaggatggggaaggtgtgtgatgaaggttgccgaggggtcaccatcaggtcaatgtgtactcaccctgaaaagcatagctttcgtggtaaatctcataggcttttctgtgggcatcactgagggtctggagttgtgacgctcttgattcctggtggggaagctccttgatcacttcctccaagtcactgaaggtgaaccagatcccaactaggtccccgaaggagtggaaggcgaatgtggcatagtcggcgaagaggtcagcaaaggcttcggttctccggagggtgctggcagggagggtctggtggtgcaggatgaccatgggctgaagccgtgcagtcttgagggccttgaggagtcgccggtagcactgcactgttttctcgtctggattctgggtgcttcctgctgggaggagctgtgcccatgacagaaataccttataatgggtgatctgactggcatggagactgctgaagtattctggcaggaaagtgggcagtggctggtgacaaacatacatgtctttgtcccctgctacaaagttagaactctggtctcccaggagaccactcaggttgtgcagcaagtcattggttagaggaccagcggtggaaatgaaatttctatcagactcccagtctgacccccagcatgaaaaacttagcagggcaataaagactacatgccaagacagctccattttctaggaactgttaggaggtatgtggaacccttactttataactgcaactgaggttgtaaaatactaagtgataattaagactta

SEQ ID NO: 308139 - DNA, 1000 bp, Homo Sapiens
tcgactcgatctaaatctcataacttcatacaaaaattaactcaaagtggatcatagaattaaatgtaaaataataacaattttaaaaaataaatgtgggagaaaatctctgtatgtaaggcaaggcaaaatgttcttatataaaatagttagaaatatacctaaccaaggaggtgaaagaccactacaaggaaaactacaaaacactacttaaggaaatcatagatgacgcaaacaaatggaaacatatcccatgttcagggatggatagaatcaatattgtgaaaatgcctatattgcctaaagaaatctttttctttcaaattcaagtcaattttcatcaaaataccaccatcattcttcatagaactagaaaaaaacaatccaaaaattcatatggaaccaaaaaagagcccacaaagccaaagcaagactaagcaaaaagaacaaatctggaggcatctcattacccaacttcaaactatactataagaccatagtcaccaaaacagcatggtactggtataaacataggcacggagacgaatggagcagaatagagaacccagaaataaagccaaatacttacagccaaccaatcgtcaacaaagcaaacaaaaacacaaagtggggaacagacaccctattccacaaatggtgctgggataactggcaagccacatgtagaagaatgaaactggatcctcatctctcactttgcacaaaaatcaactcaagatggttcaaagacttaaatctaagacctgaaaccatacaatttctagtagataacattggaaaactcttctacatattggcttaggcaaagacttcatgactaagatacgacaagcaaaaaccaagataaatagatgggacttaattaaactaaaaagcttctgcacagcaaaagatacagtcagtaaacagacaaccacagagtgggagaaaatcttcaccatttatacatctgacagaggaccaatatccagaatctata

SEQ ID NO: 308140 - DNA, 1000 bp, Homo Sapiens
gagctcccttgtcctccagcttctggttggttctgccagtgaggacccctaggcagagataggagaaatggggaaacaaagttagggtttacccttggctccctccctgtgaggtctccttcgatggcagtggtctcatcaaaggctagtgctcctctcaagggctcctgctttcctgactgtccccctccaggcggccttccaggtgccttcaggctgcaccctgttgctctcctagcccctgcccacatctgtggtatcagtacatttgtgaacgaattccccttacagcatccgcactcaaatgccgctagaccctgactgatgcattctggaagattcctccccattgtccatgtgattgtttgtgaactatttaactcagtttgcttgttctttcttctccattgtaatgattcctggcttcttcacacgaagtgcatatggtgtgcaattattagaggaaagtgctttgagtctgctccattttctttaaagtgtaactgttgtccatagtgacaaataagagagaaaacaaaagtaggtaaaataagggcacatctttattttgctacaaggcagtaagtacaccgtcatatctcaaaagttcagtgctggccatcttgcatcaaatgttcttaaggcagtgactggctatcaaccacagtttctgtctccccagttgcaaacacaggatccatgcaacagttctgagaccatacacttagaaaccacaggggatgcggatcaaatgcagaactcccaaattataaaacagtcaggctacactcaaaacaaaacatagaacatcaacaacacacatctcccaaaaaagaagtgcaacgcatgcttgtataaaccaacaataacaaaaaaaccacaataaaaaatgcagagtctcccaaacaagttttcaaatgtattgcagaaggaaaaaaaatgtatatatatataaaattaaaaagtctgaaatactagtgcatagtcaattacctaacac

SEQ ID NO: 308141 - DNA, 1000 bp, Homo Sapiens
ttgactggaataaatcccagacccagttgtgggtttaaatttgatgtgtaatcttggtcatttaatttattgtctttgcactttagctcttctgtttcaaatgagttacattataaccctgacattgagaatctgctggagaatttgaaatggcatatataaggtggctggtgcaacataaataggagcagctgaatacatgataaaattatattaggctgttggattttaaaggattgatctaactttaaaagtcttatttgaaaatgtacctgctcttggaaagggtcacatcttgatattagccagtgcctcaacgttttcagttagtactcaagagaaattatggcaccagaggagatgagggtcggagtggggagaatggagagggaatggcacccgtaggcaagagaaagatgccctgataaggaggccaagaacagctcctgatttcatagttttaccttgaaaaagctggtgtttgaaaagcttttgggaggaaaaacagaagtggtagtcttggaaaccaagaccaaaaccagaacaggtgaagtattggccattggctgaattatccagatagctcctgctttccccttatgttcaatagtcttttgtagtcccatgggcattgacagtaaaataagaagaagcatcttttagagaacagtaagaaaagataaaatatccctctaaatgcttacctcattggttttggccaagtcctttatgatgtctgcttgtttttcatcctggggcttcacgcggaacaccttctccctttgtggaggcaaatgaaaaaaaaaaagtgaactgtaaggaaacaacctttaattctcttctacacagagactggaacacaggaagtaagatttacctgtcaaagcggacaggagcaattgcaagagtggtagcaatcaaacccacaggcaggatgagcctcatggttcttctttgcctgccttgagaccctctggcagttttatgcctcagcccttat

SEQ ID NO: 308142 - DNA, 1000 bp, Homo Sapiens
tttaaacatcactctactctggaagttataataaggattattgagttccaacttatccatttattggaccaaacacttgacctatactgagcattttaactgcaataagttcataataataaagattactatcctgaagatattggaggaagatattggagatcctgaagatttttaaggtcataacaccaagctaagtaacctggttggtaggtggagaagataagattcaaactcaggtctgtctgacatcaaagtccaatccatttctattgtaagatggtcagctcagagtggaaaacgcatttggaaaaatgtctgctctcacgtttgctgggtatagtgtctgcattttgtacgctaatatgtaacagctatcctggaaaaaatatcaggtccttttctgagggctttgatttttttaaagaaaattgtagtcacataatctgcacagaagacaagctcctatagaagatgaggcattctttgaccctgcaaggagtctcagtgtggaagctctgagcagagagcagcagcagggtgcatgcacacttaagttttgcacagtgaggcaatacttttaaaagctggtatattaagccagatcagaatttaaaatgagcttatctgtgatctctaactgtggcataattccataagaagaagaaatgaatgtctagatttatcccccgatcctgaagcaactgccactgcagctaacactagcttgcttctgcttgatggatagcatagtagtatcatctctaaccatagtactctccaatgtacatttatggacacataagcaatccagctcctctccctttaagagttgctgtcctagaaatggggctgcactattcatcccaccctacagagggtacagagggccactcaacatgggggccatttcaaaatgatgtaggagactgatggctcccaaaggtaggacagactagtagctgtgccatatggactttaagtaatgggacattcaccc

SEQ ID NO: 308143 - DNA, 1000 bp, Homo Sapiens
atctcaattaaatattggtttctttacctgctgtaagagaatacagcttccttgcagtcatgtctctctctattttaacctattttatttatgaccacatagcagaagatcatagtaatttctagaaagatcaaagagaaataatttaatttgttccatttactagttagcatcttttatgataccatgtcagtattctctaattaatgcagaaaaattttaatacttaggccagtaagtattaagtgttataactagacagtgagagttacttgggaaattatgacccccttccagcagatacgttcttgttcttttcatgtttattttctgagtacagaaaataagcccaacagtgccatcactcacactcattgaactttttctgagtgaataaataaatgtgtgcatgaagaaaatgaatactggaggctgatgcttgctctctgtcaccaaactagctataatcccagcatgtatggtacaaaataataaactattattgtggcactgggtttgggcaggattggataaatattttcaagtgaaaattgggtttcaggagatgaaaagactagccatagagagaaaaattataaaactacagattgctagaagagaaaagcttgagttgggctgtgtttaaacataaactaaaggagagaatcaaaacaaatatatcgatatttggaaagtatatatttgtattgagtaaataattaaacatagaaaactcttcattgtgaaaataaattgttctttgtaccattttcttgttgttgttaatatcttagtctctccattttcccattctgattcgtaagaaatttctaatcatcatgatatggaaagcaagtgctctatacatactgtcccgtgatcttcgcccctgacctgttcagggttctcacaattcatgaatattttattcaggagtattgagagcttggccatcatactctctactaattgtaaaaagaacttccaaccaaacattatt

SEQ ID NO: 308144 - DNA, 1000 bp, Homo Sapiens
tgttcccactgagtagatgaaaaatgtatctattcattatggtagtaaacagtaatagatatcttttagagcaaggtagagctgatgcgactttgaaatactttattctggaaaagctcatttggtcaaaagacagtcttagaatgaaatacaataaaatataggctttaagtccatggaaagagctatcacagtactcagtgaaattcaatttaattccttacctaagcttataaataagtgccgtagttgcttttctccatttaaagtgctttcagccaagacaaacaactcaaatccttttattttcccttagtcgcccttaaatgaacaccttagttatttctgacatctctaatccaacctggagtcctccatacattctatagctgctatttattttctccagagtctaatagttactgttcttctaaaagataaattcagaatccccttgcagatttcatgcttgtggtagcttcaggtcagggaatttacctcaaaacccatcatgttactgagcagtagactcaagttccttcattaatgaaaaggatatgaagctggaaggaaaacttgcctcactcttttccaactaagggatgaagcaacaattgtggaatccatacctggtgattaattgcaaatttttgaactacaacacagagggctacatttcacaatatgacataggaaacattatagaagcaataactttagaggatttcagactaagaaatcacttaatgtcacaagccaggaaagcctatattccccatcccattgttgcagctcacagtagaagcaagttgtccaaagatggcattcactgatgagaactgtagcctacaaagacattcttctcctaacaggtggctgtattaaatatccttttcctttttgaagagtcatgattgttttttagtataatatagcatcagttaattggtaatatatttaaaacagagatagagtgacaaatctacaactgataaagtta

SEQ ID NO: 308145 - DNA, 1000 bp, Homo Sapiens
aaaaaggaaatgacagaccaaatggcgaggtgaaaagtgaactctgtgagagtcttgaaaccaacagtaagtcatctgtagagtttccgatggtcaagagcgggagcacttcctaatagatgtacgttgaacattcttctcctagtcttggggattgtgctacatgtttccaggggcatgatggtactcacataccgtgacaccatcacatttaaaaccattcgaagcaaatggtctcaagatgagcggctgttctacagagtacaaacttgctcacaaaatctcttttacaaagcatgacattcagatctttcttttgaagcattacaaagcttggtatttgaaagcgtcatcttcttataaaaattatcttttagtacttggaaacaattccacaatttttcttgttccatactgggtgctttttatagtatcagtagtttgctgatacttacagaatatcactacagatcttacacatataaatgatgttatttgtgcctttagggaaatgagaactctagttagccaatatgtttagttaagtcacagttaatacttgtttctcccacgtggtcccctttccttgggcttcctgagggcttcccttgacttcccttcttggatatattaagataattaaagttcttctttaaaagcctcatgatcctggaaatagaatcttttctacaaccacctttccatttttcttttctttacctattttcgtctctacagtccacccaggaaaaagcacatgataacaatacacagaaatctgtgctcaaccagtagaatttaactgatctattgaagcccatcttggtatctatgaaagagtggcaaataatttgaagatttgtatggtaaaataccaggaagctgaatatggtaaacattacaacctttaccttactaggttctacagatgaatcaaaaaagaaagaaaagcaaaggtacttgtattagagtggcttccagtcttttggaatatagcata

SEQ ID NO: 308146 - DNA, 1000 bp, Homo Sapiens
aggacacaccccactgtgctatttagtgccctcatgccttagcttgtgctattttcctcccctggaaagcctttcatgccccccaccccctttttttttgttgttgttgttgctgcctatgtatgatttgtctattaagaccttgattgcactcatttcccttgggaaactgttagctgaactccaaatctgggtcatgtgttaccccatattattatgacatttcttgattctgtgtccattttgtctagtggctagtaagcttcttcaggacagagaccttgtgcttaacacatagttaatgcttaaaaatgcttattgcatttgcatttgcttgctcaataatgcttgcataatcaatgataataaatgcttgcttaaaaataattaatacaaatactagttaggagagttagtctgataaccaactcgaaaatgatttcaagtcagaaaggtccatagtatgacttaagcaaaattctggtaaacaaaatcaagtacataagtcagactcactttttcctccttgtttacatgcagatcgagtgacaataaaaagttttcaaaaaaaaaaacaaaaaacgtttaacgatagatccatgctagcacagccttacccagctttccaaaaatggggtcagttatttaatatttttaatagcacgtttgttttacgaaggccagctctcacattttaaggtcactgttacaaatttgatttccgtggaagaggttttaaagaaacaaaaacttttggaataaagatttagcataactttaaaaaaaatcactgtactaatgttaaaatatgaataaattgaatttaatttcttgcttggagtaaagtagtagtaagtaaaagtagtagtaagtaaagtaatttaagtagtagttacatttaaaaatgagggtactttcttatgaatgtgctcattgccctgcaatgactaactttaaattcgtctagacgtgagaaacacatttgactacagaaatgata

SEQ ID NO: 308147 - DNA, 1000 bp, Homo Sapiens
aaagcttttcttctacttcatgcatgtgtgtgtgtgttgtgtgtgtgtgtggtggaagaatttattggaaactgggagtataattatcaggaaacttttaattacataaaatgaggcatatgcaggtatatatcacatgaaccaaaaggtgcatccgcctgaaaggtctaaaatcattttcagaaccaaacaggttataattcttactcctaagtaaaatggtaaaaataacagaattattcaattttagggttatcttttcaaggcaataacttcataaaaaagaaacttgattccatagataatagggagtcataatgtattactgagtagggtaatgacaaaatctatattaggcagggttctctagagtgacagaactaataggacatatttatatctatatataaaggggagtttattaagtagtattaactcacatgatcacaaggtcccacaataggctgtctgcaagctgaggagcaaggaagccagtccgagtcccaaagctgaagaatttggagtctggtgttcaagggcaggaagcatctagcacgggagaaagatataggctgggaggctaggccagtctagcttttcacatttttctgcccactttatattctgactgtgctggcagctaattaggtgaacccctgattgagggtgggtctgcctttcccagcccactgattcaaatgttaatctcctttggcaacatcctcacagacacacccaggatccatactttgagtccttcaatcccatcaagttgacactcaatattaaccatcacaagtccacccttgccaacttgaacccatacacatcctgagatcatatgtaatcttcaaataaagacaataataaggtcataattatgcctaacataatacaactatccttcatgcaactggaaacacaccaatccccaagccaaatgctattccatagagttaacaatacttaaatactgatatggatatgaagtcaataaatc

SEQ ID NO: 308148 - DNA, 1000 bp, Homo Sapiens
agggagacaaaaatagtgataagtaattagaggacatgaaggagagattagaaaagtgtctccgattagttttttgctccttgggttctttcttcagatctcagagtggtccctttttttcccatgtatttctttccctctcctacacccctactacaatcagcagaatgtttactatgtgaaactgactctgaccccagacaaggagagagttggcagttctattccttatgcagagaaaatggagaatgtgctgatgaaaatagagaatggaataggattcatgccccttactcttaagggcgttcccacatgagaggcatctctggacctggggagcaaatgcccttgggatgccaggccccgtgagcttgccacacagtttacgcatctgtttggagggtgaggaatcttggggcggggaatgctcaaagctaactgtgttcctaatctccacagtggagagctagtagtgtctgtccttgttccctggctggcctgcacccagggccctccaactgtctgccttctctctgtcccctttgatagagcagttcctcattaacacatattctgatgtctccttcccagccgtgtggctttttcttgatatgtttcctgtttctcatcttgtgctgtagaaaccaaagtactatttcttacaggacaagatacgactcttaacaccattgtaaaatttatttcactagttctaggaggcctttagaaactgtagtttggatcaggctccatgcatcaccctgagtgacttattttcctctatgaccttcctccctgtgctcatgggttcctggggtctaggtggtgtggagatgcatggaggttgagtctgagatggcagagacattgtaaaagatagtgtcccaactgttccagctaagagaggcccaaggagacgtgatgactaaacgtattatagtatcagaggacagaaaaaggacattgggtaaaaactaatgatatttcagggctggatatt

SEQ ID NO: 308149 - DNA, 1000 bp, Homo Sapiens
tgcccgcctcagcctcccaaagtgctgggattacaggcatgagccactgcgcctggcctgtttttccttttataatgagcaagccctgagtggcaggccctgaagtctgagctggggctaaggcagggactagactgtgaacccttgggcagggaagaggagccactcaccctggaagtggtagatacccggtcggcagggtagtagatgaatgcggtcgggctgatcctggttgcactgtatgaggtcatggcccgatgaggagcccacatagccataacgacctcgcaatacaaggaaggagcgattggcaaataaaatcccaaattcctcatttgggcctgaaggaaataggaaggagttatctggatgggctgcctttaggtgttttcccaagtggaagcaggaggggggacgctaattgcagaagggtgtggtcaatattttaacagtgaatgaacacctactatgtgtcaggtcttatgctaggtgcttgtgaaatgtttgtgagagtacctagcacatgcgaaacccaagaagctttaatattcttccttcctttgagatgtgttgatgtgtttaatcctcatgacaactctgtgaggctgcagagttgtagacaatgaaatgttcatttttatagacgacaaaactgaggctcaaggaggtgctttgctcaagtgatgacaaaaattcagtgactgaacaagtacagacccaaatcttccgaccccaactccagtacttttttttttttttttggagatagagtctcgctctgtcgcccaggctgcaatgcagtggcacgatcttggctcactgcaacctccaagtcccaggttcaagcaattctcctgccttagcctcctaagtagctgggattacaggcccgcaccaccatgtctggttaatttttgtatctttagtagagatggggtttcacgtggtcaggctggtctcaaactcctaacctcgtgatccacccacctcagcctcccaa

SEQ ID NO: 308150 - DNA, 1000 bp, Homo Sapiens
aagttatttaacttctctgaccagtattgtccccacctgttgcaaggattagaagggacatatttctggtgcctggaacatattgggcactatacatgaatagccattattgttacaaagcaggttataagttctccggatattttgtcaataatctgatctctgctgtgaaagaaaccagtgcaaactcattttctaggatgctgttttatgtaaacaagtcatagttaaataattactccagagtgacaaacctttttaattttgtatccagataagaacatcagttagaacatgtagcaagaacagtgattcctctgagaaagtagggtagagtatcttcaaaagcaatgggtggcttgttggtgatttatgttttgagacagggtattaccctgtcacccaggctggagtgcagtaacgtgatctcagctccccacagtctccgcctcccggttccaagggattctcatgcctcagcctcctgaatagttggggccataggtatgtgccaccacgcccagctactttttatatattttttgcaaagatgggattttgccacattggccaggctggccttgaactcctggcctcaagtgatccacctgccttggcctcccaaagtgctgggattactggcatgagccactgcatgttggtgatgttaatgctgtaatgaaaaccctcattctctgtttaagagatttcaccatttaagaagcaaattaagggacactgtgggggcatttctctgctccctaaggagcaccgaagactaaatattttagggagtgttatgctgctgatgacctcagcttgatgattcactgacttcagagtttctttcagatcctaactacaagtcaggtgagagcttgagagggcaggagggagggacttggtgcttctctcaggaggaagagtggacttctaggctggaagggacaagggatattcctgactgagggactggattgaatgttgatgggctctggat

SEQ ID NO: 308151 - DNA, 1000 bp, Homo Sapiens; identical to SEQ ID NO: 119908

SEQ ID NO: 308152 - DNA, 1000 bp, Homo Sapiens; identical to SEQ ID NO: 119909

SEQ ID NO: 308153 - DNA, 1000 bp, Homo Sapiens
  misc_feature (79)..(79): n is a, c, g, or t
  misc_feature (144)..(144): n is a, c, g, or t
  misc_feature (945)..(945): n is a, c, g, or t
ggatccagccattgcactccagcctgggcaaaaagaacaaaactctgtcttaaaaaataataataataataaataaaantaattagccgggcgtgatagtgcacacctgtagtcccagctactcagaaggctgaggtaggaggntcacaggagcatgggaggcaaaggttgcagtgagccgagattgtcccactgcactccagcctgggcgacagagtgagactgtcttaaaataaataaataaacaaacaaacaaacacataaaaaataaaattacacatatggttccagcaatcccacttctgggtgtatattgcaaataaattgacatcaagatgtcagggccaggtgcggtgactcacgcctataaatccagcagtttgggaggccgaagcaggaggatggcttgagcccaggagttggagactaatctgggcaatgtagtgagatgccatctctacaaaaagcacaataataaaaataaaaaaaatcagatgagaggccgggcacagtggctcacgcctgtaatcccagcactttgggagacggaggcgkgtggttcacgaggtcaggagatcgacaccatcctggctgacacggtgaaatcccatctctactaaaaatacaaaaaaaatttagctgggcgtggtctcacacgctgtagtcccagctactcgggaggcggaggcaggagaatcacttgaccccaggaggcagaggttgcagtgagccgagattgtcccactgcactccagcctgggcagcagagcgagactccgtctcaaaaaaaaaaaaaatcagatgagaacacgtagtacaaaaaataaaaaataatatttacaaatttaaaaaatttaaactctattttagcaactttgaaatacacaatacattagtattaactgtggttaccatgctgtgcaatagatcactgaaatatatttntccagtctcgctgaaactttgcaccctttgatcaacatcttctcttttcccaacc

SEQ ID NO: 308154 - DNA, 1000 bp, Homo Sapiens
gaattcttgcttcaacctttccacagacccacctcttgtggaaaacagttgctggaaactggattattaagcaggtttaagttatgttatttacttacgtgattttttttttccacttccccaatccctcagctctaaatttatctggaaatattttgagtttttcttacagtggagaactatttgacttagggctacacaacaatgcttgccacctccgtattttgaagatcttcctctgtgaatccttcccacattcaaggaggtacgcaggaaaagcctgtgcgaggcagtagccttgatctaggctgctcagggccacgtagatcatctgaagattgtcacctaaatacagctgttactaaacctttgccaagggaaagcagagaagggacaagtcattgccatccctcagcagcagcttcaaggtcattcgtaagtgagagcccggaagttatgcaacactttctctctaggtcctccagacaatgatttttacaacagccagatggtaaattcacgtttgtggctattccactgccttgtcctatcagcatgatggccatggcgtttcacgactggtgtggacacacatagctctacactgatggcacccaagtcacagcagggactcgtgtggcagtttgcatttcttatgataatctttttgttcacccaagtttttagagctaaaggagacagttaattaaactacaaagtgggaccagaaagctggcaaatgagatgcttattaaatcaatgggtataaatattgagaagtaagagtgactttgttcaagctcaaactgcaaattaacagcaggtgggacaatagacccctaaagtcatggctcctctccctgtgagtagctgcccattccacagcttcttatcatctctaaaaataagttcacttttaaaacaggagcccaagtgacttttttaaaagaattacctgagtcatagcccccctcaagaagtaaaaaaatgtctgttagag

SEQ ID NO: 308155 - DNA, 1000 bp, Homo Sapiens
gttcaatacttcttcaagatcttggataattagtggtgtggaaagtaaagaagtcacaggttgggacatttagacaagagtgaatcacacacgaggaatgtgttcattcttttattgtccgttgttttaacctgactgaatacaagatcaacaagagcactgtactcctggcaattattacatatgttagaacatggattttgcactgtagacaacatttaacaccagtctatggggtactgcattgctttttataaagttcaaaataaagatttattttcaaacaagtgactttggtttatttcatacattacactttttcttgcagaaaaaaataaaattgtacaactgcataaatataaaattcttccaccatgaaaatggttaaaacattcataaagacacagcaccagcatgtgatgcctccagaaaggaaaaaaggaaagtaaaagaaaatgtataaagcaaattaattagccctgtcactagccaaagtgatgggcagatccagatctcagacacagctttagaacataccggaggacaaggcaagagatgtcaagacagcattcaatacaagcataacacaacccatcacctttttgtgtttttctgtagtgtcacttaaaatttaaagggcagttcccccatgacaaacccccaccccagcccccaggaaaaaaataaaaataaagacctaacaccacaggaaaagactatggagtatgttaaaaatgctcatcgatgggccattacctttgaaagagccaaaaaacaaaaaaaaaaaaaaaaaaaaaaattaccatgccagttttattcccgttgaatatttacaccttggacagcaaaccttgctcacataaagtagaaaacagatacaataaaacatggcttgaaaaatgaccagagtatgcacctgtagtactgtacactaaataaaatacacaaggcagcaatacttaggggccagaaacactgcttactacaagtcagttacgga

SEQ ID NO: 308156 - DNA, 1000 bp, Homo Sapiens
gaactttttttcaaatatattttcacacatcttatctaaatacataatacagaagcctgtgtgacttgggcaatgtggccaggagggcctgagactaacacacccacctcggcaaaaggacataaaatatgtcttatggtcagaaaaatcaacattttgtgtatttacttagtttacgaaaagtactgaaaatgctattattagctgaatttgtgatttccttttgaaattctgagttatccttatttttcccattttgtttttacaccaaggagactgcagtcaaataaaacagatactacacgcactcgtcggggcagccgtactgcagaagcacgttgatgcactcctggctggaggcctgccgggcgtaggtcagcgctgtgttcccgtgggcatctcgggccatgacgtccaccccgtaccagatcaggagctgcgccaggaccacattccccttgcggcaggccagatggagcgccgtgcagccgtctccctccccacaggtctcgttcacctcctcacgggagccatgtgccagcagcaggatggctgtccgcaggtcctcatcagcggtggcccgcagcaggtgctggcccagggacagctcagtgcagggtagtggggccagaaagagcttatgctcatatttggaacggatccaccgttccttctcttccctcgttgactctattgagggtttcgtctgcccctggctgctcccttcccagatgctgttggctaggtcattgccaatagatgacataaccttcctgagctcaactggccagtcatccagctccagagatcgcacacgggaaaggcgggtgccaagactgcggtggattcctgaacattcaatacacatgaggactcccaagttcaaactggcccacttaggattctgggtctcacagtccacgcagtgggagttcccacgcatgttttggatcgactgcagggccatggcctcactctggctggtcagctgggacttgct

SEQ ID NO: 308157 - DNA, 1000 bp, Homo Sapiens
gacttttgttttgaaatgaaaagtctcacgtttattactgaacacagccaaccaatgcgtttataacaaatttacagagaaaaaacatattcccaataaaacatgtccaactgtccagatagtggtgacattttcagcttgatatggtaacgtgattgtgatgctcagacagcataaatatgtgtgccatctcacatgcaattccttatagacccagcttggttcttctccaatgtctccttttggagtcgtacctgattttattaccagttttgatctgaatccacaggggagtcggatggttttgcttttgtttcttggccaggaatcgcttaatcctgaaagtcttctgagaagatgtggcaagaagcagagtcaagcacacaccacgatggcaaagaatggaagagaaggaacttgacaattttttttttttttttgagatggagttttgctcttgttgctcaggctagagtgtaatgttgccatctcagttcactgcatcctccacctcctgggttcaagagattcccctgcctcagcctcctgagtagctgggattacaggcgcatgccaccatgctgagctaatttttgtatttttactagagatggtgtttcaccatgttaaccaggctgttctctaaattctgactatgtttctgctgtttgctgtcagtcctcttcattgcagcatgaacaagattaatttttttttctgtaaaaatgatgtggaaggtctgcctgctgcttcatgcatcactgtcaacattgtcttgccctaactcaaaataagttatccgtttacaaactgtttatttcttttgggcattgtccccataacctttttataaagcatcaatgatttcattattcctctacccaaacgttaccacaagtattctttttttaagacagtatctctctccatcacccatgctggagtgcagtggcatgatcatagctcactgcaatcttgacctcccaggttcatgccatcc

SEQ ID NO: 308158 - DNA, 1000 bp, Homo Sapiens
gaattcctttgattctttgtaaaattttgattctcttttttttggaagggacaataagggaatttaaaaaatcaagttaaagtggaatgaaaagtgcctttcacaggaatgttttattgtctctgcctggacttctaacatagcatatgaggtgaaaacactgctttagtaaaaatggaatactcttggttacatgaaatcccatccctcgtccttcaggtccactggaggagaagtccctcattccttgggattggtgacgacagccgtggtggaataggagtaggggctcagcagggcggcaatggtgtagcggcgggggccggagtcgttggctgtgaataccacctatgagagaagacagacagatccatttccaccagagcccgaaaaacgtgacagatgacacacatgactgaccaccggaagtccagtgccaacttaattaattttattcttttatattttggaacagtttgaacagaaggaaaaagctcaaatatgctggcaagctaagcctttggaaccatgcacagtccttagagcaggagtacagagtcaggtcttgttttgcaaattcacgccgaaagtcaggatgaccctagcttgactaagggaaatcccagaaagcctaaaggctgtatctattttattggttttagaaaaaaaaggtagggagaatgcaaaactgcattgagtcattgaagagctgctgcaatagtggctgccaaccacagacttagagatttagcattctggagctggaaacattcttcccaatttacagatgagcaaaccagacttgaattattgtattgtcccagtctacattctgatggaaccatagtaggaaggcaagtctcctgtctccaagcccagagattcccccaccctcctattctttgcattttctaacatgaagaagaaaagtatatttttatgtataacaagcaatgaaatacgaagtaaaagcattacagggctctatttacaatacaga

SEQ ID NO: 308159 - DNA, 1000 bp, Homo Sapiens
aagttttcatttaatgcacaacacaataaatgaatgttttgtttaaaatgaaaagtttatttgctgagtacaccaaataggatgcaagcactgtcatgacaaatatacagaaatatgcagatcaacataaaacagtaatttagtttaaatgaagggaaatctctttaaatgttatgacaacatactcccaagaagaaccttttcttcagttaagttaattatacatttcaataaaataaaggataatggattagtggaagttagcttgtgaatttttcttaaaaataaaactccaactctattaatccatgccagttaaacactataactaaaatttccaaataagcgcaaaaggagatgaagcagttagttaccttttttgcttgaacagtccaaaggaaaatggttactataaatacagcaggcaaactgttagactgacctagaacatagtgtactaaatttcagtctcaaattgtgctaaatgctcatcattagtatggcacatttggtccatgatgtggtttaatgccaagacagatcccaatttgttacagaaacacatagattactgttgctttttgtttttaaatacatatattttaaaaagccaggtatacttccacatacaaaggcaggtttcccaggagaaatttataggaagtagtctggggtgcgccgtgtaacatgaggctcaccacgacgaggcgctgggtcaaattgaaggaaggaatattttaaagtgtcatctaattccatgatagcagcctggttcccacaacgataacagtaattgggtgcactgaaaatggtaaccacattccgatcatgacaccaattgtatccctccattacaagctggtgggcacgagaaaccagtgtgagaccattggcatggttaaaggtttcagaaatgtcttgtccaaatgtgtagccagcaccacgtggtgaaataccccatccaccacgatcatctggatctgaccataacagatcacac

SEQ ID NO: 308160 - DNA, 1000 bp, Homo Sapiens; identical to SEQ ID NO: 119910

SEQ ID NO: 308161 - DNA, 501 bp, Homo Sapiens
atctgtaacacatatttctcttctaaataataataaatacaataaactaaataataaaacagtttaatatgaatttaaatagtacaatttaaatacgatacaagttggttaagctatttctagtgcttcttcacatttagggtctacctcttttaaattacgttgaggcagaatcatcaatgtatctccactcaacattttcctccatattatcacttacaatattgaaatatataggtaaaactttatggctaaagaagtttcaaaaactttctataagtttattataaaaatctgaggctgggcacagtggctcacgcctgtaatctcagcactttgggaggccaaggcgggcggatcacagggtcaggagatcgagaccatcctggccaacacagtgaaaacctgtctctactaaaaatacaaaaaattagctgggcatagtggcagacgcctgcagtcacagctacttgggaggcagaagaatggcatgaacctggg

SEQ ID NO: 308162 - DNA, 1000 bp, Homo Sapiens
gaattcccggctccgcagggggggcgggtctggccgggaggaggggcggggaacgggctagaaagtttgcagcaacttttctcgagcttgcgtcccaggagcggatgcgcgtggcgtgcgcaggcgcagtggaaggaggatggccgcgcgcgctgccagcccagccccctcttctcgacgctcggtggcacagctgggccacagctgggcgggggcggtgcctccgggtggcccgctcgccctcctattggccggacgccaaagccccgccccgtggcttttcctcccccaaccctgattcggccgcttcgcatcccgctagctcctcccagaccttcggccgcctccacacgcctccggattggcccgctgcggagctccggcccacaacgcaaaccgcggacactgtggagtccagagctttgggcagatggagggccttttattcgcgagggtcgggggtgggggtcctaggtggggacagacaataaataccgaggaatgtcggggtctcagtgcatccaaaacgtggattggggttgttgggggtcctgtagcctgtcagcgagtcggaggacgaggtcaataaatatccaaaccgccgaagcgggcggagccggctggggctccgagagcagcgcaagtgaggaggggggcgcgggatccccgaaaaagcgggtttggcaaaagcaaatttcccgagtaagcaggcagagatcgcgccagacgctccccagagcagggcgtcatgcacaagaaagctttgcactttgcgaaccaacgataggtgggggtgcgtggaggatggaacacggacggcccggcttgctgccttcccaggcctgcagtttgcccatccacgtcagggcctcagcctggccgaaagaaagaaatggtctgtgatccccccagcagcagcagcagcagcagcagcagcagcagcattcccggctacaaggacccttcgagccccgttcgccggccgcggacccggcccctc

SEQ ID NO: 308163 - DNA, 1000 bp, Homo Sapiens
gaattcctccttcttgggatagccccatggtccactcggccacaagacagaaccagatccctaggcggtttcctcatcttctccctttccctcacccccctgtacagtaaaaggttgactcagcagccctgcactgctcaaagcctgaacgttccaagtacagggctcacccttgaataactcctgggagatgacatttaatcccttggaacattcggcccaagtgccttggtatacctggggccttgggccgtgccagatgattcatgctaacagtgcgattcatgatgaatgcctgtttttgtacatctgaggctctaggccatgctgtatctgcttgaactcttgggaacctcaggtctgagaagttaaggtcagctattccagtaccccatgcctatcctacagacccccaataagaactctggacactaaggctcaggtgagcttccttagttggaaatacttcatacacaaggtcacacatcacttctgtgtgatttaagtgctgtccacaacaccccactgggagaaaacaactgaaagattttccctgttttcttcacatccccacttagatgcctgtttcctttgctgatttcagtgtgtctcctgtcaatgtaacaaaccagaataaaccacagtataagagctctttatttctgtgagttctactaggaaatcatcaaatctgagggttgtctggaggacttcaatacacctccccccatagtgaatcagcttccagggggtccagtccctctccttacttcatccccatcccatgccaaaggaagaccctccctccttggctcacagccttctctaggcttcccagtgcctccaggacagagtgggttatgttttcagctccatccttgctgtgagtgtctggtgcgttgtgcctccagcttctgctcagtgcttcatggacagtgtccagcacatgtcactctccactctctcagtgtggatcccacccctctttcatctctgtatc

SEQ ID NO: 308164 - DNA, 1000 bp, Homo Sapiens
cattaggcccagatctggctaacagaattttattgttaaatcacagaaactttagtgcaaaacaaaaatcacgaagtccatttaatagcaacttcatgtcctgctggctttgcttgctgtctcctggcaaccagaagtggacagaagcgtgggtgcccaagtgggccacagacagcttccaacccccacacccccagcatccaatccacacccagacagacccttcggcatgccgccctctaccaggaagccagaggcctaggagctcgccatccatatttatttgaaaaggtcaaaaggagcatctatgagacaagggaggggtgcaggctgaagcagcgcctcaacagccagggacatgtaggcaacacgagcaggcacagcgcggccaccactgtccacacgctcacacaagccaggcccgcagggcttcggagagctagcaggttacattcaggcagatggccctcttcccacccaaacccacagaaccccaaacaaggcatcaccaggaaagacacgggaaagccaaatcacagttgaaccagggacagagaacccttggccccactgatgtcccaagccaccagcagctgcttccaaaatccctatgctattacagtgggaattacatcatttaaaaagcctgattattccaggcttctaatctttcatataaaactgcctttgttttgctgctttgttcaactgagaggcccaggaaagcggggagggtccctgatcagggcaggaggccacctcagaagcccaggcccaccagtgcccaagcacatgtcagggctcagaacaaggcctcaaccaagagggttgatggcctccagtcaagaaactgtggctcatgccagcagagctctctcctcctccagcaggcgccatgcaagggcaggctaaaagacctccagtgcatcaacatccatctagcagagagaaaaggggcactgaagcagctatgtctgccaggggctaggggctaggggct

SEQ ID NO: 308165 - DNA, 1000 bp, Homo Sapiens
gatccacctgcctcagcctcccaaagtgctggattacaggcagaagccaccgcacccagccaaaattgggagatttcacctaaaacatcctgtttgggcttttttttccccctcgggaaatgagatctaggcccaccttcctgcccagttagcctgtggctgcctcccgtcatcacagaacttgaggaagtgatgatgttacgctgtcctcctacctttgagaggtgtttgctctgcctttctgactggtgggagctctggctctagtgctcagagcctggaggggacacctgggaacttgcctgaccagtccagggacttcctgagaagcccaggagacacagggattcaaacatagctcagaggagagacagagtgagggtggggaagggagtagctgagattgcagcaaagccttgggcagatgcagagggtacggatcacgtccacaactctcctcaggcccagcctctctcctgaacccccgacttgggcctgaagcctccctctcaagggtcgcctcactgtccccaagtccctccctgtacctcaccatggatacccctctccctcccctacccagcccaccaaccccatggcctgtccactaggcctcccgagtgtctctcccacccacctcctccctactctacccatcctggtcctgtcctttgctcccccttggctccctgcctcagtgtcccccttctgatacaccctccacaaggcagccaggggaatcttcctgaaaaataacaaacctgaccctgatcttcccttgcttggaaacttccatgactccacagcacccaggggtggagtctgcactcctcagcctggcactcacaggtgtacaccttccctcaccatcatttgtggtcacacccacttctcttttctttctttcttttcttttcctttctttttttttttttttgagacagggtctcaatctatcacccaggctggagtgcagtggtgtgatctcagctcactgcaa

SEQ ID NO: 308166 - DNA, 1000 bp, Homo Sapiens
gatccaataaatcagacaatccaataaatcagagaatcagggagggcttccaggaggaggtgaccttttagcagagacatgaatgaagagggagaccctccaagggcagccatgggatgcggcacccagctgcgcaaaaatgcacatgagttcttcttcctttgcagttcatgctgagatcaccaacacatgggaccacacaattcatccttgggaaggccaaggtgggaagtgaaatctggcccaatattgaagccataagcatatgttgaactttcatgagccatgagcaaggactcacaccccagcaggactctgcagcctgggagaagccaagtttcatcactgaggtcctgattcctggaccaggtagcagaacaggaaattgaggccaagggcaggagagatagtccagagggagctctctactctgggagttttgtgcctgagaaggctggagtctccccaagatttctcatccaaccaggaatatctcaggggccaaatcacacagcctggcttatggaaagtcccctagtgagtattggagggaggggagtcactcatgggaaaacagaagctggtgcttctctgcaggggcccttccacccctacccagagtggggcagtgggaaagtgcaccagaccacagagtgaccagcctcagtcaccacccatcaattcctaagcctaagtcttcacatctgacaaatgtgtctcctaaagcatcacaaagcattgccagcattctatcagacacagggagagagagcagagaataagttccaaattaaagatgtgagtaatggtcccatcaatataaaaaacgtacgagtgtatgtgtatgtgtctgtatgtacacatgtgtatgcacactgaaaaaaatccagaagaatgcacataccacgatggaattggagaaattacaattggagtagaaaccttttaactttctacacgtctctgttgcttcgtttttcaagctgggatgctataaatg

SEQ ID NO: 308167 - DNA, 1000 bp, Homo Sapiens; identical to SEQ ID NO: 119912

SEQ ID NO: 308168 - DNA, 1000 bp, Homo Sapiens
gatctgcctgtctcggcctcccaaagtgctgggattacaggcgtgagccaccgtgcctggccgctttttttttcttttttttcgagacgaagtctcactctgtcacacaggctagagtgcagtggcgctatcttggctcactgcaacctccacctcctgggttcaggcgattctcctgcctcagcctcctgagtagctgggattacaggcacgcaccaccacgctcggctaatttttgtctttttagtagagacagcgtttcaccacaggctgttctcgaactcctgaccttgtaatccgcctgcctcggcctcccaaagtgctgggattacaggcatgagccatcgtgcccagcctaaaatgtggtccattctttcagcctgacatctgcaattgggaaaaaaaaaatgtggtccattcatacaatggaatagcattcagccttaaaaaggaaaaaaaaaattttttttgagacagtctcgctctgtcacccagtctggagtgcactgacatactcacagctcactgcagacttcaccgcccaggctcaattgacctcccacctcagcctcccaagtaggagggactacagggatgcaccaccatagccagctaatttttgtattttttggagagacagggtttcacagtgttgcccaggctaggaaagaaatactgacacgttggccgggtgcggtggctcaagcctgtaatcccagcactttgggaggctgaggcgggcggatcatgaggtcaggagattgagaccatcctggctaatgcggggaaaccccgtctctactaaaaatacaaaaaaaagaaaaaaagaaattcggacacgtgctacaacatggatgaaactttaggatatgccaagcacggtggctcacacctgtaatcccagcactttgggaggctgaggtgggcagatcacttgaggtcaggagtttgagatcagcctggccaacatggtgaaacctcgaaaaatacaaaaattagc

SEQ ID NO: 308169 - DNA, 1000 bp, Homo Sapiens
gatctgctggtttctttttgccacaagggaactgagctccaagacagaggcaatatattcactgggcttcctgaaggataagggcagaaagggaggcaacaacttaacatgtctgaagccccagaagcacctcccatcagcagctaggagctacctcctatcaggaaacagagtatacagaaacagatgaccccacacatacagagagggggtcagctatgagattgattctccaagcccttatctccctgcatcccatctctgtgagatgccttcatgcccctaggcacccagagcataacttgaacatcatgcatttattctctctcccctgcccccggtatataatcctgccccttctccttcctgaaactgttcacaaagatcagacctcatcctcttccaactgtctctaccctaccctagcctccctgcatccaatgtcaactccatttagtgtccacactacagtcagtccctcacagaactcagctctgaccatgcccattagctcaaaccccttcaatatctccctggaaacctcatgataatgtttataccagtcattcaaagactgtgacacaactcctccaggtaggcacttctgcttgccctcatcagttctctctcccccagcctactcctttgggtccatggctcaaattcccagccactgggcaaagactcactcctgacattggctgtcaaagctgaagacacatttctgcagactatccaaggtcatgaggttcatgtgctcaaacatgtcgagacaggcattgtgctccaaggtcaagaggtgccacttggcctagccagagatggggacagagctggtgcttgtccctggcttccttgagcccctcccaaacccaaccaccaaggcacactattccagcctcttcattttctccccaagaatccctccccaggggtaaccaaattgcagtgagagtaaaagttgttaatattaagagatggagatgcaagactgggagtc

SEQ ID NO: 308170 - DNA, 1000 bp, Homo Sapiens
gatcccatggcacccctcattccccacaatgcagccgtgggtctgcccgttgcccatgtggcctttgacaagggtccaacctctgctatcttggtctccactgaagaacgtggctgaagggtctctgaaccatggaggatggaggtgcttagcctcttggccagatcctaaacccagaccccgactcccgtgtggtcctaccacctcctcccctctgatccatcctccgagaagagcaggcagggactacctgctccaagaactcttcaagcaacacttgggcgtctccctgccctcaggattcccgcagggcccgctggagtgctggggcccccagggccactcccgactcccactcacccagcaaggcctcaacgcatttcacgtggttcccgcgcacagcgtacagcagtggcgtccctccattctgtcgtgggtaggggcaggagaaaccaaaggtttacctcttcctcattctcaaaatgccttgtactctctggcctccagttgaacgtggttcctcctgctcatcactgggcccatctcactttctggggtctcaagcttagacaccttcctccaggaagacctctctgatttcccttgcccacatggggctcttgtagccacctgtgcatctgccatcgcagcgcagttcactgcatctcagctgcctgtttccatgtctgccttccctgcatggggagctctgctctgtgaggctgggaatggggctgtctcgtgttctcggcacctagagcaggcctgcacctttcaagtactctgtgaacatttgaggcaggaatgaaggccaggaggctgagaggtcctggggatgggcagtccctcacccaatcatagatgttgatgtccacgtcacgctccagcagcagccccacaatgtctgtgtagccgcctgtgctggccagcgacagggcgctctctcgctcttttgccaggatgtgggggtcggcaccctgcagggagaagaagggacagt

SEQ ID NO: 308171 - DNA, 1000 bp, Homo Sapiens
gatctgttggattaaaatgccaagggaaggatgggatgaggacaaatgcatctaaaaagtttctgtagttggggccgggcgcagtggctcacgcctgtaaacccagcactttggaaggccaagttgggagaatctcttgtgcccagaagtttgagaccagcctgggcaatatagtgagagtcccgtctcttaaaaaaaaaaaagtaacgaaaaataaaaagtgtccttagtggggattaatgaagaaaagtcgactgaggcttacagaggaaggtgcatgggcagccatgtgtgtgcacgcacacgcacacacacacacacacacacctgctatgtgcccaggtgctagaatgcagtcactaacagcccactgcccccatccacctcccagattgcagcctgcaggtgtctgatcacctggacatccttccattcttcggccagatgcagacctcctccaccccatctgccccgcactcgggaaccccaaggaaacctctcctgcaaaatcttcacccacaaggggtgctgagggggggccctttgttttttctctctgtggtttcttcccagagccccatcgctgccccagcgatggtccgagcccatccccaaagcagccccaagccacacactcctgcatcctaaatcagtagcggtgcacagcgatgctccctcacccagagcacctgaccctgctcacgtctgggtgccactgccccggtgccctgctccccttgccctggcctccctgccaccatactcacttggactcagttgcttctgcacctctgctccgccagcccagctcgcagtcccctgccttccagggtctaggcccccacttgccagcccctcccctccccctgggtgccaggggccgcctgcctccagggcccagctcctccctacccccgggggaggggggcacaaaggggcccttgtcaccacggggctcggactgggcagcctgacgcctgggttctcctagctctttcct

SEQ ID NO: 308172 - DNA, 1000 bp, Homo Sapiens
gatcttcctgcctccacctcttgagtagctgggaccacacgtgtgtgctaccatgcctggctaatttttaaaaattatttgtagagacagggtcttgtgttgcccaggctggtctcaaactcctggactcaagtgatcctcccgcctcagattcccaaagtgttgggattacaggtgtgagccaccatgccccgtcttcaactcctttttaaaaaaagcagtgaaatacataaacgacctccacagcaaagctctctgtggagtgcatgttcctgccgcagggcctctgtgcttgtggttctccccagcagttgcaggtctcactccccgatttcctgcaggtctctgctcatatgtcctcagggaggccttccctgacccctctcctctctagaataccacctgcattccccttccccttccccgcctcatttttcttcagagggttactgctgcttggcgtgttattcactgatgatgtttccaggtttcctttcccatccaaatgtgagcttgttaagggcagggattttgtgtctgtgtcctcagcacctaggacagggcctgatgcataggagggagtcaatgagtatcttctgaaggaattactgaatgggttcccaaactgtggggaactgtgcagaggccaagcaggggcaagggggtggggggggggctcacctccacgttccaaacgtaggagctgtggaagagctctgaccacaccttgcccactctgttgatgtccttgacatcccagatgtagatgctgtggtccttatacacgcaggacagccactggtggatggggtcgaaggtcagtgccactgtatctgggtagactgcttccgccttcctgtggaagaggaagctaacaaggccacatgggtaatcaatcaccatcaatgtcactgagtagtgacagccacctctagtgacagtggagatgcctccccggcaatgccatccctcatggtatttgtggccatccatctctcct

SEQ ID NO: 308173 - DNA, 1000 bp, Homo Sapiens
ggcagcctggctgcagtcaccagttcatgccacactggacagatgggtggcagggaagggcaggaaggagtgagagagaggctgatgcagcgggtagcagggactgcaaattgtcatgtgagacagaaagaacctacacatcagccaactccagctacgtgctgcagaggagaagctgtctcaagtttagaaatacaggaaagctgactgactaggaagagattaaaaactcacatcttcaaacacagccttacagaaattgacctttatttgttgtactaaagcctgtttaacttttgatacaaagtaacattttagtacagaaaatcccagtctgtcagctcagtacctgtctgtgcacactgtaccatctcagtcccactctgcctgtaacttagaaaacagcccctacccccagagggtctgcgagttaataccttgagaatagtctacagtttttcatagtttgtctgagctagaaaacttgtacctgtaaaacaaaggacagcattgaggactgaaacttgtctcttttttgaacaactgtgcaagaaaatatatccctttttaaaaaacatcagttatggctaaactacaatctagtgtctagaattacaaagaataaaatgaaatcaaagatttctcgctagtaaaatgaaatgttaggaacagtattaaaatataggtcctaccccaacgacacttacacagagcccagtacagtacctattattaacaggacgcatagcttaaggaggaaccacatcaaatcttcagccagacatatctagcctcagaagtgcaaaaaaaaaaaaagcccccaaacgaagacacccacactgagtagggtgcatgccgtgagtgctgtaatcaagattaaaaagacctcagtttttctttttagactgttgatagtgacaataaccattatgcttcccctaaaagctctcaattcaatgtctgaaacatgaatgttttcatatcaaaaagaactgatgta

SEQ ID NO: 308174 - DNA, 1000 bp, Homo Sapiens
ctggaaagaacacaacgagtacatatttttattcaggtcaaaattcttcacattttatgcaattaaatgcaatctttataaaacctgtgaagcttttaacttcagctagaaatgtcaacttgctatcaacagaaagcaaacagcaacttatcacaaatgaatgacggcaaattgacttgatttatgttacttaacataataattgctatactttattaagtgccttatagcaaccaaacacttcacataaattattttgtttggttattacaaccccataaggttactgttagtctcctagtttatagaaaagaaaattaaatttttgagatttttgtaactagtacaaattcatattgctggcaagtagaggagccagaactagaacccagcctgtctaatcccgaagcaatttgctcttctttcatgctgtattgactccaccaatctgctttaaaagccctgccaaatccaacagcccctgttctagtgtgggacatctgaatacatgtgcttcctgactaaatttaaagaggaaattggaaattatttctaaaacatatatatgatttatttttacatacagatgagaaaatgtgtgggacatctgaatacatgtgcttcctcctcagtgacccaattctgatattgttggccaagtcctacagaaaaggccaagccccacacctgcatctaaagctaaacctgggttagtttaggccagtggttttgctggcagcagtaactccctctagagtttatctgcacatttgtgaaggtgtcttagattgtcaccatgactcgaaggtgctataggtagttagtgggtgacagtctgcaatactcaggacagccccagacaatgaaaaattgccccatgttcctaatgattcttgaatgtcccttcagacattcatgttgctgaattgtctgtttatagtggcctgagcttacaatctaattccaatttctatataaacccaaagcatttttcaatcta

SEQ ID NO: 308175 - DNA, 1000 bp, Homo Sapiens
aagcttccaccccaccttggattgggccgcaggtgtggagggcctcatcaaactctttgggaccccccacccccactctccggtccattgtccatgccggaaccgcaagtgcagaagtgggtggggtgggccaggctggtccggtgctggcttagtctgatagttgctgtccctggaggaggacccccaagggctgatgtctctgaggctgcagagtcctggcctgggctcctccagccccctacccccaccgtatttttttttttttttttaaagaaagaaagaaagtgggggaggccaggggggcaagggacagaacatgggggagaaacaaaggtggtcagttggggaggggagctcctgggctctccctggctgccctggggtggggctgagcctcagttggagtcagagtctgaggagtcccctgaggaggaggagctggagctgctgccctcggactcattatcttcatcctcatcgtcatcctcgtcgtcgtcttcgtcctcgtcatcctcttcattctggggggtgagaaaggatgtggagtcaccaggtggccctcctggcaggactcccctcccctcccactgtgccctgtctgccccacctcatccccatcctcgctctcgtcctcgctgctggactcagaggagtcgccgccatcttcagaggagtccccattctcatcatcttcctcttcttcatcctcgtcctcgtcatcctcatcctcttcatcatcctcctcggactccttggagggatggaggcacatcagtggtctctggtctctgcccaaccattccaggcagtgccccccgccccacgcccctgcatctgggaggggctccttaccgacttggactgcagagtagtccggctggatttggggtttgggcctcgcagcttggtcatgctcttacgtttctgcaggatggggacacaaaggtggcagccatgagttcgacacccctgaattcccccacccctaccccactgc

SEQ ID NO: 308176 - DNA, 745 bp, Homo Sapiens
ttttttttttttttttttttttttttgaaatgccagtgtttatttaacacactaaggtaaatacatatcacatataaaaattgtcctataatacagctagtggggaaacataaaaataaatgcataaccttttaaaaggttcatcctaatgtggccctaaaattaccttgtgtatccaagagtctacatggtatgttttggaaaatgccaggttatggtagctataaactgtccaggaacatgggagtgtatgcgtatgtttgcgcatgcgtggattttcggaattacaaaatctgtttgggagaaccatgttccactgagttgacctctgtagcctttctaatattgctctgtttgattaacagattcccttctacaccccgataggaggagtctactttaagacttcaccaggttccagcctgtcccctgcctcccccgaacattgcctggttccaggctcccagggatggcagctaccatcttggctttgaagagtggggacatccggaggtagccccggccatggtggtggatgaagaggaggtagatgggaccaaggacccagaggtacatggggggtacccagacccctgctgttctcaggaagcacaggctcagcaggctggtggcggcaggttcaggctctgtctggttccagaccccctgccccgcgcagggctcagcaggcgcggccatcggcgccttctgtcgtcgtgggtcccagcgtctgtctgtcggtaag

SEQ ID NO: 308177 - DNA, 1000 bp, Homo Sapiens
tgcggggtcaggcgggggggtgcggggtcaggcggagtggggtgcgggtaggggtcaggtgagggtgcggggtcaggcggaagaggggtgtgggttggggtcaggtgggggatgcggggtcaggtgggaggggggtgcggtctgggatctggtctgggcgtgcaggtcggagtcaggaggagattcgggccgccagctctcaccgcgcactcacccgaggcgaagggacgccaggcgggacagcgaaccgggggcctcagcgggccgcgggcgcaggacagcaggacacgcagggcggccatggctctctggactcctcgcccggccccgcggagccgccccctcgcctatagcctttcagggctcgctccgcccacaggccagcgccgcgagaccaggcggccctcgcgagatcagcccgggcagagtgagcgggtcgctctcctccaggccccgcccccaggcccgagctgccgctcgcggatctaaggccgaggggcgtccccgggaccccgccctgggctgggaccagcgccctccaggccccgccgcagtcgccgcgcccccgcccccgccccagccctcggggtcccagctggccccggggagaccgcgcggaggcgaggcaacggcggcgctgccgggctctgcgccgcctccccccgcccgcctgcccgcctgcccgcctgcccgcctgcccgcctgcccgcctgcccgcctgcccgccggcgtctgtagcagcggacacagcgcgcccaggcgcagggccaggcacggtggcagcggcgtgggcactgaacgccacattaggaggagttttattttcatgcacacaagacttcaacagatttaaataataaaaatttcattcatttaagttattttatttataccttttaaatatctagacaagtattgtggagcatccatttgtgtacttgcccggattctgcaaacgccagggtggagataaaaccaccctggataaaatggaatggaa

SEQ ID NO: 308178 - DNA, 1000 bp, Homo Sapiens
aagaaaattaaaattatgatggtaattagaggaattactttaagttactggcagaaatcttataaaatattgctctaaagcttcagcttatcttattagaatacatttgagcctattccaaataattggaatgatctaaaaaaacatgggtaaaatgagttacattttttttttcagacagagtctcactctgtctcccaggctggagtgcagtggcatgatctcggctcactgtaacctccgcctctgggttcaagcgattctcctgcctcaacttccagagtagctgggattacaggcacctgccaccacgcccggctaattttttggatttttagtagagacgggtttcgtcatgttgcccaggctggtttcaaactcctgagctcaggcaatccacccgcctcagcctcccaaagtgctgggattacagggtgagccaccgcgcccggcctcattttttaaaaaagtcttttttttgagacggggtcttgctttgctgcccagttggactcgaatgacccgcctcagcctcccaggaagctggggctacggatgctcgacacccacccggctgaaactgcattttcaataaaggagctgcttgagggtgcaattcacagacctcacataacaggaaaaacaagaaaagcccctgtaaggtttctgtacttttgaacttgtacatgctctacttttttcctaacatcaagacccactgatggaaccaatctgatcccgttaaaggtgaggctggcagttctgaccagaaagaaacgatacttaatgataacatttaaaaggaaattcccagcaacttgtgtgactggaatttgcttgattctccggttgaacactgtttactcacagtggcaaaggttgaataaaagagtttcttctccaacttacttccttctgttaatgtcatttcaaaagctgaaaaacaaagtcccagagttatgaacggagatattacatgcagaacttttcctgcacggtg

SEQ ID NO: 308179 - DNA, 1000 bp, Homo Sapiens
agagatattgttcctcctctgaaaaaaaaaagaagataacacttccatgagaaccaaaggactttttatacttagaacacatactgaaaaatgaggaggcagtagttaagctacaagaagcaccagatgccttctgggatgagttgccttccttgcctccacaacagcagccagactggacctctggacaacatgataagtgtgacaatcacacttcctagagtaggaccaagggtaggaggccaccaggctcagcttacaagccctgcgaaaccagaaaaagcatatcagttagaaccggaatttagggtagccacaaccatgtactcctcatcccaaggcaaatgtcctggatctttcaagcagacagcatgaaagtttcttctgtctctctgatttgggcattgaatcctatattactccccacccccacacatcccttctccaggcaataaccccagcacctatgatcaggcactcacccaagtaatcgtccatcagggagccaatagcaaactgcaagaaagatggtaaaaagaaagtgaagccaagatgagcacagaaccaacctccaccctggaggcccagggcttctgcccatccatcccttcttcctgggagaagagcacagaaccccctgaaactgtgggtggtaagaaatcgacagctctcggccaggcgcggtggctcacacctgtaatcccagcactttgggagggcgagtcgggtggatcattaggtcaggagatcgagaccatcctggctaacatggtgaaaccctgtctgtwctaacaaatataaaaaattagccaggtgtggtggcggccgcctgtagtcccagctactcgggaggctgaggcaggagaatgtcatgaacccgggaggcagagcttgcagtgagccgagatcgcgcctctgcactccagcctgggtgacagagcaagactccgtctccaaaaaaaaaaaaaaagaaaaaagaaatcgacagttctcagctcaa

SEQ ID NO: 308180 - DNA, 1000 bp, Homo Sapiens
gaattcgatgtttattattaccacacgttttcatagttttactgaatatgtattttccaatatataatgtgtagctttatttgcatgttttagaatattattcaaatgttatctttatctgcttggaatcttagttgcaaacacaaaagaatctactttggctactttaactacaaaagtaatttatcatagaatattatgtagttcatagactctctaagatcctaagaaagttagagtctgaaaatatacagtccaacacatcacaaaatcttatctaataaaaacactcatgcttctaatcagcaaccatgaagctgtgggatgtagaggaaatatttttgtttctgcactgtctgggctttctgaatatatttcctgaaaactcagcatcttgggataagagccaggcttgggaagttaatttacagtggagtagatagtgagagaagtccagagagatttagctaactctgggtagtttacattttaagagaaaatgagtcccaggaccttggagaaatccatagcttacaaaaaaccagagagatatgcaaggcttatgcagcccctgtaaagatgtatgtgcattccagaaggtgagagtgagtactcaggatcctttgcactccatctctgcagggcaaaggtttttccccctttctggagggaagggggaaacagctgtctcttcctcctgtatggaagaagagaattcatttttctcactgagaaactatttagctactcatatacaagatttttccacctggctttcatcatatcaccccagaggtaaggactaaagtaagggagaatcacatgcttatttattgtaaggtaataaataaataaataaataaataaataaatctctgatccagaaaacttcaggtgcacattcagaataaaactaataaagatgaataaaacaatcccaacaatgtctgggaccagatgctagaaattctcacactgcttctccctaaaagcactatac

SEQ ID NO: 308181 - DNA, 1000 bp, Homo Sapiens
ctattagataccacaaaaattaagttcagatggattaaagagttaaatttaagacctcaaactataagaatgatagaagaaaaccttaggaaacatcattttggacattagtcttgggaaggaatttatgactaagtcctcaaaggcgattgcaacaaaaacaaaaattgacaagtgggacctaattagactaaagagcttctgcacagaaaaagaaactagcagcagagtaaacagaaaacctacagaatgggaaaaagtatttgcaaactatctgtccgaccaaggtctaatatccagactccatagggaacttaaacaattcaacaagcaacacacaaataatcccattaaaaagtgggcaaaaggccaggtgtggtggttcacacctgtaatcctagcactttgagaggctgaggtgggtggatcacgaggtcaagaggttgagaccatcctgaccaacatggtgaaaccccagctctactaaaaatgtaaaattaaccaagcatggtggtgtgtgcctgcagtcccagctactcaggagctgaggcgggagaattgcttgaaccccagaggcggaggttgcagtgagccgagatcacgccactgcactccagcctggcgacagagcaagactccagctcaaaaaaaaaaagtgggcaaaatacatgaacaaacatttctcaaaagaagacatacaagcagccaacaaacatgaagaaatgctcaacatctgatatgatttggctgtgtccctacccaaatctcgtcttgaattgtactctcataattcccacatgttgtatgaagggacccagtggggagataatttgaatcatggaggcagtttcccccgtactgttcttgtggtaggaataagtctcacaagatctgacagttttagcaggggtttctgctttaacacctcatcattttctcttgccgccgccatgtaagaagtgccttttgggagtttgcagtgagtggagatcgagccact

SEQ ID NO: 308182 - DNA, 1000 bp, Homo Sapiens
ttatatgtcttttataaacatataagtttgcattttctattttcctccttttagaactgtagttgattaaagactagctccatttgtgtaataacaataatcaaaatagactatgctactcttagggacatgactcatgttcttgtgttacttagtgtaaataattttaaatatttatatgaaaacaaacatgaagatattataagatagaaaatacatttcttgtggattctaaagataaaacacaagacttcaaagaaatgttgcacttttagccagcaattcagcctgtgcttcagaccccgtagtggaatggatttattctccctctgcccttcagactagtttaggggaaaagtttgaggagcgctgaaccaatggaattacttgaaatatgacacagtgtgttgacttggtttcaaatcttcagcagttggagcatcttggcttacctcaaatgctagaaatacggtagcacttgtcactccaatcccagccaagggtcaaatgctctgtcacacatggaagctaaaataagttctagaagttgtttttgaagttgacttaactttattcacatgatagctataagggctgacaaagacttcctctaacattccttctggcaggttgaattagagtttggttgcagaccgtgtgggttgaagggatgtgtggtgagacagatcaggggcttgtaacaatcctacatcatcatgaatccagtttaattttaactttgtggcttgtctaacacattttcagttaagagttggggaataaatctaccgttccctggcaaacacttggcagcccttgggagcagcatctttggagaacacataatcaatcctagcactacagcatagcagatattgtgagtgcaggtcacaggtgccctcggatggagaatggcatcctgtgacaatgacagcagtggggtctcagggcatagagcaggcagctccggagcatctcagtcaatcccaggaccatggca

SEQ ID NO: 308183 - DNA, 1000 bp, Homo Sapiens
gaattctgaatagctctgcaggccgttgtagtccccgcagaggccacaggtgtggttccggaacttagtgtccagctccagctgttgcgggagggagcaggtgagctggcctcccgcccggcccacagccgccaggaacccccaagactcgtggcttgtttgagccagaggaaggtggggcaggaaggctggggtcagcagccagggagcggcctggcagggcaggtccctgagaagccgagtgcgtttgggggaaggctgaggcctgggggggtcagggccaggtcggcttctgctgctgccccccaagtccagcaccgacgccccgcgctgccgaggccctgccccacccatgccctctcggtgaggggtcagagcactgccctccctgccctcccttggggtctgcccagaggcctgacggagcccccaccagccccacgagtccggggacccctgagcaccatgagtgcatcctcccggttccacatgagggtgaggccggcgcgggagtagactttggtgtaggcatcgctcttctcaatgagcagcccggggctgtagtgcggggtgctgaccctggcggaggcacatcggggtcactcttgggtccaccacccaggcccccccgccccagcttgtcctcccgggaccccgccgcccagaggggactgaagctgggcacctggggtggtggagatggctctgccaggcccagctcctgccctgggatcaccaacttggccggcctctggggtggagggacataggcagtggccaaagagcacctgtccatctccgctgccggggcttccccggcagagccacctcctgcctgcacgcccctcctctccactccctcctcggggcacggtcctgggcagggtcccccctcagaggccctgagggcaccaggttgggagaggagggaccaggctgcccagcccccttccaggccccctgcttggtggaacatccccccatggggtcccaaaccccc

SEQ ID NO: 308184 - DNA, 1000 bp, Homo Sapiens
gtcagacctacactgggtacagatgggtcttcacccaaatgagcacgggacagaatgagggagcctagagttaggacacaagcagagaagtttactggaataccatgcatcaatacccccacccctccagtcactccaaattatacaggactgacacgcccctccatccctgcctaggggaaaaggagagtggacaggcctcgacatctgggacctggagatgggaagagtacatgtgtataagagccacccagtcatggtgggcaggcggagctggctctgactcagtgcccccagactcagtgatgtcccctgagaccaagcagtctactctgtacaacctgctagactgaggggtcaggagtcctgcttactactctcaatgggttcaaggacttcaggctgggaagagagaggggaaaggtttctacaggtctgttggggaccgagttcaggccttgtgctgtgagacttctatgcttactcctggatggcggtggggagcgtgggggcgcaatgacatgggtgtcaatcatatgtttacttctctatctgtcctttgaggcatcagctcccccagagttgagccagtactaaacctagttcttggcatcagaaagtgctcaaaagaggccgggtatggtggctcaggcctgtaatcccagcactttgggagaccaaggcaggcggatcacttgaggtcaggactttgggaccagcctgaccaacatggtgaaatcccgtctctactaaaaatacaaaaattagccgggcatggtggcacatgcctatactcccagctactcgggaggctgaagccggagaatcgcttgaacctgggaggcggaggttgcagtgagcggaggttgcagtgcgctgtgattgcaccacttcactccagcctaggcaacagagcgagacttatctcaaaaaaaaaaagaattgctcaggagatgttgccaaacccaagactgacaagaaaatgtaacagggaaaaggc

SEQ ID NO: 308185 - DNA, 1000 bp, Homo Sapiens
cacaacagcaaagaccagatttggagagccacaggacatgggtataagtgcaattaagactgttatttatgttgcactagataacaaggactgttaaaaatggtagctttcttgtgcctgctcttttccctccctgcaccgtccatgccaggcttagcatattcctttctaaatgagatctgttaggatcaggtaaagtttctaccttctgtaatcacttgtaggaactttacctgatcctgacaaacctcatttaaaaagaaacatgctaagcccggcatagacggtgcagggaggaaaaagagcaggcacaggcaagttcaagtgatgcctaactgcagagttcagagaggaatcctggcttctggtccaccgtacaatcattaagagcattggaaaagaatgaaatagcaaaccaataattaataatgacctatgatgtctggcaaggagccgctgaaaagtacaggcatgggataagaaaacagccatcactgttcactttttcccttttccttttgatacgacttctgcaaaagaggtgtgaatgaaatcataaagctgtttggcatttgcagcattccccagaatactcgtgagctcgtcttgtgacagggctgctaattctgcgatgttcttaacgtggtgcatcaaggagcggcagtttttggcattcacccctggcatttttaacaagaagtcttggggaccaggattatacttctctgactcgggaagggtttcagaatctgctgtaatggccagtgctgtcgccgcatcaggctgtggcttgctttgtttcagctcctcaaacaactccgccgttgcatgaggagaggggcaccagagaatccgtagtctggggaagtgaagtgtaagaagagtgagtttggaactaatgtcattgctggagatctcctgaaacaaggcacctcgggaagtgagagagaaaggcttgctagggtcaaactcaatcagaagcacgggacgcttgtagtag

SEQ ID NO: 308186 - DNA, 1000 bp, Homo Sapiens
aaactaaatttatgaaggtccctagtttatttttttgagatggagtctcactctgtcgcccagactagagtacactggtgtgatcttgcctcactgcaacctccgcctcccgggttcaagcaattttcccacctcagcctcctaagtagctgggattacaggcatatgccaccaccctcagctaatttttgtatttttggtagagacagggtttcaccatgttggccaggctggtctccaaccgctgacctcaggggacccacctgccccagcctcccaaagtactgggattacagacatgaaccaccgtgccccgcccccccccagtttctagaaaatattgaacagtcttccagaggctagtctctgggtgtaccttaattaacaatttttgatcagtaagtaggggtaatgtggtttatagcatagagcagaatatgagaaaataaaaattcccattaaagatctgctatcatctcatatttctctctacaaaacccatagtaaagtatgatcatgaacacaatatgaaaatttaaactaaacatacttgctaagaaaataagatcatcatcatccaataatagtacatgaggttttattgactacattgcaagcaaaagcatgaagaagaaacaatcatttaaaaacaccaaagacccttacatagcaaaggttaagaaataaattaagactcctattgggttgtgtctgccagggaggatacaggcctcattcgctccggtccttgggttcccggtatttccactggatgtaatcaaagatgtctttttcactatccactggcaggggttctcctgcaactcctgcaagtacagagagaaaaaacttattgtaagaaccagttttatagtttagttatagagggttcaagattaagagctgtgtgggacttgctttcagaagaaaaaagaaaatggtaaccaagtcactaaaaaaaaaaagaccggcggatgtggtagctcacgcctgtaatccc

SEQ ID NO: 308187 - DNA, 1000 bp, Homo Sapiens
tggttgtgatggacaccagctgtcgatccacctgcctcggactcccaaagtgctgggattacaggcgtgagccaccgcgcctggctcaaaaatacttcttaatgactttgtaatgtgtacatgtcaggcatttaagagtttctaatttttcattattacaaataatgctgtgatgaacttccttaaatatgggtgtgtctgtgagtatttctttaggatagattcctagaagtggaattattgagtcaaagggaatgctcttttaaaggctcttgataaatgtggccaaattgctttattgaaaggccgtccctgtttgttttgccagcagtgtatcagagaagactctaatcaacccatgtcatttaaacctttcgaatttttattttagcttttttgagacagagtctcgctttgtcatccaggctggagtgcagtggcacgatcttggctcactgcattctctccctcccgggttcaagtgattctcctgcctcagcctcctcattagctgggactacaggtgtgcgccaccacacctggctaatttttatatttttattggagacggggttttgccatgtcagccaggctggtctccaactcctgacttcaagtgatctgcccgcctcggcctcccaaagtgctgggattacaggcgtgagccaccgtgcccgacctaaacctatggtaatttgatagttgtaaacttatatctcagtgttagtttatatttatttgattaatagtgaagttaaacactttctgcacctctcctctgccttatgtttattaccatttgtatttcttctgtaaattgtctgtcctaatcttttgtctatttttcttcaggcattaaggggttttctgattgattaataaattagaacttagagctcacacttcaccacgggccaggaaatgaaggggcccttgatttagaagtggctttacaactttagaatctagagtagaattacctccctgacattccaagccc

SEQ ID NO: 308188 - DNA, 1000 bp, Homo Sapiens
ccgctggagccgcagccgacgcggagcgaggccggccgccgggcacttcctgtggaggccgcagcgggtgcgggcgccgacgggcgagagccagcgagcgagcgagcgagccgagccgagcctcccgccgtcgccatgggccagaacgacctgatgggcacggccgaggacttcgccgaccaggtgcggcctgcgggctcctcccccggccccggtcccgacccaggccgcccgggccgctccggagtcggcctcccagcgcagggcgccaggcccgggccgccccctgactccttgttcccacagggggacccccccgcccgggccctctgtcccggctggacagccccaaacccggcctccgggcccagtctcccctgcccgctgggccgctcccggagcccgggcctcggcgccctgcctggctagccgcccccaccctccagccagcccggggcgcgggctgtgggggtttcttcccgggccggcggcgcgagtcctggcgttgggtcgggtctgaggctcgcggggagcgcctcggcgtttggagctgctggggggtccccgcacgtttttcctctcactggggctcccggaggcgggctgggagctcggggacgaacgggggccgggggtcctcccagaggaaagggggcgcgctggcgtgcgccccagctacaggaagccacagcaccttttccttttctctttcccagatgtgctggactcttggggtccctttgaccctgtctgcgtctccctccccgtttggactctgccctgggctggattgagtggggacctgtacacagcctgggaggaggggaagcctatctccctgatagtctccttccagaagtgtccaggtggcattctgagcaacagggaagcctttgaaacaggcggttgggtaactgttgagagcattcgggaactgggtggacaggatccgatcctacaaagtgaagggacacaactcccttccctctttcttgattaa

SEQ ID NO: 308189 - DNA, 1000 bp, Homo Sapiens; identical to SEQ ID NO: 119916

SEQ ID NO: 308190 - DNA, 1000 bp, Homo Sapiens
gaattcaagttttcaatgagccatgatcacaccactgcacttcatgttgggtaaccgagtgagaccctgtgatttttcccctacattttacagaatttttttttttttttgcctcttccttccattaatttgcgttttgtccgttcattttctgcaaacctttagagggcaaatgagaagtttccctttttctctctaaatgagtaagttcctcaaaatttgggcccctgaataggcaacaggagggtgtgtgcaggggctccgccacagtgatttgaccactcccagtcaggcatcagtaatactccccagaaccccaggctgaagcccactgatgctgatgtagttcaatccacttcctctgctactgcaccaggctgatatgccttggcccctgttaaaggtgtgagatataatgggtgcaaatctgtgttcagttttatccaaatccaagtgctttcctactttttcaacttccctgtttttctatttaacacttattgctcactccgtaagacagtagagacggcattctcctctagttatcctcagggagagctggctgaggacaattagtaacaccttggttgtgaatgccaaatagattttgtaatttcatgtcagatgcaagatcctaatagtaaaattattttattacaattgtctctcgctgatagaaaaagggagtaattgaaattctaaaagttggttttaaaagtaaaaagcaaatcctgaaagatgtagtatcctaaagatgtagtattttccatgaatcactgggaaagtaaaggatgataaaaacctttttgttccccatagtgcagaattcaacactggacagactgcaggaatgggagcattcggggaatacaggagaggtcagttattgtttaactaaactgccttgggttatggtgggtgggatgcggttggtggtggtgatggcagttgatgtggacccacaaaggagccaaatatgatacttgtgaagaaccacaga

SEQ ID NO: 308191 - DNA, 1000 bp, Homo Sapiens
cattcaatggcttctcattgtacgttaagtctgactcattaaaaatagtatttaggctgggcacggtggctcaagcctgtaatcccagcactttgggaggccgaggcgggcagatcacgaggtcaggagatcaagaccatcctggctaacacagtgaaaccccgtctctactaaaaacacaaaaaattagccaggcatggtggtgcgcctgtagtcccagctacttgggaagctgaagcaggagaatcgcttgaacccaggaaacggagattgcagtgagccaacatcgcaccactgcactccaacctaggtgacaaagcaagactccatctcaaaaaaaaaaaaaaaaagtatttaatgtaattcataatctggtatcaaccatcatccaaatttatatccctcagttcactttcaactactcttcgacaaaaattttgagactagtatgatttaggcaccaagcgaggttccaaaatactctgtttcactggttctcaaactttagcatgcatcagaatcgctaaagggtttattaaaagagattgctgacacccccagggtttctaattcacttggaaatggatttacatttctaacaagttctcaagtgatgctgatgctgctggtcaggacccatacttggaaaaccattggtctactccaaaggccacaaagtggaagcccaatggctcagtgaggcccactcacatgttgtctgtataatgttttaaaagcattttgtgttatttgcaaacattttaaaattggaagattcctcattaaaaaatgcagatttctggtttatccccgcatgtgaaaattctgctggagctaaacagcagctaccctacctagtccagggagatgtccttcctagtccaggatactacagcccaaattgactctctctacattcacttaaaatcaatggcttagcactgcatttgtgcttatatactcaatccactttttcccattcttttgtcttttttccagc

SEQ ID NO: 308192 - DNA, 1000 bp, Homo Sapiens
gatctcggttcactgcaacctccgcctcccgggttcatgccattctcctgcctcagcctccagagtacctgggactacaggcgcccgctaccacacccggctaattttttgtatattcagtagagacggggtttcaccttgttggccaggatggtcttgatctcttgacctcgtgatccactcgcctcggcctcccaaaatgctgggattacagacatgagccaccgcacccggccctgtttttattctaagtagtattttcttttatcttccatttccttttttttttttttgctagtctattgaaatatataatatctgaccaagtgtcctgtgaccttgataaactcacttattagttcagtagattttttatagattacacatccaatcatgttgtttgtaaataaagacaattttccttcttcctttgcaatctgtaagccttttacttctttttcttgccttattgtactgactagaaccacagcataatagaaatggtcagagtgaacattcttgcttcagacctgatgttaagggtaaagttttcaattaccattattatgctagctatagttttatattattatataacattattatatattatataatattttatatattatagcagattatgtaacactgttagctatactttttaaaaacatatcccttatcagattgagaaagtttccttttattcccagttgttagagtttttatcatgaatgggtgttgagtttcatcacaccctttttctgcatctattgagattatcatataactttctcctttattctgttaatatgatgaattatattgattgatgttcaaatgttaaatcaatcttttttttttttttgagacggacttctgctcttgttgcccagtgcaatggcaccatcttggctcactgcagcctccacctcctgggttcaagaaatcctcctgcctcagcctcccgagtagctgggattataggtgcccaccacca

SEQ ID NO: 308193 - DNA, 1000 bp, Homo Sapiens
gaaagggttatccacatccggctgctgattattttcacaattttcctgagatgtcgttatcattctttgactctcctttctatagtcagacatttggctctcagaggtgactttctggctgaagaatgtggattcgtcactgtcttgtgctcaatgtagagggggctcttaattccagaaatgtccatatcttcatctagctctcaaacacctgcagcatcaaacttgaatgctgcaggattttctcaagccgctcaatttggtcatcctgttttttaataatttttctcatcatcacatgttctacttcaagcctaaaatgtgcattttaaaataattactctcacacgtaattttttttaaatcatgtaaattctaaacaaacttctgaaggtataattacacaaattcttagcaatcacaaaagtagacgattgggctactgtgtcattttctacctgtgttttggtgataatatgcaaaatttaggaataatgtagaaaaatgatgtatttcgatatagcttacaaatgaaacttttttggcttcacaaagacatactaattatcataactgatacaattttcatactacagtgctcttttgctttataaatactcaagttattttgtgtgctgcttcaaattttacttttgtgtgtcgccttccatctccttagtacatcttatagtagctgtaagttgatcctgtatttcttgaaattgacttctcatctggtctaatttcttccttgaatcctgcatcccattttctaaataggtgcagtgacgcgatgaagcatccagcagagcttttgttgctgatcctttgtttaagacatcatctcgtttttgttgaagctgtctcacagctacttctctttcggcttctctttttcaaatggcattctttttcttcgaatgagtcagtcattgaccacatttattgtcttcttctagtaaaagacgggtgctttctgcactcagcttgaaggttttgt

SEQ ID NO: 308194 - DNA, 1000 bp, Homo Sapiens
cttctttctctctgtgagggtctgtacagaacttgtttatctttgtgcccctccccaccacagggctttacactttgtgaatgctacttggatgtttgttaaatgaaaatgtgatggtaaactataaagtggatgtttgccttggggagagggaggtgtggccagttttcctgttctctggtcaaaatctatccttctaaaaactgacactcactaaagtggaaacaaccaactacctctgcatcacactgcagcctgattcggttcacactgccctacaacaaaggcagtttcctgaacaactgatttatttttcatttattcaatcaatttaattttcaaattataccttaaaatggtagttggtaattaagacatagtaactagttttttcccttggtttctttctaatagtaaatgctttggtatttgaactgtaacaatacttgtaataaaaatggcattaagacttattttttttaagacagggtcttgctgtgtcatccaggctgaagtgcagtggtgtgatcatagctcactgcagcctcaatctcctgggctcaagggattctcccacctcagccttctgagtagctgggaccacaagtgtatgtcaccatgcccaattaatttttaaaattttttgtagagacggggtctcattatgttgcccagtctggttttgaactcctgggctcaagcaatcctcctgcctcagcctcccaaagtgctaggattacaggtgtaagccactgtgcctggccaaatggtataaactccaaatggaagatgagaaatgagttttcacaaagggaccaaggtaaaagagtgagtgagctgaaatggagcagcaggcccatattcacattaggttatcaaatggatactggggtggaatctacaattcctaagagctagtgtggagctgtcaacaatacacaatgccagaggaatcttatttgtctttggggtcagcttttatttttattttttaaatata

SEQ ID NO: 308195 - DNA, 1000 bp, Homo Sapiens
gagcgggaatccctttcccaaaaaaaaaaaaaaaaaaaaaacagcctgggatctgcaatctgacagatgatggcttaacatcccagctcaatccattgaaaagctgtgaggctttgaaaaaattgcctattctgatgcccagtgtcttcattggtaaatggcgattttattttattttatttatttattttttgagatgcagtttcgctcttgttgcccaggctggagtacaatggtgtgatctcggctcaatgcgacctctgcctccccgtttcaaatgattcttccgcctcagcctcccaagtagctgggattacaggcatgtgccaccacacccagctaattttgtatatttagtagagacggggtttctccatgttggtcaggctggtctcgaactcctgacctctggtgatccacccgcctcagcctcccaaaagtgctgggattacaggcatgagccaccacacccggccggccggtaaatggggattttaaaccctacttgcacaggatagttacagggttaaataagacagcatttgtaaagcatggcacaggcacacagcaggtgctcaaaaatgtcagtgtttgctcagccctccccgtcttcaacctaaccaaatccagcctatgtcatttttctaaggaatccaaacctttcctcctttttaaggcattttcctggctgctcctcctctacaaaagggaaatgctatgtcctgggatatataaataggggaaagtaggctgggtgcagtgactcacacctgtaatttcaatgctttgggaggccaaggagggaggatcacttgaggccaggagttcaaaaccagcatgggcaacacagcaaaactccatctctacaaaaaagtaaaaattagctgggcgtagtggcacaagcctgttgtcctagctacttgggagactgcagtgagctatgatcctactactgccctccagcctgggcaacagagctagaccccattttaatcagtca

SEQ ID NO: 308196 - DNA, 1000 bp, Homo Sapiens
caggaagagggaaacagcccaatatttatttatgtatacacataatcccaagtgtgtgctggggccaccaggcccttcctgggggaacaaggactctcgtgcatgtgagtgacgacattaatagcatttacatactgtacagatgcaacctttgatgatacatatatttgataaaaatgagaaaacagatttgttgtagagtacctgtccacttttatagcatgagaacagtacaatcaactatttattttgcagttactcatttcagtgattgagaatttctgtgctgtgcagagagacggcctgtaattggtctcatcatccacttgattctaacatgatctctgcccaaagttccatttcttgggctttgatatttataatggcgcctgctcttcatcttgtcttacgctttccgagcaagttcaaaccagaaagaaaaggtgaggctagaagcccaaagtgagtgagtgtgaggaccacaaggaagcccacctctccacagtagatgatcaaaaccacatcctcacgtgggaggtagcacttggagagggtgtagtctgtgggcgtgatgctaccctggaaaggagaagggaaagttatgctgagagcaccaggcacacgttgaacaccgcagtcttagaaacagcagagggaagactgccttctcaggtccccctcaggtgaggcagggaacgggccctcctcacctgagaccaagggggcccagccttctccctgcacagctcacccccgaccagcccaggctccagcaggagagacaagtaaggcccaagagagcctgagtggaaaatgtctgggacactgacctgtcaaaactggcccctggctcactgggttcccatcaaatatagtgggggatccataacagagattcagagaggcaccgtggagttccagggtcatcggtcagcgaggaacaaggagggaaaggtgtcttcctgccccttgatgctcaactaagcatctgttccctaga

SEQ ID NO: 308197 - DNA, 1000 bp, Homo Sapiens
ctgctgtccgctgcacgcctcggtcctttcaaagatttgattctttatactttttatgttcaaatttttaaaaatgcaaaagaaaaaaaactaaataggagggaaaaatgttcaacagaaaatttaccccaggaaccaaaaaaaaaaaaaaacccaaaactaaagtctctccttaaagtacacacacatgtggccagctactcctatgtgtgtgcacacacctatgtcgggcttgctcctgcccctccaatgcaccagcctacctactgggatcccctgtatgtgtatttgtcgccaatgacactaaacattttcactgtcccaacccagacgcaccagctgacgaggagttcgtcctggagcccagagcaaatgcctgcagagggctggaccagggctgctgggacacacttttaaatcctgcggtggggagagagtgacaaatttctgaagtgaaatgtgagagaggagagggaggggttaacccacacacacaagatcccctccaaccaaaaccctagcaggcaactattaatcatcagaaaccttatatgcacatctaatgggatttgcagatggagacttttaaagaaacattgtctgtattttttttttaaggaaagagagcagcacacacacacatacacacacaccgtctttaatgtgcctcctgtaacactatgaagttatttttattgcactgttaacaaaattccccaagtcttggatttagaaaaagccttaagtcagatccagaatccatcaaatgccaaattccagggagtgaagtgaggaataagagcaagagacaagcttggtgattgcatttgatttaaaggcccttctactgctgcctgcgaaaaaggaaggtggattaaaagaaatcttttttgcaagtctcagcggcccactgtggtctgcagtacaaagaaaggcacactctagaaaaaaagaatttctctctgcccagagtgacattctcactttctcagtaacttaa

SEQ ID NO: 308198 - DNA, 1000 bp, Homo Sapiens
gggtaaagatagtaactctatgtatctgcaatatgttcaagctttaaagtccaatatcctttttgatttttaatctgcatcttagatatctttatcatattaatacaaactccacgcagatacataaggcagaaagcaaggagttccacagacacattaagcccaagcttaatgtggaagcccaaactggtggaagatgacaagaaaacaattctaaagcgggatggttattattattagatttttcctttaagatattgataccttttctttttctctatgcaagactttagcaggctaatcaaccaagatctgagttctcaaaaaaccaatgtttagtaacaacagtgcataaggttaagaaaagagaagtagtcatgggagatgtctcaactgcttaaacaattgaactccttgccttctcttttgaattgatgtctctcattaattgtattaaaagaacatcatcacagtatgaagaaggaggaatgaaaagaagggaaatacagacacagaaaccaaatcatgattaaggcttccccaaaggagtgtatcatcctacagggaattatttcattttctctggtctttcaagaaaaaaaaacaacaactttattttccaacaccttcctgagaactttaagaacaagcctataagcatttgtaaaaatggcaagagtagacattgtggggtggatgctagcagtgatgtttccagaacagtggtcaccaagggtgagtatttcgctccccctctttctacgtagtcagtcagtcagtcacagaacttaaaatctcttcccaaccactagagtgccaaccagtatcacacaacatttgtgttgactctcaactttttcttagcagtggatccttatgccctggtgcttctgcacaagtccactatccactaaacctggaacagagctggctacaggagacatgaactctctcccataattcagggcttccttgaattttcaaatattgcagactttaa

SEQ ID NO: 308199 - DNA, 1000 bp, Homo Sapiens
tgtgaaccagctacttgtggatttgggtggactaaagctcaactcactgcattgcacttgacctgactgggtttgaagggacaggttatggccacttgaccccaccttccctgaggacagcagacagtgctgaggcctggactgacctaaggcctcttggtgaggcaaatctggcaaaagcaatagagttcaaaatgttttttccaatttatttagaaaaatagactctggattcacattcaccccagggctatgtgggatgacagcaaggagacacctgagatgaaatgaggaaggtttgaattactggtatccaaggggctgggggcaaaagccagaagcctttgtcccttgtccttcagagccagagtggcatgagtgtcttggctcccctcctctccctcccttcagtagtcttcagccatggccagtaagacaaggctggtccagccgtggaaagggcggcagcccatgcctcgcccatcgcggtcactgtactgctcccaaagaaagcctgtagcctggtactggcgccatacattgcctaccacgttggcacggagctcaccgtggagtttggcagcccgagcctggtgaggaccctccagatgcccatagtggtggagtgctcccaaagccaggtagttgacattgagccacacagcaccccgccagtaggggggatcatgctctgaattgcgctggccataaaaggagctggaggctgcaagggagcgtaaaccaaaggggctccagagatggcggctgtcggctagaatgtccagcaggggcccaaggcgggatgaggtggggtccagcagtcgcagcagcaagggaaaaagactgacatagccaagagcatctacatactgcagttgaggttggggccgacccaccacccgaacgagcccctgagggggcctgggcttcagctgtactgcttttgtgtggttcccaaagtctgcaaagactcctagctctggggcccagtgcagctcat

SEQ ID NO: 308200 - DNA, 1000 bp, Homo Sapiens
tgggttcaagtgattctcctgcctcagcctcccaagtaactgggactacaggtacacaccaccacacccagctaattttgtatttttagtagagatggggtttcaccatgttggccaggctggtctcgaactcctgatctctggtgattcacccacctcagcctcccaaagtgctgggattacaggcgtgagccaccgcgcccagccagcaaatgtttttaaaatagggcattcatgggcttttgggggtaagtgacacctaatcttcaggggtctgcggataatttctaaatggggctcacagtttattcctccctcatagggaggctgcaattacctcacaaagctccactagggtcacaacaagatagcaaaagccagtgcagggcctgcaggtatagggggatcctgcaagcagaaatctgtggtgggcgggcggcaggtgagcaaggagaacgtgtctgtaaaggaagcacagggaacaggtggtggctttgtaagacagttggaacccaaggaaggtaagaataatgtaccactccttgctccatatgactgcttccttatatctcagttcagatattaccttctccgtaaggccgcctcccttcctgtaagtgatgcttctctatctacaaccccagctcttattgcagagcactgtaggggctgttctggggcttttcttccctgagacatgtgaaggcagggagaggggcttgcacgccttagcaggtgtttaaaaattttgcttgcctggatcaccaaagaactgaatgggtggtgtaaatgggtagaaaatgaactggctggaaactgagtgacaaggttcaggtctgaatctctgtttaaatgcaggcaggccatcccccaggaaagcctatgttggtgagggttatgatgggagaatgagtgaactgcagcctggcaccaccacaccctggaaggtgcagttgggaagaaagtttctgaggctgtagacatggggatcggatgctgg

SEQ ID NO: 308201 - DNA, 1000 bp, Homo Sapiens
aactctggcatccatttaccatacaactacaataaattgtaatttcatccaaataccacatcatatatgaaataatcattgaacttcaccacattttaaaaaatttcaaagataacctggcaaaaatggtttatttaaaccacagtataatcttattttaagaaaacataaattcatagtaataagagcaaatcacacataaatgtttgaactgagcattagaattcacaaattagtatcttcagctcatttgaattaatcaaatactaaatactatattgagcaagagataacagtatcattataataagctaaatccaaacacggaaaataagtctaacataaaaacaagcaagactttttttttttttttttttttttttgtcttttcgctggctccctgactgcaactagtttttcttttggaaaaagaagctccaacacaattaaataataaatttctacattttctgtagtttttcttccccgaaaatcatgtttccattagcttgctagtaaatcctacagagttgtcaatttatccatcaccgtctctctctgagcttcaaatacagaaaatccgaaaagttcaaagcagttagaaaagcagcgagttgacaaagaatgccacttgagatttttttttttagtcctacttcctaaaaagtcaacaggtcaaaattactcacagctggatgcaagggtcttcgaaaaatgaaaggatgttttccctgcctcaatcagcagacttaaaatgctcccgatccacagtgggatagatgtggccctcaacggtcagataatcaatcgcttccttgatggccttgacgctaaggtcgcagagctgagcccggagctcatggatgctcttcccttcctgatgaggacactcatgaatcaaacgcagcacttcgtcctggatgaaattgcggtgactctcatcgttatccccagcatcattcacttctgatggagacacaggcacactttctacagtggt

SEQ ID NO: 308202 - DNA, 1000 bp, Homo Sapiens
gcagcatctggagcccctgtcatccgagggcaaagcgcagagatgttcccacatactccacaccctctagctggctccgttccaagaggatctggcacacagtcaggacttaatttaacatctgctggcctgaagttaattggggaagacaatgaccgagaaattcattcaaaaaaaagcctttctatttcattcctgaaccacagggaaggggagaagcaatggaagtgaaaataatgtcaaacccagggtttacacagagaaagtaaattgttaactccaataagaaggaaacaggagagttagttctgggttctctgtaaggggaaattactaaactgacatttggtcatgcaagagaaaagatttccactccccaacccacactgcccccatcagaacaggtccgtccagagtcccaccccctctatgcaaaccgcacagattgggcactggagcaggcccccactgcagaggggcaacacagtgcaccactgctgatggccacaccccctgagccacaggaggcagtggagtccaggtccccgcagaccacaccaccctgggaatggctcacacatgtggacagagacacaggtcagaattctcttccatctcagacatgttatgacccagaatcctttagaaccaatgattaattatcttccttctctgagggaccagcaacatgagtctttttaaactacaggcaaacctgaacccactgccatctgcttcttcaggagtgtggttagcaaattgcacaccaaactctacttggaccaggctgatgttgagacatgttcatacaatctttgagcaaaaactgatagatcacactagaggagtcatctagaaatatggttgctagagaggtgaggggaatggagggatgggaatcagacacctggcccaggggctgtgtgtacattggattattagatagagatttacaagttgcctgcagagacccacatgatcagaatataaacctagcttt

SEQ ID NO: 308203 - DNA, 672 bp, Homo Sapiens
tccctccaaggctgtaggggggtatttttccttgtctcttctagtttcttttttctggtgaaaagatacatatatttagaattagccagccagactcagtttagatgatcccaattttgttggcaacatccaaagcatcataatcaggacccagaagaatatgtgccttcttctctctatcagtcctaaccagggtgttgaccttggccacatcaatgtcacagagctttttcacagcctgtttgatctggtgcttgttggctttaacatccacaatgaacacaggtgtgctgttgtcttctgtcttcttcatgggagactcagtggtcagcagaaacttgatgatgacatagtggccaagcttgtttctcctgggggtgctctttcgaggatatttgggctgcctctgaagtcacagtgtcttggtgggcgggggtcgtgcagattttctttatgtgtgtgtgtatgtggctgtggacacctttcagcactgccttcttggccttcaaagcctttgctttggccttggctttaggagggacggaagcttccttcttcatctttggcaccatcttgtgaaaagctctcttctagtttctgatgtctccaggcatcccttggcttgtagctgcacaactccaatctctgcctccatcttcacatggtcctccc

SEQ ID NO: 308204 - DNA, 627 bp, Homo Sapiens
tttcaattctcttgggtaaggggagatttcttttggcttggactgagaacctatgccccagaggtgctattctgactacagcgtatgaagggagtgggtgcagattctcacaggagggtagctgatcttcggtgaaatctgcatacctggagtcctcattgacattgctatggaagagatggtcaggctccatgagagggggtgggacatcataggagggcttgagaccttttcctgggcctcaccatgcttggcagcagcttctgctttattgaggttagtcagttcccccatagtgctgaggcgccaagtccttgctacaagccaccatgtctagtcaatcgcatccagcactgttcagatggttcagatcactctcttctgcaccaaggtgcagcagatgtcaaactcatagccagcatcttgcaatgcctgcctgctgcacttcactccttatggcccaagcggttccccaggttccaggcactctggccatgctggatctgcaccagtgtgtaggcagccatggttgcaagctggggacgtggtgctggctgggagcaatgttttaatgaaattctctactcctgtcatattttgtgccttttcttcttccccttcagtctg

SEQ ID NO: 308205 - DNA, 1000 bp, Homo Sapiens
aaacctttctctgcaaaccatttcctccccgccccctcccctcagcagcggccgtcctgagtgggagtccctgggacttcccagtggccaagttggggcgcccagcctcttcgtggggaccttgggtaaggccagggaggcctgatgtggccgtaggagctgcccctgcccacctgccctggtgtgggggtccctaggccacaccctgctccccacccagctaccctgtgcgcctgtgccctgctgggggcctgggctctccgaggggcctgaggatggaggccccacgtccccgaggagggcggcctctggacaggcccctcattccgcgcggcagctcccaggcctggggaacgtaggtgtgtgagagcggcacccgggaaggacgcctggcctctggctcagccctgcttggcgggctcccccgtggacaccctgttgactttgcacttccctcccgggccccgcacccccgaaccgaccaccgatcgaccggcaccgctgttgcctcgtaagccatagcgcatgcgcgctctcaggataaacaggccctgcctgggacccacacgcctctgtcttttctgagcctcctccccgtggggtgagaggggtggagggatgaggctgtttcagggagccccctccccgagtctcagcagctggaaacggtctcgttcctgagcccgtgccctgcatccatctgctcccagccctgctccatctcccccgctgacccccatgggaccccctgctgtgtggcacatcctgggcccatgcccatctctcttatttggcagactcagcctcccaccttcaccttccctgtgaagccatccggccccacacaacacccacacgggccaccctttgcccaattcaccctgcgacctctagcagtcacaggtcaagctttgtaccctgtggcgccctgcctgggtccccagtgtccctttcaaggccgggtagctctgtaaacaggggtgggaccctggcagaggct

SEQ ID NO: 308206 - DNA, 1000 bp, Homo Sapiens
tttaatagaaaaaataaacaaaatcacaatggtgaagcccagagggatgggggccggggcgtcacagggcaggctcctgctccatgggctcctctgccggcctgtggggcaagcacaggggagggtattgagtggggcgcaccagcaggggtgagggcagagaggtggtgcgggttgctgcttacctggggctgtgttcccgggctgccgcagcctgggcctgctcggcccccaccgacagcaaggccatggcgctcacagtctcggcctcctcggtctcacctgcttgggcctctcgcagggaccggcccagaccagcggcgaacttctgcacacagctccagtgtttgcctgtggacgagagacaggcaaggggtcagggagggcagaggacacccacatgaacagtcccagtcctggtgctcccacaagctccgtgcccccttggcagcctgagcccctctacgtgtcctcacgcactctggatctcgatgactttctctagcgtggccactgcgttgatgttgggcttttgctgcaagactgcctcatccaagggctgcagctggcaggggaaagaagagaaggcttagggtggggagtagggttgccatgcatacccctctaactgccccactcagccccagatatccctcacaacaggggcaaacatggcctttttggacaaacgcatactcagaaagcctggccattagctgttccttaggaccaaggaaaagcttcctaaggggctcccagtgctggctgaccccttgctggcccctcagccctctggcctgccacctcccagctccttcccaccccttacctctacactgagcagagccgagacacaagcctcagaggcatcacagatggcggtcaagtcatggcctccctccagggccagcaccacccggccccctgccagggtcatcagctgcctggtcaagtggccaaaacctttgaggatgggtgaagggaggaagaagaaatggcg

SEQ ID NO: 308207 - DNA, 1000 bp, Homo Sapiens
ttttttttttttttttttggttgaaatccatattacctatttattcaacaaaaaactgagtatcttctatggtccaggccatgtccttggcactgcgaacagagataagtcctggccctcaaggagctcacagtctagtgggggaaaaaagacacaagaataaataaatataatgtatttggagtttgcaaagggggccactatgggagacaaagaacagaggaacctaaatatcctatagttagcatccacaggaaagaaagacctggcaatgtacatttttgtaaagaatagataaggcagtggttctcaaagtgtggctggctaattacctacatcagaatcatttggagcacatattaacaagtagattcccagtaccttctgcacatattcttgatttagtacgtgtgtgggggggtggtgtacggttgaggcctgagaatctgcattttaaaagcactttaggtgatgctactgcatcttaaagtttcagaactgatgagataaagtttgttcttttaactggaataaagaatgatctacacatctgaaatgctaacttgtattagtctttaatgaggggcaagggaagtagagaaaaggatggtagttgatattttctactatagtgaagttaatttaattctcacaataatcctatgaggtagatattattatccctattttagatggaaaaaaaaccccaaaattagatagtttaagcaatttgttcaacagtatagagctaatgaatagcaacactaacatatgaacccagattcacttaactctaaagcctgtccactttctataacaccatgctagcaccaggggacaaatttactgattaaatggtacaattttctttgagttctttgccagatctttctaggtaaataaatataaagaacagctacgtggtactttagtcatgccccacacatttatccatggacacatcctacttggcagttggggactgaggacaaatccagga

SEQ ID NO: 308208 - DNA, 955 bp, Homo Sapiens
  misc_feature (930)..(930): n is a, c, g, or t
tttttttttttttttttttggcaagtcaacaaattgaatgtacctaagcatttgaatatttaaatattggctcattccattttcaaattacacctctctctgctcttattctagactttaataatttttttaaaaaaataagcaatctagattttcttacgagttctataattaaaatgttacatttatgttctagcacgctaataggttgtcctttcaaatggagactgaattgtcaaatatgcccactgcactttcaaaataagtgcacaccttctaagtcatgctagaacaccaaagcaggtaacccacattacctgctgcagcatgacagcctgctgttgttggagaagggcttgtagctgctgaggagacaggacttgttgctgaaggatctgctgcatttgctgaggggtgatcacctggggagtcatcatggccactgacacaggcactgcaaatgtgttgtgaggatgcccatcaccagaagagtggccacagatacataattttgtttctggaagcaattcctgcagtggtctctgtttatcactgctcttaggagatttcaatccacttgtttgctgctgtaaaagaagttgtcttgctgcctggagagcctgctgttgttgcagatgcagcagttctactgtgcttacttcagagctggtgtcaccacttgatcttccatctctgctgccagcatctaattggctgcttagagtgctcattccattttgattcattgaactgttgcttattgtctctgtcgcagattcctgcatcatgacttaataccttctctggaaatgttagagcaaacttcccggtttcaacttcataggagtttgttaaagagatgaaaaattaggaagattcaaaaaagccagcacagaaaacagtataaaaagaagggaaaactcagaagcnagctcactgctcgtgccgaattctt

SEQ ID NO: 308209 - DNA, 1000 bp, Homo Sapiens; identical to SEQ ID NO: 119918

SEQ ID NO: 308210 - DNA, 1000 bp, Homo Sapiens
gtaggccagaaattttgtcttggtgggaggttagaactcggcacaggggtgttatgctctccttgctcattgagatagactgaatgcttatgtccccccatattcatatgttgaagcctaatcaccagtgtgatggtatttgaaggtggggcctttggtaggtgattaggtcatgagggtgaagcccccatgaatgggattagtgcccttataaaagcgacctgagagagctcccttccctgcctttctaccatgtgaggacacagcgagaaggcattgtctatgaatcagaaaatgagccctcatcagacatggaatctgctggtcccttgatcttggactttctagactctagaactgtgagaaataaatttctattgtttataagccacccagtttatggtagttggctatagtaacccaaacaaactaagacacccaggcattgagtaccaggtgccgtgactgcagatgggaatcctcacacctctggatggcaaacctggaagacaaccaggcttaaggaaagatgagtccagtttggggtgcattaaaagcatggagcctgcaggtcattcggggagagatgtgcaggagaatataggagattagagcttaggagagaggcctgggctggaaatgtaacttgtgaggcctcatcagagtccaaccttgtggttcccacctggattgagttcaggtcatttcaaagatttactgagtacacttcatgtgctgtgtccaaggctggactctaaaaatacagggctggacatagtacagttcctgacctggggaagctgacagtttggagatcagagctaaatactaacaaggataatttataaaaatattaatgtaaatttgattaaagagtaacatgcatgtagaaaagggaacacatcacaagtgctttaccaaaaaaattttcacagagtgatgacatctgagcaattagtagccagatcaaaaaaaaagatcctgggctaggtgcagtggc

SEQ ID NO: 308211 - DNA, 1000 bp, Homo Sapiens
atcatttagctccctcttagaagtgtcaacatgtggtatgtggttttctgttcctgtgtcagtttgctaaggataatggcctccagctccattcatgtccctgcaaaggacatgatctcattcttttttatggctgcatagtagttcattgagtatatgtaccatattttctttacccactctatcattgatgggcatttaggttgattccatgtctttgctattgtgaatagttgaatctttcaatacatacatcctacagacttgttttttccagtggaaacttgactgactacatcagtttcttttggttacggttttcatggtatgtcttttttcatccttctacacacaacctcccctatatttatcttttatgtagatctcttataaacaacgtatagctacactttcccccagtcttactatgctggtattttaactgtagcatttaattcacttgtgcttaatgtgattcttagactgtatttgagtctaaatacagaatcttatacttgtattctacatgttctatccatcctttttttctttaatctcttatttcttgtcttctctggtttgactgaataatgtttctatcaccttttatacttcctctagttcacaggtggtaaacttggcttcgaatctttaagtaaatttcctcgagattacaataataaattatccaaatgtaacattcatcataacatttaattttctctggaaaaatataaagactttatgtaatataaattctatttacactcttctgaactttatgttattatagtttctgggctatataatattggtatttcaatattacatttgatgtttgacccctctacaaaccatcatttttacaacaagtatttgtttcattttgctcacatatttgctactttcctaggttttcattttttttggatctcaaaaatctaatctgggatcactttcctaatacctgaattatatgttttagaatttatttgagaaa

SEQ ID NO: 308212 - DNA, 1000 bp, Homo Sapiens
gcttggaaccaagacccaggatccagaggcttcagctgctcagggcggttgcccccaggccctgagactggctcaatccttctgtgtcagttgcagtcatgaagtcctaatcctctcctccgagcctcattgttttccatctataaaatggatcaatagtggaaccaatcacatgagttgttctgggaattcaacaaatgtggggacaggcacagagcttagaacagtgtctggcacacagtaggccccatgtgtttgcttttactccaatgattttattacgaggtaaagggctaccatggggctggcccctagtaggtccctgatcatggcaggtgctcttattatggttattgttgttggcacagctgccttgcctggggcaggtctaggggtcagctcagggtgcacagtggggaacctcttggctggaggaggacctcatgaggtggtacccaggaccccaaagggtcagaaacacagcctcaggcctccttccctgtctctgcagatgggcctgactatctgctgctgaggggcaatcctgatgccttcaatggcatcgtgacggctgagatcggctcccaggtggaaatggagtgtgtctcctattctttcccagatctcaagtactgctggatccacaacagctccttcctaaacttctcatatgcaaagttgtatctcttgagtctggcctggtagcagatgggcacttaccaatgcactgtggaaaaccccgtgacacagctgatcatgtacatggacgtcaggatccaggccccccgtgagtgcagcagctcccgtccaggctcatgctctgcacatctccctgcctccatgccctgctaggcagtgcccaccctcaggagtgccacctccaccctgccatgacatgctcacaacctctgggtgaaatctcccagtcctctcaggtctgggtccaaagatgcctcctctatgaatcctctggagtcctcagatcagagtcagggtgagt

SEQ ID NO: 308213 - DNA, 1000 bp, Homo Sapiens
acgaccatattctgctgcaggcccatttcttggttctagatttggtgcagtgtttctccaaatagtacttggcactgacggtttctgccttctctccttccattctctcttgaactctttctagtcaagagatcttcctctaccaggcaaccagatctgcttttgtcaataccagttgtgatacaacttagctaaattcaaatagtcgtttctcaaaccctatcttaccagacttaccagcatttgaaacaaatgaccaatctctccttgaaactccagcccccgttggccaccatcacctgaacttgcactctcctggtcactcatttctcctcagcagctgctctatacagtcttcttgctgtttccacctcttctccctgacactaaatgctggagggtcctgtggctgtgtccgtggaccccttctcttctttgtggattcgtccatcatcaaaccttaatgtggaggctcccaaacctgtgtatctcccacctggacccctttcctgaacttcagactcctgccttctacctacaatccctacgtgggtggctcgggaccacctccaaattacagtaaccaaaacaatatttgatctacacttaagaatattctcctcctgcagggttggcaattttagttgttggcagttaaattatttaagtctccattctgggtaaccacatgggcatcatctttggcacctgtgggcatctgtgacatctatggaggtgtaatcagactctccatgatattattgaggtcatggatgtcttcatggatatccatgacatctatgatatctgtggactcacctgtgatatctgtggcacctatcaagcagaggccacgagctatctttgctcttaccctacgtgcactccgtcactccattcgcaaatactattggcttcatcttcaagatgtgtccagaacccaacttctccacatgagattcatcatccttacccaggactatgtctgcgtcatctcttc

SEQ ID NO: 308214 - DNA, 1000 bp, Homo Sapiens; identical to SEQ ID NO: 119919

SEQ ID NO: 308215 - DNA, 1000 bp, Homo Sapiens
agtgccaccatttcttcaactaaaagataaggtgtgctttgtaaaagtaaagcatatccaattttcatcctgttggtcggtattaccaagggtcatgatgtagctggcgcacaaatgtgaagaatcatttactacctgtagagtggcagtatatcttagatatcatactttttattaatcagttcagtttctctagctgcagagagaagttctctaacggacttcaccaatagggcaaaacacattcccattccagaaaggcacataagaagggtgcttctcaaccctcaagacaagcacacaccaggcaaggaacggtagctgaagtgcatctgccctggaccagcatttccacacccttcagaccaagttccatttaaaggtgtatgtactactttcaaaaggaccattgggttattttcttgtgaccccctgagtaaaaccacacattaaagctccaccgtcttacactttgctacttcttacatacctgtcttcttacttgttcctattgtttacaaatctgcccaaagatataatttttatgatattaagagctgaattttgcttaagaaaatctacatatcttttgtgattcttctaaatctagtaaatcaagtaatcaacagtttattctctgcttgtaaaaaagggtagtaatttttccacataaaaatcaaatatataagcaaaactaatatatttgttgacaaagttgctccagcaagccttgaatttttcattataatttagctataaatagacccaaggaatctgacatccaaggatcattaagcaatcataaaaatgtatcacataattttaattctgaatacttacttacaaaacatgtttataacttctgcatttccttttattaagcatgctttcccattaggacaagtttttttgttattttgttttacttttcagcggatgatctattacatagtcatacaaatacctttgtttagtcataatttgtcagtaggctactgac

SEQ ID NO: 308216 - DNA, 425 bp, Homo Sapiens
tcttagctgacatattcattcatgtttcatagttcaggaacacaagtcagtgacaaacttctagatatttcaactcaaagaaattcttcatattccaagatcactttgtactctgaaagataccagccttcctcatctcaaaatcttttatggaatcataatttctgtagaaatctgcgtatgccttctttcttggttcggccatagcaatcttgtagaaagctgcaaccaccagggataccatgaatgctccaataatatgaaatcacagacgcttaaccagaaggctatgcattggaggttttgtcaaagcaccagaagccatggtagttactgtccttgataggtgtgtaaacttcaacaccaacatccttcccagctgttggagaaatggacggtccccacctacattttatagacagtcc

SEQ ID NO: 308217 - DNA, 1000 bp, Homo Sapiens
aactcagcctacagacctgatggccaagcagttccctgctgggccaaggaagggctggaggaggatggcagggccacttggatgctagccaggagcaactggaatgggaaattcttaagtgtctctgatatggcacagaatgacctcaaaactcaggtgataaaattcttggataaaaagaattgctgggtgtggtggctcacagctgtgatccaagcactttgggaggctgaggcgggcagactgcttaagcccaggagtcctgggcaacgtacaaaacctcatatctacaaaacaatataaaaattagctgggcgcagtggcacacacctgtagttccagctacttgggagggtgaggcaggaggactgcttaagcccaggagtttgagactgcagtgagccatgactgtaccactgcactccagcatgggggacaaagccagaccctgtctccctcaggaaaaaaaaaaaaaaagctaaaagccagaataggcaaatatatagagatagatattagacaagtaattgcctggggctaggaggtatatgctgcgggagagcagaacaagggagaagagaaaagatgtgcgtaccaaaaggatgtgaggccctgagcccagggcaggtaaggcatgggactgccttattttaccctggcatttaggacagtactccacaaaccacaaattcttataaatcacagccagtgaaagtatgctcaaaatccagaaagctcttttaaaaaaggtctcaacactttgagatgttagtcttgaaataagttaatgtttcaaattatattcattcctttaaatggattaaattgctatttcttgacccggcaaaattttaccttggtagatcattcaataaagcagcactgtgcccttctctaagtctgtggtgttgtaccggctcctgccatcatttttcacagctctttgaggagcaaagaggtggaggacttggtagacactaagtagcaagttgtgataaga

SEQ ID NO: 308218 - DNA, 1000 bp, Homo Sapiens
agtcctttgagatgattatgccctctttacagataaaaacaggttttggagtaatttacccacggtccacagctagtaagtggaatttgaacctagatccagttggcccaagagctccttccccgcccccgccataatgctcttacaacaacctgaacccctagttattctgttgtcatcatctgttgtcatcaagctgaaagcttttttccccagagacatcttgctgcccattcagaatcaatttttactaagctgtaatatttagcatagcacgtattagtcattgagtgtgaaggtgtttaaaaaaaaatcaaacttgaaaaatacacaaacatttctgtgtagtctgaattatttggacatgacttgttttgacttagcctttctccaagcataatctccattaaagaaaaaaaaatggaaatgtttaaacttcctattctatttgtacagtaggataaaatgtcatgtcaaacaatttgaaaatatcaggttattttaactaactggaatttgtttttgtcaaaaaataatgcatagacccaataattcttttgacaagctacaggaaaatttcactaaagttgatgcagatgcctgcggtgatgtgagacttcaccttcctttccttagaagtctgaaagcagcatggaagcaagcctgggactaaatgaacatactcctaaggcacttaggtgcatgcctggcacctggttggtaaatgctcagtaaatgttagcactacttaaaataaacatcagtgccttctttgatcaacaatcagatagtcaaccatgaaaacagctcttttccattttaatccagcatttaaaaagctatctagactaatgttaagtcccacaatagaggccccaagagtacagaaaacatgatcagactcgtacaactcaatgtttatttctgctattagggctttttccagcagtagttccccactgtttccaccatcgtggagacagaaatcgtcctaaaaaac

SEQ ID NO: 308219 - DNA, 1000 bp, Homo Sapiens
taaagacactcccataaataaaaaaatgaaaactcaaaatggcatggacaacaatgaataaactccacagtgattcaataataccaacagccaagcctttgttgagcaccttctacagatgcacctcaggcatgaagccctaggcagcacactgtggatacaaagtataaataatgacattttgtagatacagacattgcttttgtgtttccaactgctctattaatttaaagtacggaaaaagtagaaggaatgaagggaaggaagggaggaaaaggggaaaggagaaaaatgggagaataagagaaaaagaaaaggtgtccagtgttagaagtcacaattctatcagaactccaagtgcctggggctcacaaccacatgattctacctccactgaatcacttctggaatgacttttgtagacttatgtatagctgaatcacaaatgaccattctcccccccaaaaaaacctcatagcttaaaacacccatgaattctgagaatagctctgcttcacaatctctcacaagactgcaatcaaggtgtctaccaaggctgggggcctcatctgaaatctcccttagggaaagatttgcttcccagctaacacaactggctgttggtaagattcatttctttgagggatattgaactgagggcatctgtttactgcttgctgttggccagaggctgccctcaggtccctgccatgtgagcctctcttctgtggcagcctgcttcatcaaaaccagcaagagaggaagtactctggcaagacggaggtcgcaatcttctgtaaacttatcagagaggtgacctctactctactaccatattctattggtatgagcaagatactcaagtggaggggattacacaaagctgtgaatagtagaaggctgagaaaaccaaaagctatcttaggctaacctaccgcaacttggtgatctgctctcagtttctttgtttcatcttttattttttttcatattgacctat

SEQ ID NO: 308220 - DNA, 1000 bp, Homo Sapiens
tccacggagaaggcctcagagcgggcaggccaggaatgccctcccgcccaccctgggagaccggcccctcctcagaccgtttctgggaggtcgaacacctgtccactttgattttccctgacttcgcaacatctgtttacgaacggttttgcccagctcatgacttttttggggagtttttgtactagaactgttgaactttgcttagggacattacacaagacgcaaactgcaggagacgtttgggagacacacggcaggccttgtccggaatcttttctgtttaccgaaagttcatttgattttcatggccagttaacttgaggcctagggacagtgccggattgcagcagggcaaggactaaacatctggaccctaggagaggaggagccccccgaagccccgcctgccacgccaccaccactcagcacctgaggagctccagaagcttccagaagctcctggccagcttcactccagagactgatttcagtggccaggctgtggcctggatgcaggcatgctaaagcccacagggggttctaagggtggccacggtgggggccaactgtgccaggtcaggtcgctgcctggtgagcaggtcacctgcccgggggatgcctgtggcccccaccacacaagcctgagctggggtggggcctggcaccgtgcagttgaagagcacctggttgtttaagttaatgtaaaatgtccgccccaatgagaagctttctggacgtttccctcccagggagtctgcgggtcataggcagtcaccggggaggtgtccaattcccaagaggaacaagagagaccaggccaagtggggggtcttggggaggctgcgccaacgtgtgggcccctcccgacgccacggggcctgcacaggctcccatctgcctctgggcgtgacccagatgcaggaaggtatctggggaaaggaatgcccatggcagtcatggcacagtatcatccctggagcctccatcctgcccccac

SEQ ID NO: 308221 - DNA, 1000 bp, Homo Sapiens
ggctcctgcgagactggcttaggcctctgctgcagacaaatcacatttcagactctcccacaatctcccttgtgctcttctcttccttgtgggtgtatctccagagaacactccccatatcccgttgtcatgcaacactttgaatcagagtcaatttccaaggaatgtactctaagactttttgcacagtcaataacacaaaggtttatctctatctttagaattgaaacaaattttctctctcacccagtcatcacttcatagttgcacttttgaacaaatagctagagccaaagagaatgggatccagtatacttacaggctccaatagtggtcagtccaggagctaggtcaggctgctttgccctcagctcttgaagtaaacggtttaccgccttccactcagagctcagatcttctaacttcctctttaacagaaaagcatacacattacttattcgattaacactttgaagataattcatgaacatcttaatccatttggtgaatatattattggatttctattatattttacttctaaattaactttagtgggtagaatttcttttaaaggaattataattattttagccaaccaccctacaaatatttatcaattgctccatacaaaaaccctttctccaggcataattttatttaaaggaagtagagtgcaaacattagtgaaaacaaaccaacaaaaaacagttccctctcagcaactagcttaattcttgaagagtatctattgtggttgcatactaaaattatccagataactttaggaaaatcctaatgtactggctcacccccagtcaattatatcagagtctcttaaagggaggggctgcagtggacacgggaatatatgtcagtagacattcttcaactgtcagtcccttcagggactgcctgagctgcagagagctgccttgtccaagttcatgcctttccccaggcagccctcattcagtgactgatgaaggtgaaagtatag

SEQ ID NO: 308222 - DNA, 540 bp, Homo Sapiens
gcagaagccatgccttaggacagagaggccaaagctcaagaactacatctatacagaagcaatatcaatatccacaaacataaacctaggaataaaaaaccacctctggtacactggtttcaagaacccaaggctttagaacagcagcaaaaatcactgcactagggaagcaacaaacaactcagggccttcattcttgctctacttccctgaattgttacttacaggttcccggccatccatggcttccatccagagcctccggtccccttccgacaaagcttgcatggtgataacccctggcctgcagagaaaggagggacatggatatgaaaccagtgccacatgtagagagattggtgaaggcaaatcttaaacatccactcaaaagagtcagtggctgctagggttaacaacacaaagaggggcaaaacactcggctttactaagccaccttctactctcagaaaggacggcccaaattcctctcagtcagcccatctccctcagagaggcagaaacacagaagacatgatccta

SEQ ID NO: 308223 - DNA, 1000 bp, Homo Sapiens
cagcttctcctggcaagaggggagaggagggagccagtgcgagagaatgaagagtggggatcctaacttcctccccactcccaactccctaattcccttcaccccagatgttgcaggaaacacaaactacttgttttctcatttcaggcattttatttccttctctgtaggatctggtggatgcatttatcaggaaaaatgaccacttctcctagagggccaagaagacttgaaaatgaaaatctcatccaccaacctccagtcccatcccccaccctaaatgacacttctccaaattctcttttaaaatgcttcttgtattccaacttcacacctatcaacacattcataaatgatattcataattactctttgagcttttctgcaagggaacaactgaggggttacattttaacttgatcacataaattatctgttcatccaaaccgattaaccaagaggatttgagggtcactccactgagtctgtctgtgttgttgattttcgaatctttggttttaatttcctgaaccagttggtttttactgcagggcttcctgccattagctccagctccggaagaacgcatgcgccaattagagcatcaaagccctctccgcagagcttgtttccataaaatggagcggatcacaaacaataacagttctccagaaactgcctccctgctacagaactcaacccccaaacccagacgaactccacgctataccttaagccaccactaccattttcttggcttataattcttttggagtatgaatagtgggttctctatggactgttatgatttttaatgtaatggtactgtagttgagtttctggcactgaacaattgctgattttctaaacagttatattactatcaatctctgacatcatcaacaaagagaattcataggattcctcctcaaatatatggttttaaacattttaaaaaataatttacaaagccagaacttaaattcaattgtaatatatc

SEQ ID NO: 308224 - DNA, 1000 bp, Homo Sapiens
actagtgctaaaaacaccctccaaaatcaataactttgtaatgaaagttagatatgataagacactatgaaaaagcccaaatagctgtcctgatatgccaagcagttaatttaagagtgcctactctgagaaatattagagatttttgtatttagaaaataaacaatagtttgaagacaagaaattctacaatggttgaagattctctccctaccttttacagttattattctggaaaacttagtatcaaattatctaaattttgaattatctaatatattcagtaacatatccttttcttaagtcatgatctctcttaaatgaaataacataatccatgtaaaattcttaacacagtgcctgacagcatggcaaatggttaatgcatgttaggtagatacatggctaatgtggttatcaaccatgagtcaagacaatgtcctaagggttcatagggatgaggctgattctgacatagcctatggctcatgttggaagccttctgctatccagagagaactaaaggtattgatctttgagaaacagtggctgaacaagtgtaaagtgtaaactttggaatcaaagtttaagtccccacatcagctgtttaagaatctggaaccggccaggcacagtgactcacacctgtaattctaacactttgggaggccaagatgggtggatcacttgaggtcaggagtttgagaccagcctggccaacatggtaaaaccccatctctactaaaaatacaaaaattagctggacacatggtgggtgcctataattcctgctactcaggaagctgaggcaggagaatcccttcaacctgggaaacagaggttgcagtgagccaagatcgcaccattgcactccagtctgggcaacagagagagattctgtctcaaaaaaaaaaaaaaaaaagaatctggaacagcaaaaacatctccctgaaaaggcaagtgtccatggggctatgcaggacaagccttcaacaatgac

SEQ ID NO: 308225 - DNA, 1000 bp, Homo Sapiens
cctaaccctaggttatgaagaattacttctttgttgcctaagcttcttttttttagatatggagtgtcactcctgttgctcagtctggagtgcaatggtgcaatctcggctcactgaaacctccacctcctgagttcaagtgattctcctgcctcagcctcccgaatagctggggttacaggtgcccaccaccacaccccgctaatttttgtatttttagtagagacaaggtttcaccatgttggccaggctggtcttgaactcctgacctcaggtgatctgcccgcttcggccccccaaagtgctaggattacaggcattagccaccgctcccggccgcctaagcttctttttgatagatttttttttttttttcacatggaaaacagtcttctctttcaagcctattgagtcaagtctacccaccacttattctgatttacacacaaggagcttctcttttttttttttttttttttgagacggagtctcttgctctgtagcccaggctggagtgcagtggcgccatcttggctcactgcaagctctgcctcctgggttcacgccattctcctgcctcagcttgctgagtagctgggactccaggcgtccaccaccacgcccggctaattttttttgtatttttagtagagacggggtttcactgtgttagccaggatggtctcaatctcctgacctcgtgatctgcccgcctcggcctctcaaagtgctgggattacaggcatgagccaccgtgcccggccaagcatctctttttagattattcttgttcaacaagacttccatatgccaagcataagacaccttctatatgccaagcagtatgctaggttttatgggaaatacaaaattaaaatgatattcttatatactggataatggagatgtacagatgactataactccgactttgcagtctagaagagatgttaaggcagatatgcaaaaaagaacaataaccatgttaagtgacatgatt

SEQ ID NO: 308226 - DNA, 1000 bp, Homo Sapiens
aaaatagagataaacatgtcggccagtgagatagtaaaaggaggtcccgagagtaaagatgaccttctactgatcgtggaaataattagagtatagtacgaatgttatgtgacatattatcaaaaattgtagaaatcatactactcagcaaggaaaagattaatcaccatcgagtttagatgtggaacgagatactgtgataatgtaaccttgttagggtcttatacaaaaagtgtcaatagtcttgtcttccatggccacattcagcctaagtggcataactatctttatcaatagtaaattagagacccagtaccaggctggtttcctgcgacggatccatcaaggtcttgtttatcacgtaaggaatgacgtatccctttggtcatattgtatatggcagccgaatcagtcagccttttaatttcctaagagttctttcaagtcgtatccagaaggattatatgaattagggcggcgttcagggcattactcggcacgtaaaagtgggtattcgagagtgggcctctaagcaggcagtggcgacgccagggaggccggactgaaagaagttaatggaaggtccgacccaaaccccgcaccaggcagaccgcggagcctgttcccggcgagtaagggaagcaaccaccgtcagtcagcccagcaacctccgacacaggcaagacagccctcaggcgcactggagcgctgcagcctcggtcaccgccaccgaccgttccaggcccaagcccaggccctgcgaggaccggagcggcgcggtgtccaaccgggatcactcacccggcgcggcgggtcagggtccaggatcatcggcggatcttccattctcagggcgggagccggagtccgggcgcccgggatcgggctgggcccgcgcccatggcaagcacggcctgcccgggccttggggaccctgccatgtgaggcaggcccgggctgggggcccggccatggccggggaccggcccccactgcgggg

SEQ ID NO: 308227 - DNA, 1000 bp, Homo Sapiens
aaccataactggagaagagtgtctgtctgaggattagccaggtagtcacttgcaagaaattcaaggattctttccttgggttccagttgcctgttgcaatgtccatagcatccaccatagaggaaggattaggggtgggtcctgtgccctattcaggttgcccctcatgttcctcaaaggtcttggcaacctttgttctcaaccctggctgctgcccaagcagttgcccctctttcagtctacctgggatcctctttagtcttcttccttcactaccaagctccagccctaagcctcgtgggctctttaaactctccctccgactcaccttttcctactggggacttctccttctcccttgcatgtgtccatggtggccagtcactgggttccatcttgttttctcctgaatggagatgatttcaaatgggtgaacacaaaggaggagatgaaagaaaacaacctaagcctcaagcacccagagacagtcagacttttagcacagctccagtgattgcctcgtagtacatcacttagatttacgttattatgcccccagcatctctgtctctctctgagctttgagttgtcttacagaaggcaaacttttgttatcccagcttcgtgtgaatctcactcatcccaaaagcaggagttggtgtgcgtcaggccttacgaaagggaaattctgccatataacaatgaatttaataactccaactacacaggtagatattgggtggaattcatgaacaaaatggtgaacaaaatgagtaaaaggcatcaatcctgacacttgtgaattttcactaaatataactataaaacaagtattattatcaggtgatcgctgaggtctctcccatctaactaccaaccctaaggcacgaaggagtcgggactgggctcacatgtcgtggacgctggaagacccacctcctaggggaccctggacacgatgcccaaaggggctgtgaactttgctccccttcagtttctt

SEQ ID NO: 308228 - DNA, 1000 bp, Homo Sapiens
  misc_feature (21)..(21): n is a, c, g, or t
  misc_feature (35)..(35): n is a, c, g, or t
  misc_feature (54)..(54): n is a, c, g, or t
  misc_feature (59)..(59): n is a, c, g, or t
  misc_feature (94)..(94): n is a, c, g, or t
  misc_feature (174)..(174): n is a, c, g, or t
  misc_feature (378)..(378): n is a, c, g, or t
  misc_feature (386)..(386): n is a, c, g, or t
  misc_feature (419)..(419): n is a, c, g, or t
  misc_feature (525)..(525): n is a, c, g, or t
  misc_feature (540)..(540): n is a, c, g, or t
  misc_feature (641)..(641): n is a, c, g, or t
  misc_feature (649)..(650): n is a, c, g, or t
  misc_feature (652)..(652): n is a, c, g, or t
  misc_feature (672)..(672): n is a, c, g, or t
  misc_feature (676)..(676): n is a, c, g, or t
  misc_feature (907)..(907): n is a, c, g, or t
ttgttttttcagaaataaaanagttatttgagggnggaaaaatgattaaagatnggccnataaaatgaaaattgtcaaattgttaaatgaattnaatggtaagtcatgatatttatctccacttttgtatatgttgaaatgatctataaatagttttttaaggaaatgataganctattataggtgacctctaagactgtttcaatttataatatactgtgataccttattttcaatacatcattaaccctagcaaacttttccaacagtcgtctagctactaaattgattagatttattcatatatgctcattaaagcatttttttctaaggaatagtactatcacagtaagaatcacagatccttactaactttgntatttctntaatcaggactgtcccaacaacactttttactnaagttctcatgatcatatcattcttcttcatttaaacaggtgataaattgattctcttagatggtatgtgaacatagattcatttcattggcccgccatgaccaantgctctgtaagatgnatccattctggcaaaaccccacactcactgtaatgtacctgccacatatactcagttgtcaaatcctattaacaccactttcatgtttcctttagaatccnaccttctnnantctttcctgtcagttctgtntaanatcaagttctcattactactttccaggctacagtagtaatattctaatcccaggcactgcctataccccttacaatcaattctatggctataggattggaatcaaatattaaaatcttagkgctgtcttttgctagcttttattttttaaattttcaaactttttcaaattttattttatcttggaaagaacacttaatatgagatctactgtcttaaattgttaattgtncaatacaatactgttcagtataggcacaatgttatacagcagatctcaagaacttcagcatttcgcgttaagtgagagtttatgcctattgat

SEQ ID NO: 308229 - DNA, 945 bp, Homo Sapiens
tcggtctttccatattctaaactggaataccatttccattgtataattacatctaggttaaaattcattgtcttatactgcatcttgaagaagagtcgttagtgtttggagttctcattttaactcctcagtgctggcacattcagtgcatccattgccagcaatggatttggggctaggaaaatatacatcccagtacagaggaactcaggaagaatgggcattctccaacagtggtggtccatctctgtgcatggatgggtgtgtgtgctcccttttgtaagtttttggagggagtttagggatatgttgagaagtgctttgtcgtggaggaacaggcggcccagcaatggaatgaaggtccacttcttgtgtcaatggtggtgatggcagatgccttcttgtgccgtgaggagaaggtgtttgaggaggaggtggtgtaaagggggaagggctgtttgggaagaaggcattgccatggtcactttttttgcccaaagggggaggttggagatgtagtggtgagcttgagaaaacatcaggtgtcctcacaggttctcgtggtggtaataagggagggctttcaggagggtctgagatagaggtccggtctgatattgaatatcgtggtgaataggcttttgatgtgggttgcctaggaggaatggctgggggactgtccaaatgcttagacataatctaacaaatgaaaagaataaaatacacatttattaataaatttatgaagtatcatgactataagaattaagttggggttttcaaacatgctattggcaggatgctaagtgtggaacagggagttttgccatatgttttctttttaattaaaaaaaaatttttttttttgagacaatgccttgctctattgcccaggactggagtgcagtggtgcaatcatggctcactgtagcctcaacttcctgg

SEQ ID NO: 308230 - DNA, 1000 bp, Homo Sapiens
gaaactccgtctccaaaaaaaaaaaaaaaaaaaattcatacctccaaaaacattgaaaaaaatggtacaataaaaatctgtatgcctttcacctaaactcaccaactgatggtattttgccacattgcttcatctctttctgcatatatttgcacagagatatgtatttgtttgcttattaatttttttctaaatagatttacctttaatctgactacccaaacccaacactgtttgcaagattaattcatggagcaaatgatttttaaagaattatacaagtattttcctctagtcttttttttactctacatcagtttttgtcttgttacatagttgtgattgtagcttatggagaattttctgctcttcacttaatattctattatagtcagctggtattttttttaggttgagagaccagatgacagagagagtgaacaaagcaatataactgagaaaaaagaatttagagttatttaataagcatctgagaatctcctaaacttagggacctggtaggagttagtaatgatgacataaaagaaataagtattgttttcttcttgttctctctggtttgagggccaaggaaagacaagaaatgacatgagaacaattacaaaactgtttatcagcaaggacacacaaatactgagagaacaaagaacaaaagaacaatctaagtccagtaagattaattcatggagcaagtgatttttaaataattatacaagtaatatatgatcaccatagaaaaagtagaaaaatataaagaagcacataaaaagttaaaagtatgagtctatttcatcctcatcatgtgagcaaacattcttatgtctgtgaaaaccaagtgtggatgagtttgtagaacatgaactcccatacgctattggttggattttgaatcactacagccactttggagaacagctgaggaatatccacgtaaagttgaagatgtgcccatgttatgacccagtagtttcacccctag

SEQ ID NO: 308231 - DNA, 1000 bp, Homo Sapiens
gatcaatggcatctagcactgtccagagggtccggatcactctcttctgcactgaggtgaggcagatgtcaaactcatagccagcatctcgtagcgcctgcccgccgcgcttcgcctcctcgtggcccgccgggctcagatcggcgtcgtaccagcagctgaagcggttctccaggttccatgtgctctcgccgtgccggatcagcaccagtttgtaggcggccatggcggtgggctgcaatactttttataccatttgaagtaaaaggtacaaaaggttatacgctgaaaattctttttcccacccttattccctaaccactcatttcccctcaccagaggaaccactgtttccatgggatatattagattgatttatatgaaattgccggtgtttgactatgatgatttcatgtggttcagcctaatatcagtgaaaaaacagagtcctatcttcatggagtttttattctagtgggaagtgtattacttaattattgcagtgtaacaaataaccccaaaatttagtggcttaaagcaacaaacatttattatctcacatttcctatgactcaataatttgggagcagcttagatgggtagttctggctcagggtgtctcatgaagttgtagtcaatatggtgtctggggatgtagtagtttaaaggcttaacttaggtctgaaggagcagtttccaaggtggttcacttacctggctattggcgggaggccttaggtctttgctggtttttgacatgaggcctcagttcctcaccatatgaacctctccataaggctgcttgtatgtcttcatacttggtaggtggcttcccccagattgcgtgattcaggagagaggacaacaaggaaaacacaatgcttttttctcctcttgcaatgttttttatgacctagtcttggaagtcacaccttgtcgcttctaccgtagtctattcattagaaacaagtcattaggccaggtgtggtggctcatgcct

SEQ ID NO: 308232 - DNA, 1000 bp, Homo Sapiens
caaacatttactgaacacaaacaccattttttccttttacacagcaagattgttagtttcaaattagctgagttattaggactgtcaattgccatgaaactaaaaatgactctacatgtcaaactcaaatagaaaatgtcatgcaatatataaatcactaatggacctctggtgcagtcagcaagtttactatgtttattaaagtcacataaatggtttgacaaaagtgcacaatagaatgacatcaccggtttgttataaatcacagtgaattactagaatacaacagtgtagttcctctgcacggaggattgcaggatggggtgaaaaggacagggtcttttccatcgattaggccagtcagattttactccccaactgtgtacctttgaaaagactgtgaggaaagctgagtttctttcctcatcttttctcctctaccagttactaagcaacaacaacaaaaagccatgcacaaattttacaacacctgataaaaaatagatacaaaatcttgttcatttcatcatttggcaagcttgcatcttcgctccttcacttttctgattaggccattcatcacatgactcaccctgaataaaagctgtaaataatttagcaatacttacccctatacacacatcaagatacactccccataaccatcaagtcactgtctcttccctacacattaacacaaaggtacacaccacaaacctagagaccacatttactttacagttttaaaaattaatatatctccactatcaatagtgtagtatttatttcagatcccttatttgggggagggcatgctgtataacccagcccatctaaagatttgggcaagtctgccagaaatacataagaaagccctgcaatgtgataaacacataggagttttctactttcaagagatgacatccagaacaaagctatgcattttcagagtaggaatggacacacagcttaaaacctctggactaaaaatatttcatag

SEQ ID NO: 308233 - DNA, 1000 bp, Homo Sapiens
aaagttcaaatcatttgagtaagagtttataaggacacaagtcaacctgaactaaatacatacatacttctgcacaaatgttgtttaccgtatgttgggtaatttggaggaaggtaaagtgattagggtctcaaaattttgtccaaagccttgctttcaagttctctaaaattggagccaatgatgcctcttgtatctgaggcaggcttaggagtctagtcccttctctcacccacacagggagaacacaggcagctcagaaacatttattattaattttttcagtcacagttttcatcttgagaaagtggcaccctcgggagagcgctgggaatgttcagagcctgaatatcatccactctccaagtcccagaaagaactcaacaaagtctcagtcctaatgaagcccaaaccaagtgacctcttagctgggaggctttgtgcattttaaaaaagactatgtaagcttgtttcccagaagctctttctgtctgaccccatctgtcatcccatctttttccctgatctgttgcataatagctgagggaaagttgtgttagagtgtccctccatcgctaggccagctcaactcaatggcgttagtatcctgttcaacacactccattctgtaaagggccatataaaaatgtggcctgtcagattcacaaaagtggtagttgattttattagactagtagttttaaggctagtagtttagccatttaaaatctatttcccaaaagaggggaaaactagtatttttcttctctttttaaaaattcattagccagttgctatcaaaaagcaaccttttgggttggtgaaggcaagagagttcttaaattactccactatgtagttatggccttcagcctaaggagataaggtacatttattgtgctgtctctcatcattggaaattttacaacataccatatacttaaaactagtaggcagacagaatttaaaagactcattttcgcagtatgcattctttccc

SEQ ID NO: 308234 - DNA, 1000 bp, Homo Sapiens
aaaataactgcatcctttaatggcagtaatacaattactggattaagagaccacaggagaaaggcaggtgacgtttctggaagacagatatggagtataaaaagggtgtgaaatagtcatgcggcgatcattgtaaaaatacagttcattatatacatatttgcaccaccaactctcaactctgaaacagtatttacacttttgttacaatcctggttagagaacaatttttctttaaaagctcggcctgatggcaaatgagaatttcgggtgaattcatagtcctatgaggttcttaggctgaatattccaagaggagggctccagcttctatttcatccacggatttcggtttaaaaaatatttttcttttacaaaagaaaattctcaaaaggagaggaaaaacaacaacaaaaaccacaacactgccacactgtgtattcatacttattttacaaacaccaagggctgtgccctctgcttcaaggccaacactggtggctgaagacaaatctcattaatgattgtgtaaaaaaaaaaaaaaaaaaaaaagacaaaaagacaaaccaaccaaccagatcccagcactgacccctcagggctgtgcagccctgtaggacaccctgcctcctggctccaaactatgagtttttcatttttctctttttggggtggggtgggataggagccttgttcaccccaccctgaggaggagggaaggggaatcccttggcaggtaactaggtctcttcatggtcagcaatgaagagcttggcctgcagccacatggtgggccagggagacgggcagatgcagccacaagcacacacttcctgaggcccctcaagtggcccagaggcaggatagcaggcctcccccagcaccccttgcgcccatctctcgggctgtgtccataggtgggcctcctccagggctctgcagatgaggctggccctcagccagggtgggagcatggggggagcagaggctccccatcccc

SEQ ID NO: 308235 - DNA, 1000 bp, Homo Sapiens
attttattttaagacagggtctctgtcacccaggctggagtgcagtggcgtgattatggctcatggcagccttgaccttcttgggctcaagcaatcctcccacctcagcctcccaagtagctgggactacaggcatgtgccaccatccctagctaatttttttagtttttgtagagacagggtctcactgtgttgctcaggctggtctcaaactcttgagcacaaaggatcctcctgcctcaaccttccaaagtgttaggattacaggtgtgagccaccacattcatttctttgttgcttttattctcaccacacatttataagagaaggcatgttcaatttcagtgggctatccaatttcagatgggagacatctaactgtaatgtgttgatttgagggaagaagctgtggtcactgcatctattcaaataaaatggattttctcttttaacattctttgggggctcagttaactatgtttaaaccctatttgaggaatcagtattcgttatggactgaatgtttgtgccccatcccctacattgaagccgtaacagccaatgtgatggggttagggggtggggcctttgttgggggtgactgggtttagataaagtcatgaggaaggaactctcatgatgggattcctgctctcgtaaaaagagacactctagggcttgctccctgccactgctgcctgcagaagtttctaaaccctttatgttccacatctgcctcctgtctcttcccatggctctctacagagctatttgtaacatgtctacctgacacttttggggatgtggtcagtaaaagaggaagaggggcctcaccacgaaccaaatttaccagcatgtggattgtgggacttcccagcttccagaactgtaagaaatgtctgcttttgaagccacccagtctgatattttgttatagaagcctgaagtatgatggtattttaatgtaaattttaatgtaaattttaatccacctgtgtat

SEQ ID NO: 308236 - DNA, 1000 bp, Homo Sapiens
ggtaaacattttataatttatatataaaatctcagtaagaaaccatgtaaaatgacagaaatatccaccttacattaagagtcaaaataaaaaaaaaaacccatacacactgaatgtaaattttaattataaaacaagaatatgaacaaaacattttaaaataatctcaattatttggcaactcatcacatcattgcaagagacaaatttgatcgtaagaagtttaatcttatgaaaaactgaagttggacagtttgctcatatgagagttaaaacatgtttaaaaaaacacttggcaataaagccagtttctatactgaaataactgtgtataaaacaacataaaatcctgaaactggatagacaggagggacctaatcttgaatgcatttctcttcactgaaaaagacaatatggaaagagtattggtagaagcttcagaacagcacagaagaggaatgaacacagagaagaggaatgaagagggatttctgctgcaggtgactgacgcaactttacctgaaccagaacctgttttgtgtcaacgtggctggtagtaaagtcacagatgcaagtataatctaaaaacaagttacattcttaaaaaacagagccacaactgtgaacagaaaagcaatgaagaacctttctttagctaaactactttacttggatacatgcgagtttctgccagatcatattaagatagttacagagcaggcagagtcctaaaaaattttctactaatgactgcatagcatttaaaaccctttttatttaaaaaaaaaaataaagtaaaataaacagatatatagtaaagttcacagataagttttctctgtaaaataaataaagtgttcattgattagcatcatacatagagtaaaatacaacctatttttacatgtttatatactatacacagattaccagtaggcagcctggcgtctgatgggctggaggggtttgcattcatgatgtgtcacattgggaaatccca

SEQ ID NO: 308237 - DNA, 631 bp, Homo Sapiens
gaattcctactgtgtgccaggaacatgcatcatcttagtcgatttcacactggattgctagccccattttatggatgaagaaactgaggctcagagggatgaaggaacttgctcagggtcacatagccaggaagtgacagtgggtcacagtctcccacctcttccccacactccatcccattccagaccaggggataggaccagaggaagaggcaagtatgggggaggtgatggaggaggaggagactggagggagggttggcctcttcttcactgttgggacatgaaggggtaaggaagggtcaacgctaacctgccaaacccccacgatggcattggcaatgaggatcaagaggatgacaaagggttcaacaaaggcagtgatggtctcttcaccttcctcaaaccaggccagcacctggggagcaggggaaaggagaatgacaggtaatgaggccccaaaacagatggagaaaggaagtggaccactgcaaaggggagaactgtgcaggagagtgcaggagccagcaggaggggccgggcaccgtcggggcgctgtggcccaccatccgtctgagggtctgtccatccactgcaggtcctgccaccgccttactcagcggatgggcgt

SEQ ID NO: 308238 - DNA, 1000 bp, Homo Sapiens
caaatatacaacttggaatggattttgaggcaaattgtgccataagcagattttaagtggctaaacaaagtttaaaaagcaagtaacaataaaagaaaatgtttctggtacaggaccagcagtacaaaaaaatagtgtacgagtacctggataatacacccgttttgcaatagtgcaacttttaagtacatattgttgactgtccatagtccacgcagagttacaactccacacttcaacaacaacatgctgacagttcctaaagaaaactactttaaaaaaggcataacccagatgttccctcatttgaccaactccatctaagtttagatgtgcagaagggcttagatatatccagagtaagccacatgcaacatgttacttgatcaattttctaaaataaggttttaggacaatgacagtaagataagggaagaaaacatggaggaatgaagtcctaattactatacatgcatatttttttgacagtagggagaaaccttttacagataagttacaaacaaagaaaaggcaaataaacaattttgtacaagaaatttaacacattctgtacaaggtcttcactttgctgtcatcatttgtacaaactctgaaaaagaagaagtacacaaaagagtaagtcaatagcaaaagaccaagaaaaaaatacactttactcaattgctgaatactctttccattcctctctttcctcagaattaccattaagtacagagggaagctagtttaattgcccaggctggaacttcattaaccataactattcaggtttattagtaagagccaaataacgctttagataggccaatataaaaaagagcattcttggctcttagtttagacgtgaattttaagtctgctggattacaagacaatattgtaaattcaatgctatgggctaggtttaatttttataacattacattttatgctcttttctaagttaagtagttacatcatgaaaaaaatacagagtttt

SEQ ID NO: 308239 - DNA, 1000 bp, Homo Sapiens
tcccgattggggtcagtgatctcatggtgagttggagggcttctcaagtgtttgaaggtaggtccgctggctcatttatggctccttggtcctagctttgagcttatctgactaaagtagacagagagatggaggggatcatagtggctgggtggcaggactagattgcagcttcagacagagcagcatctggaggcttccatggtgaattttagctccagatcaactgcaagaaaaaccagcaatcccaaaaggacccacagactctctgaaggaaccagactgctcctgcaggacccagaagacactccaaatactgtgagtgccccatttgcggaagtgggaaagggagaccctcctctcccaacacaatccccaatattgaatgggagaaatattcaatgaaatagcttaaagaaaaataattgaaaattcaggaaactttggacacacttttagaaatgtgaaatgctctggaaagtctcagcaatagaattggacaagtagaagaaagaaaatcagagctcatagacaaggtcttcaaattaaccctattcaacgaagacaaagaaaaaagtataagaaaatatgaacaaagcctccaagaagtctgggattatgttaaatgaccaaacctaagaataattggtgttcctgaggaagaagagaattctgaatcaaggaaaacttctgcagccatctagagtcctagacatccaaatacaagaagtacaaagaacacatgggaaattcattgtaaaaagatctttgcctcagcacattgtcatcaggttatccagagttgagacaaaggaaagaatcttaagagctgtgagacagaagaaccaggtaacctgtaaaggaaaaccaatcagatgaacagcagatttctcagcagaaaacctacaagctggaagggattggggccctgtcttccggctcctcaacaaaccaattatcagccaagaattttgtatccagtgaaactaagcaccatata

SEQ ID NO: 308240 - DNA, 1000 bp, Homo Sapiens
tggcaagatggaaacagaagcagcaaagaagtgccctgtgctggtgtgcgagaaaaatgtacagagacagtaaggatggaccaagagtgattccaaggtggtaactgagcacctgagcccgtctctgtcagatacattttacttttctttgttatttgctatccttatggtaatggatccagagcattatccagtcttaccctaataccgctgcctttgctctcttttaagatttcaaagttttcttcttaaatatactctattgaggagaaaatcgccagcaaggcagtgtgaggtcttctgcacttgccagtgtctgttgggagacagtattccagtgaatatcacaggaagatatccctgatcccttctttaggggagcagcttccccacaggcagctcatttttcagagcaagaatagggctctatcttatctttttctttctgtttcttctttgtgctgttccttggccctttacttgaaaacaatacttaatagtatatccatatttctttcaagtagttttatgaattacaaataaaactaaagacaccaatggacaccaatgaataagtctttcatttatatctgattagggaaagaaactaaagacaatggaatagaactgacattctctttagaggcaaaatgcatttttggaacaaaaatacatacatttggagtcttttgattacatctttttaaaataaataatctgaaccatgactgacatttacaagactggaggttctctcgtgaaaaagaggaaagttttctaatcaaaattgtggacacatttttttctttttttcaagacggagtcttgctctgtcacccaggctgaagtgcagtggtgcaatctcagctcactgcaacctctgcctcctgcgttcaagcaattctcctgcctcagcctcccgagtagctgtgattacaggcgtctgccaccacacctggctaatttttgtatttttagtagagacggggtttcaccatgt

SEQ ID NO: 308241 - DNA, 1000 bp, Homo Sapiens
aacacccaaatcaagctgaagttttatttaaaatgtaaaagaaatgttcccccaaaatgctggtgaataaagcaaaaggataccatacagtgctctcttcctacgagttagccagcctatccaagtacagggcgatatacagtacttaatgctggtagaatttcacagtagtttagtgttaaagattatctgtgcctagattatgaagagattctcagtgtgtgatgtttagttcagggtttacatcttactgggcatgaacaagagcccctgctccttggccatagccaaatcccttgggcccaaagttctttgcatagcatcctacaaaggaaagggaggaaggatagttagtgcaagtccattaagctttgctagcactgcttaagacccactcaacaaacccccataaattaaactgctgtgtaaaagagctcaacttatttaagatgttaaatgtgtcatgtactaaatatcttaaagctgcaaagacaagtccacacattctggccctatagtgttcagcgtggtcctgctgagttgcaagcatgagtcaggccaggtaaggtatgtatttgtctgttttcttccatatacttacgctttgctcaagacatgaaggcaaaagatggctatttgtggtgtttttatctggtggggagttttaaatgatcaggaacttaactgtggttctctgtcatctataagcatcttgggatattttattttcagaaaatagtggcatacttttctttttttttttttaatgccagtgacatttcattaaacaagaaccagtgtggatattcatatggacagcagtaactgaaatgaattttacctttacaatagatttcaccttctttttcagtcagagttgttgattcaagactcttcccacactttgcacatcggaaacagtttttgtgccagggctggaagagatgaatgtgtcagcatgtttgagaggcctgtttcctacagttcaatttagatgtat

SEQ ID NO: 308242 - DNA, 1000 bp, Homo Sapiens
tactgtattccatgcatactcttctttaccttcattgtggagcagtagactgatttcatcttgatagtctgggtcagtcaccccagctaacactgtaactcccttcttagcctgttgacttaaaggtaggaggagcccaaagtgtccaggtggcaatcttaacatccagtttaatggaattattgttgtgtttcctggtggcagcattcctccctctggaactaagacctctaggcgagcagaacataatgtcgcggtaccaggaagcaaaaattttgctggtggatcactaagggtgatggtgagtgctgccacttcgacttccaccccttgattcctggaccagtgaatcttggctatgggagaaacagtaccatatataggacgccgattcagagcatacacagccttccagaggactttgccccagccctgcaaagtattgtcacctagttggcattttaattgtgacttcaaaaggccattctgccattctgtcaatccagctgcttcaggatgatggggaacatggtaagaccagtgaattccatgagcatgagcccactgccacacttctttggccacaaagtgagtgccttggtcagaggcaatgctgtgtgggataccatgacagtggaccgggcattctgtgagtccatggatggtagtcttggcagaagcattgtgtgcaggacaggcaaactcatatctggagtacatgtctattccagtgaggacaaacctctgccctttccgtgatggaacaggtccaatataatcaacctgccaccaggtagatggctgatcacctcaaggaatggtgccatattgagggctcagcatcagtctctgcttctggcaaatcgggcactcagcagtggctgtagctaggtcagccttggtgagtggaagtccatgttgctgagcccatgcgtaacctccatccctgccacaatggccactttgtttatgggcccattgggtgatgacgggggtggct

SEQ ID NO: 308243 - DNA, 1000 bp, Homo Sapiens
ttttttttttttttttttttttttttttttttaaggattcacaaactatggcattttatttcagagcctttgcttacatttgtacaatatattacataattcttcattgtttgcagatcctaatatatactttatagcttttattctataagcttttttcttcaacattttgctgtcaacaaatctttacagtcctgtacaaatttgaataacttgaaaccattttcaacaaaattagttactgtaagcacacactacaagactgaaaatgcttttcttagaaaagttgaatgtaaaggattctgacacgttagcatctacaacaaaacgcattgaaattcccacgtcgtattgccaggaaacaaagaaaacatgccagccccatccaaaaaaagtacacagaactacaattaaaacagtaaaacagtctgtacaataaagtactgtgtattaacagtgccagatattaaatagcttgaatgaacacatccacaatatacaaatgtcttacaaaggtgaagaattaaatacaagtgccaaacagaacagagattggaatccatacaacataaagtcaatacaagtgaaaacaattttgcattcattttggatcttatacaaggcatttaattttataggcctaccacccccattagctatttatatttaaaataaccaccatccttttgagacagtcctatcaacaatcttgaaccatactaatacattacttgttcctgaagtccttttgttgtagctcataataaaataagcaatacaaatgaattatctgtatttaagggaaaagaaacatttacaagaaaacacaaaaatataattcattatgaataaatatacactttgaactggctaagtacaatctttatacattgtttaagatttaatacagtttattaggccattttcttttttcacacaatgtatatcaaaattaaaaaaaaatactgatttatagaaaaatggcaaagtacagtagttc

SEQ ID NO: 308244 - DNA, 1000 bp, Homo Sapiens
gatctttagaggaggtgacatatccagttaatcttagtgaagtttgaggcgattagtttgttattcactcttccagccaactttttcctattgagggtttggagagtgaagtggggtgaaggcaacaccattcttattgctaaaataatttaataaggatagttatataaacaaagcattaagctgtgaagagaaattgcccataaagtataacctactaattttctgatcctccttctgttttacaagattgatatttggaaggtgattattttactctttcaggatttgacctttgataggaatcaactccctaaggaatagtttggttaaactaaaccttaactgaattccaagttagtaaggaactcatcctcaatagggaagagaaaaaattgcagtgttttatttttttttccagtcagaacagtgtataactacattctacagttaagcaatattagatgtagtctttgggattctgatatattctcagtttactgcttagtgctgtagtatttttccattatgtgctgctgcaagaattcaatcttcccaggatggcatattgaacacaccttccatgtggagagtaatgccatgtcctgaagatagtcccctccattctcaacatttttaacacacatcatctaatgttgacatcaaggacatggagagggccttagtcatcactgtccttggtgggggacacttagagtactttgggactcaacctcaggcatttcctcatcattctttgtcactctcattctatagcaagtcagcatatctgctactgttccagagtttgacccaattatagtagaatttcaaaggttgtggtatcaaaattaaaattctggtactcaagaatgtgtttataactttagtgatacacatagaactaactgttggatggagaaagttcgttagcccactcacttctgtgtcaaggtctttattataggaaaagcttaattcccattgtgaatgggcaaca

SEQ ID NO: 308245 - DNA, 1000 bp, Homo Sapiens
tttgtaagtattctattttatttatatgtgtttgtgtttctgagtatgtcctgagttgcacgataatactatatttcttattgggtaacattgtcagaaaagtttctaaaaactttctctgctgcacttattttatacattttatttatgttaataatctcacatttaacacacttatgatttattctcaacagaaaaaggtggtatttctttcatttagtcttttaaaaagctcacattatcaaatgattgctcaatcatttaatctctttgcttctcttatatgcattgatttaataaatatgtatactagtttctccatcgattctttagatttgaaacttattttccttttattcttacaaaactgacttgtctataggcccacttctacttcctttattctatcatcttcctcaacttattctgtggtcaaagaatggagaaataatattaataatatgtttttctcatcaatgacttccacctgttctctgagaaattcagcttcaagaactttagtttgatatgactgcaaagataatacacagtctaaatcataaaaatgtctcaaaggttttttttttatttgtttctttgaaatatccatgaacaggcatgtttctcccctgtagtgcaatttgtgtgaaattctggcatgcacttaagaggatgtcctaaaataccaatatttaattgattctaagtcatgtattgtatcacatttttgcccatggattgttgaaatccatggacaaaactgatagcattttagaacttcctttgtctagtggcagtcttgatatattcacactatctattgacaaaaaatctaaagcaccaggctcaaagcttgtagagtaggtgtcagtgatttggaggacatctctagggcaatagtagaggcatttttaacccctaacaactaaatgatcatcagaagtgagtgatatcctcactcatgaccccaactgctctaatttctattgttttcttgcag

SEQ ID NO: 308246 - DNA, 1000 bp, Homo Sapiens
agctactcaggaggctgagaggggaggattgcttgagcccaggaggcggaggttgcagtgagccgggattgtgccactgaacttcagcctggtcaacagagcgagactccgtcaacaacaacaacaacaaaaaagtgttctgcaaaacaacaaagtttttcctctattcttctaaacattattataaaaacattaactcatttttttaaggaagaaaaagactaaagctccgtttgatcaaccctgcaggaataagagtactatatgggccaggtgtgatggctcacacctgtaatcctagcattttgggagactgaggtgagtggatcacctgaggtcgggagttccagaccagcctggccaacatggcgaagcctgtctccagtaaaaatacaaaaattagccgggcatggtggcaggtgcctataatcttagctactcagagcctgaggcaagagaatcgcttgaacacagggggcagaggttgcagtgagccaagatcgcaccacttcactctagcctgggcaaaagagtgaaactccatctcaaaaaaaaaaaaagtactgtatatagttttcaatttttcctactatgtatttcttagcgcgttttccatgttaaagcagagttcttgttctttttatttttacctctttgtggtattgcagaggatggatatagcgtagctaatttacccagtgccctgctgatagtcatttattttactaatgaacatcctcatatgggctttccagttattatgagatctttttatagtcaactcacatacagctatctcttttaaaaagtatttattattataattatatatatatatatttatttatttgaagcaggttcttgctctgttccccaggctggagtgtggtggtgtggagcactgcagcctcgacctcctgtgctcagacagtccttccatctcagcctcctaagaagctaggaccacaggcacacactactacacccagataattttttt

SEQ ID NO: 308247 - DNA, 1000 bp, Homo Sapiens
aaaatagtagttttaaggaaactcagtgatctccaagataacaaagaaaagcaattcagaaatttaggagaaataattaacgaagacattgaaataatctaaaaagtcaaatagaaaccttggaaatgagagatatatttgctgaactgaaaaattcattacaggctttcaacagcaaaataaataaagcagaggtaagaatcaatgaacctgaagacagctatttgaaagtacacaaaggagaaaaaagagagaagaatgaaaaggaatgacgataacctataagatatagaaaattacctcaaaagaccaaatctaagaattactggtgtttaagagggagttaagcaagcaccaggggtaggaagctgttcaaaaaataataacagaaaaatttccaaaacttgaagaagagataaatattcagatacaggaaagttagagaacaccaaagagatctgacccaaataggactaccctgacacatataataatcaaaactcttaaaggtcaaggacaaaaagaggaccctaaaagtggcaagagaaaataggcagacatgtaaagcagctccagttcatctggcaacagaattcttaagggaaactcaacaggccaggagtgagtggtatgacattttgaaagtgttgaacagaaaaaaaaaatcctcaactgtcatccaagaataatgtatccagcaaaactgaacttcaaatatgaaggagaaataaatctctcccaaacaaaagctgagagaattcaccaccaccacatctgtcttacaagaaatgctaaagggagctcttcaaactgaaagaaaaaaacactcacgtataaaaagaaaacatctgaaagtataaaacctagggtaaaattaagtacacagacaaaccaaaatattgcaatgctataactgcagtgtgcaacccactcataactttagtatgaagcacaaagacaaaactaccaaaatcaattaatagctacagcaactgattat

SEQ ID NO: 308248 - DNA, 1000 bp, Homo Sapiens
aagcttcagagccctgccctgcagggagtagaaacccatagatgctgagtgccagggctactgttccacagggaggggctggggagggctgcctgtgcttacccctgatggtttctcttttcacaggtgtctgagagacggggctggagacgtggcttttatcagagagagcacagtgtttggtaagagcagggtaatgagccgtgggtactgaccccttttatcttacttgatcatgactctgacctttgagctaattagattcctaagttcatggcagaccattttcaagattcctacagggcacagctctgattttatgatctttcatattttaaatgatcagttttcttcaaacctcctgtgcctactgcctttctcttcccctcatagacacccatgcctaggtgcttggcaatgcgtcctccagtcctccaagacacatgtgctcatgcagaacagattgtgctggtttgtgtttccggtttctgggttcatagaggttttagtgagcattagaaatcctgctacttgggttttctgctcagcattttgttttagaggtttatcggtattgttgtatacatgtctagctcaggggtcctaacagttgaggagtgttccgtggaatacatccaccttttacttctctgtcaccatagtgatggacagaggttgtgctctcttttcctctaccacatgcagccacacgactgataccttcacctgtgttccttacttacctgctggacagcgtccctcctggacttataataaagcagttgatgagtatgtagaggctaaacacactgcacccaggactagtggacataagctcactacatttcatgcaagaccaatagagacagggctactatattccacccagggccactagagaaagtgacagacacccacattcactcaggaccatcagagacacaccccacatccacccaggaccaccagagaaagagacaacacccacattcacctagga

SEQ ID NO: 308249 - DNA, 1000 bp, Homo Sapiens
gaattcttacaaggcatgggtgattagtaaagagggaaaaataattagacctactatgtgcagagcactctggtggaaattggaaaatcagatatttacttcagagcaattaaaactacaaacataaacactcattaactttgttcattttacaaatatttattaaggccctactatgtaccacctatggtgataagtgttgaaaatattgtaaaaaccggtcatgtttcctgccttcactgcacttcaataaaagcgtcatatggtaatcaatcacacaaataaaatagcaactatggccgggtgcagtggctcatgcctgtaatcccagtactttgggaggctgaagtgggctgatcacaaggtcaggagttctagaccagcctgacaacatggtgaaacctcgtctctactaaaaatacaaaaattagcctggcgtggtggtgcgcgcatgtaatcccagctacttaggaggctgaggcaggagaattgcttgaacccgggaggcggaggttgcagtgagctgagattgtgctactgcactgcagcctgggtgacagaatgagactctgcctcaaaaaaaaaaaaaaaagtgcaactgtgactagtacgacaaaaagagacagggtactatagaaggctaaagatcttgggggtcaaggaagatggtacacaattctgtgtaattaaatgttcaatgatgtgggatggactcaagtggagaagcagctcagaaaaagaagggttcagagagttttatattagttaaaaataatttttttttagacagtctcgctttatcacccaggctggagtgcaggggctcagtctcagctcactgcaacctccatctgccgagttcaagtgattatcgtgcctcagcctctggagtagctgggattacaggtgtgtgccaccacacccaggtaatttttgtacttttagtagagacggggtttcaccatgtttgccaggctggtcttgaactcctcacctcagg

SEQ ID NO: 308250 - DNA, 1000 bp, Homo Sapiens
ccatccccccacccccactcacggcccgagacgtgcaggctggcggagcagagggcctggccggcagcgttgctggcaatgcatgtgtaggtgccctggtgctgccggcccacgtccagcaggaccaggctgtgctgctgcgcagagctggccacggtgtagcccggtgtgtcagggccaatccacagcacgcctctctcagcctcctccctgagccagtgcacggtgggcaccgggcgtcctaggggcaggcaggaggtggtgggtgcaccccgccaggagcggggtctctggagataaagccctgccacaggccttccctcgggatgatgtgagtggggagggggcacctctgtcccatcccccaggggtgatctttccatagctgcgggcaggaaacgccttaccttctaccttcacagagaaggtgatgctggagcctttcttcactttcttgggggtgaacctctccagcattcggggcggcaccagctgctcatgcacatctaggggacacaggctggctggcagagacctcggcacagcccccaccgcccgcctcctggccccggatgatgtctgcagacgcccaggtggctctccacagccagcacctggacagcaccacgcttccccctcggccgggctgtctccttgctgcgccctccctgagccagcccatggccacccacacctccactgcagccagccctaggctcaggccctcagcacccatggccacctggcctctccctgcctgtctggggctgcctcacctgatgcaggcttctcttctggctcatcagggcctgaaagaggcactagagtcagacacccagcacacacaggcccccaccgtggctcctacccggcgctgtgcgggtgcctggcagttctgccccctacagtgagggaacccaagggcagcgctgctccccaagcaaacgccctaacccctgcctgaaacctgggccttggagccctggaactctacacactc

SEQ ID NO: 308251 - DNA, 1000 bp, Homo Sapiens
aagaagggcccgcagggcgacagggagggccctcaggaggatcccagggctgctgctgaggccgggcagcgtcctaggcctcaaggacactcctttctccccgctgccccaagccaccatggcagcagcatcagggctgtgccgcctcatccccatccctgtctgggcagatgtgaagggtgaccgtctcccccactgtcccgaagttgacggtctgggtggaaagctctgtggtgaagctgctctggccactgtccgcagaacgccggatgcgggtgcagaaagactgcgtccagggagcactgcccacaggccgagccggggcctcccgcaagaggaaggaggtgccctcaaggctacggacctggggtcccggtggtgacgccccacggggctcaggcctaaagaggccgagagggcctcggggacccagtgcatgccccacgctgagcagcacaggctgccccaccgtgggctccccgatctctctctggatcaccgagacctcgcagggagggtcatcaggggcgccaggcccagggccaccacagtggaaggtctccccttccccaggcacgtaatcttccaggtcagccagtgtcagcatgcggccgttgtgcgtgaggatcttggggtcacgatccccaaggctgtgtgtgtcctgggactcctccgtcacaaaggcgtctccgtcttccccctcttcctctcccgcctcctccatggtgccctcctcctccaggctgcccatgccagaagcagcccagtccacactgcctctggcatccacgcggaagacaaggggctctctgacgccgaccatggctgtgccctgggcccaggcctcctgggccagcagcttgttgttggagttgttggaattggggtcccctccgggggtcgcaccgggcagtgtgaagagatgccccgatgagctcctgggcacctctgtggtgggagacacaccctgcgggcccatcttcttcacccggacttcaat

SEQ ID NO: 308252 - DNA, 1000 bp, Homo Sapiens
ttttttttttttttttttttttttttttttttaaaagatatatggatgtgaggttgaaaccctcataagaggttacgttagggggaagcccagaccttactgatgttgttcacttctgggataattctaagtactaagctacatctccaattatttctttctttattttcctggatccagggccagacctgtttccttccgggcttctaccttctattacttcaaaggcgggttttccaccccaatagacccactatgaagaatgcagtttcacagcttgacctcagccctcctattcctgaaagaaaccttcctttattttgagaatttcaaagagtttttatagctaacaacaatgagaaaaacacagggggtaaaatgacatactagacaaaagtcacaaactttcaaatcagatcaaacgggggaaaaaagaccatttctggttttcattagcatgtaaatggtagtagattctagtcttccaccatccaaattttccacagctgtcttctacctcctctctccatgatgtagcttcctccaccccccatccttctaccccatcacttattacataacacaaggaaagacaaaagccacatgggtgagaagggtgggtctttttagtacacaaagaactgaagtgaggttcatctacatttcagaggaaaccccagatgatattcgtctctttacaaagaaacgttatcattaaagagttcctttggaatagatgctgagcttaagatgtttaggatgaggccctaagtttaaggctaaaagaatcaggggtatttatattttctttgtgtgtcagtatgtttggggacatggtagtgggaacagggagaaaatgaagtcatagggagcattcagtcttttcttcttatataaaaagatgagcctgcataataccttatttggttaacaactgaaaacagatgattaatgggggaacttgtgtacttatagagatactataggtatatagtacgtc

SEQ ID NO: 308253 - DNA, 1000 bp, Homo Sapiens
ctaccagctatctcatttccctggtctaccaagtcagttctaatttgatgtattatcaacttttcagacacttggactccgtggagcaagagcggtgaggttgcatgctgtttctacattatctacaaggccccaaacatttgtatcacccatgtatctatatattactgaaaaaataaataagtaaataattatataggatacactgatagtttctgttttacactggggtaggaaaggggttagtgattaatgctggtcgtaaatcactaaagggttgcaatccacaatttgcaaaacagatctatttcaatgtctcacttcgcagataaggaaacacagacctgtagatatgccattataccatctccaatctttagtgttacctttcatttacccaattcctgccatgcaatcctaaacaaccctccacaatataaccccaaatgacttacattaataagctctacattctcttacaacaaactggcttccaccaaagaccacagaacaggacaaccaaaccaccaatcttaaaaggtctcgctgctgaagaaagtgacacactttcttctagagtgcaaaatttccaagacaagatggattagatagatccctcattacacatccaattgagtgtaaaaatcggtaacccaggaatgcacattctagcctgttaacgaggaggaaaaatagaggagatatagttggaaaaaggatagaagtacactaaaaaagtaataaaactattgtacacttctcttgattgcagcaaataattcaaattaggctgcttataggtaagaatcacaatgagcagcattatttgttaaacagtttaattcccaaagctagtaattttagttaaatatacattagagcctttttagatggctgctaataaacactatgtcaaaatgtgtagttttaaactcagactcgaaagccaagataagcaactccttcagttattactctgaccaaggcataagaattcact

SEQ ID NO: 308254 - DNA, 1000 bp, Homo Sapiens
ctatatgtgcactcatccaccaatcctctggagaaaggcgagtctctttgggcgctgtcaccaacaagtacgagcaagggacgcgacaggcggggccacaagccaatagcgagggagaaacctcgaagatggacgaggtaaggagccattaaagagcaagctcctgaagacagggggcggtacactgccgacaggcgtatgtatccaccaataaaatctcgacaccccatgaccccgccttttgactcataaacatctaatcaggtgagtgatggaggcgggtcaaagtgaaactttaaccagtactgcgaaaatacggtacttgactggcaggcaaggaggggttgaaggaagccttaggaaggccgctactgaccttcgcccctccccctggacttggctggggctggctctagtgccctgccttctatgacaaattcgcgggcgtaaagggaaatacctcttctagggatccggagcctgggaatttaagtaaccctgacatcagcgcttcctccttttagtgaggcttcagtggacaggcgtatttggggtggccgcgggcggtctgagatgttttttggtggaatgagacaatggcaactacaagaagtggtagcttggagacgctttttcagaatcgtatgtaaatgtaaataaaagaatctttggaaaacttttctgtctgtgatatgaaacagaaaggaaaaacggcgggcttactgggaaatgcagtgtcgaaaggcaaattccccgggagccctcttcctgccgctatgtatgtgcatgggtgtgtgtatgtatggggtgtgtgtgcatatatggtgtgtatgtggtgtgtgtgtatttggtatatgtatacgtggtgtgtgtggtatatgtgtgtatatgatgtgtgtgtggtgtgtgtatgtgatgtgtgtgtggtgtggtgtgtgtgtggtatgttggctgggggaaaggaggtttgctggtgtgtggagaaagtgaagtaggaagt

SEQ ID NO: 308255 - DNA, 1000 bp, Homo Sapiens; identical to SEQ ID NO: 119921

SEQ ID NO: 308256 - DNA, 1000 bp, Homo Sapiens
aagctttcctaagtcacaagaattcaatgtggttgctgttctggagacagttaccattttgggctatatatactaaaacccacgtattcaaaggcaaaatatgggggttgagagcaggaggactaagaaaagaaaatgttatcttttactgcagacctgccaaaaaaaagactccattacttactttggtactattgctagagacgttgtttctgccagaccacaggttggctatatggttgttccttttatatttcctttttcaaatgatgacaaactttcccaattaaattgttcaaccaaataagcagacacctttaaattaccatatattttttagttgcttgaaagaaattaattattttcttaattggtttagcagccttgtgtctggaaaagcagtaaaacctgctttgttccaaaattagaacacttgactcagaggctgcttgtaagacacttggctatcttttatcaccaatcagtcacaaaggtgaacctccatgaactctgtaacgtaataaatgtaaaaatggcctcattgaccaatacacaatattaagccagcaaaaccaaaaaagtaccctcataagtgggaactggcttgtataaaacaagaggatatacatccgcttacataaaacaagagaaatatgtacggtaataaaaataatctttaataaacttgtatagagaggattccggtttacatgtaagtctgctttaaataaccacagctgaatgactggaaatgttcttttcttaacacaatgcccattcattataagttaagctggtcctagtttcttacaaatctcttatttccttgaatttatctactacaccctcactgtgatgccctttaacttataagctgggcctgcccagcctgcttataaagcccctcttcagaaatgtaccaggtgtattaaacagaggcatcatttaatggaaatctgcacttcaaaacagcacttgaaggaccagccattggccctcc

SEQ ID NO: 308257 - DNA, 1000 bp, Homo Sapiens; identical to SEQ ID NO: 119922

SEQ ID NO: 308258 - DNA, 1000 bp, Homo Sapiens
gatcacgccactttactccagcctgggcgacagagtgaaactgtctccaaaaaaaaaaaaaaatttgcttaagtttaaggccaggtgtggtagttcatgcctgtaatcccatcactttgggagcctgaggcaggatcacttgaggtcaagagttcaagaccagcctgggcaacatagcaagaccctgtctctacagaaaatttttaaaaattggccagcatggtggcacatgcctgtaatcccagcactttggggaggctgacttgggaggatcacctgaggccaggagtttgagatcaggctgggcaacatactgagaccccgtctctacaaaaaacaaaaatcaaaaaattagctgggcatggtggtgtgtgcctacagtcccagctgctccagaggctgaggcgggaggactgcttgaacccgggagtttgaggctgcagagagctatgatcgcactgcactgcctggatgacagaatgagaccctttctctaaaacaaaaaaaattttttttgcttaaatcatgtagtgttgtaaaccttgtttggtttcttaactttttcacttaacatttttttttcttttttttttgagacagagtctcactctgtcgcccaggctggagtgcagtggcgtgatctcagctcactgcaacctccacttcttgggtttaagcgattctcatgcctcagtctcctgagtagctgggattacaggcgatcaccaccatgcccagctaatttttgtatttttagtagagaactgggttttaccatgttggccaggctgatctggaactcctgacctcaagtgatccactcgtcttggcctcccaaagtgctgggattacaggcgtaatcactgcgcctagccaagatttggtttttttagagggctttacttccatgtgactagtatcttgtactgttggacatttttaccatgtgtatggattatacttacaaaagaaaagaacaacataaataaaaataaactaa

SEQ ID NO: 308259 - DNA, 1000 bp, Homo Sapiens
ctaatctaagcgtcgggtgaagttctctggaaagaggcctttgtaggtggcaaggtctctgtactgaagccagtctgattccttcactcccaccagccagcctgcatcctgatcagcttctgaatctgaggggaccaccagcaccacatcacccctttgtaaggtaagttcatcagaatttgctgcctcaaaatcatgcagtgtttccaccttgtagagaaagccaggaggcaattcctgagaggcctcccttgcagatgctagctggtcagcagcccccatggctggtgcagaaggcgtgggctgagggtcctggataggcttctgctccgtagccagctccggtgtctcgctggtggggcccggaggagccgcgtcctcggtggtctccttgggctctgcacctatagttatttcgttttctccttcctcttcatggttggaggcaggctctatgaccaccgaaggaatgaccttctcctgaggcactgttgcttcgagctcctctgcttcaggttgggcactctctgcaccctcagtggtttcagttccaattttggcctcctctaaacttactccttccccggcagggacagtggccttctccgcctctgcttcctctcctggggccccctcagctgctgacaccaaggttccaacagctgcatcagcatcagctccaggtatgatcaagttgcagatcatactctggtctgtctgcattgtgaataatgaagtatcctggggctgtgtgaatccattaaatgaaccaccagaagccttttgacacgcctccacacctgcccacagagaatcttctatcttctgtttctcttcctcttcatctgacttcttcatatcttcatgactttctttgaacaggccagctgtgtccatggctggcatgtctgagtcaagtgggtcatacagctgctccatctccacacaagcagcaatggcaactccagcctccggcgcaggctttgggggcagttgttca

SEQ ID NO: 308260 - DNA, 1000 bp, Homo Sapiens
gaattcagtatggaaaggcagcagagagtaactttacagtgagaagacccgacaaacatgacctcagccaaagggtcaagctcaccatcaacgatgagtcatgttgctagcatgtgatgagaaccacacatgatacgatgtgatcagaaccacatttcacctctagtcttcctctccataacccacaatcccagtctactcatgagaaaagcatcagacaaaccccaactgagggatgttctacagatacctgatcagtcctcctcaaaactgtcagggtcatcaagaacaaggaaaatctaagaagatgtcacagccaagaggcatctaaggagacatgacaactagttgtaatgggttatcctggatgggatcctgggacagaaaaaggacattaggtaaaactgagaaaatgtgaacgcagtataataatgcatcagtattggtcattcacggtgacaaatgtgctatctgatgtaacacgttaacaagaagggaaactgggtacaagatacatgggaactccctattgtatgttcacaatgactctgtacatctaaaactgttctgaaaagtttatttttaaaaaacttagagagagagagagagagaatcaaaataacctatgaagatttatagaaaacacaccaggtaaggaagggttctttcaaagcaaccacaggaacagttacgataacttaaaaagaaatgctttccacactgaactgacagcgctgcagaccacgcctgagtggggacggcagccccaagcccaggggcaagcgcccacaggctggacccaggccaggcacacctggggagtctcttactgctgaaaacctcagccatctcacttcatgtacttatcctgctggtcagccaggattttggcggaggacttggcatcatagaaaagttcactgatctcttcgacatgctctttctcaatgctgtccttcccgttgattttagcaagcaagttggccggggtcagcagctg

SEQ ID NO: 308261 - DNA, 1000 bp, Homo Sapiens
  misc_feature (13)..(13): n is a, c, g, or t
  misc_feature (55)..(55): n is a, c, g, or t
  misc_feature (138)..(138): n is a, c, g, or t
  misc_feature (162)..(162): n is a, c, g, or t
  misc_feature (328)..(328): n is a, c, g, or t
  misc_feature (937)..(937): n is a, c, g, or t
tcatattggtggnaagcgactaccaggattagacagcctattggcccggttcttnatcgattgaaaggtggatatttggggcattcatgatcccctaaatttccccatgtatggattggatcctaagaggtttgccanacctcccagtttcagttcatggtnttaacgtttggccttatggcctggttttgtgatacctagtatatgcctggacttgtgctcctagaatgaaggcattcaggccaaccacaaggcaaagggccctgggccttggttcaatcttagcaagactgacctgacctgccaggtttgtctcatcaagacttgnttatgaccaatcactacgtccacagaacaccagcaagtttattgagtaattaaggtgacagccatagaactttgcaaatgcgtttccataaaagttctgagttacttgactatgaaaagtgaattttcattttaaccaaccccctcctccaatactaccagaaagcatgagattctgaagaagaatcttcacaaatctactcttaattatggtagcaatgttccagtctcaattaggttctgctgggttcctggagttgggagtgaagtggctcttgagtggctcccagcacttgtggtagttctcatccaaacacctggaggccttgagtccccactttgtgaccgccagacttaaagatgattcaaacataaatgcctggaggaagtgacgatggggatgagaaaaaagaggtgagatagataataaacacatttgattagatgtcaacagaaggtatgggtaggtgaaattttccaataacaaatcaaagatttgtgtgctagagtggtgaggagagcaggctcaagccctgagttgtggctctggtcctaccatttgtaagctggtgagacctggtacaagaccttaacttctcagggcctcaantttcattctgtaaaataaaattcacccttaacctcaaattatcttcatggtattacggaacta

SEQ ID NO: 308262 - DNA, 773 bp, Homo Sapiens
  misc_feature (4)..(4): n is a, c, g, or t
  misc_feature (6)..(6): n is a, c, g, or t
  misc_feature (18)..(18): n is a, c, g, or t
  misc_feature (67)..(67): n is a, c, g, or t
  misc_feature (526)..(526): n is a, c, g, or t
  misc_feature (557)..(557): n is a, c, g, or t
aatntncctagggaacantaagaaaggcatgagagggaaagagacagagaaggaatgcagagagaancaggcacaagacacaaaccagatctctcagacctgcctcctgtcctgcttctcgacttccccagcacacgcatgtcccactgtcttgtcctcgcggcctctccactcagcgtgtacggttggcttctggtgagagaggaggggagaaaaggcagccagagggagacacagctgcctcacctttgctgagctgttgggttttattgatctgttttgtgtctgcacttcggcctgttctgtcctgattatgtccactgctttgagtcctgacccttatttctggtccctgaagttattttttcctcgtggttctgcaaaacctcctcttaggcttctgagggtctacatgtgtttgccacaccctggagtttcagattgactccagtatcttcctgtctttccaggtgctttgtggcttctctagccagaacctaaccctagggtttctgaccatctttgnttagacgcggcaatcacgatgcctgcctcanccagtgcccgtcctgagggagcctgccttgggcagccatgttttgttctgggtgacattgactccctactggccttcctcatcccatgggggacctgaccagaacccagggcagctgtggtgtgggaaggccaggggcctatgaggttgtctggtgggaaaagctttgtccgaataggggagagcaggataatcagattccttaccttcggaattc

SEQ ID NO: 308263 - DNA, 1000 bp, Homo Sapiens
agcgcctcctctttatgcgcacacggtagggcccgctccgcagtctgcacccgacccaggtgcttttctaccctcctgcaattctttcaacctccaggaccagggaagggtagtctgtgattggcaggaggcacctcacatgggctgagctttccgctgcctgccctgcctcgctgaggcgggggagtaaccggaggctgtcagttgatttctgctgctttggaatgtgtgactctgacagatggaagcaccttgacagccacactcatcgctttcctggatccctcctaggtttgggctttactggaatacaaactcagggattttattttgatttgatttgatttgatttgtgtaatttgatccttactcctgcttttgtgtgttgaaggcttgttagtcctgaccgctcacagcgatgctgatatgtgcttacctgtgtagggccatgtccagttttagtttctataacttgcatatgccaaattcagagagacagtaattgcccaagtaatgctcatactgtaggtggcccaaagactgataaggagcaagagatgtggaaagaaacagattgggaaaaattcacggagagagagggctcaagtgattatctgatgtccaattcttccctcccctcttcttccctccctttctcttctcttcccttcccttcttttttccttcttccctgacttctggagccatcatgtgttatacatggcacccagaacattattttaatggctgcataacctatcatggtatacatgcgccatcgcttgtttaacctgagttaggaatcggtaaccgcagtaatgttagaatttactgagtgcttttaccaatagacttgggagttcctcaaaggtcagcatcatctctgttgcaggttaggttgttcaggagcagactttgagacaaaatttagtgtgcaatatatttattagacagtgccctgagattaacacccatggcagggagaggggagaaacaggac

SEQ ID NO: 308264 - DNA, 1000 bp, Homo Sapiens
acaaagaaatcctccacaaggaggacctacccgcccctctcggtgagcccctagcccctagcccctgtctgtcttccctcctggtggcttctctatgtccccatctcagtgtcccccatctttccccctaggtgcccccaacacaggcacagctggtgacgcagaacaggtgaggatgggctgtgcttcggctcctggggtgggcgtggggactgcatgggcctgggggactgagcagcatccccggcccctccccaggcccttcgccgcagcagctcactctccaagatccgtgagtctatcaggcgaggaagtgagaagctggtctcccggctccgaggcgaggcggcggcaggagcagccgggtgagtgttgatcaggtcggcaaagagccctgacatcagcagaatccacagcccaccccacccccacccccatcttgctcaagaaccttccatggctcccatctcccctgtgatacacacagatcaaaccctgtgctggaaaggtccctcgtggaggggggccactcctggattcactcatttcctccctgctgccctctttgcagaatgaagagagccatgtcactcaacacactgaacgtggatgctccaagggctcctgggactcaggtgagggggacatctgggtcaaaaatagaggaggccatgtgggtaggtgcagagatgaggcaaaggcagggcggtcgggccagtggtggagtcagcaggtggtgggttggtgtcagaagagacccaggacaggagcaaagattgggttttacttggggtagaggcgagggggttggatagttggctgccaggctggacctggagctggagggtggatgtaacacttgcccctcacctcccctccaaccatcccctgtgcctgtctccagtttcccagctggcacctggacaaggcccctcggaccctcagcgccagcacccaggacctgagcccccactaacgtccagtgaactgcgctggccgc

SEQ ID NO: 308265 - DNA, 1000 bp, Homo Sapiens
tactaggaagtactttaatagtttttcttagaaaaaaaaatttccagacacttaacatttcacaacatttcaacagcaaagtattagttgagagaggggttttcaggagttggagattatagaatattaggaagaaatgttggtatcctccattatagatggatggcataggtcacaaatgggagactggcagctaagccaatatcaaaacccagtggaatgacacttctatggagtttacttttcttcctgctatcttccctatcccacggaaatgtctgtcaccatgtaaagcccagtagcaggcagcttaggctccagtcttcccccttgggtaggaaaaggagtgaagggaatgtcactcctgagtttccatgctttcttcttcctctccttgaggtggttcttctgtattctcctcttcttcctctccttccttcttctctggtggcttctcataagccttttctgaaggtgttactatcactccatcccaggtagatatttcagaagcaagatctaggcaagagaaaaaggtgatttagacgagtagcccagcataaaagtcattacttacactgtggaaatattaaagacatttaagtagtgtacagcttctctgtaccagattacaatacaaaacccctgacccacagtggtcactcacagctggcatcaccctcctggccaaggatcttcctaaagccaccatgtgagaggattcggacgagagtctgagctgtatagcagaccatgtcctgaaggaaagcaaagtgagagtaagcaaggaaaatcaaaggaccttatttgagtaatacccttctgaaaacagagattaagacagctttttaaatctcaggaccaaagtctttcagaatccccaaattcctgacccgtaaagaccatattccactttgcctgctgagcagcagtattcaaaagagtggggcaaaacaactcagttcatatctgtcccaatacctgctgttctagggtcatg

SEQ ID NO: 308266 - DNA, 1000 bp, Homo Sapiens
gatcattgtgccctggagtggtcagagaaggcttcttaggggatattggactggagttagatctgaaagagaatgaagggattcaaatgagattagtagagagaatgggagcaaggactgatcagagagactggcctaagggtgggagagtgtatgctgaggagttaaggttgagtaggaaaggttatactgtcatgtgtgtgcccatgaaataacatgatttttaagagaatctttttttaagttagattattgaagcacaatttacatacagaaattcctcattttaaactgtatcattcaatgaatttttacttgtgtacactagtgaaatcattatcacaatcaagtttgttttgttttgttttgcttgagaccgggtctctctctgtcatccaggatagagtgcagtggtatgatcacggctcactgcaacctcaacctcccgggctcaatggatcctcctgtctcagcctcccaagtagctggaactacaggtgcacgtcaccgtgcccagctgattttaatatatctgcagagatgtggttttgccatgttgcccaggctggtctcagactcctgggctcaagcagtctgccagcattggcctcccaaagtgctgagattacagatatgagccaccatgcccagcccacaaccaagttttaaaacacatcactccccaaatttctctcatgttcctttgcaggcaatcccccaacctcacacttagagcctagcaactactgaactatattctgccagtgttgtgttgccttttcctggatgtcatataaatggaaccactcagaatgtagcctttttgtcttgtttctttcactttagtgtaatgcttttgagatttatccatgttgtagcatgtagccatggttcattcttttggttgctgagaagtgttccattatatggatttaccgtaatttgtttatcctttcattttttgatggatatttgggttgtttctgctgtttggctacta

SEQ ID NO: 308267 - DNA, 1000 bp, Homo Sapiens
ggatcaggacccacttgggtgtacttatattctccttggattttttctttctgaaaatattggtttagatgagttttagcattttccaaggtccagtttccatgaagcccagcatttaaatccacttcttctgactctagagtcgcttgcacttcttgttcttcctttcttgagtagtaatccttcaagttggctccttggtcccaggaacaccatagccagaggcccctacctcagaattattttcagctttgagagccagatgtggcggaagaggacctcccatggttgttggtaaacctccttcagcatttgctgtagtgtcaggaatatcagtaagtgggggcagagatgcaaccccaaaaagctggaacttcttcactcttcatttatttgaaccaaatagttaacaaagtctctggcagcattgctctgtgcatcttttttattggtggaatttcctatgccactgtaattatacccttccacctgaacctcacacaagaatttctgcctacttttgttccccaatgctctaatttcataggatggagtcatcttccttttgcctcaccaggcatacagaaaatttttaatatcacccatgattgaagtgtcttcttcagatcagcctatgcttcctggttcccagctcttaggaccgtgtggctctggccttccacaaagacaacagagacacgcacaacaacttccataaaggacttggcaaaaaaaaaaaaattaagtagaaaagaaaggaggttgttatgacactttatgatttactgtggtttgagagaagtactgttttctggtaattttgaggctggttttatcagtccaggctaatgaatacgagggcagattaaagtccaagctaatttttagtttctcatttacaatctcattttttattttaggcgttaaaagcattattctgagaaggggcttcaccagtttgcctaagagctccggccctagacacactaatttcctactc

SEQ ID NO: 308268 - DNA, 1000 bp, Homo Sapiens
gatcctacttggggaggtaatgtagttgtgaattttcaaagctggagctggggaaatggtctaatcagaagccaggtctattagtattacagtttaaagattgcttgaattgtaaaggaaagaggtttagttgactcagttccaccggactggggaggccccaggaaacttatagtcatggtggaaggggaagcaaacacgcttttcttcacatggcagcagcaagaagggcagagcaaaaggaggaaagccccttataaaaccatcagatctcgtgagaactcactcactatcatgagaatggtatgagcgatacgagggtcaccgcctccatgattcaatgacctccttccaggtccctcccacagcacatggggattatgggaactacagttcaagatgagatttgggtggggacacagccagaccatatcaccaggcacaggagtgaggagaaggaagggacatttggagcagaacgcacctgttctttgctttgggcccatagccagatgcccaacatgaaggtcaccttgaatgtctaaaggactccgctgactgcccagaccccagacactctgcagctgtttggggaaagtcaaagactggctcacagatgcagcttgtctcccagggaacctgcaaatgtggttttaggacaccagcgaggggcaccgtgtgagtgcctgtgtgctttcattcattcacacgatcatcgttcattccatcgtcagctggttcctaaacactctctgtgtgtcaggcttggaaccaggagctggaaacatattaagatgaagacacatttcctgcctcccaagacccaggccccatggggagtgtggaagccgaaggacagtttcagggcagtgtggtgggattacagcggagccacgtcaaaaaataagaagggacaaacgaaattaatcataagaatgtattttataggctgggcatagtggcttacacctgtaatcccagcacttcactttgggattgc

SEQ ID NO: 308269 - DNA, 1000 bp, Homo Sapiens
gatcatttgagcccaggagattgaggtcagcctgggcaatgcagcgagaccctgtctctacaaaaaaatttaaaaaatcaccctggggcggttgcccacgcctatgcctatagtcccagctactcagaaagctgaggtgggaggatcacttgagcccaggaggttgaggctgcagtgagccatgttcctgccactgcactccagcctgggcaacagagtgagaccgtgtatcaaaaaacaacaaaaaaccacttgaatctttttgaagttaacagggtttgtttcatagcccagactgtggtctctcctggtaaatgttctgtgtgtgctcgagaagaatgttttctgctcttgttgagtcaagtgttttaatgtcaggtccagtggagttcaagttctgtatccttgccaattttcttttcttttttctttctttctttcttttttttttcttgagacagagttttgctcttgttgcccaggctggagtgcaatggcgcggtcttggctcactgcaacctctgtctcctgggttcaagcagttctcctgtcagcctcctgagtagctgagattacaggcatgcgccaccatgcccggctaattttgtatttttaatagagatggggtttctccatgttggtcaggctggtctcgaactcccgacctcaggtgatctgccttcctcggcctcccaaagtgctgggattacaggcgtgagccactgcacctggtgccaattttctatctattcattctgtcaattattgcacttcatcaaaaattaaaaattaggaaaacagataaaaaggctcacagtgggagaaaatatttgtaaaacatacagtataataaaggacttgtggccgggcgtggtgcctcactcctgtaatcccagcactttgggaggccgaggcaggtggatcacttgagctcaggagttcaagaccagcccgaccaagatggtgaaatccatctctactaaaaatataaaaattagcc

SEQ ID NO: 308270 - DNA, 1000 bp, Homo Sapiens
gatctgagcaccgagagcccctctgaagcgaacagacctcagagacacccgcccggcacagctatccccacagctgtccatctggtacttggtcccagaactcccagacaccttgctcccaatccattcatttccaagtccttaaccatcctaaccatccagccagacattcacaactgctcaggagtcagtgtggatgcatgtatgcaatactatccagggattaggaagaagtgaagggctggaacatggcggtaaacctgagaacagtgtacacaaagtacacggattatatgactccctttctgtgaactgtctggagcaggcacattcggagagacagccagtggatttgcggttgccagaggctggggttgggtggggtgggctggagagtcatggctaataggaacggggtttcttttagagagatgaaaattttctaaacttcagttgggtgatggttgcacaggtctgtgaatatactaggaagctttgaattatacactttaaataaaggaatcttatggtatgtgaattatatctcaataacgcagtttttggggtttttttttttgttttgagtttcgcctttgttgcccaggttggagtgcaatggtgcaatatcagctcactgcagccttcacctcccaggttcaagcaattcccctgcctcagcctcctgagtagctgggattacaggtgtgtgccagcacgcccagcaaatttttgtatttttagtagagattgggtttcaccatgttggccaggctggtcttgaactcctgacctcccgtgacccacccacctcggcctcccaaagtgctgggattacaggcatgagccactgcgcgcccagccaataaagcagtttttaaaaagttaatcctgacttgctcaaggatatcagcaaaaattgtggagcaaggaactcccaattctgccccttcataaaggcaaatgaaaaaatctgcaaaaatcatcacagtaaaattgtttt

SEQ ID NO: 308271 - DNA, 1000 bp, Homo Sapiens
gatcaaagacctaaacataagagctaaaactataaaactcttagacaaaaacataggggaaaagtttcatgacattggatttgcaatcatttattgatataaccccacagcaccggcaacaaaaacgaaaacagacaaataagactacatcagactctaaaacttctgcccagcaaaagaacttatccacagggtgaaaggcaatctactgaatagaagcaaatatttgcaaaccatgtctctcataaggggttaatatccacaatatgtaaagaactcctacaactcaacaacaacaaaatctgattttaaagtgggcaaaagacttgaatagatattcctccaaagatgatgtaaacctggtcaacaagcacatgaaaacatgctcaacatcactaatcattcggggatacaaagcaaaaccacaatgagcttcagacctaggcagaggacggctattaccaaacaaacaaaaagacacgtgttggtgaagatgtggagaaatgggagccccgctcacagctggtggtcatggaaaatggtgacgccactggggagaacagtacggagtttcctcaaaaaattagacatagaactactatgcgatatgatccaccaattccacttctgggtatatagccagaagaattcaaagcaatgcagccaacagacacatgagaaaatgctcatcgtcactggtcacgagagaaacgcaaatcaaaaccacaatgagataccatctcacaccagttagaatggtgatcattaaaaagtcaggaaacaatacatgctggagaggatgtggagaaataggaacgcttttacactgttggtgggagtgtaaattggttcaaccattgtggaagactgtggcgattcctcaaggatctagaactagaaataccatttgacccagccatcccattactgggtatatactcaaaggattataaatcatgctactataaagacacatgcacatgtatatttattgcggcac

SEQ ID NO: 308272 - DNA, 1000 bp, Homo Sapiens
gatccgcccacctcagcctccccaaagtgctaggatccgtgtgcctttaactccttgcctttaggagtcgccgtgctgtaagcagcactgccccggggtaagggcgggcgctggagactggcagtgctcaccagcgcccccagctggtaagtatggcagtcatcgagcctggggggaacggaaagcaccactgggatttctccccgctgagctgggcagttctctcctctgcccagggcgctgccgtgcccccagagggctttgggaaatgtgagttggctcttgtggctgttcctatgcctggggaatttggaagagaccaatgtcattgggagggacagaaagtaccacgcactgaagaagtgtgcccacttcccaaccccatgcccagggtgctcaggagaggaccactgggaagaccgcggatgaacattccagatcccctcggggagagaaggcgctcctagccagctggtccttgagcgcacgcgcactccgtgttggagcccatttagaataaacattcaaaccctcagagcccactggagggctcagggcctttcaccttggctaagaaacgatccccacagccttgaagctgggtggaagctcaggtaggtggtcagggtccctgggtcagcctgtctgcccagctccaggcagctttcctgatccttacaaactccgggtgcagctccacaccgccgggtcccgcccaccggctccgctccgaccacgcccactctacccctcaacacagccttgaccctgccccactggccctgccccaaccacgctcatcccactcctctgccccgcccttctcggccccgcctcccccgctcagctcagcccccactgggcctggacctccctggttcctgtctatcctcccctccaccctgccctctctaaccgaatccccgccccatctagagccctaacctctagatcggccgggggttcatagatcataagccaggccctgctggtgacctgg

SEQ ID NO: 308273 - DNA, 1000 bp, Homo Sapiens
gatctcgagagtccttagttcctcccagcagaggctccaactgccaagcacagggttgtcattggccttgagtgtcaaacccacccaagttcacctggactgcccccagccatctctgatagccccatgtgggcatccggactcgggttctagctgcccacggcctcagtccccacagcagagcccccaaccccttttgtagtgaagatgccatcagtgacccctgtgcccacagagagtaatacaggaaacggtgagcctggcaggagtcactgcccggggtcagaagtttgtagccctctctggaggactgctgggagcctcagaggcatcagagggtgagtctcaagctgtgtcctttttcttctttttttgagacggagtcttgctttgtcgcccaggctggagtgcggtggtgcaatctcggctcactgcaacctccacctcccaggttcaagcgattctcctgcctcagcctcccaagtagctgggattacaggcacgcgtcaccatgccaggctaatttttttgtatttttagtagagacgaggttttaccacgttggccaggctggtcttgaactcctgacctcaagtgatccacccagctcaacctcccaaagtgctggaattacaggcgtgagccactgcgtctggccatttttcttcttataacttttattatggataattccaaatagacacaaaaatagagaaaatggcataaagacccccagctttcacgaccatcggtgcagggccactcttgttcacctctcactgccccactccctgcccgcccctggagatgtttacatgaatcccaggcatgtgatgccatccacagatagcccaagatgtaactctactagtgacggcaacaccattctcacacctaaaaagatgtctaatgtcatccaatatgtagcagtgttcagacaatccacatgtcttatagttgttttttttaaacagttgtcttgctgacatcatgatccaaa

SEQ ID NO: 308274 - DNA, 1000 bp, Homo Sapiens
gatctgctgcggggctgtgctgggctctttctcagcctggcccgaagtttccagatctgattgagcgagagagcagcaggacctgcccctctgctgggctcttaccttcgcggcactcgccactgcccagcagcaggtgaggcccaacacaaccagttgcaggcgccccatggtgagcatcagcctctgggtggccctccccctgggcctcgggtatttatggagctggatccaaggtcacatgcttgttcatgagctctcaggcactccctcccctctaccccctcaggtgcagggagatccagttttccccaaacccacagtgcacctgtgcaggttaccacttacctgggagcagaggcaggtggcaaggtggcgggtggtaagggggatggtggggccgggcagggtgcacagtgccctgccttctggtttgttcacagggcttggtgtcactgtcagagaaaagggcatactttgtctccatgtctccatgccctgcttgtcccctaggtccccaaaggggcttcagaggggaccgagcacgtgacttctgggacagaaagggcagcatgctgcaggccctccactcatgtggctgaccttatctgtacgagcttttcctggggcccgtggagcgggtagtccaagctgggtgcgaatcccagagcagcacaaggcagtcccactcaagggtgtggaagtgtcaccatccagcctgatgtgtcctgggagggaggactagaggctcagggggtgtgggtgggggggtgcggaggcatctagcccaaccatgtaggtttccctgtggaaacaaagggcccagccgaggccctggggcatgcccaggcagagtgacagaaggggagggaaagaggccagtgggagggaagggagaaggtcgtgtgaggttgtggaggaggaggcgactcgtattttctgtgaacaggtattaatcctggagccaggaaaggctctgagaagtgaaagaacaccacga

SEQ ID NO: 308275 - DNA, 1000 bp, Homo Sapiens
gatcaattacttggtttgtttcccttactgtatgatgttggaatcaagagattgatactgctcagtggaatataatttagtattatgtgccatgggtttatgaggtaggagtcagacaaaacattgcatttgaacactacccatttattagctctaagaagagatttatatttgacaaggagacaatagctttgttttctgataagccaaagaggtctatttttgtgtccaatacactgagtagcttacccttccccgataactctatttactagtgtgaatatattttaataataaaattgatatatatgtaaatttattttaatctaatttcattgaaccttccttaaaaaaagagcctttgtagattttcatatctgaattatagatttctgtatcgtattcccagattgatttctaggctataattctgtcaagatttcctcctggtgtcaaaaacagcaacaccacagctagagtgttttataattggcatcacaaccgaaccagaattacagtcctgatagtcatcctggtgctaggtggattcattttagaatatttctctctttcttagcctgtatctgaacttgaaggtttacggctaagattactttctgagttaatcataaaaatgtttaactgaaagctaaggtgctggagatggaagagacagagatgagaaaggaggaaggaaaatataccttcaatgactacgaaaggatgatcaacagcagcatatgattaaatctacattgtaaatcaagattttttgttcctgcctgtccttcgccctagggtcaaataaattaaattggcattctttactaagtctttagaacgtgattttcactccgtggtgaacggaagagtgtttccttgcaaccctgccctaaatcaaatcggttcttgaatattcctcctgtgtgcttttcctccctgtgttggtcctgtagtactggtgcttgggctcggtaagtaaaacagtcatttttccccc

SEQ ID NO: 308276 - DNA, 1000 bp, Homo Sapiens; identical to SEQ ID NO: 119925

SEQ ID NO: 308277 - DNA, 1000 bp, Homo Sapiens
ttcagccaatgaaagctttagactagtgactagtaaactagggccaggtgcccctttttttgttgatttgttttttgagacggagtctcgctctgtcgcccaggctggagtacagtggcatgatctcggctcgctgcaacctccgcctccatggttcaagagattctcctgcctcagcctcctgagtagctgggactacaggtgcgtgccaccacgcctggctaatttttgtatttttagtagagacggggtggagaaggggtttcaccaggttggccaggctggtctcaaactcctgacctcaggtgatccacccgcctcggcctcccaaagtgctgggattacaggcatgagccactgcacccagcccaagtgcccatttttgtgtggcccatgagctaagaatgatttttccatttttaaatggggaaaaaattaaaacagtattttgtgataggtaggaattacatgaaattccagtttcagcatccataaatagttttgttggaacagccatgctcacccatttacatgttttctgtggctggttttgtgctacaacagcagagtttaagtataatcctgctataacccttgttatttgctttcgaaattgcgcatttgttccaacccatttaatatatttgggaacagtttgatcataacgcagacttcatgtttgcttgtgtgtgatttcatcctcgagaaatagtaggtgaatatgggaaactgtatctagctgaaccaagcctaagtagtacacaaaactcacacctaaacatgtaccagctacctcactcatctccccacctgtgttgagcaacccttccgacgtccacttccaaaagcaaagtgcatgtcttcaagataaaaggccatatttattgtgatataatttctcaaccatttgacatatgtaaaaaccaagctatcctttttttttaaatgtgtcactcatttgagtgttgtgcttcaagccccatttttcccatgagacctg

SEQ ID NO: 308278 - DNA, 311 bp, Homo Sapiens
tcacttgtccttcaatttacaccctttggtgttgacatgctttaacataaaagtatgacataaatcacgattttaacccttcagctggtattacagcttaatgacttacaccaggtagatgtaacggttcttggtactgagacaatctcccaatagatggtaaaccaaaagacttgtaggggtcctgaaagttcaaaggaaaggaagcacagtctttgaaatataaatcagcacaagtaaggttaaatatttacacaatgaagaaccatttataggtctattttcaacatatggtatttaccaaatcacag

SEQ ID NO: 308279 - DNA, 1000 bp, Homo Sapiens
  misc_feature (914)..(914): n is a, c, g, or t
ttttttttaaggacataactttattggaaacaaagaggtggggtgcagaagatggctaggagtcaggctctgtgggaggtggtggcttctcatcatcagggggacaatcgatgaagtcggccagcatggcagctgtgtcatcctgctccttttcctggagagcttcggcctctgtctctgtctccatctcttcttctgcaggtgtctctggtgggggctgcaccttgtcactcccatcctcagtctcctcttccaacagggttgggggagcagagggctcttcttcaacaagctcctggggagggggccctgccgcagggctttccccttccctctccacctctccctgggaggggagcgcttcaggggccagggtgggagctgtgtcagccccacgctcctcctccgtccctggctcctccacttccaaaagcagcccgggttcgggttcgggttctggctgcacctttgggggagactcagggggaggcagagctggaggcagggttgggggtggaggtgcaccttcttctacctcccctcctgctgtgccaaactccaggtcttccacctcttccagttcttcttcctcctcctcatcctcctcttcttcttcttcctctaactcaccttcttcttcctcaaattcttcctcaaactcttcttcctcctcttcttcctcttcaaaatattcctcttcatcctcttcctcttcctcaaagtcttcctcctcttcctcttcttcctcttcttcttcttcctcttcttcttcttcttcttcttcttcctcttctccttcttcctcctcctcttcatcactgctgttgatattaataactgtcaaatcctcttccagggctgggggtcctcccccaccaggagtcccttcagggaccaactggggtggagggagngtcacaggaccaggaacaggcggcggcggaggtgggggtggcgggagaggccctggggccgcaggaagttcttcaggctcctcctt

SEQ ID NO: 308280 - DNA, 1000 bp, Homo Sapiens
caatagaaaaaaataacttttttatttacaaaaaaatccaaatattggatgctgtaaacaaaattcacaatctgttccctctagcactgattcaaacatgtcagttttttagtccattttccatcaactccttttctgcctgtgacgcagcctatagtcaaaatattccaaaagagtgacccaaggtgcagcttgctgcaacagaacacctcaaagcaggcatgattgtagagaggttggagggagagacagccagcaggcgagcctcctccgttctgcaaggctttgcagcaagtctcgttaacttgacatcttccaactttgtactttaccatttgctttgttagaaagccattattttaacaaaatataacatagagattctttcttagcactgaaaatgctatgctaaaagaaattttaaagaaagattatattcaaatagatgctatatatgaaattactttttttggctttttggtttcacctaacacacttcatcttcaacaacaacaaaaaagcttatttttgaactgacagctttcaacataatacatttcatttacaaaatagttcacaatatttatttaacaagcgttgcattgaaaacaactttatgcacagtgaagcaaccaacaataagcaaacagaaaggggtggtaaaaacagtacgttcacttttcatttccttccttggtttggattacacatattcttccatccttgcatttttggagctacattattagtccatccaataccaaagtgagcagatacttgatcccatttctggaaaggaaatgtccatcttggtgtaggagttcttgaggcagctggatttactgcaaattaagtaaacctttaaaaacggcattgtcacaggctatgtgttctctgacatgccaggctggacaggtgagaagagcctccaaaagacaaaacttcttcctggtttaaagaaacagcacactaggccagataaacacaaaaggaaacaaat

SEQ ID NO: 308281 - DNA, 1000 bp, Homo Sapiens
caaatgttacagatgagttctagagtgctctaagaagctgatttaaagaaaagattaagcctccacctagagttttatttttattttttgggatggagtcttgctctgtcacccagactggagtgcagtggcactgcaacctccacctccatgggttcaagcgattctcatgcctcagcctcgagtagctgggcctacaagcacatgccaccacgcctggctaatttttctattatttttaatagagctggggtttcaccatgttggccagactggactcgagttcctgacctcaggtaatccacctgcctcagcctaccaaaatgtgggtattaaaagtgtgagccaccacgcccagccccagaaataagagtttagaacgtctgatagaaataaattcatgtagaaataaattttgcaagagattgcttaacttttttttttttttttaaattaataaaaaaacaaagatgctcccataatactctcagatagtgaagaagaagaaatgatcattttggaaccagacaagaatccaaagaaaataaggtaacaaatttctggtttatttcaaatgtatacatatactcaacacttatagaggtttgctctctggttttactctcatcttgccacatgactataaacaaaaagacatccctttttcattagagatccatctgttctgtgatttttttaccttgtgatttataaaaattaggacctaaatctataatataaacttcttggatgccagtcttactcatagctgacacattttagatcctactggaaaactaagaaatgcctcttatttcaataatccaaaacttaacatactcttagtaaattcttactttgctttattcacagaacacagaccaccagtgcaaaacaagaaaaagcaccaagtaaaaagccagtgaaaagaagaaaaaagaagagagctgccaattaaagctaacagttgtatatctgtatatataactattaaaaggga

SEQ ID NO: 308282 - DNA, 1000 bp, Homo Sapiens
gatcttaaatcttacaccacatgggacaaaaactgcatgcctttgtctcacaagacaggtctttcttgacatttaaaaaaaatttccagcatattcaatccacatagtatcactctttctgggatcatccattcacatcattgcttctttttctttcctctcattctgactgctttttggtgctattctcaataggtatttactatagactgaagcaaaggaattggagtttgagcctaatgttctgaattctcttatttaccttctcaaataagtaaaatggagtgcaagttggactcataattggtggttctcaatacatagtctaaaaatacatgtacctcaaaaatataaacactgcagatcaaagattatcttgacacttctctttcttgctgtcttttccagaaataaccattattatcaatcttgtgtgcattttccggtcctttttctctctacgtatttgcattctctactaaaataaacttcatggaaatggatagttggcaccccattactcttggttaaatgaatgaatgtgtatctgtgtgtatgtgtgtgtgggcacatacatatatatatatgtgtgtgtgtgggcacatacatatatatatgtgtgtgtgggcacatacatatatatatatgtgtgtgtgggcacatacatatatatatgtgtgtgtgtgggcacatacatatatatatgtgtgtgtgggcacatacatatatatgtgtgtgtgtgggcatatacatatatatatatacacacacacacacacatatatacacacacgtgtatgctaactgctttgtgtatgttttgaatgtgttttgatataaaccatattgctttgtacatattacttggcaacttacttttttcactgaacaacataccttggggatatttccatgttaccacatcttgttctatttcgttcattttaactgttgttaaaatgtatgttatggatatttatctgtccaattctctactgat

SEQ ID NO: 308283 - DNA, 1000 bp, Homo Sapiens
tcaaagggatgccccgctccctccgcccactcccagccttccagccttggctcccgaggacacgactccgggccctgccaccttctgataggctcgcgagaccgaggctgcaaagagagccgccccccattggccaaccggcgagtcccgcgcgccacctcctgggagatgtagttccgggaacagctggcccctgcgactcgcgggtgtgacgttgaagatgtcggccttctgagccgactgcggtggtcaagaggtgggtttgtttggaaagtgggtggtgagagtagcgaggatgcgggtgaagaaaacctaagggccccaaattcaacataagcgaggtttgcgggctgtcagcaaggtacagacctacttcaaatcggggcgcagagcgttgggggtgggggaaggcgcaagctccccggccaatcagacacgagcaacctcagcccaactctggaggccccgcccccttccccgccccacggaaaggggaggagcttgggctgtttgaatggctttgggatggagcaggggagagagtggctccgtttgcctccccgctttggtgatgctgtgcgagcggcttcgggggccctggagacgtccgagtcactgagggtgggctgggactcggggcccgcgtcccatctccccgccgattggtccgccccccgtgcgaggtgaggtcctccgggattcctagagaggacgcggaagtgctttcgggggggggtgggatctaacggtttaaccccgttggacagggcaagattggacttggttacttccggcgaggaagtgttggggagtgtcggcttcggtttctctccgtgggaagaaccgcatcttcccagcctcggctgcggggagcttgatgttccaggagagctcccctagagtggggccttgaggggagggggcaggggcttcgtgactggacgggggtcctgtccctaaccttgaccgggccacagtctctgtatctcggggtcagggg

SEQ ID NO: 308284 - DNA, 1000 bp, Homo Sapiens
accttctctgggtttcttggctgtgtggtttattggtggctgctcttgaataaatggtaagcttccaagagcagaaatcaactatcttacctttgtcatacagtcccctggatatgacaggtcatgtttaagatgctctctgttactttgtgtttagtagatgacctggctggtgcggttgtcacacagaagtatctgagctgtctcattgggcttcagggtcctgcgggtggccggagcaggccagagcgagcgtgggaggactggaggttaaattttatttgctgtcacttcagtccctcctcttcctcaccctaccattcatctcctttctttgccatttcgtttggtctcatgtctttccagtccgcccctcttgcactgcctcccagctgttaattcaggctagtttcagtgctaagaattgtccaggtggaacccgcacagcagtggctacgccaaagatcttttacattgatcttttaattgatagtgcttttattttattttgtgaaatgtgcatcctgtctctacaacttgtacagttagagattcgtcagaatgtgaatttccatgtgtccacatcacataatcagtcatcaacgtgattaatgccagtgctctgtgaagccctgtctgtccccacctctcccccactcaggacaagtgctgtcgctcctgcgtttctacccctcctctcaccccctcacccttcacaaatggctcttccaccctgttcctctccagccacctcctgtctctgagttttctaccccttcatgagccttaattcctttctctcccttctctcattctctctttcccttcttccgatgctccccaccgagcagatacttgtgtttgcactgatgttcttctgggggtggttgggtaggtcaaggccagtggttctcagtcaggacaatttggacccccagagacaattggcagtgtctggagacagtgtgggtggttacaagtggggagggggtgctgctcc

SEQ ID NO: 308285 - DNA, 1000 bp, Homo Sapiens
aagcttgtatgacgggcggaacagctggaccttgcttcgcattatgctttgggcaggtaacacaccgctgcgtcaccgttttggcaagggctgacaaatgcaagatgtagaaataccggactaacaacttttcaagtgactcctggcctagatgggtggttttatgcacagccagcacaactgcggctcctagcagctgtggcacagcttctctcccatctggtaaccgaatccatccttcctccatcacttgtcctccctctgcctggagaaagtccttttcttctttagaataagtaggtaaaagatcaggcgcttgagggagcaggggtgctgtgactgatgcccggaagggggcagatgctgcttttcgagcctctaagtcagcgcgggaattccgcaaacccaccaaggtggaagctcgctggtgtcctctgcaatgcataacggccaccttgtgtggtttccatactgcttctaataattgcaagatttcttgttgatattttatgtcctttcccccagagttcaataggcgcttttctttatataatgctccatgcacttgaagggttaaaaaggcataccgagagtcagtgtaaatgttgacagtcttaccttcactgagttctaaggcctgaatgaaagcaatgagttcagctttctgggctgaagtgccctggggcaacgatctggcttcaacaacagtgcccagggttaccaccgcacaccctgcaaatctctctccttgtgggttgatgaagctgctccaatccacgtatagttcccagtctactgatgcccaaggctggtcccagaggtcaggtctgctagagtaaactgagtccaatacttctacacaatcatgcttgacagggctctctgataccgggagcaaggtagtggggttcagggtgttacaaacttcagtggttatacggggattttcacagagcaaactttggtacttagtgagtctagcattcgctagctaatgatg

SEQ ID NO: 308286 - DNA, 1000 bp, Homo Sapiens
gatccctatgttggcatttagcattgtatacagctgattagtatgtcctcctctgtatactttatttatatgatgtccaacatatcaaagtctcatggctatgctcctacaaacatatccttcttctgcctttttcttcctcttatcttttcttcaatctcttaagctttgagaatccaaagtgcagtctttggatctctacactcactcaactcttttggtcatcttttcaagtctcatggctttacatatgtcatctaaactcaaaactatgcaattaagatttttggcccacattttttccctaagtgccaaacctgtatatctaaatactattcacatctttacttgagctttaaatagacatctcaacagtaacatctaaacttcccccaaaataccaaatcttccctgtctcagctgatggtaatttcatctttcaacctactcaaaaccaatgtattttaatcaccctcaatgattgtttttctcttatatactacattcttctgccagaaattttccctttttcccttcagaataatgcctgaatcttgatagttttttcatctttactgctgcaatcctgttccaaattgtaagcatttctaaccaagtttctagtgctactctcaagactagatctacaaattccaaagttgtccttctgtctcttctttttaccccccttctccacccctgaaaactcaaacggtagtgtatgttcaatctagcagctagagcaatcctttcaaaatataacttacttctctacacaaacattacctcttcaattagggtaaccatttatttaaatatgcaagtagtgtcctcaagcattttgaattgtttttaccccaatatagtttttctataacaattatcttctaatataacatataatatatttatatattgcctatactatttattgtgtctttactcagtaaaatttaagctccaaatatacagctattttttattagtttacgtatcatat

SEQ ID NO: 308287 - DNA, 1000 bp, Homo Sapiens
aagcttgacagttttacctctttctaccacagaaagttgagttttgtgaaattttataacaattattaatctagttatttctctgataatctagtcttttaccagaagaccatcttgtagggattttaattcagtttccttatacatttgctcattcatttggtcataggatgtgttcatatgaacctcaccaatgataccatttgcaccaagtagcaattacattatgatttagattgcttactaaatgttttctcatctttctcaacaaaatcagctcttgcttatataccaaaatgttgtaattgactgaggcaccataagtttcccataaattcattctttttgctcgctctgccaagataccaggccattttccttgcactaccttggcttttaattgaggagcgtacttaatccttcttgagtctgggtacatgtgtcttcccatctttatgtaactgttgagtttgttttatcatttttccaggctgcttgccaccatttcccttcctcctgaaataacatttcttgtcaacaaccagtaggtcattaagtcgtcttgctcagtatgtctcttttcattaaaggcaaatcgggcttaccataggactcatagaactgtgccagtgtttctgcccaaattggtttaaccattaaataagttgttgccattgagtttttattgcttgaatatagtttgaatataccttttggatccaaaatctttcaggaaccttttgagagatggcgggcgagggaagacaaaagttttcagttccccgagacagtgtcttatgagtagtaattattctcagcaaaagatcagggctataagtgtgtaagcccacctagttatcctttacttggtttcagtactaagaatttttttaaccttagtgccttccgcccacagaaacaaggtacataggcattagagcacatgttactatgagtagttggaaatgcagcagttattttatgtctgtgtttctggaca

SEQ ID NO: 308288 - DNA, 1000 bp, Homo Sapiens
aagctttttgatgtgctgctagattcaatttgccagtgttttactgaggattttcacatcgatgttcatcagggatattggcctaaaattctctttttttgttgtatctctgccaggctttggtatcaggatgatgttggcctcataaaatgagttagggagaattccttttctatttattggaatagtatcagagggaatggtaccagctcctctttgtacctctggtagaatttagttgtgaatctgtctggtcctggacttttttagttgttgcctattcagagtctgttactggtctattcagagattcaacttcttcatgggttagtcttgggagggtatatgtgtccaggaatttatccatttcttctagattttctggtttatttgcatagaggtgtttatagtattttctgatggtacttcatatttctgttggatcagtggtgatatcccctgtatcattttttattgcatctattcttctctcttttcttctttattagtcttgctagtggtctatcaattttgttgatcttttaaaaaaagccagctcatagattcattgattttttgaagggttttttgtgtgtctaactctttcagttctgctctgatcttagttatttcttgccttctgctagcttttgaatttgtttgctcttgcttctctagttcttttaattgtgatgttagggtgttgattttaggtcttccttgctttctcttgtgggcatttagtgctataaatttccctctacacactgcattaaatgtgtcccagagattctggtatgtcgtgtttttgttctcatttgtttcaaagaatatctttatttgtactttcattttgttatgtacccagtagtcattcaggagcaagttgttcagtttccatgtagttgtgtgtttttgagtgagtttcttaatcctgagttctactttgattgcactgtggtctgagtgcaacagagttgttgtgatttctgttctttta

SEQ ID NO: 308289 - DNA, 1000 bp, Homo Sapiens
aagcttctgttggtggtagagaggtagagaaagcatgggttttagagtaaaagtctgttaaaattccatttcattttgtgacttcaacaaggtacttgaacttgagtctcaatttccacatttgtaaaatgaggctaataccatgtatctcacatgacagttatgacaattaagttacataactgtgttagctggcctagttcaaaaaaaaaaaaatgcttctctcttttccctctccttgtcttctctgttcccatggcaattgtaggccttccctcattttaacctggtggctgtggtggctggcctgtctctgtgtctgtctttccatcattcccatttggaaattcctccaggatttagtcaatattttagttctcttcatggccttaattactgaaacatgaaatgttagggatatatatatatcaaaaacagccaagtttaggaaatcttattttatatcacttttttttgcttcgtatcattcagcactttcattgtaaaataataagcaagtgcatatactcatttgcatttatttgcatatatctttataattgttacttgtgtgtgcatcatagtatcagcagtaatggtaatactagtaattgttaatagtaactatgagtacctaatgtttgttaagtaattattatgtgttatgtactctttcaactatctttacatgtattaccttatttaatcttcacaacaaaacagtagccactattgttctccccatatacagatgaggaaagtgaggcacagagaggttcagctatgtatgagaatgaaatagaggaaagtaagtaggaggagacataggattccagcagcaatgcagagcactccacgaggcatcacagggatggtaattgaaccctgattctgcagagcacgtggccacagatgaggcacatacactctgtgagaggctttgtcctcacctgtgagatgggatgcctgctcctacttcagagattcctgtgtgggaacc

SEQ ID NO: 308290 - DNA, 1000 bp, Homo Sapiens
gatcctgcccccagcggacccttggccatgtctgaacacacttgtggctgtcacgacggtgggtgccactggcacctagtgggcggcagccagggaggcggccacacacctgtgtcacacaggagggccctcacagcagagaggatctcctccaaacgtcagtagtgctgaggttgggagaccctgtaacagagccgcccgcactatggcgaggattacatgggaaagtgtgctgtgatgttctcggaacagtgtctggcacacaggaagccctcggcaaacaggggctgctgtgtttaccatcctcatctcagcctcgagaagtcaaagcagatgccaagatgcctgttttccaacaaggaaacaaagcccagaagagggacgtgctggcccagaactagaatctgggccccgatcctggtctctgagggagcctcctgcctggggccaggtcccatggagtgctggctccggacactaccaccatctcagaagggacgggctctggcccccaggatagaggctttctagagttggtgggggacatgtggggtgctgtttggggactggctgtgctcccaccccagcagcccctcctcccacgcccacaatggcagctgggaggctgccacacggagctctccggagccagctactgctcagcagagctcggccctcccgtttccaggaggtcacttggcctcgggagggctgccccgcgcctttcaggaggggatacaataggtggcgatgcaggcagtgaggccaaggccaccttccctgggactgagtccctggcatgcaccaggcaccgaggagggatggaagacgctgtgactttgatccacatgacctctccaagctcccaacagcctgtaggagggccgcctggtcccactgtccccccttcacagttggggaccgaggcccagggaggcaaaggaacctgcccgagagcccccagcccccagatcccccggcgcacccctcacaccatgct

SEQ ID NO: 308291 - DNA, 1000 bp, Homo Sapiens
gatcctgtctcaaaaaaacaaaaaagatatcttgtaggaagtgttattgaatggagagtctttaggctgaaacctcatcacctttataatcctgtagccagcgagtgtctcaggagcagaacagacagcattggaagccatgcacatcctacagatgaagagggatgcgctgagaggtcttcactccagcaccactgccctctatgggcagctggccatagggagggaaacagagagagggaagaacaccttcttccaaaagcaccgatagggctgggtgtggtgacttatgcctgtaatacgctttgggagagcaaggcaagaggattgcttaaggccagaagtttgagaccaacctgaacaacacagcaaaactctgtggggctagtcaacaaaagcaaaaaatgaaaagtagctgggcatggtggcccatgcctgtggtccaaactacttgggaggctgaggcaggaggatcgcttgagcctgggagttcaaggcttcagtcagccatgatagcaccactgcactccagcccaggcaacaaagtaagaccttgtctcagtaaataataaataaataaaatgaacaaaaagcagtgatgttctggaaagatggagtagatgtatttatttattctgccaagtataactgaaaaccttgaacgtgacaagacaagcataagaagactgaaagatggagagaagcagactggttaggaacctcgggacttaaggaatggtggtgaattccctgggatttctctttgcctcatatatctcaggctgaatactggagaagccaacaactgaaaatgccaaggggcacaaacaagaaaaagtcccaacagaacaagttctagcaaaactatgcttttctagccaaagaacgaggaaaggggcatcctagaaagacagagctcttttagtccatacctgctccgctccatccaagttccatcatcacccttgtcagcaaaggccggatggaaaacctagacatt

SEQ ID NO: 308292 - DNA, 1000 bp, Homo Sapiens; identical to SEQ ID NO: 119928

SEQ ID NO: 308293 - DNA, 1000 bp, Homo Sapiens
tcatttatctttcttctttgcctcctttacttccttcgtctgctcatccttctcccctctcacgttgacatttgctgctccttcttgattttccctctgagaattatcaactatctgatagtcctcaaggagagtgtgtcctgtttgtgttgcagttttcttcaccattgctttgataccaatgttgttaatattgtaggcagttacgccaacattgaccgcagaatccaccgcatggtgggtagcttctcctgcattatatccgtatctttaaaagaaagattagaggacatacaatgaaacaataaatataaaataaggtcttctgaattagtattaaataagtcaaatgattactgtgttacccctgaaagcaaaattaaagcttaggtttcaatttaattaataacttaaaacacagtagagaatgaaatcacactctgtgacaaagcagtattttctcctttagtaaaaacagtgtgtgaaaataaactcagactagctgagaatgatgtaataaagactgtcaagtaaaaataaaagtgtaaattataatacaggtcattaatcagtcattatttctttttttaatcctccctttctagaaatatgagggaaaatattcacagaagcaactaatctagagtcacgtaagtagtttcaagttctaccttaaccagactttggctatgtcttttaattatgggaatttgagttaatctttaaacagagattctatggcattctcccctgcatcccactctactgcacactcactggcctccttgctgttccttgagcccaccaagcactcaaaggccttaggacctttgtactggctgctctctgcttggacttcccatagctctctgcctcaccttcttcaagttggctcaactataatctcattatctaacctgtttaaattgcctttttccacatgcccacctccacctcttgacaatcgattcccctttacactgctttttttctcccatta

SEQ ID NO: 308294 - DNA, 1000 bp, Homo Sapiens
  misc_feature (5)..(5): n is a, c, g, or t
  misc_feature (20)..(20): n is a, c, g, or t
aaggntgtaaagggagcctntaattatgtgagattgacaagggggacatttgggaagtttggcaatgcagtttcaagggccttcccaagccctgccagcaaggaagattattaacatattttcatgtaatttgtgcattgctatgtacccctcctcaatgaaataattttagcattcaaaaagaagacaagctgggaagaggaaaagacagatagggaaggacagagactgtaagagtctttagaaagggaaaattatttcattaaatctaaagagcatatgcttttcttgatgtataccatatgcaagtctatgcaaattatttaatagcactgcactcagagtaatttccatttcctccctagcttgtgacgggactattccttttaatcagattctagtcctcttcggcagactcttgggggttttaacttaatttgccatgctaagtagttagggtaatttgaaataaagcaatcagtgggcagaaaagaatgaagccaaacctcgtttctgtctttgagatgagaggctggccggctgtgtgagccccacaggacttctttctcttcttctctcctgctcctcagcacctgagacctcagcagagtttccaatggtcagttgtgttgttttgatggcacctaatcaggtctgtttcccatccatggggctcgcgtgcgatgctgcattccattaggcctccactgtcacaatttatggtgctgcctcaagtaatgatggaaaaatgaattcacattccttaaaaaatttttcacctggggaggtcgtggacacctaaaggggtctttgaaatggtctgaaggggccctgcagatattccattctagaggttctggagaaagggagctataatcatctagtaccatggatggacaagagttatcaaggaaagtcctggcaggaaagaattcacatgggacgcacgcctgaagggacagcaaccgatcaagggcggctgtgctgcagtagtgccagc

SEQ ID NO: 308295 - DNA, 1000 bp, Homo Sapiens
ttaggaagagcagtgggcatgttgctgcaggggcaaaacggtgcccagaaggctggtttagacacagcgcgttggccacttactgtctccagacaatcttagaacatcccacttggtcaaagggcagttttcatgactttcatccccacccttagtggagatctctcaaatggaccccaattctgttttttgtttttgttttttagacggagtcttgctctgtcaccaggctggagtgcagtggtgccatctcggctcactgcaacctccgcttcccaggttcaagtgattcccctgcctcagcctcccaagtagctgggactacaggtgcgtgccaccatgcccggctaaatttttgtattttagtagagatggggtttcaccatgttggccaggatggtcttgatctcctgaccccgtgttccgcccacctcagcctcccaaagtgctgggattacaggtgtgagccaccgcgcctggcttttttttttttttttttttttttttttttttttttttagaaagagtctcgctgtttcaccaggctggagtacagtggcacgatctcagctcactgcaacctctgcctcccaggttcaagaaattctcccgcctcagcctcccgagtaggtgagactacaggtgcgtgccaccacacctggctaatttttgtatttttagtacagacgggatttcaccatgttggccaggattgtctcgatctcttgacctcgtgatccacccgtctcagtttcccaaagtgctagaattacaggcatgagctactgcacccggcctctttcttttttttttttttcttttttctttttttctttttttttgagatgagatttcactatgttgcccagggtggcctcaaattcctgggctcaagcaatactccctcatcagcctcttcggtagctgggactacaggcctggaccaccacacccagtttggacccctattcttgaaagcaactcccagtttcaggccctt

SEQ ID NO: 308296 - DNA, 1000 bp, Homo Sapiens
atttacaaacagcaatgtccattgactttatttataccataaaaaagccatttacaagcaagaaacaagaattcagaacaaaattaagcagcactgaaatattcatgtcacaaatctaaaacaaagtgaatacaagagtaaaatatcatttgaataaatagtcttaaattcatgctataaaataatccttaatggcaagttactagttgatacagcatccgcttagctagcttcatttacttcatatggtgatgaagtgtggagttgtgaggttaccagtttatattgcaagataatgacactgtgttaagtcattcaaattgctcaaccatttataacggaaaaaaatgttagccctactaataaaagtggtgagagagatggttttcacattaggaaaatggtcattctcaaacaaaccaggtaagtttacctcttacaatagtcagggcagcaaccaaaggcttgggcagcaagtccaaaggttgaattcacagcatacttgtcactgaggggcagcaagaggtctgtggactgaatctgctacaaggagagccaggcaaggctgactccaggacttgatcaagaactacaatagccccgtctgtgccagactcaggaaggaaaccagagaaagcaggttctcttccgggccgagaagtcaagcactgggcagaaacagtgggaacactctggcacttactgaaaaagacgcatgtgacatgtgacaaccattacaaatttggaacaatgtgaatgacttttctgaacttttagttcagttgcactgagtaatatgaaatctatgatttatgaactagatagtttcatataaagaatttacataattccccaatactttcatatataaaatttaataaataaccctgaccagtctagaagcaccattcaaggggcatgtgcccttggaaaatagtttaggtgttgcatatttgagtccctttcagtggaggcttcacaggaaaccattacagaattt

SEQ ID NO: 308297 - DNA, 1000 bp, Homo Sapiens
gatctatattttaaggtaataaaaacgtttgctatggacagagacatgcagacactgtgggtgaagctgattcatgttccattgaaggaaatgacatggggttttctaagggaaagcccagcatgccgcaaggagaggggaggtcccaggagggaattggagtcagcattaggatctaagtgtcacaggggagtgtgttcccaaaaaagactgtgactgtttctttgtccatcctgaactggttaccatgagtgtgtgtgtgtgtgtgtgtgtgtgtgtgtgtgtgtgtgtgtgtgtgtgtgtgtgtgtgtgaattaaaagaggagttacatgctggggcatttttggtatctcaactggcatctcagctgctggtgatgatggctatacattttcctcagtattcaatgtgcgtattttgagttaacagtccacccattggctgaggcaggtggatcatttgaggtgaagagtttgagaccagcctggccaatatgtgaaaatttgtttttactaaaaatacaaaaattagccaggcatggttgcagcacctgtaatcccagctactcgggaggccaagacaggagaattgcttgaatccaggagacagaatttgcagtgagctgagatggaccactgcactccagcttgggcagcagagtgagacttgtctcaaaaaaaaaaagttattgtgacatgctgtacacattcacaaattcagtgtctcccagaagcctgagattctttctttctttctttctttcttttttgagaaggaatttcactcttgttgcccaggctggagtgcaatggtgtgatctcggctaactacaacccttcctgggttcaagtgattcttctgcctcagcctaagtagctcctgcctcccaagtagctgggattacaggcatgtgccaccatgtgcagctaattttttatttttagtagagttggggtttctccacgttgatcaggctggtcttgaactcctgacctcagg

SEQ ID NO: 308298 - DNA, 1000 bp, Homo Sapiens
aagctttaatcataaaggtgtgggagtgaatccttcacaaatggcaaagcaccaagcccttaatgccatcctcctgatagtgagtgagttctcatgagatctagtagtttaaaaggctgtggaacctctttcctctctctgtcttgttccaacttttgccatatgaaacatgtcattgccgcttggatttccggtgtggttaggaggggcctgatcagtgtgggcctggtcagtggacctaggtcagtgaggactatttagtgggatcgtggtcagcaggggtctgcttagagagggtctcattagtggggtctagtagtgggagttttggtgagtggggacctattggctgccagttgtttggtgtctggtcagtgcaaacctgggctgtggggcttgatcagtggagacctggtcagctggggcttagtgctggcctggtcagcatgggctggggcactggtgaccaggtcaaggggtgctattcagtggaggactgggcacatgggacctagtcagcagaccctggtgggcgtgtcctcatcagtgaggcccttgtcagtggggccctggtcagggcagccttgtcggtgggacctaatctgtagtgtcctggtcagagaggacttggtcagtggtgacttttgtagcaccggtctacagggtgacctggtcagcggggatctcagcatttggtgctggttcagtggggtctactcactagggtcccagtcaggggcatctggtgacataaggcctcgttattaggggcctgatcggtggcaacctgttccctggaggcctggtcagtggggcctcatctttggggccagggaatgaggtcatgatcagtggaacctgatcagtgaggccttgtcaataatgacctagtcagtgaggacttgtcagtaaagacttggtccgtgaggccttgtcaatgaggccttgtcagtaaggtcctgcgtcggtggagtccttgtcattgtgtgcctagacagat

SEQ ID NO: 308299 - DNA, 1000 bp, Homo Sapiens
ctgtaaaacaatatatgtttaagttaaggtagatatggggacttcagtgacctttattattcattccaacaaaaactcaagataccaagaattacaggcaaagcctcatcaattcttaacatcttttctctctaaacaaaaactatcaaactgttacaatttacaaaaatgaactgaatgaaggtacatatttttgattcggaaatattaatattcaggtataatctatgtgttgtcataaactaacttcaaagtctgtttttattccttccctgtagctttaggttttatttgaaaatctgtgcttcagtgtttagatgcagtaataagaacaatacagcacaagtccagtaagtctacttagttgaacttaattatatgacctggaaaaggtcactttacctcccttgggcttggctcttcatttataaaattaaagggatagaattttttttttttttttgagacaaggtctcactctgtcactcaggtgggaaagcagtggtatgatcacagctcactgcagcactgacctcctgggctcaagtgatcctcctgtctcaacttctggagtagctgggaccacagatatgcaccaccatgcctggttaatttttttaaaaaactttttttgtaaagatggggtcttaccacgttgcccagggctggtcttgaactcctggaatcaagcaaccctcccaccccgcttcccaaattgttaggattacaggcatgagccactgtgcccagccaaagatgtttacttttgctttccctaaaatcccattaaacaaagaaatctttttaaaggataatcccacatgaataaagacaacagaagagggcactatcaacacaaaattctggaagctgaaaagcagatgcattagtggtaactgacttaactgacaaaagaaagctaattgttaaactgacagtggagaaaacctaaaagcaacttaatttaccatacagaattcccaaatatctcaggaattgg

SEQ ID NO: 308300 - DNA, 1000 bp, Homo Sapiens
gtgtgaacaagccttcattgtgcaagcgtgagcccaacaaacaaacaccaggtctgcgctggccgaagacgaagcgtcctccctggaggtgggaacaagtcacctctgaccacacctcctctgacgccatcacctcctcctggccccacccaagggctcgacacaagccccaaggtcggggggagaggggcggggcggaaccgagggcggaggccaaggtgggattccaggaaggccttccgaaggatggaggtgggtcctgtccctccaggtagcttgtgggtgtggacagcaggacttgctggctcagtgtgggcacaaggacactgtgccactggttgagtgagtggtgagggattggaggtggctcccagaggcctccatctgcatggccctggccctgtggctccagcaggctgccctggctgtgggtagcccaggagccacatgcgcttagtggggccgctctggggcaggggctctcacaggacagcatgagccactgagccgcctggggagggccaggccaggcggggagctgtggtgcaatttgctcctgtccctggaggtctgtgggcggaagctgtgggcacaggtggacatggctgtcagacgtggggtcataggctcccactccccagctcctgcctcctcacagacagaagccacggccaaggagaggagagacatggggaaggcagagatgagggaacaggaagggagaaggcaatgaggaaagagaaagggagggtaagatgcggagggcacaggtggatggggacgagggggccaagcatggacagcaggaggggagaaggcggaggggccgagaggcactgcgcaagagggccttcaggcagagttgaggtctgtggccttgggctgggcttgcgggaggtcagctccgacagcttcttcagccgcttcttcagctccagcgggaacttctcgtagcacctcttacacacgggcttcatgtcgaactccacaaacttgttct

SEQ ID NO: 308301 - DNA, 1000 bp, Homo Sapiens
ctcttttctttctaggacaggatctcactgttgcctgggccagagtgcagtggtgcagtcatggctcactgaagcctcgacttcctgggctcaaaggatcctcccgaagtgctacaggtatgcgtcaccttacctggttccaatgttcctatcaaatttattttggcacgtatatattttatagttgtataaaactatgacaggcatttaaatggagatgtaatttacacccagctgtcctatgtacagtgtggtgagggatgtgtagatttttttttcttttgagacagaggcttgccctgtcgcccaggctggattgcagtggtgcagtctcggcttgccgcaacctccgcctcccgggttcaagcgattctcctgcctcagcctcctaaccagctgggaccacaggcgcataccaccatgcctggccaatttttgtatttttaacagagacggggccccaccatgttggccaggatggtctccaactcctgacgtcaggtgatctgcccacctcggcctcccaaagtgctgggatcacaggcgtgagcaccacgcctggcctgtgtgggaatctaaagttttattgaagcaactgccccctgctctaagtagcgcccagactgaaagggaacatggccaggttcccagaagcccctctgcctgcctgagccactcccaacctccacgtgtaaccaacgtctcggtttctaacaggggacaaactctgtgttgaatgagactgggtggcagtggtgagggcaggcgccccttcctggtcacaggaggaaaacgcccagcagctccccatcgagcaggatgtcatctggtagcttttgagagactccctcatcaggttcaaggattttccttcttctcctagtttgctaagagtgcttgttataaaagggttttgacatttgcaaatgctttttctgtatctattgaaatgatatgatctttcttcttcattctgtaaatatggtgaattaccagtggc

SEQ ID NO: 308302 - DNA, 1000 bp, Homo Sapiens
gatttgggttggtttttatctctgattcttcccagtaactcatccactaagaaccctgcccacaggagggtctgatccaacggggggtttgaggccactcagctcagcctggttcccagggccagtgtcccactccagaggccaagtccatgctcccctcccctcagcaggcctgttcctccagagctgtccagtctctctgccaggctccaaattctccatcttcagtgtattgaccaaacaatgagacaggaggacagctgggagagcgggagtctgaaatcactggtagagtggcccaggacacacacaggagagagtctccaccgctgctgagatgaagggactctccattcttctcaaaaggcttgctgtgtttttggcattcccccacctgactttttttcaagtgagttgttccgatctgaccttagagaaggccaaactgggtgcatggtcatgtaggtggcctctgatttttcacttggttcttcttcctcgatcacctcccgtacaattattggggagtaaatgtgtttctagagggggaaaatggtacaaaaattcctaaaaattagatgaatcttatacaccagagaaaaggccacccactcctatttgctaggcatcgaccacccaaactgctggttcagagggttactgagacctagagaattctcaacaatgataattcagtcttcagtcttcttgaaaattaactgtcaaagaacacagtcttaagaaccaaactctttgcttcaaaagccaaacatctttgtttagatggatgtttaggtagcagcaggggttccttatcttgctaaattccttgtattctggggttatttccttctaattacagtaaaggcagaatggcattaatcagcagtgaattgtcatcatctccctcagaggatttatgtggcagggccagccctcattgaacctcacaactgtgaggttcatggtcctgtcactcgttggtaaagcagtatcatcc

SEQ ID NO: 308303 - DNA, 1000 bp, Homo Sapiens
gaatgaaaagggcttttactttctttttaaaacaagtgatttttaagggtttgtagaaaaagcaaagaaaagcataattctcctcttacttcaagctagtgtctgatgagaaagtaccaggctaacctctgaagaatcctaccccaacaccttcttctttcttctgctgggatgaacatctaggggtaagatatgactgctctctaccatctggggacttctcttctttatattgttgcattcctcaatctttgcataaggaagagaatggctaattcctctaggtgccaaggaagagcttccctcttcctacagcctcgcatgtttcttttcccactggttgccaggaagcttggagatatggtgacgactattcaggcacacatctcttccttgggtcctaccacagtcatctcctccaatatgcagtgatgttgacaggcttggagatggtgactagggagttctgaactaggtacttcaaatccatcaagtccacagtaaccaggagctatgatcatttcttaggttttctgatcttcccttctactttatttgtaaccatctggttgtaaatgttttcttgtaggttgcctcaattgattgtccattgtgggagtaggtagtgaaaaacagtaataaaataagactcatagttctctgccttatattccctcccgtagtcttctggtttctagctaagaaaccaagtctgaagcaccttgtgaagatgaacttttttcttcttaaaaaaaataaataaaacaaatatactggcttggatttccttctcttttcttactttcccccttaaaaaaaagcagcagccgccgtgtggacccttaatataggcagacagtaggtcacctggagatgcttgatacatgaggggtcagaaagaagcctggtgggcgagcatggcttattcagtcctgggctgctgtgggatgatccatcttcagtgggggatgaaagttcccaggctctccctagagccctc

SEQ ID NO: 308304 - DNA, 1000 bp, Homo Sapiens
gctataaaattatctgggtttaattattatcaacatcagaactatagaacattaacgtactaaacctaaatttacaattacatgtacaaaaaaaaatgttctttgtgaggagcaattttcagcaaatctgacaaacagcaagagtcattcctattttgggtttgaaaagagaaatggaaatttccaagacgcccccctcctccctctcactccagtgaccctctgaacatcaatttgcaaaggcctgaggtagaaagggaggtattaacaatatcaggcactcattcttcccctcttatgaaagggatgaatttttaggaaccgttttccatcatttattatactgatgtgccatccatctgcatcattaggttcagtagttaccatgacaatatgatgcctacagcaatctaacttgatagccacatgccagaatgtgaaaaaataggaccagctaagaaagtgagagaaatataattaatctgaaccacattcaaaaaaatgtgcacaaaactaggaccaagagggaaactgctgaaatatcattgaagaggaaattataaagggcagcaataatcaagtttcagtataaaaactttgctaaatagagccatgtattggtctattactaagacaggaagtagtcaaagttggtctagaatattgttctgagcccctgcccctccccctgcttcccatttcttgctacagggccctgcggtatcatctttgattctagctgttagggccctaatttccccaaggctctcaagccaccaccataagtgccaccaccatgtcactctgctcatgtgcagtctgctattagacccagactttccacctgatgaaataatttccatcattgtgaagttaatcttaagagactgaattgtgctgtgtcttgagagatcctgtcctcttgccttctaagtgcccggtggaggcatcgggctagcacaaacctcttgagggtcccaatatggtagagaggggctgg

SEQ ID NO: 308305 - DNA, 1000 bp, Homo Sapiens
gcggccgcgggccaggctgtcactcaggttccggttcaaggtcaggacattcagcagaacctgtggtagccaaggtacagaaaaatcagggctgtcccaggggtgatggtccaggattcctcagctctcacccttggtccaggctccttagtcttgagaattcttacaccgggtgtcatctgagcctcctaacagccctggaagacaggcaggcctgtgatgactgtttccatttcacagagagggaaagtgaagtccagcaaggaaaatgacttactccagagtttagaggaagccagggaagatacaccactagaaccaagtctctttaatctagcccggggctcccttcttttctctctggatagggcaaggttaatagctaggagtggtctagggcacaatgtgggtgcttttaacttagtggttaggagtgtgcgtaggctctggaaccaaactgcctccctgctctttctagctgaaggtacttgacctaaagtcttaacctctctgggcttcggtttcctcatctataaaatagaaataaggattctctccagaactgggaaggttaaaatggttaacacacataacacagtgcccagcacttagtacgaactctttaaatgttagctattgttattatttccattttaaagatgaagagactgaggttcagagctgttaagtgaatgctccagcatcacacagttacaaattggtagcacttgggccggaacccaggagtgtctgattccagaacttaagatcgttaactcaccacctgccaaaataggtgcctggcatatatatcaggttctcaagacattcatggagccattctgaggtgttctggagaaaagcaggcccttcctttcaaatcccaccctaaagagggctggttgtctattcagatgctgggtagaggtataatgggacttgaggttaacagaacccaggccacccagatgctaaccccacttttcaatctactgaccct

SEQ ID NO: 308306 - DNA, 1000 bp, Homo Sapiens
gagacagagtctcacttcgttgcccagcctggggtgcagtagcacaatctcggctccctgcagcctctgcttcccatggaggccttgtttatatacccccatacccaaaaaacaaaatacacctgacttcagtggatccttgaagccaactactagttttcaggaactacagaagacagagaaatacattaaactaccgttaaacttcctgcaagcagcaaagtctagatagtctaggtcaacctgggatcgatcaaattaattgcaagcagagaaagaaacggggaaaaaaacctttagattgattggaagccatcagccaatcacaatgtgtgtccttatgtagatactattttaacaaaaaataaaacaggatgcttgaggcttggaaatttgaacataagatatatgatataaaggaattgatagttaattttttagataagataatggtgttagagttgtgatttttgaaagaattcttaaccttttgacacatatagttaactatttaaggtcaaataggatgcctcaggttgcttcaaagtgatacaggggagtggaggggaaaggggcaggattggccatgggttgatggtggttgggcttgggttatgggtgcaggtggattcattatattgctctgtctacttttgcaagttcaaaagtctccaaataaagagttaaaaacaaccacaaagtaggcggatgggctccaagaagggctattggcaatggaactggagatttcctctctagtctggagctgagaccatcagtgtagactatgcccttgatgtcacccttcctgaacccctcagggtgtggcgccttaaacgtacagtagttacaggcaaagagtgaaaaagcagagaggtccactctcttggttttcaaatggactgaacacagtgacccattaccaggtagccatgaatattaattgaaagtaaataaggatgactatcaaaacactaagaaaggctgggcgcagtggctc

SEQ ID NO: 308307 - DNA, 1000 bp, Homo Sapiens; identical to SEQ ID NO: 119929

SEQ ID NO: 308308 - DNA, 1000 bp, Homo Sapiens
agtttggcttttattttaccaaaaataacaacaataaagtcttccctctgtttcataaaaataaattttccaaccctccccctatcccagaaatcagcccttgccacagcctagaatccatcatgcaagtcacagcactctgggaaaagctcctactaccctcgctccacagcctctggcaaagctgccaggccactctggaggcggcagaggcagaagtcccaggcccagctggctgggcccaagagctccatctgtttccccaaagtacaggcagcttctaggccattgagtggggcatgatattggatgcttggctcaggaaacaaccccagccaacccaaggggcagtgggacatgttggcctcaggttagaaattattgctcaaagcagaaacagttgtgtcctagagagggtctgttaaaccctctttccatgtgtatctctatgtagcaattgatgggccctgcggtcaggatccctggtttctccagctccatgaatgcctccctgtgaggccctggacagtttctccctcttcttctcctggcttcagtttccccgtatgtacattgagacagtaagactggatgattctcaggttccctctggctttccattctggcatcccagagtggaggctctgggagggcagaaccctgttcctgcctcagtttccccacctgtgggtctgcgtatagggctgggtatggaggtactgagtaatggagtgctgcgtgaacatcccagtctccctgtggatagctgtgctgtgagatccaactggctggaatgtgtcagggatggctgggaaggaggcaggtacttttaggatggaggatctccatgcctggaagagtccattcaccaactacatcctcaatgtgctgggatgggagacaagactccaaagttcccaattcaagttccacaagctccttggacggggagattattttgtgctgggcttcagatccgaggagccaggtctgtagattc

SEQ ID NO: 308309 - DNA, 1000 bp, Homo Sapiens
attgaaaataagaccctaaattccttttgactgaaaggaagttatcagacaagatgcaattttctctttctttactgacaactctgtcatccaaaggatcacagccatgtcagggtgtctgtcttagaaagaaaaaaaagagagagagagagagagagagctagtgagagaagccctgatgcgcgtggccatctttgcatcaaaattttccagacctctatttttgattgtgatcccactgatctgagtttgaaatgcgaacgcagtgaagcccctaagccttcaatcgtgtgaaattttcaaaagatctctagaagcaatctcaggctgcctgacccctgacaggcaccgatctctttattcctctctctgccagcacttcatttgtcggaatatctttcagatttgcacctccagatgacaaacctgagtgtttattatgtgtacatgaatcggaaatcttcaagcccggacaaaagcaccattttaaacataatatttaatttcccagcctaagtgtctgcttctttatttgcttttcattagcttaaatattttttccaagtctccccatgtgtcactttgatatttagatgattctctcttctaatcgtcatttcccccttgaaaaatcccctgttgcccgcgactgctgggctcacacggcaacgtcaccgtgcggccgttggcgaggactcagctcgacgcacagcagttcagggagcgcggggtggggggcgcgtctccagacaaggtaagggccggagggctgccaaagaaagacttgctttttaagccagaggccagggctgggcccaaggcagtgaagactttcccatctcactccacccttctccttcaggcctttttaattccccgtattacttttgaaaaaaaaaacaaaaccctcaggcgtcttgaggacgtgctgggggcagttttagctgactcgagtgtgctcagctgctggccctctgagcgtgggcgccaggtttagcca

SEQ ID NO: 308310 - DNA, 1000 bp, Homo Sapiens
ccatccactctctttacccacttggcagctgcactcaggagagtcatgtagcattttgatgtcaatggcttcttctcttgtcattttgtcccataagtatcctcagtatagcaaaagtcctaaaaggaggtgccactgtcttattactctacactttggaggactccttcctcttcttcaacaacataattacctcctgtgagtgggaaagtggggaaagcatgactaacaaaggctttgatgagaagatagagtcttttttttccttctttttatttccactgccttggagcaggtttatcacgttagagcattaattctttccccttctagggcactgcatcagagcatgggggacagaacaaagaaccagccaagaagaaaaggaaaaaataaatgaaatgcctgagttaatgtgaactttggggcttctgcttcatttttacccaacaagcaacaatgccccttgtcctgtagtccacaccgatgttggcatcttggttctgaacccactgaattcaactgcaccttcagttagaaggaatcttcttggcaggtcctgctactgaaaaatggctggccttaggcaagcccttttgcaaaaagcacagctgaaagcctgagtttgggagcctgcacccaccccgatgaagctccacgggagcaaatacagagcctccaggcagtgctatggtccaggctggcttcgtttttccaaggagcctttggtgagttcaattatctggtaaatatccagcgcttcacctgaaagatagtgcaaattggttaggatgccacctcaagaactgtaactgagagctcagaagtgagcaaaggagcttaatgctaaggtcaaaaggagagtgaaaggttgagaacaattgccacgaacggtaatgttacatgttaggagggtctgttttctttttatataagtgtgtcttagatatattttaaatagaaaataagctttctgatttacttgtttggtatttaaagc

SEQ ID NO: 308311 - DNA, 1000 bp, Homo Sapiens
tgcgctgggtggagcgcggagcggcgggcggacgggcgcggcggctcccgcgagcctccgggccgttataaaggctagccccgccgtgactcacgccggcgcccgcccggcagcacacgcggggggcacggcgcgggcacacaccccacgccccacgcgcacacgcgcgcccgcctcggcccggccggctcccagacgagcacgtgctatgcgcggccccccgcgcccccgcctcgggcgccacgcaggcagcgctcccggcggggcgccccgctctgcgccgttccctccgccgtcgcccagccaccgcctttcgcacgcgccggaaccgcttttgtggtctccgagacactcatttgctgtcctggtttccaaagctccacgtgctcagcgccgaaaacttgcaaatcatttgctgtacagatgtttaggggtcgcctactacgtgcggggcgctgtggacacatagggggcggggggtgggtgagggggacacagcagcccctgaatccattcgtttgttcagcaggtctatactgggcgcccgctgcgtgccaggtactgccaccggctctctcctcacggtggaataacttaacagagaagacagacatcaatcaaataccctggaaacgtggaaggcaggggaaagaacaaagggagagcaaaatcgccccaatcccacatcacccgcgacgtgaaaggatttgtccttccagctgcgggactcctatttgtttatttcaagtcagaggccttccctttatgcccacatctgttcccgaccctctcctctgattttcctcacatgtatttcctcccctcttcagccccgcgccagctccaggcacagccgttcagggtgatgccaaagggaaatgagaacgcctggtttcgagtgccagcctgaggccccttaagccctaggtacgcagctctctcttctttcttaaactttccagcccaggaaaatcacccttcggttttacagatgcgatag

SEQ ID NO: 308312 - DNA, 1000 bp, Homo Sapiens
cagatgtctcggagtctagaaacactggctgagcgggggatgcaggcggctcccctccaacgtcacagggcttggcagaacgtagccacgacgggcacgccatgttccccgaagaaatgccttcctcaggccgttagttacccctctggggtctcagctggcagccggtgctccacggtgctcggagttggggcgctgctccaggccgggggttgggcccagcgctcaccgcagccaggggagggttgggccgttccactgagcggcagggcggggaggaggggcaagggcggcccctcctgcagacggtggttgctatgggaaccctgggaggcgccaagggaaagggcagcccaaggacgtccatggatgccctggcctggacgcacaaaggacacttgcacaaaacaaacttttaacaaacttttattaacaaacctcgcgtagagccaactctaacccgactaacagcaaaaacagcattgctaacaagatcaaggatggaggtgcagacccaataaagaccgtctcttaaaaaaaggactgggaaaaatatatatatatatatctgcatgagtacttcttaaaaaactaaaactttccagtgttgcaggaaaaaatatcccaaagtgatttcagtcggttaaaaaaaacagtacttggcagtctgtgctgccttaaaaaccccaactggacataaccctaggagaaaatcaccccaccccataaagacaaaattcccttttctcctcttccttgttcaaattccactgcttattccaccaacacccaaggaataacaagacccagcttacttctctcggtctcttatctgataaagctcacagcaatcttaacctctactacaatcaggaaattgagccctaatttctgggccagattctggaaagttgcaaaacatccttatgctgcgaggggcctgaggactccttcaaagatcaagggggcagtggaactggcagagactggcatgcctgcc

SEQ ID NO: 308313 - DNA, 1000 bp, Homo Sapiens
ggctggaaggttaaacaagttaaaaaaatatatgtatgtaaagattttagactactgctgtccaatacaattaaataaaatatttggtatggctgggtgtggtggctcacgcctgtaatcccagcacttaggggggctgaggagggtggatcgcttgaggccaagagttcaagatcagcctggccaacatggcgaaaccccatctctactaaaaatacaaaaattagccaggcgtggtgtcacattcctgtaatcccagctacatgggaggctgaggcaagagaatcacttgaacccggaaggtggaggttgcagtgagctgagatctcatcatcgcactccagcctgggcaacagagcgagactctgtctcaaaacaaaatcaaaacaaaacaaaacaaaacaaattcgcatcctctgtcatgctggccacctgtcaagggctcgggcattgcaggtggccagtggcggtcacactgcacagagcagatagagaagacgcccaccactgcaggcagttccatggctggcactggctctggcagttcctaggccatggctacatggctacatgctatgcaggtgacacccatgacagctttgcccccagagcccagcacagaccctgtcacaaagtagctatccgataattatttattgaaagaaatgacgggatgaatcccagactccggagtaagccaccccctcacacacacacccctcccctgactctcaaaatccacagcctgccacagcagatttgctaaaaagcaaaggcaataataaccctggggtccgtccaactcatgccctgtacccaggccctaggagggcgagggcttagtaggtatcttcagggtcagagcctgagtcctcgccttgttggttctgaatctgactttgcttccggtacaaacaggccacctgcggagagagggtgggacggggtggtcagaagctccctggctgctcccacctccacaaggttccagagaggccac

SEQ ID NO: 308314 - DNA, 1000 bp, Homo Sapiens
gatccacctgcctcagcctcccaaagtgtcagggttacaggtgtgagccgccgcgcccggccacagtttatagttctgtgcctgcagcactcccccagttcctcagtgtggtcgatccagacatctgtcttgtgccaccacctcctggtgaccacctcgctgtggaacagctggaacagcctgctggaccgacccacccactgtgtggccatgcaggcaggccacagtgatggcctctcagtcagtcggcaaccagagaccttgaggctgcctgtcctaaccccaccaattagaacccttgtgggaaagctgcttgggtaacaccctggaccccaataaagactttggcccacaggtgtctctctctccctttctccctctccatctttctcactcgccctctctctctctccctgtctccctctctctccccctctccccctctccccctctccccctctccctctctccctctctccctctctctctccctctctcccccctccctctccctctctccccctccccctctccccctctccctctctccctctccccctctccctctctccctctccccctctcaccctctcccccctttcctctctctccctctctctccctgtctccctctctccctttccctctctcccccaccctccctctttctccctctccctctccccaccggtggttgagcatgtgtgttctggactatcccctcttatcagccccaagaggcacagccctctctctctggatctggaaggagtgcgctgctctgattccatgtgtcctgtgccgctgcctcctctgtgtccacctgagccacacgccccagcctcactctcctctgggtgcagcctctcctggaatgtggatgacatggatatgacctctccagagagaggcctcaagactaaattagaggaaaacaagacaaaaagagataaagacagtggggaagggaaagaggagcgggttggggaggacagaggca

SEQ ID NO: 308315 - DNA, 1000 bp, Homo Sapiens
acaagatggatactttgccaacaaggcagtgtgtggcagaaagtacagtgtaatagatgaggaaaatttcaaggccactcctgtctctagttagagagaactactctccaaaccaaaacaggaaagagtttctgacaaattcctaaaaacaaaaacaaaataacaacaacaaacaacaataacaacaacaaaaaaagggaagaaaggaatttcaaaccaggaaataaaggctttctattcttttttttaaaatctatctgaggtacactccctaaacctatagcaagtaataaaaagcttacaggctattttccaaaagaaatgataaagcatgatgtcatacagaaggttaaaatagacttacaacaagtaaattcagcattctgaagactaaatagaatgcatgcacatctcttaaaatatactagaattttttctcctttttgctgtgtgtataaaacttcatcttttactgctagcaaatttactgcttttggccagaaaagaaatgctgaggacatggggttaactttctaatttgagaagactattttggtgaatcaccttcagtgaacaaatgcctgttatttactgaccaccttgagtctttaaaattgaattattcttgtcgtttacaaaaagtaacactttaaaagatcacagaatctctcacatacacacacacacacacacacacacacacacacatgcacacacacactcaaaagtaccaaatcaggcccggcagctgcagagagattacatcataactcagctgtgcctggattacccactccacactggcagcattcaaggttagaaaaatcaaatggcagcacaattggtcagcagcttctcttcttctggaatttttccaggttcttgaaacaaacagacaaacaaacaaacaaatgaacataaagctgcaatcactcttgcattgatttcaaaacagtaaactaggcggtttccttggagaagcagagcctgtccagaagac

SEQ ID NO: 308316 - DNA, 1000 bp, Homo Sapiens
atctgacggcagttagaggctgcggggatagagatgggagtcgctggggggaaacccagacccaaagcccattgccaggaccccgacgtggaaacatcgtgggtgtgtggtccggcgggggatggggggggtccccttggccgggctgaggagtggaagccccggtgcgcctggggctgccccagggcctggaggaaacaggtcagcacctggagggcggggcagccaccagggtccccagggtcatcaccagggagggctgggccggggccagacacctgggggccctaagcagggcagagaagcgctggtataagggttccttcagggccagagaggaaactgaggcaggcttggcccacatgaaccaggcagcacaggtgggagtccgggggcttttgctgaggatgaggggcggtgcgggcctcaggagggtcccagccaaggccagggcttatgaaaccagacagtgtcccccagagaccacaaagcaccatatagcaaaagtccagaactttattaattctccctggtcccgcccccgccccatgggatgcttgcaaggtcaccaggcctcaggtccagggggtccgaagcgccgcaggagctgctcctggtcttccaggtccttccgcaccttcttgcgcatgtagaagatggggcagtcccggctgcgggtgggggcaggggcaggggcagggtcaggaccagccaaggcccagtgcccagcctgggagaggggtgggggctgttcccaggactttggtccccgcctgctgcccagcccacccgccccctcccgcagcgggctgtttgctcagcaggcacggggggggtggggggggggagccgataacagcgggtgcctggcgaggtgcagggccatggctggccgtatatcacctgtcacctggcgtgggaacccaccccgcctacccgttccctggggaaagcccggccccgccctggggagggggccaggctggctgggtgtgtcggg

SEQ ID NO: 308317 - DNA, 1000 bp, Homo Sapiens
acatcataagcatttgaccatcctgccctaaaacaaaacaaattgaacaacaacaacaacaaaagataatagcaaaagtggcacagtagtgagctcgcagggcccattcctatatagaaacacagaaaaataagcaaaagctgccagaattgacttcgtgggaactctgggaaacagtaagaaagttttacagcaaccaagtgagtgctgaaccaaggcaaaggtaactgaaacgcaatgatagagaagaggggcagggaagtgttgggtagacaaaggcgggtccctggtaagggccctcccctgggcctgtgcccactggacctaggtgaggacaggcactccttccttcacgcccaaatgttgcatatcccaagaccaccctgtcccgccacgcccccatcctttgcctatgaaaaccctgagaccctagcaggcagacacacaagcggctctatgtccagaggaactcatcggaggaactggacgtggagcggggcaccccagcggaagggagcacgccagtggaagagcacactgacagaccataggagtcagtctgttatattatcatagtataatattataaaattattataatacaataaaaatataaaaatataaataatgtaataaatatggataaaaataataattacatatttatatttatatgagaacactatgaataattttaagccaaaaaacaactcgatgttcatcactggatgagtagacgagcaatttccagtatattcatacaatggaatatgattcagccataaaatgaaatgaggtactgatacatgctgcagcaggaatgaacccccaaaacactacacttggtgaaagaagccagacacggaaggtcacatattgtatgatcccatttataagaaatattcagaataggtaaatccatagagacaaaaggagttttgtagttgccaggagttggaggcaagaagagtttaacaggtatgcttaatggggcctccta

SEQ ID NO: 308318 - DNA, 1000 bp, Homo Sapiens
ttaatatgtgataaactctaatcataacattctacatgttcttggcttcagattaaaataactgattaattttataatgttttacaattttaaaaatttttattagaggtagggtcttactctgtcatccaagctggagtgcactggtgcaatcatagctcactacagcctcaaacttccaggttcacgcgatcctcctctctcagcctcctaagtagctgggactacaggcaggagccaaggcctcaacctaatatgccccaaagttgatacaaattttattagaaaaacaaactttttgtaagtctaacaggtaaaggaacaaagaatcagatctatttttcttatagcttccttactcttcccttccctcttttattctttatcacctaaaagcttggtcaccagtaagttgaaaaggttaaaatatggctatgaaagtagaaaatatagaaaaatatttaagatgttcaacagtaatttttagagtaaagttagttaagcactagagtttatgcaacactgtaaaatacaagtattttactaactacactggaaaaaacacctacttgcaattttaattaatcattataattcaaaaacaggtttatataactggccaggcccttttgaaaatataagtacaaatcttggggatatgttttgaagctggcttcgcttcacagactgataaatctactgtccaaaagtcacaagaattatgtctttattggttcatcttagaattaaatcaacatggaagaaatatgtactttttgaattaaacaaaatgttttgataaaaatgagatacgtgtgtataaaagctggaaaactcatgtcccctgaaacttggtttccaccagatgagtttcaaattcagatactaaacacacatgaagaaataatcaaatgaattctattcatcctttccccaaagttttgcttacaattaagatataggtattatttgtatgccgaacaaacaaaataaattggaa

SEQ ID NO: 308319 - DNA, 1000 bp, Homo Sapiens; identical to SEQ ID NO: 119930

SEQ ID NO: 308320 - DNA, 1000 bp, Homo Sapiens
tttgtatttttagtagagacggggtttcaccgtgttagccaggatggtctcgatctcctgacctgtgatccgcccgcctcggcctcccaaagtgctgggaatacaggcgtgagccaccgcgcccggccaacatttttatttttaaacactacccatgctactacagatttgtgatactatatgggtcagatcttccaaataactggtaataatttttattaagttttccctaatgcattttcaattctacatttcaagagtattgaacttttctcacttttgcactctaatcagaaaaaccagaattaaatttttattttaaaatacatttaataaaaataacccatagttttacatattttacatgtgtagaatatttacaaactcacttctacagcatttacttaatgtttactatttttccattatttgcctttttggctatttccctcagtagtaaaatgttgtccagtgttctctttaaaaaattagtttcttgggcaatcctcctaggaagcaaaaagaacaagaaaaaaaaaagttgttcacatttaacaaagttcacattctcatagcaattttaaccagtcactgcattccaactacattatttcactgacacattttttccagtagcacttgttaaacatttagcatgtagtttacagaaggaatttatgaagggaacaaggtacacatacatagttcccataattctgaggtatacacaaaagctgccgaagtattcacaatgaaagtaaacatacctaaaacggcacagtctctctactttatacaattaaatttataaaaattaaatagctagcaagctacatttctttgctgttgttcagtcgctagccatacacgagctatttggagttttctaaattcatttaatttcttttaaaagggggaatcttaccttgttctaaggcctctgttcttttcctttttattgccaaagctggatttgattgctcctttaaggtttccactg

SEQ ID NO: 308321 - DNA, 1000 bp, Homo Sapiens
ctgtttctcaacaagaggttccagccagcctcttgccacatatgagtcataactcaagtgttttgtttgtttcccttggataaaagtgactccgatttttaatggctcctctcaaagattaacatctcttcactaaatacagaagaattccatatgtaatgaatttccagcctccatgaaaacaaaatggactctttcatgctgtctcaacatatgaatacattgctctgtcacctgggtgttattaccgacttaaatctgaaagaagctgggcacggcagtggtgtgtgggtgcctgcagtcctgaggagctgggactgtttcccgaacaatgcctttccaccacacacggtggttgtgagggccagctgaggcaaagccctcaggaagaccactcaagcccaggagtccagcctgcgccgcaagacagtaagaccccttaaaaaaaaaaaatctgaaagaaaatatagagccaaatctttagataaatgctttattattttctcaaaatgttataaaagtcatttctccttagtacagagagctttatacattttatctagtaatgaatacaatctagtttaacactgatctattttactaacatttccttaattttcaattcgtatttttccttttctttcctgattttagctttttttaggcttctgtcaccacaaaatgttacttggaaaactagatcccagcagatgacctgtacttctctgctctctcccctactgcaaagaggcagtgagggcagcattagtaagcctgactcaggggaaggtaagtggcctgcagagaaatggtcctaggtccgcaaccgaggcgagtgaacttgtcggacagatgaagactctaactggaagaaacgatcagcgcattcacggatgcaccaccatccagaaatctcccggtggcttccatacaaaaactgatgtttctaaagatggaaagaacaggtctaggaggcagaagagtatctcctagcaaagtg

SEQ ID NO: 308322 - DNA, 1000 bp, Homo Sapiens
gcatagttacaacatctgccagacctttgctgtctttcttgagaaccttggctctgctgcttctacagtccaggcccaatggtataactctcaatacagcattagcactcagctgtggagggaagaatctcagatcactgacgaaaaagtccaagttccttcctccttaaaatctacccatgtctctctaacccctgtgttcatctctgcttagtaaagaggctcttgaaggcattgttgtagttcttgttaaaagctgtgtaaatcagggggttgaagaaagaattggagtagccaagccacagaaatatgcttttccagatggggggcaggctgcaggcacagagtgggctgatgagttccgtcaggaagaaggggatccagcacagcacaaacacgccaatcagaattcccaccatcatggctgctcgcctctccttctgctcccgccaggagtccccgctcacctggaaggacaccgttgctttgcaatgtgccgtgaacaccacttcagcctcatcaggtgcttcctttaccttggaacaaagaaaataatggaattaaaaaataaaacagaaaaacaaggaagaagctgaacaaaccagaaagacaacaactcctcttagatttgtcagagaagtgagctcacagggctaaatgctgctccaaaaatggtcaggtgaatatagagcatcacagcttactagagcaaaaacccacaaccagaaacttctgcaggaagcagtgctggggtaagaaaacataagctctaattgacaaattgctggaggctcagtgtggaaaaatctaacagttaaaaaatccaggaagacttagtcatggaagggggtagagggtagaggtgtaccatttatgttttattatctccagggtctctatcaggtcctcacagtgaatactggagaaaagtcaccttgtgcttttggcaaggggaagggaaaagaatccattttgaactatgccaaaccattctgttctt

SEQ ID NO: 308323 - DNA, 1000 bp, Homo Sapiens
atatgaacatgactaaaaatttttaaatgccgttgaataacattaggagtgtatttattagtttactagatattaacaccttaggtccttaaagtgctaggactttgcaaaatctttgaatgctagcaaaacacagatacctttaacttgaacaatcttgggaaaattttagtaaacagagaacagagattgtatgagatctaaacatttcttttgaacatttttgtgaatgaagctattacttgcttgtttctcaggctgtagatcatggaatttaataaaggaacgatgacagtgtaaaatagagactccatcatatcttggtcatctgcttgcggggatgcagagcccacatacatgaagacaaggggcccatagtataaagatacagataagagatgagctccacaggtggagacagctttttgtatccctttgacagacttattttttaagattataaggaggacaagtgtataagatataagaatagttccaatggtaaaaacttgaattgaatctgcgaaaataaaaaccattagaaagttaataaaagaatcagtacaggaaatctttaacaatgggataatgtcacagtaaaagtgttgtattatgttggaattacagaaggttaatctgaataaaaaaatttcatggattaaagcatgaagaaggccacctataaatgacaagactaatagctggatgcatagtccgttggtcataatgactggataaagtaaagctttgcaaatggctacatagcgatcatatgccattgatgccgagataaaacattctgtggttacactgattacaaaggaaaaaaattgtaccatgcattcagagagagatatcatcttactcttagctaagaagttgatcagcatctttggagtcactgtggatgataaccaagcatccacaaaggccaaactcccacggaataaatacattgggatatgaaggtgagggtctttccagatgagaacaattagac

SEQ ID NO: 308324 - DNA, 1000 bp, Homo Sapiens
tttaattttagcttatcttacttaacttatgctctccccataaggttaacttcatgaggacaggggtctctgtttcactcactgatatctatatatctgtgtatatctcaagtacctaaacagtgcctggtacacagtagatgctttaggaagatttgttgaattcagttaaaactagtttgtagcttctcagcagtcttctagtgcacaaatgtttggaactgcaaaccctgcgttaactttctcatgcatctatggtcctccccactagtcttcttagttgcccctttgacttccttgttcctcagagtgtaaattaggggattcagtagaggagtcaccagagtatagaagagtgcaatgcttttgttcacatcctgtgaataactggagggaggctggaggtacatggagatgagtgtcccaaagaaaatgatcactaccaggaggtgagaaccacaggttccaaaagccttctgcctcccttgagctgactttatcttcaggactgcatgagtaatgtgaccataggatgctaagatgagtgagagaggcaccaccaagaagaagacactgacagcaaagatttcagcctcgttgatggaggtgttggtgcaggacagtttcagcatcactggaacttcacagaagaaatgatccacttggtttttatcacagagggggagagtcatggtcaatgctgtctgtatcacagaattgccaaaccctgtgagccaagtggttacaaccaactgcaagcaaagttggggatgcatgctcaccatgtagtggagtgggcggcagacggctgcatagcggtcataggccatggcagacaataagacacactccactccccccgagtcccaaggcaatgaatagctgggtcacgcagccaccataggtgatggtcttgtccttccccttaaagttgaccagtgtctgagggacagtacaagtggtcaaacaaagatccataaaagagagattggagaggaag

SEQ ID NO: 308325 - DNA, 1000 bp, Homo Sapiens
tgtattaattaaaaagcaatagtggtgatgacaagagtgtgggataagagacagtaagctttacagtccaagctttagctttatgctttactgactatctgcaagcattagccagccccttgttagagttgacatattcatctacaaatcaagaagcttaaatacctattacctctatgttgagtgctcaatggtcttatttaatcattatctgaagtcactttttttctccaaagcttccttattgcactttttacctcagcatttctgagtgtgtagaccacgggatttaacattgggaccaccatagtataaaatacagcaacagctttatcaatgggcagagtggtcactgagcgcagatacacaaatatacagggcacaaagaataagacaactactatgatgtgagaaatacaggtggagagggctttacacctcccctccaagctattgttctttaaagatctcaagatgatcacataggataccaccaagataaggaagtttaataagcagataaacccactgttcacagcaacaaagagaccaagggtatgagtgtctatgcaaacaagttttaacaatgggtacaagtcacacatgaagtggcctatgacattggggccacagaagggcagccatactgtaaagagaatctgaatagttgcatgaagaaatcctcccacccaggccactgccaccaggagaatgcacaggctgtggctcataatggttgtgtagttcagaggtttgcagatggccacatagcagtcacaggccatcactgtcagcaggatgatctcagtagcaccaaaaatgtgttctgcataggcttgagccatacacccattaaaggagatgattttcttctcttgaaaggaatccacaatcaacttaggagctgaagaagaagaataaactgtgtctatcaaagaaaggtgggtcaggaagaagtacatgggggagctcagagcctggctggtggtaatggtaacca

SEQ ID NO: 308326 - DNA, 1000 bp, Homo Sapiens
acccgcccccaaggagccccatccacactcagtctcgatgtagaagttgagatcttgaacttcaatcagatgtcatgatgggatgactttgtaattgagctaggagcatccaaatcctgtcttctttctttgggatccttgacttgcccttagaaacctgaaaacttcactgggaagaccttgactacatacctccttacctacatgaggacggacactcctcctataataaatatagttaactttttacccaagagtttttctatagcatttctcatctctgaatttctcaacgtatatattaaaggactcagcatgtgtgtgataatggtataaaacacagtcatgaacttatcagtaggaaagtttgaaacaggtctaacatatatgaaaatacagggtacaaaaaagaggacaacaacggtactgccggagctgcaggtagacaaggctttacccctcttttcctgactgtaagttttaagggagcttaggatgactccataggagattaacagaaggttgaaaatgaccatacagattgctccactattgacaacaacagtgaggcctataaagtaggtgtcagtgcatgccagttccagtaatgggtgcatgtcacaactgaaatgaacaatgacattgggaccacagaaagggagactgtacacaacaatttgaaacgcagaatgtacaaaacctccaatcatggccaccaccaacagaaggaagcaaacctgtcgattcatgatggtcaaatagtgcagtggcttacagatggccacatagcgatcacaggccatcaccaccagaaggaagacctcagccccaccaaagaaatggtctataaatagctggcccatgcaaccttggaaggaaatagtctttttatcacagaataagcctacaattaacttgggagaaatggtagtggaatatgcagcatctataaatgacaggcaggcaaggaagaaatacattgcggaacacaaagaagggc

SEQ ID NO: 308327 - DNA, 1000 bp, Homo Sapiens
tgcagcatagactgcatgggacagagtcgtaaggttgtttaatgtaagtaaggacacacatttctatgactaaatgtatatttatatagaggaataatgcattaagaaatgtttctgcccatggccctgcatagggcatccttgacctccttgttctttaggctgtaaacaacagggttcagcaggggagtgatgatggtttaggtcactgagagaaggaggtcttgttctatagagttttctgacttgggcatgaggtaggcaatggaagcacagccataatggacaatgaccacagtgaggtggaaggcacaggtggcaaaggtcttcttccaaccctcagctgaggcaatcttgaggacagtggagatgatgaggacataggagatgaagaccagacccatggggaccaggatgacaaataacctgacaacaaaattgattatctcattgatagtggtattaatacaggagagtttcatgacagggaggatgtcacagaagaaatgaccaaccaccgtgtgacaaaaaggtaaggtaaatatggatgttacctggacagctgccatggccaggccaatgctaaaggctccacacaccagctggacacacaccttcttgctcgtaatgaccctgtatctcaagggattgcagatggccatatagtggtcatagcccatcactgtgagcaagaagcaattgttgatggccaaggtaacaaagaagaacgtttgggtggtacaacctgctagggagattggctgggtctgggttacgaagctggagagcatctgtggaatgatgaacagtgtgtacactgtctttgagctagccagcatgctcaggaagaagtacatgggagtgtggaggtgacggtcaatgcagatgatggtcatgatgatggcattgccagccacagttaatgtgtacaggatgagaaaaaccacaaagagagtgatgtgatgtttgtggaatctggagaatcccaggaaaacaaact

SEQ ID NO: 308328 - DNA, 1000 bp, Homo Sapiens
aaacgaaccaaatcccaggcccttgtcctgccccacagtgcctcacatcccttcggaagagtccaaggcctggggaggggcatcttcagctgaaggaggacacagggtgtctgctgggaagactggctgtcccacagcagtgcccagccttcgcaggacctctcttggtctctgtccgtgggtgaccctgctccagcctctcagatgatgctggtcctgcaggtgccctggctctgctccaagtggctggccttggtgctgttgctgaaggaggccacggggtgcagtgggaactcacggaggtgccattgctgccacttcttctgaacctccagctgcacctgcccgggagaccagccatcagcccaggaggagaggacagttctgtgcctggagccctgctcactcccccagtgactccacgcaggccctgccactcctgcccagctgccctgtcccctagcctgcaggccacgcagattgactgtttccagccccaatgtccagtagctactgagggtcccctctctcctgggcacatgcacctgcaatctcattacatcgtgtcttaaagaaaggacttgtgcaccttgggacaagtgtgtgcccttgacattacaagagcagtggtggggaaagctagctccctggcccccaggctgagaggaaaagaatcccggattaagccagaggctgagttctctgaaggtctggggcactgacaggggctactgggcagagggccagcttagaggagggtgtggtctgaaggtgtgggtagggcaaggcctgactccactcagtgatgggtccccagtgattttaagtgatttaagatgggtccccacttattcccaggaagccacccaagctcagaactgatctgggaactagggagtttctctttgtaaatttccttcacaattcccagctgcagcagctgaacctttgaagctaggcttgatatttgatttttgggaaacatcaaagatcactccca

SEQ ID NO: 308329 - DNA, 1000 bp, Homo Sapiens
tattttgaaatgcttgaataaaatagtttttaatttcaatagtaaaaggtattctgattcatgctaaatgctatcttacagtacaagatttgatataccatgctaagactacaccaccagaacccaaatcctcaatgttacctgagagtattaggcagctgctgtaggagcatcctgaaagggaatgttgaaccacatcatcattgcagcttcaaaggacacatgtaaatcaaaactctgtcatccagaacagttgacactgtggtattgttaagctcactgctcacaaaagctgaggtcagttggatgcaattatctgtggtggagactcttccacaaacaatttcactggtgttcctctctggcctcagcaaaataatgaggcacttaggagcaaatatacaacccaacaagccatggctggatgccaagattgcaaatatttccacagccattttgaacttgcctttggtgctcaaataaacagggacaaaagacatccaaatgatgaaaaagacaagcatcccaaaggtgatgcattttccttcatagtaattatctggtaactggcgagccacaaaagttgtaagaaagcatagcaaggctaagaaggcatcaattccaaacatcgagtacaaaaactctatggaaatttcattgcatcccagaatgatctttgtattttgagattccatgttcttgtataccatgggaggttccaatatcaagtaggctgtacatatgccaatctccgctagaacagagattagcacaatgattttccgataaagggggtgcatggatgtaagttgagttttggatttggaaattctgtaggctaaaaacagtgaactagtctttccaagaaggcaagacaggcaaagagaaaagcccagtgccagagtgacctggccagccatgcaggaccagttgtgtggcttgtcaatgaaaagcatggacgacagcagcatgatgatcagagaaacctgaatgagaaagc

SEQ ID NO: 308330 - DNA, 1000 bp, Homo Sapiens
tcacttgctagaaacgctccaggcaggctctagggctgcgttctctaggagtgtccggaccagagaccagggggccgggggcagcctccgagcccagggccggggctggccgcgcccgggcaggcctctgtccccggcgtctgccggggtgagtgggaaggggcgggaggggccgccttgggcccctgggatcctggtggtcagaccagggagacttcggcttggaagctggaggagcggcgggcacctgggctgacgcgggtcagcatggaaacctgcgtgctgcacgtggcgccgttgctgcctcccgacgggtgccggtatttggggttccagcccaggacgccctgcaggtgccagcgccgccacttccgcctcagctccgcctgcacctaggagaggggaaggtggtcaggcccactgctgtggagcctcttccactgctgattgggctgccctggacttagggttctgaactagccagtcttattctctttaggaaatcaaaatggagggacccctatgctgcctcgggcggtgcaaacttgggactgggttgaggccaggttcagaaggaggccttggaatggcaggaggtaagaggcagagaggatcctagaatacagtccagggagagggagggatgctgcctaggggtgactgtactccaattcttcccatcctgggtctccagctcacttgagtgggttttttgtgcaatgtaaccagagctccacagcaactcaaccttcattggaagccctcacccctccccactcactgcacacagccacttaactaggtgtttctcaaactctgttgtgcacaggaatccccctggggtttagtaaaaagctgtttgtttgttttttaaaataattattaaaatgcagattctaagccagcaggtctggggtggtcccagagatgcgcatttttaacaagggcctaggtgacaccagtgctactagtttgaggaccatacttggagcagcaaggt

SEQ ID NO: 308331 - DNA, 1000 bp, Homo Sapiens
accacagtgggtgggaccagtaccaaaacaaggaggggacaattccagtctgtgccctgcctccttctcccccctcaggagccaagcttccagcccagggcctgcccaaggggagggaagaggcgcaaacatgcgtgggctggcacctgcctgcggtcccagcctgtggatggaggagaggaggaggaggggagcatggctcaggtggccagattgtcagcagggaggccagacatgcggatttgggagctgctcttgctcaggatggagagctgggtgcccccattcaccccactgctggccagagacgggtgtcggtgcttgaagtccacagcgaagtaacggttcaccttccagcttcgccattttcgcttgatctccgcttgtacctgcagggagcaaactgggcggtcacttccagatggacatcctctgcagcctccaggccctgtcctggcctggggcccttcccaggctggcagtgccaccctcagcaccctccccactccccagttgcagcctgcggccctcaaggtctccagtgggggcttttagcagctgtaggcaaggaagcctctgaggagctgaccggaacagccccttcccttgccactttctgagcaaggccctctaatggctccctgttgttttcaggccaggcagagaatagtccattgggtccttcaggaaatctttaacaagcagtcccacagggcaggtggatcaggaaaggatccccactcttggctgaccagtaagagtgggctacacattagaattacctggggggctttaaaaattccagatgcccaggccataccccagaacaattatatcaaaagttctgcacaagacccagacatcatattttttaaagcttcccagtcagggttgagaaccattaaataatgcacccctctgggaaaacacacacccatgtagctcttagcatggtgagtgggggccatgctgagtctcagcctccatgtgccttctcagt

SEQ ID NO: 308332 - DNA, 1000 bp, Homo Sapiens
catggtgagagaggaagcaagacagggaaactgaggacaccacactctttctaacaacttgttattttgggaactagtccattcccacaagagtgatgattcacttcaactggaaggcattaatctattcataagggatccatccccaatacccaaacacctcccactaacccctacctcccaacactgccacattgggatcaaatttcaacatgagttttggtgggggcaagcaaaccatacccaaaccatagccctgatccatcctggggacgccccgcctccccactggtagcctcggagggggctgtgtccccagccatgaacaaagtctccttagtgtgacacctgttgactctcgtggagagggaggtcgtgggagtcagctcgagcttatcttccttggtgggtgtgacccatgggcagcagcggaaggcaagccggaatccagagcgaaacctgggggagcgaggggcaccttgagccagggagttaggggctcaggagctgtgatgtgactgcccccacccccaggaaactgactcccttccagaggaaagtcactgtctctctccaagagcctcccatggctcaggggctcttgagagatgccttcgtgggtgagtttgatttttggaaactgccagagtgttctggagctgggtctagtgaatgaagtgggtgactaagctgatttaggtcatctgttattacgaacaaaaaatgaccccagcataattactaaaaaaaccaaccaaccaacaaacaaacaaaaaaaccagcagatgttcttgtctgacttgttaactggcttctaagggatgagtcaaagaagaacctgctaaaacacaatggaggctttggcaacttgggagaacaaggatgcttttcccaaggggactacattgaaaaacccacactcggagccaccaagttctgatgcatttgcttgaaaacaaacagctctccccatggcagcactgaacgggagttcagagga

SEQ ID NO: 308333 - DNA, 1000 bp, Homo Sapiens
gagcgactgggcaacagagcgagactccatgtcaacaaaacaaaacaaaacaaaacaaaactgtgtcttgaaagagcctccccaacagtttctggaagttcctggtttcactggtgctcagagacagttgagctaatattgcagctggcctcctgaaagacagccccccagccagctgaggaaggcatcctgcctctggcctagacccagctgctgttgccatccatggagacacagatgctcttccctgatactgggttctctcctgcagggtccctgcaggttgttccatttagttcttcatccatggaactttgtgctttcttcccgtgcccgcttctgtagggcaggctcaggctgggctggggccgacattatctggtcctccggtggaccttctccctccccgggtacctgcatttgcatccccctcctccttaagcaaagaataaagcgcaggtgcatcaaccctgcctggggatacatctgtgtgtgcacatggaggtgtgggcgggtgagggggtcctccatccttaacacctgctcagggtcagtgtagaccaccccggagcagaagtgttgggcttacaggtcttcagtcctttctctgaactcggcaccacatgtcttggaattcagaatacgtcagagcagaggaaggtgctgtgtgcatgtagtggtgcgcgttcgatcacgattccgtggggtgtggacagcagtacatgatcactccactaacagtccctggtggggctggcaggactcacaatcacaggacaacttcgggaccagaaatcacctcacaccgggtcacgctgtgccgctaaacgtgtttgtggcacatttcggaaacatgttttggttttcagagttttttggagttgagaatcatggcaaatgcattggagacccacattatcctctttctgggttagctgaacctccctgtctggacatccctgctctggggagaagcagagaggcaaagtggaaagccaag

SEQ ID NO: 308334 - DNA, 1000 bp, Homo Sapiens
agctttgccccatttgcatattcattccaatatttcaatattcctgaaaatctacatatataaatgttatccataatacataaaaattttctctatataaatatacatgtgaagatatctatatttatttaattaatttttttttgagacggagtttcgctctttttgcccaggctagagtgcaatggcacaatctctgctcactgcaacctccgcctcttgggttcaagcaattctcctgcctcagcctcatgagtagctgggattacagacacctgccaccatgcccggctaattttgtatttttaatagagacaggggttttgccatgttggccaggttggtctcgaactcctggcctcaggtaatccgcccaccttggcctcccaaagtgttgggattacaggtgtgagccactgcgcccagccggtatctatatttaaacttacatcttacatttatatgtatataatattatacattatatgtatataataagtgtatataaatgtattttataaacataacatataaatatgtattatttttaatatgttacataattcatatacaaatgtatctatgtaaatctgttataaattatatatgtcttattcttgaaattttatttaaatagagagatagataatgtgtgtgtgtctgctaatatatacatataaatccccagtcttcaactccacacttcatccatgagctaactagggtgggcaccctcagctcccattcagtacccaacacgtggcagagctgagtgtcaccaagaggccggcacctccctcgaccagcacccgcagggagcatgcagtctctcaccgtcttggaagcggatggcatggaggacagcaagatccttgaggtctgggactgggagctgggcttcgtcttcccagtgatccacctcttgtattcttctcgtacctggagaaggagacacatcatccagatgcagggaaatggtccagtgacagggatgttgggt

SEQ ID NO: 308335 - DNA, 1000 bp, Homo Sapiens
  misc_feature (71)..(170): n is a, c, g, or t
acctggctaattcctaccttttctagtcttcaactaggagtcctgtgtgagaagataaataccctaaatannnnnnnnnnnnnnnnnnnnnnnnnnnnnnnnnnnnnnnnnnnnnnnnnnnnnnnnnnnnnnnnnnnnnnnnnnnnnnnnnnnnnnnnnnnnnnnnnnnntccagaagctccacccctcggcagctgcagtcaggccctatctgggcctttccagaagcaactcaggagccccaagacctgcaggggtatgtgcaccctgacccctgatgcatagccctgcacctgcaaccagctggcctcgggctgcaaacaaggcggggtaagcactggcctggcacgcgaccacccactgggtgggcccagccttctgtctgtgttgtgcacaggggacaagaggactccctctgccctggcacagcccccaaaccacagggcgcaggttccaagccgcccctgccctgccacagcccccagagcacatggcgcgggttccaagccgcacctgccctgccacagcctccagagcacatggcgcgggttccaaaccagtcctgggagcctagaggccagaggagggaggagagcaggaccagcagctggcccagaccccgcctcttcccacaccgcttccgcttttctccctcctcactgaatcatcttgaaagggctcagcagcagtaactgggacaggggctcttctgtttgaaaaattaaaagaagcttggttaaggcaccaatgacatggccgggcacagtggttcatatctataatttcagcatattgggaggccaaggcgggtggatcacctgaggtcaggagttcaagaccagcctggccaacatggtgaagccctgtttctactaaaaatacaaaaataagctgggtgtggtgggcacttttagtcccagctactctggaggctgaggcatgagaattgcttgaatgtgagaggcagaggttgcagtgagctgagatcgcaccactgcat

SEQ ID NO: 308336 - DNA, 1000 bp, Homo Sapiens
ggggggggagttggcactagatggccttaggtggggtgagtacccctcccggcaaggcccaggctcctcagatggacgtttcgtcgctgctgcgggcaggcgatggggagcggggcaggataaagcacaagacaggagcagggcatgagtgcggctggggaagggaagggagcctcgggcgtaggaaccacggcccagggttaatgcaggaagttaaagaagagaaatctggagaggcaggaaaggaaagtggcagaaaaggcagacagagggttagttgaaacagaggagagagtgaaagctttcaccagacgaaggaaacaggaaagcacccccagctccccatcctcccgcactctgccctaggctgggctgcgccgcgtagagcctaggaggggtggccctccccgcaaggcaccatggtttgtgggcacggcatagtaagggagctgggccagttctgcccatttgtcctccaaatgccatccagagtcacctggggaggcccggaggcagctctgggcccaggtgaggcctccgaggggctgcaccccgtcccgcccacccggccacactcactcggagcctgacgagtcctcatccaccgtgcctgccttgatgctcatggcgatgggcatgaccccgttcagctgctcctggaggctctgccggggcggtgggcggggaggggggcctccccggctgccctcactagcggaggagccccgggaagaccctgtgcattgctccagggggagccgcaggaggctgctcttctcgctgatggtgggcagacacttcttcttaaggatgcctgtgggccggggcggggctgtgaggtgcggccacaggagaatgtgaggtatgaggctgctgactaggggagctcggcagctgggggtgccccactcacctttgtgaggctgggcagaagagcctggaagggggcctagggacccctctcgagacagggcatctccattctcccgcagccgctcct

SEQ ID NO: 308337 - DNA, 1000 bp, Homo Sapiens
accagtggctccgactccaccccactgggtgtcctggactttggtgccagactatagctgccactccctcctggtggcacacgggatcagggagggagggtggagggagtagagtggtggacgaagggaggatggatggtcttcgtgtacaaagctgctgtggccacaggagctgctgggccgtccagaaccatgcgccttcatatgccggactctgatgccctgagggcctggagaggagagcccagaggcctgagccccgctagccctggtgccttcctgcccacacccgccccaggcgcagccccttacccgggtctgattgtggccagtgccagacgtggtggaggtgaattctgagtacttgctccccccagcaactaggcaggcccacttccggtattcttcccgaacctgccggcccagacaccaagtcagggcaggagcaggccctgggaccatgcacgctcctccccatgctctgccctcagccccaccttcttggtgtttttgtgtttgtcttttttttgagatcgggtccccctgtcacccaggctggagtgtagtggcaccatcatagcttactgcaaccttgaactcctgggcccaagtgatcctcttgccccagcctcctgagaagctgagatgggtattcagcacacccggcttttttttttttttttggagacaagtctcactgtcacccaggctggagtgcaatggtgccatcttggcccactgcactcctggttcaaatgattctcctgcctcagcctcccaagtagctgggactacaggcgtgtgccaccatgcctggctaatttttgtatttttagtagagacagggtttcaccatgttggccaggctggtcttgaattactgacctcaggtgatctgcccacctcggcctcccaaactgttgggattacaggcgcctcaccctggctatctttgaatttttttgtaaagacagcatctggttatgttgcccaggctggt

SEQ ID NO: 308338 - DNA, 1000 bp, Homo Sapiens
ggccagacatgaactctgtaaacgttcttgatacacatgattaaaatgcccacagcatggaaacctcatctatttctgtgcctttgtattttctttgtgtagtttggttttgtttagttggttcaagtaaaattagttccttttgaaaacgttcagcttgtatgaactcaactaaaggtatcaggaatttccaaccacaacctggccaggagtttgccagaggtcaagaaagctcttgtccaggtagctccaaagaggccagggatctggtgaggaatggagaagaggagaggctgaaaacttagaagagagcagccagggactgatgcaggatcctttgagcctgccgaaagatctgaactctgggccacaactgtccttttgaccccatccagttactgggagtttaaccatccatgctccacacaactgtagcttttcttctccttctgtctacctgtatctctgtctcattagattgctctgattttgttattgattatctaggaaataaatacaaccaactttttgcctatttccaaattgttacggctggtagaaataatcagcataaaataaaactgacaacagatcataccacacatggcaacattgctattgattaaaagtggacagatggctcacatcattttaataaaatttatccaatttttattttttgtttttgttttttattctagtagctttagggatacaagtggttttttgttacatggatgaattgtatagtggtgaagtatgaaattttagtgcacccatcacctgagtagtgtatattgtacccaatacgtagttttgtatccctcatgcctcacccactttctccctcttttgattctccgatgtccactatataactctgaatgtctttgtatccttacagcttagctcccacttataactgagaacacacggtatttggttctccattcttaagttacttcatttagaatggcctccagttccatccaagttgctg

SEQ ID NO: 308339 - DNA, 1000 bp, Homo Sapiens
ttcttcacacatagctggagctgcttcacaggattctatagaaaacagggaggaagcagcctcagctgtaattgggcatttgtggcacttacctgacaactcccacctccaaggctgggtttgggggccctcctctgtgtcctagtgctatcctctgaccgttatctaatatagcatgtatctggaagtactttagttacactataagctttcagtaagctgaaactctgacttctgaaactctgacttctatgttgatacaaccttagtgtagtgaccggcatatcatgtgttctcgtgagcactttaaaggtggatagagccagtgaatgaataaacaaactgcagagcacagatgggaaatccagagtctgagaccagatctttgcagagacaagttgcctaccttatgttaaagaagcatctagattttcctgtctgtatcaacccaaatgcacatttttctagatatgctatacctttttgaaattttttcaaaaagctagatttttgagggacaggcagcatgtaaaaatttagaaatgttaaaatggtcaagtgtttaatggaaaaatctttttgaatcatgaggacttttactttaccctcagagaagctttgaaataaaattttctgagaaggtgctttaaattttaggggctgcaattatccaccgttaataaaagtcactgttaagctaacagtccaacaagtgagggtgagcctgatggattatatatcatatggtagaatactttactgccattaaaaaggtagagtaagaggataagcaaaaggtagttcttatgtaagagtaataggttagaaaaagtaacattgtaaatctcattaaaaatgtattttttatgcattgcaaaaagattaatcatatttaccaagatgttgactgaggttattatgaagtggtgggttttataggtgtttttaattattttcccatggttctgtcatatttttttaattttctatattgaatgtg

SEQ ID NO: 308340 - DNA, 1000 bp, Homo Sapiens
gatcctgctagaaacgtccccggtgtcgtcctggggcaacactgtcccagttccacacctggcagggcggctctgcgaaatgcccccacccagagcctggtctctatcggctccctcacctggtggcctgcggggggtgtcccaagggttctcaccaggagtttagccaatgtacagttcgagagaacagcccccacaagaccacccttcctcaattcagacaccagctgcaagttctgggggtctccaagaccaccctcaggtttggtgatttgtgggaaagactcgtagaactcactaaaagcacctatgctcacagttatggtttattacagcaaagggatccaggctgagatcaggcaaggacaggcaggcgtggggggcagagtccaggagggtccagacatggggtgtctgccgtcctccctgggaaagtggggataagtccctcccagagatgacgtgtgacaacacgcatggggcattgccgccagggatgctcccagacctttggtgtcccgagtctttgctggggctctgtcacacactgccttggtggcagggctttagtttccagctcctcctggaggttagggctaatccttctggtctccagtttcttctggaggtccaagctgatgtggcatgacccagagctcccaccataaatcacactgtcagactgtccagcagtcaaagcccccaggcaaacagagacacatacatcaggcaggatattctgggagcccagagaccacctcccaggaggtgaaggcaaaggttagctctctctttggatcaagttggtgcttcactacccagacctccctccctccattttagatcagaaaactgaggcccagaccttaggaaatctgagcaggctctgagcagtggaggatgtgggctctgagccagtccctgcactctcctcttttactcaggcccctccgctccccaagtcccctgcctcccagaggtccacaagcccaagctgggg

SEQ ID NO: 308341 - DNA, 1000 bp, Homo Sapiens
gatccgcccacctcggcctctaatccctaagtgctgggattacaggcatgagccactgcgcccagccattagctcttattttactatggatatgctcaacacatttgtacttgagaaatacatttgaataattatgaatatttatttattataaattcttttgaaagttacacttatcattatatttattatattatgtgtatctaggatgactctggtgctaaattgatcaggaataaaataaatcaggaataaaaataaaattcacaacaacaaaattgtgtgggtgaaaatatgagctgatctatgatgatctaatttgttttttagctctcaggaatgcataggtgaaaagtgaatttttcctgtgtccccacattacaatacctttgatgataatatatctgaaataatttattcattctaatgactgaaaatatgaaatcctatactagtcaaacatcttgcaggaatttcaatgtgtgttacacttatcaaatcgtaaaatgataatcttccccaagagacaggaatgccctaagaggtctgagatttcctttccaatcaaagcatttggaatgcaaggaaagatgtgtgttttcctttgaggcagctggttttattttgcataggctattattacaaagaaaaatcatttgagaagaaaaatttgattctcagagacctagttcaatgactctgaaaatcagatactaagaggcatatatttgctttcctctcttctggggtccctctctttgctcctacatccaagaaaacaatagttttcttattctccagctgctttgcttttgtatattttacttaaggcttgtctttttcctcatctcctatttttggtgtttgatctaaagactccgctgttcaggcagagataatctgcgtcccccgactcctccatgctgccccagttgtagaatgaataacccaagctcttgaggttaacctgagatcagaaagacattttccctccaggatt

SEQ ID NO: 308342 - DNA, 1000 bp, Homo Sapiens
gaattccgctgtgtttacatatttaaaaatgccattgttcaattaatagtttaagaacttgttttaaatactgtcctgagtttcttttgaaacctgttatttataaacatagaactgtgtgtattgtgaaaacagtgagccttggttttgacctcccggaatattaggaaattcacttgtagtcccagctatcaggaggctgaggtgggaggattgcttgagcccaggaggtgtggaggctgcagtgagccatgatcacaccactgcactccagcctgggcaacagagcccgaccctgtctcaaaaaaagtacacccttcagcacttgctggaatggtgaaacaaacaaggggtatttaacaaacatggaagctgggacactgcctcagaactggtatggtacttcaatttgagaaacacaaaactgatacgaatgtgccttgtagttaatgtttgatatgaacagaaaatagcttcatatttatactgaatgtgtaagtagagaaaactaagttatgtggcctttgaaatgattacaaaattggaatgattacaaaagtcttattttaaaatggaactgtcctcttgcctgataataaatattgtatcttgtagagaaatggtcagcgcgaacaggctgcagcaccagcgctgctcggggtgggtgctatggttggtagaattgctgtgatgggtccccttccataatggtcttcctcccaattaaagggggcttgggggcaggggaaacaggcatacaggaattgttcttcctttcataattagagtatgttcaaagtatactatttaagtcaaaataatctttaagcactcaataattcatcttttaatgcactaatgtacaaactgcatgcaattactacctgctcaatctacacacttaatggaagtttccaagaatttcattgaatttcattgactgggttttcttcctccttaaccaagttgagaacactgtctggtagccccctgaaggtat

SEQ ID NO: 308343 - DNA, 1000 bp, Homo Sapiens
gaattcctagccataaggaggtagcataggaagaagggacctgagctcctgggctaagaaccacctcgttttcttccctccccatgaagatttcttctgcactgtctcatgactcacatttagagctattgacactttagcacatgcttttaagccacaccatttgaaacccattgtgatacttaggagtacacacacccgcagagatggtccaccattaaaaaatgaattaggcacatatctagggtctagaaacaggacaatttgggcaggatgcagggtcgaactcttgatgaggtggtgcttaggcaccagatgggcacatccccttgatcctacaagctcctcacctgatgaggaggagttcttatcagagaaagatcggagtgagaccttctaaagtatgtgaacagaggaaacggatgctccagcccagagctattgcaagtaatatgctaagcgcttaaaatttttattgacaagaagagtacgccgtcaaaattggttaatgtctactcggttctgatgggcagtatataaatggtgaaattagcatttgaacccttagctggtaacttctgagtctcttaccttcactttgacggtcttggggggctgtggaaaacctgccttattctctggtttgttttttcttctcttctcttcctctgttttagtgtatgatgatagagtgaggaagttgctagggttggcaagtataggaagtaaaagggtaagagggagaaagggcatgtgggaattttgaaaagtgaattggtgggaagcaaaagtagaagagaagagccagaaaacggatatcacagaaaaaggaagagttaggtttaaccctatggtttttaaagggccaacagcacccttaattaatattaaatatttcttctttaaaggagaaaaattctcttaagtccaccagtgttatttttattataaaatatatttaaacacatgtcaacacaaaacaggcataacttttattaaa

SEQ ID NO: 308344 - DNA, 1000 bp, Homo Sapiens
ttttttttttttttttttaatagctaacacaaattcttttatttcagtgtattatataggagaaacaaaaaatgctataaaattcatgtttctaatgaacaaaaatgttaaggtttatgactatgcattgtatagaattacctaatatttttatatctgaagtagaccttttgtaagtacagtacctacatgtttttttcatacattcatacttgccttcgcagtttcacatctgtataaatcttatgatcgttctctaataagtacacaagattaacactacttatgaaatatggacaaatatattactactcattataacccatccagattattagtttaactcattcaattactacaaagatccttacagagctgaatttaatatacaatagaacatcactgccctctgatggtatcactaatatataattttaaattcagcaaacaaaaaatcctttatcataaagtaaaacagggtatgttaattttataagctacataaataaaaataaattggaaaaaattttacatctgcctaagaatactcattactaagttataaaaatttacagtgctccttcacatcagcccttcaaatgattttttcaagattctccctgatgatcagtttaaaggcactaagtccataagtttaatcaaacatcttcatagtgaaataaaaacagatgtaacgcgatgcagcacaaatataagtagttagatcattttataaaggatgaaaagacaactgcgaattttaatcttagaggtatatgcagaatgtttacatgcagtgtatgtatattcactatttagttccattttttaactactaagaaaaatagcaaatcacccactaactgcagaagagcaaatgtaggaaaatcagtatttaatgaaaagtctagccattctctaagcttgaaaatcaacgtttttttagcattgcacttaagggcaataatattacaaagtctgaatcttcatttactcaaag

SEQ ID NO: 308345 - DNA, 1000 bp, Homo Sapiens
acaccctgggataatatggcgccctaaaaaaggatgagtttttgttccttttttgggaaatgggtgaaattggaaacccttattttccgtaaaattttgcgagaaccggaaacccaacaccgggtatttttaatttttgggggggattgaaccatgggattaaatggaaattgggagggggatattaaaattttgggaattttgtggggtttggggaggggggggggatagcattgggggatataccttatggttaattaaaagtttgtggggggggcacccccggctgggaaatgtttaaatatgttaataacctggacaatgtggaaatgtacccttaaaatttgggtttttttaaaaaaaaaacctttaaaaaaaaaaaaaatttttttaaattaaaagtttgggggggaaaaaaaaaaaaaaaaaaaaacaaaaacaaaaaacctcttttctttaaaaacttcccaaactcaggtattcctttatagcaacacaaatggactaagaaagtccattctttctttttttagggcaattttgcttactgcaactgtaactagcttgtggccactttgatgggtaagaagatactttaaaatcaaaggagagctcctaaggctaaagtagtcataatccacagcttagcctttccagaagatcacagataaatattaaactatatgaatcatttataaaatctctcaagtatgggttgggggtgaagagaaaagacaagagagaagtttaacctaattgttgaggaaactatatgattatttgtgcaacccttttctttttttgcaaagttcaaagtttcatttaaaatattttttatctttacaaatgtatgcagtacttgtgaaattttgttagatgtatataatgcatagtgattaagggtacttagggtgttcatcacctgagtaaaatatgcttttgtctaactacaggcaccctaatctgctatgaaacataaaattcattccttctattaggt

SEQ ID NO: 308346 - DNA, 1000 bp, Homo Sapiens
gggaccctccaagacagcactccccccaagcaccccaccactggcctgtcgcgctgggagacccttgctcatccctcctgctcctctaggaagccagacagagttggtcgcggtcccgtgactgtcactcagctgacacagccgcgcccggctcaccctccccctcctcttcagggttccgctgggcctgggggcggggctttgaggccccgcccccgcacttgttcctgccgcgaccctccactcgaatgggccagtccctccagggcccctgctgggagctctggtctcaagatcctgcttggtgggaaaagctgggatggccggagggtctgggatgagggggaacggggctgccacccaccccgccctacaccaggggccccggcaggcggctgagggccttggcctaccaagcctgtggggcaggggtgcagcaggacagggaacagctagtgggcctgaattgcagaggtccctctgacctgtcaccacacagggtagacaggaggcaagttctgtttttgttgttgttgttgttgtttgtttctttgttttttgagacagtgtcctgtcgcccaggcagctcactgcagccttgacctgccaggctcaagcgatcctcccacctcagcctcctgagtaggtgggaccacaggtgtgggccaccatgcctggctaatttttgtatttttagtggagacagggttttgcaatgttgcccaggctggtctcgaactcctaagctcaagcgatcctcctgcgtcacgctcccaaagtgctgggattacaggcgtgagccaccgcacccagcctagcaagtcctctcttttgaatcagtttgtcaccaactacctcaacagtcagtaatgggcagccattggcgctaattttttttttttttccccaagatggggtcttgctctgtcgcccaggctggagtgcagtggcatgatcttggctcactataacctccgcttcccgggtttaagcaattctc

SEQ ID NO: 308347 - DNA, 1000 bp, Homo Sapiens; identical to SEQ ID NO: 119932

SEQ ID NO: 308348 - DNA, 1000 bp, Homo Sapiens
ctaaatttccatctcggctcctggcttagaaccacccagagtggccactgacggctccttgccctctaggaaggacatgatgccctgctttcggctgcggagggccagttgcaggggtgtgcagctcactccatcctggacgtccagctgggcgcctgcctcgaccagcactttgaggatggctgtgttgcccttgagggcggccaggtgggcgggtgtccagcccaccttgttgcgggcgtggacatttgcgtgatgttctaggaggttgatgacactcaggaaggtgctcctctggaccgccaggtggaggggtgtccagcctgactgctctgcagcattggggtcagccccacactgcagcagtgctgacaccaccgcctcctccccgtggcgtgcagctaggtgcaggggagtccagttcacagctccaagagcacccatgtttgcgtggctctctgccagcagatggatgatctccaggtggcccttgtaggctgctagatgcaggggtgtccagccctggtgggtgggcagctcaaggctggctccgtacctgagcagcatcttgcagatcaggtatttgcccctggcagctgcagtgtgcagtgggccgtagccgctctggtcaagggcatcagggaccgctccactcttcagcaggtgttggatggccctcactttgccccgctctactgccaggtgcagtggtgttctcaggtttctctgctgagcatccaactcagccccctggctggtcagcagcttgaccaggctaacatggccaaagtaggcggccacatggaggggggtcttgccctcagcctcatgcaggttggggtcagcctgacgggagaccagaagccgtgccacattctcaaagttattctgtgcagccaggtgaagaggggtccacccttcacgttcctgggcatccacacaggccccgtggtccaggagcaggcgcgcagtgccgtcatccccattctgggctgcaaag

SEQ ID NO: 308349 - DNA, 1000 bp, Homo Sapiens; identical to SEQ ID NO: 119933

SEQ ID NO: 308350 - DNA, 1000 bp, Homo Sapiens
gatcctccctcatctcttcccgcagctcacacccctttgtctttccctaaccctcctctccccacaacccaaaccgggtcacacattggcggcaggtgggctgggattcgaccatagatgggttttgtttcacttctggttcaaaaacctattgacttgggtgatgtcttgcacacaggtcttattagtaggtaagaaacagctgctcctccacctccaccccagccccatggagcttgctttttccaggccaccgtagtcctcaccactgccactttgcttcgaggtatctgaatttgagacccttgtccttcctgcgctgaccctcctctgcagctgccgcccctccctgtgtccttccaagaagtgccacatgcactgatctcttgtgtccccagatggtcatcatgggccagtgctactacaacgagaccatcggcttcttctataacaacagtggcaaagagctcagctcccactggcggcccaaggatgtggtcgtggtggcactggggctgaccgtcagcgtgctggtgctgctgaccaatctgctggtcatagcagccatcgcctccaaccgccgcttccaccagcccatctactacctgctcggcaatctggccgcggctgacctcttcgcgggcgtggcctacctcttcctcatgttccacactggtccccgcacagcccgactttcacttgagggctggttcctgcggcagggcttgctggacacaagcctcactgcgtcggtggccacactgctggccatcgccgtggagcggcaccgcagtgtgatggccgtgcagctgcacagccgcctgccccgtggccgcgtggtcatgctcattgtgggcgtgtgggtggctgccctgggcctggggctgctgcctgcccactcctggcactgcctctgtgccctggaccgctgctcacgcatggcacccctgctcagccgctcctatttggccgtctgggctctgtcgagcctgcttgtctt

SEQ ID NO: 308351 - DNA, 1000 bp, Homo Sapiens
tgtctgtctcttggcttcagataaccagctgggctttgataggaatgatctgaatggagacagaaaacagtgaaaactaacgctccccgcccagccctgtttatatgaagcatttggttcctctcttgactcttgagtgatgatgagattcagacgaggcattgacattatggtaagaaagggagaaaatgtatctgtcttgtctgtctatctatctactggatatatagctccaaaagcagacaaacccaaggccgtaaggtgaactagggtctgcgtttggactccatgaaaacaaaatccatgttgaacaaagtgatgtttgtatgcagtgacattctgggtgacccgtgtgtatctgtccatcgtgtgcaagccctgagccctgtttccctcggaagatagtgagtggtagccatctcctcacacgaaccacacatgtggagcacagatggccctctcaaggtaattgatcttacacatttactgttcaccaaacaagtgtctgatgcatacttgggtatattccacagcatgtggactgcggtcccctgtgtttgccaggaatgctgtgctccatgtagaggttttcctctactcctcactgcaatttgcatgctgctccatggacacttggaggcctgtgctctgttccctgtaactggaaatgtgctctgaacttgtctgtctcccttggctgctcctggcccttggtaccagctcccatgggtgtccacaaccacttgggacagaaggtaaaggtggaatttcaaagagaagcttgcttggatcttcagtgacaagcttggatgagctacatccctaacatgggccctctcagaattgccaggaggaggctttggcaggtgtcacaggtgtcacggggcctgccctcctctgctgcgtgcagtggatgcaagccagccaacgtgtggccagagtggctggatggtgtcacagccctcagatgtctttccttccacgtttttaaaagagtccc

SEQ ID NO: 308352 - DNA, 1000 bp, Homo Sapiens
agcagcaggagtgttttaattaaaagaaggcagttgctgtaaccaactataaacaaataaaggcttaaacacaatggaagtttatttctcactaagggaacatccaaatccatgatactttaagtcagggacccaggttcctcccatctatggttctgccatcactaatctgggtcttccacaattgccgtgctccttggargtgggaagagcaggcsgaggacacgtgggaggttttagggacaagcctggaggcagcatgcgtcactcccatgcagagtccattggccaatgctggctccgatggccacatctcactgcaggggcagctgggaaatacagtctggctgtctacccaggaggaagagcagccagtttctgctgctgatgatcaggaggtggagaaaatgttcagtcaggcagggagtgggaatagacaagaccacaagcagcttggtgcctctgaaagggagaggggtggaggggagactagagaggtgggtaggaatactggattccactgaccacgtgctggatgtcacgcttagccctcctgctctgtgccgggttaggcacctggtgttttacgtacataatctcaattctgtgagggcatccgacaagaatttggwggggaaaatattaccatctttcccttttrtgattggagaaaaatgaggctttgaagggtttaagaacttgcccaaggtcggccaggtgcagtggctcatgtctataatcccaacwctttgggaggctraggtgggaggatcgcttgaggccaggagttcaagaccagcctgagcaacatagtgagactttgtctctatagtcagcagcatcgggggtcaggaaagacttcaygaagccataaatgcatccttctcggggcagcacctggctctcccaggtgagagaggactccattttcacaggcaggcgtgggagcttcagcacccatctctgggcccagaatgacccactggagaccttacagctc

SEQ ID NO: 308353 - DNA, 1000 bp, Homo Sapiens
caaatgtatcaataccaggtgagcctttgttctgatctccatttaaaccccctgcacagcctagagcagttgcatatgacataatctctcctctccttagtatcacagctttatgcatcatcttctccaaaaagcagctttttgataaaggacttggccacttggctttctctgatctcccaatgtagttcttttccagttgtaaatgtgacccagctactaacagagagaatcactgaaaaatagaacagtggtcatacaaaatttcctttcccaaatttggcatttttacatctttgtccttaactaaactctcagcaaagcccatgagaatatcaattttcatgtgtaaatcctcatgaagtgcaaatttgatacgctcacactactgtaggttctcaataatgattgaatttaaaccatgaaataaaatccacttgtaaaaagccaggaagttgccttgtggttggaaggtaagctctgacagatcagggagcagggtgttgaactgtcccttcaaatgctactacaggataaagaaatgcttttctgtaacagtgtggaattaaactgtagctgaccagaccttttcatgatcccttctataaaagaagctcaaagcattgtgggtggtcaatccagagaatgcttaataataacccctgctggtataagtcagtattacaccattatcaagttgttaaaatcaggcttaagttaaaaactggtaaataattaacaagtgccattatttgcctagcattgaactaggatcatgatagctgcaaaatatgtatgagacatttttcagtctgtaagcatttatatgactgttttccattttaaagttgaaaaagggattcagagtccacattctctcttcttagttgtcccagcaggacagtcctcacttccccagcttattatccagaaatactgggaacattctgcctttcaggccaaatgcccccaacttccctgatcacagttgctcctgaat

SEQ ID NO: 308354 - DNA, 1000 bp, Homo Sapiens
agaaaagccccattttccttttatttaaatatcctaaatatatcacgaaggaacatacactgcactttaatggtaaaaagatacaagtttataacatcttataaaaactaccatttaaaagtgatcttgtccaccatttgatattcccctcccccatagcaaaatattatttaaaaaaaaaaaaaaacaaaaaacagggtggagaggaggataggaaggggacagttgataaaaccccagggccacagcagaggcaaagggcatctggggagagggttcgaagctgtggcggactccactaatgtaaccctccaatgtcaagccatgggcgtgatcagtagctaagtgatgacaaggctgttgggggtggacggaaaagacttggggcaaagcagactgtttatagcctgagctggtagggcctggtgcagcagcctacccggaactggcactactctttcccaggttccctgactctctatcctggtctctgagagcgtgccctacttccgtttcccccactccaaacacacctgaggcatcttccagtgctaggccccatgctggccagcaggggtcgggcattgggcccaggagcctctgcagcggtgtgagtcagtggcttccctggggtatccgtggggctcccgggccctctggatgccaaatcactcctttcactgctttgcgcctctcttctcacacatgcactgccccagacatcagcgcgggaactgaaccaaccacctgctcctgagtttccctcactgggtccttggcaggggtggctctgctatggctgttcgcacatactctctgaagttccctccctcccacccacccaggcaggaaaccaaggtctgtgggaacccagggcaccttctgacccagtacacacattagtacacataggggcacaggtcactcatgtgagacttacatgaatctctccacatacacccctatcccaaagagactagctgtaagtggcagggacaga

SEQ ID NO: 308355 - DNA, 1000 bp, Homo Sapiens
gatcttattacctaaatcgaaagagattttgcagccgtcagtaacatgcttgcaagatttccccggtgtgagctgaagcctcccgccccccacaccccttcctgcagccgccaacgggttacgcgacaacacgctgcaaatgcatgataaagacacaggcagagggcatctgcttccaaccccagtatctgtgacaaggcacgctggtgtcgatggagatgaaaggacccggccttggcagcgcactccggagagctcacctgatccctttgttctgcgcgatgctgtgcagggagagcctcgacaccgcggagatgacctgggggagacaagaagagacgctcctgtaatttcacaagaaaccagaaaggcatcacagaactggggacgctgctttgcaggacgtcgagaactgttaactgagcacatcgcatctgggtaagaaacacggcatagcgttttgtaggctagacacttgttttgtatttgctgagcaaaacttgtcatttggatgtgctggtatttgcggggcactgctgcactcccggctcctgtggccatgctgctaacaactcccaagctgcttctcacccagaaagggtctgttttgtcaggggctgccagagggcttcaccgaggccacctttaaagggctcactcatcccatgctgctgttctgcaaggtaccatattactaagtacagctcgtgttcacagtaggtgccaacacatttcagagatgaggaaatgggagcccagagaggtcaagtgacctgcccaaagtcacccagcagccagggcaccacccacatgcaaatatcccagggtgctgcttgcttcccttcaagccctcccttgcatgacatttaaacagatgcctggctccatggagggctcgggatgcagaaggtcaagagctccaggtgcacagtggcatgacgggatctctccttgtctcccctggccggcagactggtcaagaggaaggtttggtgagaag

SEQ ID NO: 308356 - DNA, 1000 bp, Homo Sapiens
cgtgatgtaaaaagttatttttattatgacttgcagtcaaaaaagtttgaaatacattggtcaatagagaccaccaaaaataataaacatggagtttccacgaaaaataataaacatggagattcctggtgttaacgtcaataaggatgagtactgaatgtaaaccagtcttctgctctggaatccaaggtaagctacagagttctcagtttaccatcaacactaaggttttacttgtttttcctcttaccctacactttcaggcaggggcatgggcaacagaaggaaggaggaaaacccctagtggcaatgatttacttggagtggtatcatgttcttttgagaaaaggcattttttaaaagagtaattcccaggtggctaattaaaaggctttccttctcccctataaagtcatactggtagcataaaagtgaacagaaatttgtcattacagttttgacattataaatggtctaaaccacggcagtctgcgattttgtttctggttttgcaaaatatgcagccacagacacagatagaatgtgtgatcttgtcctaatctactttatccacctgtaaaaggaagacgattggaattatccgaaggagactgactctgtcctctccatctgtaaagatgctaaacaatcattttctccaaatcaaccacctaaacacatgacaagacaatgtttagcttctggctttcagaaacccaatggtaagggtcagtttagttctggcacaaagactgctgtgtgccaccctaaacgtacctcatcttggaagtttcttgggtaagccggggttagcactgatttggcagatggccataaaagaaagtatccagggccagacattaaacacctgggttctgactttggcacaggcctcagaaagcctctgagatgacacagcttcctatttcttcaggtgtaagagggaggttaaaataagttatttatagggccccttcctgaaataactaatttgaatgca

SEQ ID NO: 308357 - DNA, 498 bp, Homo Sapiens
ctccttaaaagagaatattagaaaaaagcagcagcagaggtaaaatatgtacgtactctgttcattttcacaagaatacaagggtttccttgagaatagccaaaatcaggatcattcataccactgcatgcttgaagtaatgaaataggaaactgacatgcaacataaactggacccttctgttcaaaaagtgctccatcaggacagactgtgaggttcttctgttcttctaaagtatatgctaaaaaggaaacatatatgtgtgctagatcagccaaaaaaggtactaaaaacaaccaggaatatattaacctttggaaaatgttcttcaaagacaaaaacagcaatgtaaattaccagataactttagggaaagaatgttaagtttgcccctttaccttttaacagctaactagttctctaaagttactgcatttcaataatcatacaaactggattatagatccatctcttctgtcaccattaggtggcagtacc

SEQ ID NO: 308358 - DNA, 1000 bp, Homo Sapiens
aagcttacagtttaattgtttaacctaaataaataatgaggcaatttaattcatatttgttggaaaacaattcagttcaactatgtaaaggaacactgtgttttattaaaacagaattagaacccccaaagcttagctcttgaaagagaatatcttacaggaagaactggctggccaaacagtcctgaatctgtcccagtttcctcctccctcaggtttcctgtgtctttgctgttctttttccatccctttggtctaagcatagatttttaaacttttgtttgtagatgaaatgagttggagtcctcaacaaaatattttgctaaatataagggaaaacaaaagaacatttttgaaagcagtatgaaacaatggtatgactttagaaaattgtttggccgtattaaaactgaccataatcatatactatttatatttgtaagtcaaatattaatattaatattatttttattataatatattttaatatattataatgtattttaatatatttttattaaaatatataacatttgtaagtcaaaaagagacaatcatattttttgtttgtttgttttttgagagagagtctagctctgtcacctgggctggagtgcagtggcactatctcggctcaccgcaacctccacctcccgggttcaagtcatccacctgcctcagcctcctgagtagctgggattacaagcatgcaccatcatgcccggctaatttttgtatttttagtggagacggggtttcaccatgttggccaggctggtctcgaacgcctggcctcaagtgatccacccacctcggcctcccagaatgctgggattacaggcgtgagccaccgcgcccggccattggagacaatctctatctccacatgcaatagaatggataaactaggttatttcactcaatggaacagcacaacaagaatgaacaaactacaactacatgcgacaaatgtgtgaatcttaccaacataatgttgagc

SEQ ID NO: 308359 - DNA, 1000 bp, Homo Sapiens
caggcatacctcggagatattgcgggttcggttccagaccaccgcaataaagcaaatatcgcaataaagcgagtcacacgaattttttggtttcccagtgcatataaaagttatgtttacactatactgtagtctattaagtgtgcaatagcattatgtctaaaaaacaatgtacataccttaatttaaaaatactttattgctaaaaaatgctaacgatcatctgagccttcagcgagtcgtaatctttttgctggtggagggtcttgcctcgatgttgatggctgctgactgatcagggtggtggttgctgaaggttggggtggctgtggcaatttcttaaaataagacaacaatgaagtttgccgcatcgattgactcttcctttcacgaaagatttctctgtagcatgcgatgctgtttgatagcattttacccacagtagaacttctttcaaaattggagtcaatcctctcaaaccctgccgctgctttatcaactaagtttatgtaatattctaaatcctttgttgtcatttcaacaatgttcacagcatcttcaccaggagtagattccatctcaagaaaccactttctttgctcatccataagaagcaactcctcatccgttcaagttttatcatgagattgcagcaattcagtcacatcttcaggctccacttctaattctagttctcttgctatttccaccacatctgcagttacttcctccactgaagtcttgaacccctcaaagtcatccatgagggttggaatcaacttcttccaaactcctgttaatgttgatattttgacctcctcccatgaatcacgaatgttcttaatggcatctagaatggtgaatcctttccagaaggttttcaatttactttgcccagatccatcagaggaatcactatctatggcagctatagccttacgaaatgtatttcttaaataataagacttgaaagtcgaaattactccttgatccatgggct

SEQ ID NO: 308360 - DNA, 1000 bp, Homo Sapiens
ggagacacaaaaagtcagagagactttatttaaatagagttaatttgaagtaaaccagagagttttgtgtgcagaagcattttgcttaacttagggccatcaccacattatgaactcgtgtgtgtgtgtgtgtgtgtgcacgcgcgccaggctagtgtccttctgtgggtgtgtctgcgtgaggacccatccatgcatgtttgatctttatggcctccccctgtgcacctgcgcctatggataaggtatagtcctgtcttgattcccagtattcattctccttgaagaatcctgacagccttcagtcaccttcccttttccagtctcccaaaagcaatggcgccttaaatgtgcggtaaggatgaggtgagtcttgaggtagcctaggccacagctgccccttcaaggcaaggcctcagctgagttcaggaaataggagaacctggccccggagcaaccccagaagcgcaggaccacgaacgtcccgacccccagcagcaagaggccgcccagggccccaaagaagatgccgaagaacgcgtcgagtttcatgctcaggtgctcacagtgctcgccccaggccgtgtagatggagaaggacacacagctggtgaccaagagagacagacaggcggtcagaggcgggagctcagcctcccagcccctcctcttctgctggggaagaagaggttctgtaggagaggctgggctcgccccactctccggagagactgagtcagccctgaggccgtgctgaagtgagaccactgggcaaaggaggcaggtgtgggctttaaaaacatgggcctgggccggcgcgggggctcacgcctgtaatcccagcacattgagaggctgaggcgggcgcatcacttgaggtcaggggttcgagaccagactggccaacacggtgaaaccccatctctactaaaaatacaaaattagccaggcgtggtggtgcgcacctgtaatcccagctactcaggaggctgaggcagaa

SEQ ID NO: 308361 - DNA, 1000 bp, Homo Sapiens
aagcttagggatggtggaattgcctcctggggggcaactgggatttcaagggtgtttttggtggtcacaggggttgaaggcaccataagcatttagtgggcaggggccaggtttttaaactgtcataaacgtgtcctagaaactgcctttttctttttcttttcttttctttttttgagatacagtctcgctctgtcgtccaggccggagtgcagtggcgtgatctcggctcactgcaacctccatctcctgggttcaagcgattctcctgcctcagcctcccgagtagctgggattacaggtgcccgccaccacacctggctaatttttgtgtttttagtagagatggggtttcaccatattggtcaggctggtctggaactcccgacctcagttgatctgcccacctcggcctcccaaagtgctgggattacaggtgcccgccaccacgcctggctaatttttgaatttttagtagagatggggtttaaccatattgttcaggctggtctggaactcctgacctcaggtgatctgcctgcctcggcctcccaaagtgctgggattacaggtgtgagccaccacgcccggccgaaactgcctttttctattgtgaccaccccagtcctgtgctgtcagggatggtgtggtggcaagggagccacaagtggttgtggggtgcactcaccatatttggctgctttagcggcagccagggctccaggtactggggagaaagaaaagttggggagtggtcaggagccgagctctgtgcctgggagttctgccgcctcctctagagagccctccctgacttccttggcctctattgcttcctcaaagccctgaagctgtacaggcacagagctttagggctgaacagtgcctccaccttccgtctgccccttccttctctccccaggcctagcatggactgcctgaggctgggcacagagtggggctcagtcaccagctggtgaagaactggagttcctagtgg

SEQ ID NO: 308362 - DNA, 1000 bp, Homo Sapiens
attcttatttaagcgtggccttctttcacgatactcgatgcaagactaattgctactctgggataaacatggattctgattcagctaacaattattgagcaactactgtctagcagtgtagtaggcactcacaaagcaatttatacacattatacattatttatatatatataaaatctgaattacaatttaatgaatactgttggtatttggcagacagcaattactccttgactatttgttggatgaaggaataaaaataaaaacatgaaatcacagactaacaaaattgcaagggatttgggagagcatcctgtcaaatactctcattatagaagtggagaaatcaaattcccaaatggagagtgacttattgaaggccatactcacagttagttagacccaattctgtctcaggtggattcagaccactgtcctctctgggacacagctcacactgccttatatgaaaactggataacagagcatcaaatctctgctgtgttatattgcatttgaaaacatttttcagagtgttttgttgaatgtagtgtttgggatgcctctccatgaatgatttaacaagaaacgcctcaagaaatgtatttatttatttattttctttgagacagagtctcactctgtcacccaggatggggagtgcactggtgcgatcttgtctcactgcaacctcccgcaccccctgctccccaggctcaagtgattctcctgcctcagcctccccagtagctgggattataggtgcacattaccaagcccagctaattgttctatttttagtagagacagggtttcaccatgttggccaggctggcctgaaactcctaacctcaggtgatccgcccaccttggcctccagaagtgctgggattataggcgtgagccactgggcccagccaagaaatttaaaaatatgtttatttatacttatatgcgaagacaaaaatatattgactaaaagaactaaaggaactagcaa

SEQ ID NO: 308363 - DNA, 1000 bp, Homo Sapiens
gatccaggcagggccttccaggagcctccctccaaatctccctgggcaacagccccgctggtgttcttggtccatcatctcagaactcagggtacacacctcaacaggaggggctgggggccgcaaggctggctgaatcacctggccacccaaactggcctgagaacttccgcccaaatgaagccaggaagccccttctcctgcacacccggccgctttcccccagcatctcaggaagcccccgcctcctgcacgcccggctgctctccctccacacctcgcacacactctttcctcaccctccccccgctgggcccggagtgtggctgcctgggtgttgctgagcagactaaacagtcaggcaagggacctggatctgccagatctgccaaccacgcaccagagctgcgcttctgacgtgtctgtgacccacctcacaccagctgggctgtcacagccatctgctctctgcccttagacacatggctgcggtgcccactgggggaggccccacagggagagcagcaggtgcagctcccggtgaagaggccacccaccaagacagcccggagggaggggcgtccctatgcacgtctcagggacaagcacgacagcgggccgggcctggctaccaggaaggatatgaccacttccttcacgcagtgcttggcacccagggccttgatggcctctgcggtcccggcataaggccacttgccaccttcctcctgctcgtggcccacagtcacctcgacgcctctgagcaccttggccgcgaggacaggtgcaatgcagcacaagctgaaaggcgaaaagaacacgggtcaggcaggctgcatggcctgcagaacagaaattaccctcgccatgaccccaggctgccctgccacgggagccctgccgaccctgccccctgtgagcctgcgctgccagaaggctgtggcccatgggatgtgatggaggtggcaccaggtgactcaaggctgagagtgaggtgtcc

SEQ ID NO: 308364 - DNA, 1000 bp, Homo Sapiens
ggtgctgccccaccacctcccaagactgggctggagaagcttcccgctgccacctggcaaacaaagcagagggagccgggtccgggtccccctaacagcgtgggcttggggtccagcaggcggggcccatcccgtgcccgcatgcatggcgtctgcaccagccaaacacacctgtgcgtgcgccattagctggcccactcgccctgccggtgccgggaagcaagcaggctgactactgcccatcaacgggattagaaccaccctcgcttccagtcccatcacgatcagaaccacactcgcatccagcacaattagaaccactgtgacggttcgtttccatgacggatggggctctgctgaaactcaagttcatccgcggttgatttcttatacttgcttaggctaggggtccttgtgtgtggccgagcccctccacactgcagaggctgctgagagcacttggtcaggggagcagggcctgggccgtatctgggcttattgtaggagttctttacatattgtggatattaaccccttatgagggacatggtttaatcaaagactaattatgaactatatccccaattagagtttctttccccagcctgcagggagaggcacagggagaggctgcagggagaggcactgggaagctgggtttcttcgagtgagacacaactttctttctttttttattactgtttttgaaaaatagagatagggtcttgctgtgttgcccaggctggtctcctggccccagtcagtcctcccatctctgcctcctgaagtgctgagatgacagatgtgagccaccatacctggcctgtggacgttcagtggtctgaagaagaagccattcattcactcatgtgttcattcattcattcagcaaacatggcgctcctgccatggccaggtgcaggggtggagtggtaagggagcagagcccacactccggcacgcacagagctgtcatctggtggggactctctggtgtctg

SEQ ID NO: 308365 - DNA, 1000 bp, Homo Sapiens
gtcacacacaccccacccagcacagcccgctcacctctgcctcttgttttcaaggacttggcgatgtacatcaatgaagttaaacgggacaaggagaccttgaggaaaatcagcgaatttcagagttctatagaaaatttggtgagtgagactgactcttcaggctagggaaggtcgatgaggacgtacctataaagtcacgttcacagccccagtattgagtgagctccatgggcagccacaccatggctgcctgttgagaggctggtgcccggcaacttctgagtttgatctcagacccccagcatccacgcttccttgcccacgacagccaacccaagtgccctgtgcactgaagactgcctgtgctcggggggagggggacggggaggggaggggacaggggagggactgtattcattgcccagccccccttctcccccaagcctagacagaagaccccttcaagtccaagaggagaactgtgtctcccaggggcaggagacgccccctggttcgtggacccctggcccaccctcaccttgactctcccctccaggggcaatggacagggtttgggcccaggctcggtggggccggcagtcgcctctgctcctcggaccccatcaggcagggctgccacctcctggggctccccagagtctggccctgcagaggccaggcttgggctaccgagtcagtcacctcgtcctgcctggggagaggggatgcgccaccccaggaagcaaactccctggtctgtgctgaccggagccgacttcccgaggatctgctggttctaacctgggcttctccacctcagcactgctgacgtctggggctggatcattcttggttgtgggacctgcccctgtgcgttacaggatgtggagcagtgtacctgcctgccacccaccagacaccagtagcacccccaccccctcaagtaatgccaaccagatatgcctctggacattaccagagggtcctttgggtggca

SEQ ID NO: 308366 - DNA, 1000 bp, Homo Sapiens
gatcctggctgcaggagcgcaggcgctaaggcatccggcagtcatcactgtgaagctgaagcttctagaacacatcctcagggaaggaaccagacattcccatccagagaaagaggagagcaggtgcagaagccacaggagaggaggctcctgacccaatgatggagagaccttttggagaatggactcctgaggagatgggaggaaaggacgtggggactggagacagggaggctgtttcctctcaagatttgggtaaggagatggtttaatttgtttttcataagacaaaaagtgaagaatagaaagacagcacccaaccaggcaggagtttctcacacatcaaaaccaccacattggcttttaagaagagagctgggaacccagatacgaagagaaccagaacctcagtgtcttagcacccagcaggcagagtcctaggtgcaggttccctgtgagcaagggcccttggggcagggagggctgcacttggacacctcagggagagggctctaggttggcagggaggagacagaaagagttgtgatgggaagaaggcctcagctggagagaggctatcactcaccgcttgtagcttcttccaggacaccgcatgctctgaactactgttggggctcctggggccccccctggagctagccccgcccctgacctcacaggcctccattggatgtcccaagtatcagtctgccacagtccccccgaaggggtgtggttttctaaccctgcctctgccttctgcctgcaggagagaccaccccctctacctccagaatgcacacattctgcccctagcctcctgtctcctcacttcgtttgtgaactcctagagtcaaagaagtgtatctgtggcagcaaggaccttggaataatcagccctgcctttgagtttcatctctgccatttactatttgagtcaccttgggcaagtcacttctctgggcctcagtaacctcattcatgaaataggcataatatc

SEQ ID NO: 308367 - DNA, 1000 bp, Homo Sapiens; identical to SEQ ID NO: 119936

SEQ ID NO: 308368 - DNA, 1000 bp, Homo Sapiens
agatctgggaatcacagaatacatgaattaagctgttttcctctttttcacaatgtatgttatgaaatttctaaccaagccatgtccctttttgagtgatcttgagtatgtgctgtgtcaaattggataggcttttgtttcttcagtggaatttgcttatctatcatcaagaacaagaaagaacagaatgtggtcattttattgaagatgttagggagcctaactaactactcaggaaattctttctttctaaataatgaaatatgttgggggtgttccctaagcatcacactcattgataatttcaagacagtctttcagagaacccagcatcctgggctgtgagcagcatctcagaaaaattgagcccatgtagggcacgggatattatgtcactggaatcatgagtaactccaatcttgctgtgaataaagtggttttttgacccaaacaaaatgttcctgtttattacttcaagtcagtgattcttaaacaactgttggtggttctcaatttattggcaaaacattttcccggaaatgccagactatcatcataacaagtgccttagaaaaacttcgtttctggctgggtgtggtggctcgcacctgtaatcccagcactttggaaggccaaggcgggtggatcacctgaggtcaggtgttcgagaccaggctggccaacatggtgaaaccccgtctctactaaaaatacaaaaattagccgggcatggtggtgtgtgcctgtagtcccagctatccgggaggctgaggcacaagaatctcttgaacctcggaggtagaagttgcagtgagccaagatcgcaccactgcactccagcctgggcaacagagtgagattcggtctcaaaaacaaaacaaaaacaagaaaaaaatttgtttctaaagtcactgccttaacaccctgaagaagtaattcatcatgaaggttataccttcaaatcagaaaaacaaataaataaatgaaaatgtgtaacctt

SEQ ID NO: 308369 - DNA, 1000 bp, Homo Sapiens
catttgggaacgagtttattcaccatttgatgaatagagataattgtttaaggggcagttccttagattataagccatcagctgaaattaagctaaaatgtctttggatttcatgagtattagtttcttatatgtaagccaaattcagttaataatttaagattggaaaaatatctttagaacgcatgaaagggctgggcatggtggctcacgcctataatctcagcactttgggaggccgaggtgggtggatcacttgaagtcaggagtttgccaacatggcaaaaccctatctctactaaaaatacaaaaattagccaggcatggtggctcacacctgtaatcccagctactcagaaggctgaggcacgagaatcgcttgaacctgggaggcagaggttgcagtgagccgagatctcaccactgcactccagcctggagacaaagccagactctgtctcacaaaacaaaacaaagaatgcatgatagtttggttaactaacaattagctctatggggtacattactggtcaagtaatgaagtataatttggtccactggagggcaacagtttctggattgcagccaacagtctttggtatggtttctgccccagtgtcaatcacagtgctgatttttagtatcggctgttaggtctcagcaattcagagggatgtggcaaagtagggagtggttaacatttgctgtgtggaagctttctgattattgcagttcagcctcattccagtccataatgaatcccttccttgtgatcagccagattcctcattagtacccagacctgttttctatctgccagtattttccttagtggaataattcaaattccttagataatgaggccaagaaattacataatgctataattaatcctggcagggaaatatctggttaggcaccttctgctgtagcttgttctgcctcctcatgtaatgcactaagctctttgtcccaggtagccccatgtgagcaggaattt

SEQ ID NO: 308370 - DNA, 1000 bp, Homo Sapiens
tgacctttagccctcacaatgattcctacaagccccatttctgtaaatggggattgaaataattgctggacttttgagagatagatatattaaattgcaaactggcagtagtgggggcagttgatacataactaggttttaaagtctagccttctgagaccactcattccatttgtgaaaagtgattctacttcttattatgagccaaaatatgcattcattcacccatgcattgatttattcattcaataaatatttgttggatgtccactctgtatcaggaatgtgctaggttctgggaatacagcaatgaacaaggtaatttttccctacccctaaggaacttagagtttagtggggaagacagacattaaacaaacaattgtgcaagtaataatctataattatttattacaattaaaggaaggaagagacatatggattatgagggcattaaagaggagacctagtgtaagtagccagttctcgtgaagggacatgtattagttggagttctccagagaaacagaaccaatggtgtgtgtgtgtgtgtgtgcgtgtgtgcgtgtgtgtgttggggtgtgggggtgtggtattttttatagaaattgtctcacacaattatggaagctgagaagtcccatggcctgctgtctacgagctgagaaccaggaaagccagtggaatacttcaaagtccaaaggccctagaaccaagagtgccagtgttggaaggcaggagaagatgggtgtcccagcttaaaaagacagtgaattcactctttttgctctacatagggcctcaatgggttggatcatggccacccacattggtgaaggcaatcctcttagtctaccaattaaatactaatctctttggaaatactctcacagacacactgagaaataatgttttatcagggtgatagaaatcttctggagttaaacaatggtgatagctgtacaatcacatacatttttaaagggtgcgttttatggaa

SEQ ID NO: 308371 - DNA, 1000 bp, Homo Sapiens
gatcattccattgcactccagcctggcgacagagtgagactctgtctcaaaaaacaaacaaacaaaaaaaaacaaaaacaaacaaacaaacaaatctaatatgagattccaggctgggcaccgtgactcatgcctatgatcccagcactgtgggaggccaaggtgagtggattgcttgagcccaggaatttgagaccagcctgggcaacatgacaaaaacccatctctactaaaaatataaaaaattagccagggatggtggcatgcacctgtagtcccagctactagggaggctgaggtgggaggatcatctgagtctgggaggtcaaggctgctgtgagcctagattgcgccactacactgcagcaggggtgacaggacgagaccctatctcaaaaaaaaaaaaaaaaaaaaaaagaaaatgggccaggcgtggtggctcacgcctgtaatctcagcactttgggacgccaaggcgggaggatcacaaggtcaggagatggagaccatcctggccaacatggtgaaaccccgtctctactaaaaatacaaaaattagctgggcgtggtgtcatgggcctgtagtcccagctactccggaggctgaggcaggagaatcccttggacctgggaggtggaggttgcagtgagctgaggtcatgccaccgcactccagcactccagcttggccacagaacaagactctgtctcaaaaaaagaaaagcaaaaaaagaaaaaaaaaaagaaaataaggctgggcgcggtggcttgcgcctgtaatcccagcactttgggaggccagggcgggtggatcacttgaggacaggagttcgagaccagcctgaccaacacgatgaaaccctgtttctactaaaaatacaaaattagccagcatggtggcacatgcctgtaatcccagctaagtgggaggcggaagcaggagcattgcttgaatctgggaggcagaggttgaagtgagccaagatcgcgccactgcact

SEQ ID NO: 308372 - DNA, 1000 bp, Homo Sapiens
gatcacgaggtcaggagattgcgaccatcctggctaacatggtgaaaccccgtctctactaaaaaatacaaaaaagattagccgggcatggtggcgggcgcctgtagtcccagctacttgggaggctgaggcaggagaatggcctgaacccgggaggtggagctttcagtgagccgagattgggccactgcactccagcctgggcgacagagcgagactctgtctcaaaaaaaaaaaaaaaaaagatgtcttcattgctctcttcccctcagctgcctagcagggccagaggaagctgtcagaaccaacgtcagaatatcctgctgatgggtcagaaccaatgtcagaatatcctgctgatggtcaggggttttcctgtctcagagaattgttggatctagcacattccaaaatcttctctccaagatgcagacctaggctgtggtatattcatgtatccaacaagcattactcgagggcttgctttgtgctatgccctgtgccaagtggcagggataaactatgagcagtgggaccaactcgttctttaccctcatgcactgaacagccccacaggtgacagcgggtctaggatcaccgtctccccaccccgggtacaccctgtcaaaagtggaaggggcagagccagtgacttgttgctcaccagattcttggccccacgctcagccctttggtcctaaagattctgtaagtagcaacaaataccagaggcgggcaactgggagggaaagcaacctagagggaaaggagtccggggaccgagggatgtgagccctggctacaactccaggacaggagggagagaatgcaactcagcctgtccctctgtgcatttgtggtatgcactaacgctgtctgcacacatgcagctaccaaccaagccagactggtggggttcctaaaggtcctgaggcccgcccacagccccctttgcctccatttccccagttatcaatgaagaagtgcatacattcctctc

SEQ ID NO: 308373 - DNA, 1000 bp, Homo Sapiens
gatcttcaatctctgatatcctttcttctgcttgatctattcagctattgatacttgtgtatgcttcacaaagttctcatgctgtgtttttcagctccatcaggtcatttatgttcttctctacactggttattctagttagcaattcttctaaccttttatcaaggttcttagcttccttgcattggattaaaacatgctcctttagcttggaggaatttgttattacccatcttctgaagcctacttctgtcaattcgtcaaactcattctctgtccagttttgttcccttgctggtgaggagttgtgatcctttggagaagaagcattctggtttttggacttttcagcattttcgcactggtttttttctcatcttcatggatttatctacctttggtctttaatgttggtaacatttggatggggtttttgtgtgcacatcgtttttgctggtgttgatgctattcctttctgtttgttagttttccttctaacagtcaggcccctctgctgcaagtctgctggagtttgctgggggtccactccagactctgtttgcctgggtatcaccagtggaggctgcagaacagcaaagattgctgcctgctccttcctctggaagcttcatcccagaggggaacccaccagacgccagctggagctctcctttatgaggtgtctgttgacacctgctggaaggtgtcttccagtcaggaggcacaggggtcagggacccactggaggaggcagtctgtctgttagcagagctcgagcactgtgctgggagatccgctgctctcttcagagccggcaggcaggaacatttaagtctgctgaggctgtgcccacagctgccccttcccccaggtgctctgtcccaaggagatgggagttttatctataagcccctgactagggctgctgccttttttttcagaaatgccctgcccagagaggaggaatctagagagacagtctggctacagaggctttgct

SEQ ID NO: 308374 - DNA, 1000 bp, Homo Sapiens
  misc_feature (662)..(662): n is a, c, g, or t
  misc_feature (688)..(688): n is a, c, g, or t
  misc_feature (710)..(710): n is a, c, g, or t
  misc_feature (742)..(742): n is a, c, g, or t
  misc_feature (755)..(755): n is a, c, g, or t
  misc_feature (762)..(762): n is a, c, g, or t
  misc_feature (855)..(855): n is a, c, g, or t
  misc_feature (862)..(862): n is a, c, g, or t
  misc_feature (878)..(878): n is a, c, g, or t
  misc_feature (909)..(909): n is a, c, g, or t
  misc_feature (927)..(927): n is a, c, g, or t
  misc_feature (933)..(933): n is a, c, g, or t
gaattcaggttttaaccaatgttctggatgtaaatggtacacagaatctgcgtattgggggtggggaggggcacaaccccctaagagtctctcttgctcctggacggcatgatgggaagtgacctgttccacttgtcgagaactagtggaccccatgtttccctctagcttggacactatggttctcaggaggaatcctcacccccggccaggagcccttctcctccacctactactgctgggctctacctcccccacttttaattttaagccttggctcaaaattcactccccaatatttctccccttctctctactttcgtcctcaataatcccaagcagctggggtgtacaagtcgttttcacctcttgggaccgtgctaaagggggcagcctatgattaccatgagggtatgggagccctgaactgcaaatctatcatttccagagaagccagaaatctgaaattttctgtgcaatttctgaaactttaaatcagaattttttctaaaattcaatgggtcagataccacagtctgtgttatcaaacccattcccaaattctcctccttttgctaaaggaaaaaattccttaaaaaccaaggcagaaaccccactgaagccaagggaaaaacaacctcccaaccctccccacaaaaacnttttcccacaccccagtaactaggtntctgggcggataattctgtttngttttgttttttttaattttggacagctaatntctgtagtgaggnacccagnactttcggtaatgtaagggatattagtctggttgtcagaaaaatgggctggagtatttgtgctgtgtccctgaccataattcctggttcagtngcttagntccctggcaaactatntctgagggctaaaacaggagttggtgtgatnttccagaaaaagaacagnttcttntcttgcagaggcaggaagttcagaaaacaagagtgtgtgtgtgtgtgtcaggggtgggggtgtcagg

SEQ ID NO: 308375 - DNA, 1000 bp, Homo Sapiens
tgccacctcctctgcctgtggcgacccagcacatatgtgagaagattccagggaccaggtcaaatcagcaaaggttgggcgaaacccagaaagctatgctagatccccccaagcccagtcgaggtccctggcgacagcccgaacggaggcacccaaagggaggggagtgccacgcccctaaaggtacccgtgacacccaggaactgccacctcctgaggggcccctcaaggagcccatggacctaaagccagaaccccatagccaaggagttgaaggtcctccacaagagaaggggcctggcagctggcaggggcccccaccccgcaggactcgggactgtgttcgctgggagcgctctaaaggccggacacccggttcttcctaccctcgcctgcctcggggccagggagcataccggcctggtactcggagggagtccctgggcctggaatctaaggatggttcctagcaggacttggtggggggaacagggaattggggatgggagggaggcaataaagatatttggccttctttggctttctttgcttagcagcgcctagcctgtgaggaatggctctttttctcaattcctaataagattggggtgtggcagagcagcccccaactttgctctgaagtctgttctccgaagagctgggtaaagagggtctgacatctcatcagctagtatagtgagtttcagggaaaactagtgggatgtcagcatgtaagcagagtccttaggacccaccgttaacaactcattgtgtacacacccatgcctgtccattatttatatacatagaatgcctttaggtagaggaatttagtttcctgttttgtgtctcatctctttatcttaggctatgccccatcatttgtatatgtggttgcctgactgacccctgtaggcacctgtgattgcagcccgtcttactcaagtaccaatccagtgatgaagggagatgagagagcagagtagtgtggcagatgttt

SEQ ID NO: 308376 - DNA, 1000 bp, Homo Sapiens
gaattcatatttatgaagaatcaacgtatagtaaacctagagaagactcaataacaaagcagaatcacatgagggaatcaataaaacttggaaaaacaaaccagctcttcacgaggagataaaaggcactgaaaaattcaagcaagtaaaagcagtgttagattatcttggaagcagttctctggtttgtacaacagagagtaaatgttgacagacctgtgaaggaaatgggctccgtgtagggtcagaggtggtgacataagcagcctgtgtgtaggcatagctcttgaatcgaggcttaggggaagaagttctctcatatccctgtgctagactgaccgtgatctgcagagaagggtttgggggagtggatagagaggagggggaaaaaccataagtaacccgaaaggactactttccaacatggtagaaaacagaacattaaatggaaatggtgagattcaatgtttaatactaaacatatataaatgatattcgaaattggtatactcccagaatgaaggcacttaatatcatgttggagagtaaatgatctgggaagatatgagcatgctatttagccatgaggattccaaagtaacacaactccaacatttatatgggatggtactcttcaatccggcaaaaacaggcatccataagcaattttctctaaatccaaagtaaataaaaacagaattcatcaggtccataccctggaaaggactaaaaatttcataagctaatacagagctagctcagcaaagtgagagagtttggcctaagagctctccacacattcagcagaaatgttgctaaaggtttcttcactgttgtttgtgcctgagaaagcataggaaaacatccaaaccacccactgttgagagaaagaacaagccaatgtcatggaagaaccccactaaattctatacaattatgtaacgaagaatttcatcatgtttttctttattgtttatttgaaatagtttaaaacactttt

SEQ ID NO: 308377 - DNA, 1000 bp, Homo Sapiens
atccttcttgagggcaccctgagttcagggttgtcatgtttctgaggtgtgctactgcttagtaccctgatttctggagttgtctacctaggttgcttttaattttttcagccttaggtggaagagattttccatcttggtgtttaggcatgttaggtgaggtttacttccggagccagacttttaggcaggttgtcttgacataagtcaaggtcaggaagcgatcttcaggacatgcagacgatgcccacttcctgctgtggtcttgaagagggctggaaggcttgtgagcacagaggcactgagggctgtcgcatccatacaggaagacactcagggctcgtctccggtgcctcattttataagcatggaaacaaaagtcccaggagggtgaatgacttgcccaaggtgacataaattgtttgcgcagagctgggtctagaatggatcttatgcccttggcagcgtgcccccattgccatcacttcagaggggctggctgcagccctcaacggcagaaggcaagctgggaaaggacaagtggaagggtagcaggccccaattctgcacactggagagcacctctgaaatcctgccggagactatgcccatagaggtgccagaggccctagggaatgatgatttattttgtattttgtatttttgtggagacagggtcttacaatattgcccaggctggtctcaaatcctaggctcaagtgatcctcccacctgggttcccagagtgttgggattgcagacatgagccgtggcgcccggctgggaatgatttaaaagtcggcaccagcattctagccctgacccaggctaaaaggggtcacatggagcagagctgtgcaaagagcttttgggtgaggagtcactccgagaaaagcgagaagactctgaccccgagacttcccgtggtgagttaggaaagcatttctggagagcctgttaggtgccaggcactgtggctgggcactgaagacacgaagtg

SEQ ID NO: 308378 - DNA, 1000 bp, Homo Sapiens
tctttacagtccagagttctgcctatctcccagattctgggctcaaattggcttttccattttatgaactattacaacactattcaaattatataatcatgttaattaccttttgttattccatgcaggtatctattgtctccctaactgaacagttgcttacacttctttatctacaatattatcagtgtctcccaaagttggcagaccatcagaattcccaggggaacttttacaaaatgtagattctgactcaggaaacagggttgagaccaaagtcctagaacacctagcctactgattgacatttaaataagcagtcagagatgctactggcagtgtatcagagaaacgttttgaaagcactgtgtccctaaatcccaaggttactaccagaattgttgcaacattattgtaacctttgagtaggctgcttttttatttgcatgtttgcttatgtatatacagtgtacatgacatatttatttaattacattttacagagacaagatgactactataatttttggctctctattttttttaacatcagttccagataaatactatataactttcaatgacctatttattaaacatgggatttaaagaacatgtaaaacacatttgttcttccctgtaaaatattaaggtgatgaagaatttttccatttctctgattttctcttgcagtgtagggtgtgcgatacatatttgctgactgaatgaatggttgaggtgtaaataggacaaccataattgtgtgttattacactgatggtaaacaatgtgatgtatacagaccttactgaacaaaccataaaatagaggaacacggcatttggggaaaattcttttaattacgcatttgaatattggtctttgggtcatttgagggacagtgactggtggcaggaaggtccacggtgacatgtggccttctagcttgattcttggccttctgcagcctctggtgccatccagaggactctctggaagc

SEQ ID NO: 308379 - DNA, 1000 bp, Homo Sapiens
ataagcaataagtacgggctcctggtacctgcggatctcctgcaaacaggcccagagaacagccttgaagccacctttcccctcaaggggactgaccctgtctttaatgctgcagtggcatccagggatcagtggaacattgctttgagaaccctcctgctgttacggaggcagcacaaagctggtgacccctgagccaacacggcactgggatggctttctaggacagaaccctgtcggcgactgtcacatctcaaactaatagctgattttaaaagccagcagcagcgacgccatgtacctgagtacaggtggcagttgcagagccgtgggctgtagaaggtcagatggggcttcccacaggggaaatctgggcgtgctgtagctcagggtgactcccagctccgtcactagcagggcgacccccttccttctggagccttagctctgaaagcccccagtgggggtgccctttcagatgccccctttccatttcaaaggctctgactcttgatcttgaagccggacgcggcactggcactcggcttcagtttccactgtgacagatggaggtctcctttcgccccagcccaggtggccaagcccatcctggcctcagaacatgctgagcacattttgtagggtggcacctttttatccaagttactagctacacatcagtgtttaaagagaaaaaagtgacctttcattttttttttcttgaaacttgaggaaacaagatacatactactgattttttttttttcttaaaactaaatgcatgactgcagagcggtagaggtgtatatttttcatactgtggggcaaagtatttgtgctgctttttggagatggactggaacgtctggtttctgtccccgggcccggcagctacgtctattttctgtagaaggtgccacagtgagacctggagccaccccttcctgccctggcgccgtttagagctgggagcccgtggactcccggcctgtttctacct

SEQ ID NO: 308380 - DNA, 1000 bp, Homo Sapiens
gggatgatgaactttcgttttattgatttttcagtacccaagtgtggcactgtaaggctgccacatacagcaagtgacatgacaccaaaaggaccttccgagagtattattcttactttggatggaagacatcgcttaaacaaaaaacatttaaagatgctcccttgctttttataattcctaactgtaaaatataattttagtacagaacaaacaaattctccttggttggtcacatcattcattattgaaagggaaacttagtatcaaaagaaacaaaacactgaaataaataactaagtaatttactgaaaggtagttttgttgcattgcacacaactgaccgcagagaattctaaagctgatttttttcttaaaggatgaaaaactcatttgccatttttagtttcttgctaagtgatacatgctccttataaggaaaactactctgtgtaggcctgagtttaaaatgtaaatatctgtttatccagagtttgttaatctagagtacacaggtgtggaaaactggtggtgaaaagagggacctacccagccttcagggtggctgggcaggggccccatgttactggcctcagccaccagcagcgtcttcactccgcccaggtcagaaagcactgcctaaagccggagcttaggatgaacatgggcaaaaagcactggtacagttccatgtgtttctcttctactgtaatgtccccagagggattgtgaaatgtctgagaacatcccctggaggaggtttaaaagtgagaagcccatgatatggctatggaacataagcacttattgctggcatgtttctaccaagattgaacacaatgcttttctttgataaagctttgggcaagttcctagtccaatttcttctgctacaagtacacagaatttactgccttcttggtcagctcttggtatgaattcttctcttgaattaagatcctccctggcttgtctctcacccaccctgtatctcttagag

SEQ ID NO: 308381 - DNA, 1000 bp, Homo Sapiens
gaattcttttagtttgtttcaaatgattgagtcctgatttgaggaggaaaaagaaagaggagtatagtgtggaaaaagtcttctggccctaaaaataaataaagtgaacttacctgagactagcaagagagtcgttagctgagggagaaggtatagggagaagagtgaggtaaggggtctctgaggcagaggagatctctgccctgctttctgggcatgcagctgggaagacagcaagatcccagggagagagcagccatatgccataccttggcagtcatgtccatggctagtgtacagacattcctgcacccccagttttctacagaagtagcagataaatcagactgaaagagtgatgtgaacagggttgtgactttccctgagcaggatggctatcactcatgatgatgatcattggtccaacagtcaccctggctgagggatagtcactatcctgcttcctaccacctggacagcttggcatggtgtgagatcctagaactgtggcccaactttgtgtggaaagtagcagggcagggaaaggggactccaagaaggactggggttaaatttccactaagccagtaggatggcatcctcaaatagaaattaatttgttctgagcataaagtgacatttcttatgcacctgaatttatggtcatgattcatgttagcaagcttctttgcaatttatagccagaggtttgtttgcttcaatactgaatttagaacttatttttccaaaagaaaatttagatgcctagtaataatcacgaggagagaatttaggtcactttaataataataaatagggggagggtgggaagcaggagagcattcggaaaaagaactagagcatgctgggcttaatacctaggtgatgggttgataggtgcagcaaagcaccatggcatgcttttacctatataacaaacctgcacaccctgcacatgtgccctggaacttagaaaataaaatgaaataaatgataacaa

SEQ ID NO: 308382 - DNA, 1000 bp, Homo Sapiens; identical to SEQ ID NO: 119938

SEQ ID NO: 308383 - DNA, 1000 bp, Homo Sapiens
gatctgccctgggccctgctgtcttttcctgcccatcccttgcccaccctccccactgtgcccaggccttcaggcccagccaccactccccaagtcagaggcactgccagacacgcgccacttttccaggctcttgtggtggagtgaggcccctcaggcccttggaaggggagacaggcccttttgctggtacaaggtgccaggcctggctcagctgacctgcaggaatcaccaggcctgactgttcccagaaatcacacactgttcagcagagtgcaagagtgaaaaataattcatgccattaaaattcattgccctaatagtgcagtgaagccatgactggacagagatgaaactctcccagaacagaacctctgcccccaggatagggcagggctcatccttcgtgtaccagacactgttgccaaaacacttaaggcttcatgtggtgcccagatgctcaaagattcctgcagaatgagggagcgttccctgagaactaaagaggcctccctgggaaccagaggtagacaataataatgataatcatagcaaacatttggggacttcctggtgaggtcaaaactcaaaccctttgtaagtgctatgtccccacgatcacccaagaggctggtgctactgttaaccttgttttgcagctgagaacatcaagactcagaagcttcaagcaacttgcctgaggtcacacagtgagcttgggaaggggccagtggttggaaggtgaaaggagacctgaagcgcccaccccaggtcccagggagccccccaatgcctgcaacccatagaagcccccattgtatgggagctggaggtgggacagagagagtcaagcacgggtcccacactcaaggggtttgttcttcgcagcactgaagtctcacaacccatagcagaggctgtcagtgccccagtgctccaaggctgtcagggcagctcctaaggtgaccccagtgacttcccacctcctggtgtccatgcc

SEQ ID NO: 308384 - DNA, 1000 bp, Homo Sapiens
gatccaggagctcagtgtcattaggaattttcctttctccatgtctcagctctgctgttctctttgctggctttatttgcaggcactcccttcacttggggacacacacacccctgctccagcagctcaaacttaactcccacctgcttagccaccccacaaaaagagagtgcctcttttgcagtagcactggattgggtcactcatttatccctgagccagtcactggggctgggggatggaagaccttgattggccaggtctgggcttacttacccaatcttagccagggacctcactgcaactgatggtgtaggggagaggagtggttccccaaacacaaaacaagggtgggaaagccaaggccaggcaggcaatgcccaagcccttcccgtgtctctacggccctgttacatcgggccttgttacctttctaagcttgttcgttagccctctttccttgttcactcctctgcagttatggtgtcctccctgctgttcctccgacagttcgggcctgtcctcacctcagggcctttgcacctgctgttctccctgccaggagcactcttctcccagctttccacgtggctgactctctcacctcttacaggtctctgctcagatatcaccttctcaataagcccttccctgggtacacttaaaatcgagtcaccgtttccttcaccaagcttaatatgtttttttccactttctaacacactatataattcgtttctttattttctgtcaccctcactagagctcctcaaggacagggatttttgtctcttttgtctctgctatatcccaggcacgtaggaggtggtcacgcttggtcaagtaaatgaacacgtgtatcagcagatgtctcccagggaggacagggagattgggctgatctgaaggggtcagtgatccactggttccccctacaggtgatcatggtaacgggtgaccaccccatcaccgccaaggccattgcagccagtgtgggcat

SEQ ID NO: 308385 - DNA, 1000 bp, Homo Sapiens
tctagattccacactaacacaataccaacccagaacactttcgtgtccaaatgtgtagatttcttcccgagagcgagcaagcaatcaattctgcagtgaacaccaattaggtatcctctaattcacttccaacaccatctttctggaaataatatcagatcctgcaggttgaggcctcagtccccaagactgcccccacccacacaccagtagcaagtttagggctccagaacttctgaccaaccagcttcaagttggggttcccaccaccttcgctttgggtttaatttgctggagtggctaacagaactcagtgaaaaatgtttaccagtcttttttttttgagacagcaggtcttgctctgtctcccaggctggagtgcaaactgaacagctgggactgcaagcatgcgccaccactcctggttgttctttttttttctagtagagacaggatctcactatgatgttatcttgaactcccaggctgaagcaatcctcctacctcagcctcccaaagtgctgggattatatgtgtgagccaccacgcccggcctacctggtttatcataaaggatattacgaaggatacagatgaagagatgcgtacaccaaggtatgggataaggggcgcagagcttctgtcccctccctgggcgcaccaccctccaggaacctctacacgtagttcagctatcctgacactctccactgtcctcatgggttttaacgaggctttatgatgtcaccattccttcccccagggtatggggtaggaccttctctgaaatgagggttgtaatctcacctgtaatcccagggctttgggaggccaaggtgggaggatcgcttgagcccaggagttaaaaccagccagggcaacacagcgagaccccatctctacaaaaaacttaaaaatcagccaggcaaggtggctcacatccgtaacaagggctatgggagttatgagccaggaacaaaaaaagaaaacatatacatca

SEQ ID NO: 308386 - DNA, 1000 bp, Homo Sapiens; identical to SEQ ID NO: 119939

SEQ ID NO: 308387 - DNA, 1000 bp, Homo Sapiens
aagctttgcaacagtacagcccaggtaatttgctgagcctgacgggtgtcagggtcagtccaagtgaaagcgaagagaggctaggaggacaggtgcaaaggaatagtaaagaaagcatgtttgagatccagaacagaataatggactgtggagagaggtattgaggataggagagtatatgggtttggcaccatggggtggataggcaaaacaatttggttgataaggcgcagatcctgaactaacttgtaaggcttgtctggttttaggacaggtaaaatgggggaattataaggagagtttataggctttaaaaggccatgctgtagcaggcgagtgataacaggctttaatcctttcaaagcatgctgtgggatgggatcttggcattgagcagggtaagggttattaggttttaatgagatggtaaggggtgcatgatcggtcaccaaggagggagtagaggtatcttatatttgtgggttaaggttgggggatacaagaggaggacacaaaggaggctttggattgggaagaagggcggcaatgagatgtagctgtaatccaggaatagtcagggaagcagataatttagttaaagtgtctcggcctaataagggaactgggcaggtggggataactaaaaaggagtggttaaaagagtaacgtctaagtgggcactagagttgggggattttaagaggcttagaagcctggccgtcaatacctataacagttatggaggcaagggaaacaggcccttgaaaagaaggcaatgtggagtgggtagcctccgtattgattaagaaggggacagacttaccctccactgtgagagttacgcgaagctcggcatccgtgatggtcttgtagggggcttccgaggcgatcgggcagcatcagtcttcagccgctaagccaagaagatgtgggaagcagtcagagagccttgggccagaattccaggggcgctgggagtggctgccaggtgagttagaca

SEQ ID NO: 308388 - DNA, 1000 bp, Homo Sapiens
gatcctcacagcaaccctctggggcagacagtatttcccccatcttacagatgaggaagcgggcgctcagaggggttaaatggctcgcccaaggtaaaatgccacctccgttgcttcccctccccgtggccttcactgcctgcacttatgggtggcccctggtcaagccgcctcccccagtgggggctgtttctggagcatgtcccatttgccacggccagacgagtctgtccccgctcctatccgccctgtgcggcacgcgcctggcgcttggcagcacgtgggtgcctgccaagtgtttgtggatagccggctccggcccctgccagtctgagggcggcggcttggctgggcagtgactgtgggtggctctctagacggcaggtgccgtgggctgggagccgtggctcccgctggctcctctcccgctgggctaagattagaagctggctgagctggtctcagggtgcacactgagccctggccctggaacgctgaggtgatgcccatgggtgctgggtgctgaggcccttgcaggctgcccagagagacctgcacacccccaggaggcctggacgttaaacatgcgcgtctgcctggtgcctggctccgtccccaggacacacccacagaaggttctgtgggtcatctccctcctctccttgcttgaaatggccttcggtggctcccactgctgctgggatggagtccagacttgcccactcaatccctgaggtcccttgttcccagagctgctgtggctgcttcatgcctcctggttgggctgccccttgccctgtgtctggaatgctctcctgcctccctcttgtcccgcaaaacttgtgtttgtccgcggagcccccgctctcaggcccttgtctggaactttcctggaagcagggagttcctcccaggtctctgcagcaccgaggtccccgggtcctggtctgggtgcttgttaggtgtctggcgaattgcatgcagcacctcacatggcttg

SEQ ID NO: 308389 - DNA, 1000 bp, Homo Sapiens; identical to SEQ ID NO: 119940

SEQ ID NO: 308390 - DNA, 1000 bp, Homo Sapiens
gatcttagctttcctcaacctcctttgcaacttaagctttgattcttcctaggtctttgttgttttaacttctctctctgttgtgacatttagacaaacatttcttataatattctttccctctaaatttcctagtttagaaagaatataagatcatgttaaggtgaatacaactaaaaatatattgcaaaattacctacgaagacaaattttatgtcttttttttttttttttggagaaagagtcttgctctgctgcccaggctggagtacattggcaccatgtcagctcactgcaacctctgcctctgggttcaagcattctcctgccttagcctcctgagtgcctgggactatagctacatgccaccatgcccagctaatttttgtatttttagtagggcctgggtttcaccatgttggccaggccagcctcaaactcctgacctcacatgacctgcccacctttgcctctcaaagttctgggattacaggcgtgagccaccaccctagccaattttaggtctttttaaaaaatcattagtttgtttataaaacaaattatgtttataaagtgatcttttatttctgatcactatatttgaaacactttctacttgcaaacctgttattttatcaatatttataccatttaattataatagtaactattttattttatttatttatttatttatttatttatttatttatttatttattttaagacggagtcttgctctgttgcccaggctggagtgcagtggcgccatctcagctcactgcaagctccgtttcccaggttcatgccattgtcccgcctcagcctccctagtagctgggaatacaagcacccgccaccacgcccagctaattttttttttgtatttttagtagagacagaatttcactgtgttagccaggatggtctcaatctcctgacctcgtgatccgcccgcctcggcctcccaaagtgttgggattacaggcataagccaccg

SEQ ID NO: 308391 - DNA, 1000 bp, Homo Sapiens
aaatttaggttctacacacccatatttcttatatgtacaatgtacaaaatcttataaaatacagtttttaaccttgctataggtacattcttacttataaaataatttaatttttgaaaataatttaatttaattttaatgatgaaaatcagagcctgttagaggtatagtggggtgattctgttgaaaacaacatatcatttattccataaggcacaaacaaagaaagaatataagaaccctgctacatcctccttcaagatagaaagaagaaaccctaaacacagagaatgcaagaagcagaagaggtgagggcagaaatactttatcaccattactatttctgaatatcaacttcattttggtacattttggataaaaacaatcacaccatattaccttttatttcgccaaagttccccgatcccattgcaagaagcttgtctttccagtcctttgagagtagtttttcaatactgggggtttctaagtaaagaaaaaaagaagtgagcaaatcaacatgactctccttacaatggagctcattaaaagtctatctgctaaaaataaggccatccctatcccagccccacttcataatggcttcatcaaaaaactgataacaggggtggaaaaaaagaatgtgtcctgtcacctgctgtttcaaaatcattagctttttcctcttgcggaacaaagccatactgattctttatgacaatgggtacacataaaccttgcggttcattgtttttcaatttagtgaacaaattcttgctataatggatgcttgtcaatttcagggtgttagtctgcagtcaaaaaataattatgttgataaaatgcggagtaaaaaaaggcaaagaattagctcttaaatctgctacatgtaattatatccctctgtgtgtttacaattacatccactttataatatgtgtttaacatcgtgtggcggtaagcacactgtggtaagatttgccagtactgcgaacataaa

SEQ ID NO: 308392 - DNA, 1000 bp, Homo Sapiens
tctctctgcagaccagcaaggcagaaccactagggaccagaggtggcaaccgagccagaaggagccacaggagctgggtatgcaaagttcacggggacctgtctgaagagcccaaccgctcttccccaaccctctgccacccatccacccaaacagaggcactcgctgagcagagcacatccaggctccactgtgaacacaactcagacccgcattcacaccaatacatcccagcttcacatctgtggacccattttcaccaaggagacacatgaaagtggcacagccataacacaaaggaggggaatgattcacacaaaagttaggagagtggttaactcaggggcaatgaaggaagggtcatagttgggggttggggtggcacagggagcttccaaggcactaacaacattcgatgacaaaaatacagacccctggggctgggtgcggtggctcatgcctgtaatcccagcaatttgggaggcagaggtgggggcatcacttgaggtcaggagttccagaccagcctggccaacatagtgaaaccccgtctctactaaaattacaaaaattatctgggcgtgatggcttgagcctgtactcccagctactcgagaggctgaggcagtagaattgcttgaacctgagaggtggaggttgcagtgagccgagatcgcgccatggcactccagcctgggcaacagagccagactctgtctcaaaaaaaaaaaaaaaaaaaaaagactcctgcatataaatgcttattcacacatagtatataagattgacacccagaaagatccacattcaccccaatcaccttatctatacgcacccccctactgtacagacactgctcaggtggggcatgtactccattcaccgcatgcatgcacagacccatatctccctgacacacctatgcccacctgtgtactcacagggacacccccagacacatacccaaaatgcagatcacaacctccaaatgttacaactc

SEQ ID NO: 308393 - DNA, 1000 bp, Homo Sapiens
agtcttgtgcatgtgtcacgtattctcgtggcatggttttcagctccatcaggtcatttaaggtcttctctacactgtttattctagttagccgtttgtctaatcttttttcaaggttttttgcttccttgggatgggttcaaacatcctcttttagcttggagaaatttgttattacccaccttctgaagcctacttctgtcaacttgtcagtcattctccatccagctttgttccgctgctgttgaggagctgcgagcctttggaggagaagaggcactctgatttttagaattttcagcttttctgctctggtttctccccatctttttggttttatctacctttggtctttgatgttggtgacctacagatggggttttggtgtagatgacctttttgttgatgttgatgctattcctttctgtttggtagttttccttctaacagttaggtcctcagctgcaggtctgttggagtttgctggaggtccactccagaccctgtgtgcctgggtatcaccagtggaggctgcagaacagcaaatattgcagaacagcaaatattgctgcctgatcattcctctggaagcttcatcccagacgggcagccacctctatgaggtgtctatcagcacctactgggagatgtctcccagttaggctatacagaggtcagggacccacttgaggaggcagtctgtccattctcagagctcaaacgtcgtgctgagagaaccactgctctcttcagagctgtcagacagggacatttaagtctgcagaagttgtctgctgccttttgtttagctatgccctgcccccagaggtagagtctagaggcagtaggcctggttgagctgtggtgggcaccgcccagttcaagcttccagaccactttgtttacctactcaagcctcagcaatggcagacgcccctcccccagccaggctgccacctcacagttggatctcagactgctgcgctaccagtgagcaagg

SEQ ID NO: 308394 - DNA, 1000 bp, Homo Sapiens
tctcaacctcctgacctcaggttatctgcctgcctcggcctcccaaagtgctgggattacaggcgtgagccaccgtgcctggtgtttgctttcttttattctttttttttccataaacaactttattaacatctattagatacaacttgaatggaaacttaccaaacactagcaaagtttgtccagaaaataattttgtaccctctttcatttattgcctttgcctctctgtgctgatttctgaataatttttttctgaactgtctttcattcactaattaattaattgtatctaagtttctgctaatttctttagtttactgagttattaattcccaccatggtttttattttcacttccagaactttgatggagtaatttttcacatgtgattattcttcagtttttttttcctgcatatgtttttatttctttaaattcagcaagcagccaggcacagtggttcatcccaacactttgggagagcaagggaggcagatagcttcaggccaggagttcgagaccagcctgggcaacatgacaaaaacccatctgtagaaaaaaatagaaaaattaagctgggtgtgatggcacacacctgtagtcctgggtactcaggaggctgaggtgggagaaccacttgggcccaggaggttgaggttgcagtgagccgagattgcaacactgcactctagcctgggcggcagagtgagatcctgtctcaaaaaataatcagaaagcatagttcttcatatactatgtttaataattctagtatctaaattatttcaggttatagttctgctccctattactcttgttgattctcatttgtggtaatttatttcttcgtttgattaactttgttgtgacctgcttaatttctttataaaataatttgagtaaattctttgaagtctaggacaaaggtgaattccctcacagaagatctatatttgctttttgcttttgctaggtgtctgggaaaactaacaggcc

SEQ ID NO: 308395 - DNA, 1000 bp, Homo Sapiens
  misc_feature (709)..(709): n is a, c, g, or t
acatatgtgttttatatattcatataatttatatataaatgtatataaatatttcatttccaactctaatatgtaagttttatatgtatgttttatattatatatttaatataatataaaatattatatattttaacatacaaaatattttatgtactattaaaatatattacataatttataatatacattatataaaatatatattatgtatatttaaaattttttattttaataggtttttgggaaacagatggtgtttggttatatgagtaagttctttagtggtgatttgtgagattttggtgcacccatcacccaagcagtatccacagaaccccatttgtagccttttatccctcaccccattcctactcttttcccccaagttcccaaagtttattgtatcattcttatgcctttgcatcctcatatcttagcccccaactcatgagtgagaacatacgacatttggtttttccttcctgggttacttcacttagaataatgctctcccatccaggttgctgcaagtgccattaattcattcctttttgtggctaagtagtattcctttttatggctaagtgtatatatatatatatatatataatagtttctttatccactcattgattgatgggcatttgggctggttccatatttttgcaattgcgaattgtgctgctataagcatgtatgtacaagnatctttttcttataatgacttcttttcctcagggtagatacccagtagtgtgactggtggatcaaatgatagttctacttttagttctttaaggaatctccacactgttttccatattggttgtactagtttacattcccaccagcagtgtaaaagtgttccttgttcactgcatccatgccaacatctatgattttttgattgtggtcattcttgtgaaagtaaggtggtattgcattgtggttttgatttgcattttcgtgatcattagtgatgttgagcattttttca

SEQ ID NO: 308396 - DNA, 1000 bp, Homo Sapiens; identical to SEQ ID NO: 119941

SEQ ID NO: 308397 - DNA, 1000 bp, Homo Sapiens
  misc_feature (2)..(2): n is a, c, g, or t
tntcatataacccaagaggtaaacctttctgaaaattatgtttttatgaatatattgtccaagcgaggcctattttgcaaacattggaggcagtaattcatatccaactcagagcatttaataatagtatgtatagctgcatagaaaaaaaaatggactgtgcttaacaagaaaagagagatagccatgttccagaaatgctctggagagagtataatggccactcttctgcattgtagccaaggccttctgagaagtacagagctgtgatggagaggtcctggcacaccacatcaggagaagagaaatcaggctgagagctgctgccagttagccgtgagcttagcaaattacctaacctccatgggcctcagtgtgttgatcagtaaaatgggattattagttttaaatcatctctaaggctacttcttgttctaaccttcagcctggcaacagagtgggactctgtctcaaaaaaaaatagggaaaataagataacagtaagatttcagttcaaagccataaacgaataaaattgagaaatataatatgaaaatatcctgtgctcagtgactttccctgttgattgaagttagcaaaaactacacacacacacacacacacacacacaccacagcaagtttagaatgttttaagtatactattaaaaaattcaagttgtattagttttcagtgatttgaataaaaaatggtcctcgattatgttaatatgtactaaaaagtgtctttattttcagactcattattatcaatgaagccgaaagcctgcatttggttgactttcttccttttcctttgcatatgccattcccttttattaaaatgttaggaaaatctcctgggcagcagaccttccacttccttccacatgcagagtgtccagctcgtggtcatccagaactccacaagcctctgcccacagggcctcttttagtgcttcaagagtaaaagtagcttcttctagagagggactattttt

SEQ ID NO: 308398 - DNA, 1000 bp, Homo Sapiens; identical to SEQ ID NO: 119942

SEQ ID NO: 308399 - DNA, 1000 bp, Homo Sapiens; identical to SEQ ID NO: 119943

SEQ ID NO: 308400 - DNA, 1000 bp, Homo Sapiens
tacaacattctataatttgttatagggaattttcctagattttcgctccttacatgggttgcatcagggcctacataattaaatatttatggtgtatttttcacagatactgcatacatttgggtatatattatgggaagggtcggcagtgtatttttgtgtcaaaaatataaaagtgaatatatgtgtgactgaccaagaaatatctatcttctttttaataatctgttgaaacccatattcaaaataaaagtagaatcttcacaactatccactcttcccaaattaaaattagaatcttgctaaattaatatccatggtattaacatccttgtaatgtaccaaacacacttagagttacctgtgttacttttgattcccctttgtccttagtgctgacgcttagtcttttacaagatccactagtaatattttctccctaatttccagtctcaagacaaatcttgtcactgtgaaacaaatgtattaaaacaatgactctcccttctacccgtctcaaatatttaatctactatcctaaaaagaaaggataggacacaagactaaatacctttttctttctgcatctctcttattgaaaaaacataaaagtgttcacattttcgtattttattcaatcaaaatgctcagaataaagttttacattctttttgagtagtgaccgaataatcttggcattttggggagcaattttgtactctgtcctaggagataattctgtgcagtggtcctccaaagtcatagcagattcatattaaatattggctctttttcaaaatatgttatgttgagtgtgttttcaggatccaggtcatttagcattatttggataaatactttgataaatttccacaccttgttcatgagtcatcaactattggtgacaattttacaatctcttttaagacattataattgtgtatattttattaaacaaatattatttatttaaaaaatattcattagcaatatgccactt

SEQ ID NO: 308401 - DNA, 1000 bp, Homo Sapiens
ccctataaataaatggtatgaaattgtttaaaacagtagtgtacaatttttttgtctcagtatacatttaccctcttaagaagcattgagaatcccaagagcttttgtggtgggttgtatctattgatacttactatattaaaaattaaatctgagaaaaattaaaataacgattacatgttttaggaaaaacatgctattttttccaagactagaagcttactgagaacattgttttacatttttgtaaatctctttaatgtctgtcttaaaacaaatactttgattcttatatctgcttctgtattcattatattgccataagttgtttagattgaagtatatgaagaaaatccaatctcacacagatgcaactgaaaaagggaagagggcattttaatagacttttgcaaataaccagggacattcttctttaatactataccaaaacttgacaagtagtaatttttaaatagcaattgaaatgtggaatcagaaaacattatcactattttttgtactgttatattcgaattcattcgtctatcttgcatttctttgttgctttttgagacaaggtcttgctctgttgtcaaggttgaagtggagtggagcaattatggctcactgcagcctcatcctcctgggctcaaaaaaatcttcctgccttagcctccggtgtagctgggaccacaagagcgccaccacactaggctgatttttttttaatgtttgtagagacagagtctcattctgttgcccaagctggtctcaaactcctgggctcaagcaatcttcccaccttggccttccaaagaattggtattacaggcgtaagccacctcacccaccttatcttgcacttgggattatttacccatgcatgatttgttatgtaatgcacagattattcagaaagtactggctgagttatactgacctttcaaatgctgacacacttcactacatcagaaagtacagtttactaaattacgctgat

SEQ ID NO: 308402 - DNA, 1000 bp, Homo Sapiens
atcactgctaaccctccagagatataaacaaccatcagaggatactataaacacctctatgcaaataaattagaagatctagaaaaattggataaattcctggatacatgcaccctaccaacactgaacaaggaagaagttgaatccctgaatagaccaataacaaattctgaaattgagacagtaataaatagtctaccaaacaaaaaaagcccagaaccagatggatttacagctgaatcatactagaaatacaaagaggagcggctaccctttcttctgaaactatcacaaataattaaaaaggagggactcctccctaactcattctatgaggccagtatcatcctgacacgaaaacctgacagagatacaacaaaaaaagaaaacttcaggccaatatccctgatgaacactgacgcaaaaattctcaacaaaatactggcaaactgaatagagcagcacacaaaaaagcttatccaccatgatcaagttggctttatccctgggatgcaagattggttcgacatacacaaatcaataaacatgtttcatcacataaacagatctaaagacaaaagccacatgattatctcaatagatgcagaaaaggcctttgataaaattcaacattccatcatattaaaaactctcaataaactaggtatagaaggaacatacctcaatataataatagccaattatgacaaagccacaaacaatagcatactgaatgagcaaaagttggaagcattccccttgaaaaccggcacaagtgaaagatgccctgtctcggcactcctattcaccgcagtgtcggaagttccggccagggcaatcagaaaagagaaataaataaagggtattaaaatagaaagaaacaaattcaaattgtatttgtttgcggatgaaataatcctatatgtagaaaacccgatcgtttcagcccaaaatcttcttaagctgataagcaacgtcagcaaagtctcaggatacaaaa

SEQ ID NO: 308403 - DNA, 1000 bp, Homo Sapiens
  misc_feature (3)..(47): n is a, c, g, or t
  misc_feature (281)..(281): n is a, c, g, or t
  misc_feature (334)..(334): n is a, c, g, or t
  misc_feature (794)..(794): n is a, c, g, or t
  misc_feature (839)..(839): n is a, c, g, or t
atnnnnnnnnnnnnnnnnnnnnnnnnnnnnnnnnnnnnnnnnnnnnntttagcattcttcagaattgcctgaagctactgttaacagaatactgagttccactctcactgtctctgatttagtgggtttgaggcagactgagaatgtatttgcattttgaacaagtttccaggtgatgctgatgctgcttgtatggggcccacgttttgaaaactatttatataggggctagagaaaaattagtagtaacttgaaaagggtaagaaaaacagaggggagangttattaaagataacattgtattaatctcttttcacactgctgataaagacanacccaagactgggtaatttataaagaaaaagttttccatgtggctggggaagcctcacaatcatggcagaaggtgaaaggcacgtcgtacttggcagcagatgagagagaatgtgagccaattaagggggtttccccttataaaatcatcagatcttgtgagacttattcactaccatgagaacagcatggggaaaactgcccccatgattcaattatctcccaccaggtccctcccacaacatgtgagaattatgggagctataattcaagataagatttgggtggggacaaagccaaatcatatcaaacatgcaaatgaagaaagtttacttattgaaataaaagacttaatctgaggtttaaaaagcacaccttacaagatttttaaagtcgacttttgatctattgtcagactacagataaaaactacaccacaaataagattattttagctagcnagatgttattttaaaactaaagtgtaaacatttgctttttatttntcataattctttattcagcaagcgagactggcaagccatttaaaaggcagagaaactgagctggcctcagacagggctggaagacaatgcaataatgttgcctaccgagatctttgggaaataattctggagcaaagactttatattctgccacgtcaatc

SEQ ID NO: 308404 - DNA, 1000 bp, Homo Sapiens
attgatgtttccatatatcagatttatatataatcatttcaggaatttataaagagtttctatttttaaatcatcatgtaaaaaggatttgtttttagtcctgttaaccatttttaaaaatttaaaaattgataacataagatgaattcttttaaatttagaaaagaacattgagattaatatatagcagtaataaaccacctcaggataagagaaataactacataaatcaagtaagatttttttttcaaaaatgcctacttcaaatgttcttttttgctcaaaaataattagattaacgtcaagccatactgaagaaaacatcctaaaacaattttaatatacggtgcatttatccccattgttaaattaagttactgcatacatactgaattctttgtattcccaacatgatttttcacttctttgagtgatctaagagactcatttaaaattttaaaatctgcagtgtgtttttaaagaactaatattttggcccaggacctctggcaattacaatgcaatacatctgcaaacagaatggattctgttctactcttaactctaaaaaagtgaacttcaaaaggttcatagaagacggattgcattctagcatacgtatatgtcatgcaaaagaactagttaactaatttgcttgctttggggtcatttttcctgtggaaactatatataattctttgaattcaaactcataaaatctgttgatgagattcagcttcagaggaatatttcctgatgcataatatttcaaaaaacacatttctggaaactttactatattaaatcttattaatacaggggtctggagcaatcattattgagttgtcatcagagtctacagaatataaatctaaacaaatgcatccagtataaaaagaattctttattaaaaccacctttctttaaggttctatgacctcaatatgtgactttggtgtgtttaaacagggctttccctcaatgtcactgtaactggcca

SEQ ID NO: 308405 - DNA, 1000 bp, Homo Sapiens; identical to SEQ ID NO: 119944

SEQ ID NO: 308406 - DNA, 1000 bp, Homo Sapiens
ttctgccattgaattcccagacatattcgtcatccccattttcatcccccaccaccctgccattttcttcgtgttaacttgttttcctgactcacagaaatcaccttttcctgtatacatttttaggatgtcagactttattctaatgatttctcctagttgccccccaaaattgtattctacagtgtgattttaaagctgaattttcaagatgatatttcatatctatattttcacaagcttttcttctatgaatgttattgtcagctgtcagggtgtgagatggtacttgatactacattctttccaagctgttgcctgaatcggtttaagacaaagtcattactaggctgtaaactgttgctctgcaaaattgagcagcacgtatttaaccactcatacttcttagctctccaacactttgagtcaatagagtatacaaacacctgtaatttccagtgagcacagctcccaggctctctctctgtctctctctctctcttttgtttttttttttttgcctcagcctctcgggctttatttgtgggatttgcaccttcaccttctgcatgcagtgtgccatggctagttccccttacatttttgtcatgattttggtagaggcaatgatttcctggttgtagaaaaaagggcagcaacataggattacaaaagtattgctaagaaattgcaacaagctacttgcagtttatgtatgattactcacagtttttggatggtgcaacccttaatttctgaaccagcaggtgaaagatgagagaagaataagagacctttctatagatcttcaggcagacaggcttgttggcttcctaatatttcggtgggatactgggatgggttggaggcaacatactgtttaaataagtagacagttttttaaaaataatgaattgtgtctctaagatatatttttaccagaatgatactatataggaatatgcgtaaacccctggactttgatctcaagcaaaacctt

SEQ ID NO: 308407 - DNA, 1000 bp, Homo Sapiens
cgaagaagacaatatccaaaaatatttaaacttgcttacttctaacttacagtagtgacacactgataagagtatactactgttacttagatctgcagtattttgaaatatttcttttatctttgttcagttttatgcacttaaaaatatttttcccatcaacttgttttcctgaggttagcttaatctgtattctgttgcttgcaatcaaagttttttaagtaatacacctattttttgccttcagtaatattaagtggtcctatatctttcttcatacctcagtggactctctctctctgctagccctttctgtagaataatttggggtttggtcttaggcccttttctctaattacgttggttttttttttttttttagatggagtcttgctctgtctcccaggctggactgcagtggcacaatcttggctcactgcaacctccatctcccgggttcaagctattctcttgcctcagcctcctgagtagctgggattacaagcgagcgccaccacacccggctaatttttgtaattttagtagagatggggtttcaccacgttggtcagactggtctcgaactcctgacctcgtgatccacccacctcggcctccaaaagtgctggggttacaggcatgaggcacgcctctcagtcttctaattacattctcttatgaggtattttctagtttcatgattttcagtaccatctagtgctgatggctccttgatccataagtgcagtttcaacctcactgctgagctccagacccatggtaaatgttccatagctctttgttgaataaaaatagccatagtggcagagattgcagggaatgagggcattgttagtggtgaaatagtggctgaaaggattgaccctaagatctagatactgatatccaaatactagataaatgctgtatcaagacaaggcttataggctaagagaataagcagaggcagtagaaatggtgataccacttaggtcaatgc

SEQ ID NO: 308408 - DNA, 1000 bp, Homo Sapiens; identical to SEQ ID NO: 119945

SEQ ID NO: 308409 - DNA, 1000 bp, Homo Sapiens
aatatttgtggaaccaatggatgaatgattttaatggattgatgtcatatctctctttcctcagactggaagctatttaagagagggcctctgtctgccactaccattgctgtattcccagcagcagtggactgaccagcagtagtgctggggatatatctttgggtcattggttccatgaagtgaaatgagctccgcctgctggagtgaatcagccttggcagagatgggtgtgggtgggaaggaggtctgtcccattctctaggaaagtgggccagcccacctgtgggaaagacacaaataaaggctctctggcgcattgatcctgagcagtcccagacggcaggataaaaataaggccacctaatgttgtaccaagcattttatatagatcatctcatttcatcctcacgatggacccatgaagtagatgtgacggtcatctccctattacagaagaggagaccctgggaggtcacatgactggccccaggccacacaggtagggggcaatggcaccacaaccacatgatatcacctctcagagtcctgaggatattctagatgccagagattacgggagccggggaaggaatctgaatgtgggttggcacagaggggatgggcctggaaaacctggacttatgctgttgtcagtggtggtcactgagagtcaggaggtgtgagttccagtcccagctcagctattttacgtgctgctggtggttctcccttccctgggccttggtctcctcatctgcataatgggattatgctggcaaccacttcacaggttggtgctgaggactcaaaagtccagcacacaggcaggggatcaccatgctggagggaaggtacttccaagtaataagaggaataaagtgcggggtgaaggcaacactgaaaacttgaaaccccaggaccggaggagggtgaaataaaaacctgtttggcaaagacaggctcaaacccccatgagctgtctggctgtctgagggct

SEQ ID NO: 308410 - DNA, 1000 bp, Homo Sapiens
ggtagaggctgtagaatttgggaaggtggggggcacctgtgctgaaatcctgttatgacattgaagaggaacaggacaagggactgtgccttcctggggctgactttgttcccgtctcctctgtagccaagccctcaatgtcaggctgcacctccccctgcctcgaggggtggtcaggtgagtgtgtgcacccaccacggggagattcctggggagagagtgagctcagcatgacgggtctgcctcaagaaggtgccaagcccagcaccttccctttccaaactccagcctgtctcaggagctgagcagcccagagcagaaggctgagctggcagagggagcccttcgctgggacctgcctcgggtgcaaggaggctctcaactctcaggccttttccaggtattcgctgtggacccccagcccctctcctcccacattcacttgcagcccccaccccaccctcccgaagcagctgctgcctggttcccccagcgtggtcagcttcttgccctccttcctctccctgcctctgcccctcacagatggacgtcccagggcccccaggacctcccagccatgggctctccacctcggcctctcctctggggctgggccctgccagtctctccttcgagcttccccggcacacgtgctctggcctccaggtccgattcctcaggctggccttcaggccatgcggcaatgccaacccccacaagtgggtgcgacacctaagccacagcgacgcctatgtcattcggatctgaggctccccaaacgaggacacgacggccaaggtggcagtttgtcccacgggaggacagtcgtttcttttccagcctcctggccttcggactctgaatctgggcaggaagagtcctcagtcccaagaccaggagggggcaatgggcccagcctttctgtggtatctgatgcaggaaggactgcagtggatcagaacttacaaaccaaacttttattctgagaaactggctgtac

SEQ ID NO: 308411 - DNA, 1000 bp, Homo Sapiens
gacatacatagagggctgctcattgctgtgtttatgctaataataggatagaaacaatctaaatgtccttaataaggaacttggtcaataaatagtatcattctatacagtcactaaaaataatttggtaaatccacatgtactgctgtggaaagtttcccaagacagtaattttaaaaggcaatgtccacataaagaaacaaaataatttttttttaaaggcaaggtagcagtatgctctattttgtcttctgtctttaaatatacatatacatgcatacaggtcaaacaatgctataacactactagaaggattcacaagagactaacagtggttgatttggagacctggggtgggtagaaaattcactgtataacctttttatttgtttacctttttttaaactatgaacttgtattcaatttataatacaaaaatgttattctctaacaagcctattattttttctctatacacaatgaaggctggaatccagatgccagatattcggagcattttctgcaggaagctaaattactccactggaatggaagacataaaccttgggacttccctagtgttcacaacgacttatgggaaagctggtttgttcctgaccctgcagggatatttaaactcaatcaccatagctgatataactctacccttaaaatattccctgtatagaaatgtggaattgtccctttgtagccaactataacattgttctttatgaatattacctttgatacatatgatccacaatataaaaaccaaaaactactgtgtgcaaattataccttggaccatataggcattgattaacttctttaagtacatgtgataactatggaaatcaagattatgtgactgaaaaacataaaggaagagacccatctagataacagcaatcaacctgcttaattctgaatgacaattatatccacaaatttttaaaacttctacatgtatttttcacatgaagatctccttaacagg

SEQ ID NO: 308412 - DNA, 1000 bp, Homo Sapiens
aagcttggtgctaactgaacctgaaatcttaactgacttgatatttttaatcaacttttcaaatcaaacattttcatacagcaattttcagagttctaattccactttccataatgttagcacttgtatttttgcctttcaggtaactcttatatatacatattttctttcccattagacagtaacatttttcagcttttacttatagtctttaattgaaactaaaacatttggtgaatattttgaaaataaacatattaactgattatttattgatgctgaatggagtccaggcatcagactctattccttactctgttattactaacagtatgatctcaactccagcttcttcggaggtcaggatctttgaaagggaatgattgtacaggctgatctctaacatcatatatttctaaaagttttgaaaaacaaattttcaagaataattctttaaaaaatacacagaacatttaggtacgtaatgatgagttctttcattaagtttaaaatacaatttctttgttcactacagaacagcaacatatacctgataacactgctccaaatgaaattacaaacattaatcaacacgtgacatttcaaataattttccctatgacacataacatgctattttttttggtcacttcacaacagctttttaaactactataatgaccttcagtttccataaataaagttacacaaaaagctgactaacatacttaagaactagattgtcattaacacttaaaacatagaaaagaatttatccatagaaataatttaaatatgttcagataaacatttaaagtttccattctgttttcagtaaatattccaaggttatttcacagctatgagttgcaaattaatactaagggagaattgttttggtaacttaataaaaaatatacaggtcacagaagagtctattatcattatccaaaatataaacattatacaggtcagcacttgctaatgaaaactactaata

SEQ ID NO: 308413 - DNA, 1000 bp, Homo Sapiens
ccagagtagggctatggttttactctaggaagggcatgccatcagcatcgcatcaccaccagttctgtcttacagaagttgtattccaggcaactgcagggcagaggattggagctccctcctccttccagcctccaccttagagcagaagttctactacatggaggcaggctgcagtactttgccttgcttattcacagggtagagtttccacaccaggaggagggagatgagaagaccaggggatactatctttgcccagtgcccctcttgaagagcaagtgtgtcattctgggaaaagcaggccaccatcttcctcccccggccagctcaggagtagtggtacagaggttctgtccaacaggagaggcaaaccaaaagaacagattgctggctgggtgtggtggctcacgcctgtaattccagcactttgggaggccaaggcgggcagatcatttgaggtcaggagtttgagaccagcctggccaacatggggaaaccttgtctctactaaaaatacaaaaattagccgagcgtgttggtgggcacctgtaatcccagctagtcaggaagctgaggcaggagaatcacttgaactgggaaggtggaggttgcagtgagccaagatcacgccactatactccagcctgggcaacagaacgagattctgaaaaaaacaaaacaaaacaaaacaaaaccatagaacaatcacctagaaattagaagaggctaagtgggtgtgaagtagaccagccaaaagcttaacagttcatcagggaaatagatagagagcctagagtcagtcatccctggtggtcatggagactgtgtgtgcccaaggctgtggcctctgaggaagacaccagcggctccacattgcatgggtacctggacttcaccgaactagtccaatcaagtcactaaacaaataacaagcaaatacaacaggtcctggaggtaggtaagggggaatcagtatccagagttgctaccatagtct

SEQ ID NO: 308414 - DNA, 1000 bp, Homo Sapiens
ggctctgtctcatacaaataaataaatacaaacaaaataaaataaaatacacatgttcatgcacagatatgtgcctagaaaatgactggaaggataatacaagaaaaatgcgaacagtggttatctctggcatgaatagcatagaggggcaggtaacgtccccccctgccctttttttttaaacttcatacccttttatattgattttgtgtgtgtacaatatatagcactttgaggtttttcaatgataagttcagagttaacagtgtgacatggcagtcaaaaaattcaaatctgctcctagatggcattactagaaatacacaatctagaacatgggaggtaattaccagatttcagaattaaaatgtattggctttataacccttacgaggagtcaaatttgtcactttctcagtgtaacaattactcagtgtccgagtggtttctgcacatggtcaaagggacaaggtaagttctacttcacagggtgcagagcacaccggaagtggtcaccaaatatttgctgagtgttctgagtcccaaataccgtctaaggcaaacgatgttttaagcttttgtttagcctttctccttaacttgtttaagaatgttttaaaaaattcaattaataggctgggcgcggtggctcatgcctgtaatcccagcactttgggaggccgaggcaggcggatcacttgaggtcaggagttcgagaccagcctggccaacatggtgaaactccgtctctactcaaaatacaaaaattagccagtcgtggtggcgggtgtctgtagtcccagctactcaggaggctgaggcaggtgaatcacttgatcccgggaggtggaggttgcagtgaaccaagattgtgccactgcactccagcctgggtgagagtgattgactctgcctcaaaaaacaaaacaaaaaaaaaaaaaagaaaaagaaaaagaaaaaaattcaattaatagaggagcacaagataatattaaagaaa

SEQ ID NO: 308415 - DNA, 246 bp, Homo Sapiens
ggaaaggttatataggcttcatgcttttttcactaatggctagaatgacacatacgtactctcttcctgcatccaaggaggaaaaaaaggaaggaaaaactaatctagtaacagaggaataaaataatgttgggtgtattaaatttcccgattaaaatagctttttcacagctttgaataaaatcactcaactcatattattattaataaaaaatattttctctacatttattggcctaagttatt

SEQ ID NO: 308416 - DNA, 1000 bp, Homo Sapiens
tgttgggtgccctccctcaatgtgcagcttttgacagcattaccagtaaaaaatgcaacctgtctacatcaaaaatacagtgttcatgaacagctccactctcgctggccccaccagagaacaatcccctcatcatgggcatctgcaagagatgcagacagtccaggacagcatctaggttgtgacagtttctaactccagagaggggtgttcaaaacctaccaggatcacagggtcaaagacccctccagtgcatcgagctatgcctgctttctgttcagcacagcttgacatgagtctgaaacagcccagagtggacatttttgggttttagcttagagtcgagacaagcctattgtaatttgtgacttctgggttccaaaacagtcagagagttttctactgcagcaggaaagctgagatgcttcaagaccagacaacagcagcattccatgtcccagtgagaagcctgcctggtgtgcttttctaaggccttctggccttatcagtttaacagtccaaacagaccccctaaaatcacacacctcagctcagataatcatcaacctctaagtgcgagactccaagttcagcagagttcattgcacactgtgcaggattagggggttgatcaagaaaaatgctatgaccaaccaggggcagtaccacacaaacaactttattgggtggtgcttggatagggtagcagaagcggggacatcctcagagtaaaagactgtctagagtttatgggtgtgggatcaccatcaaatggggaggaaggcaagagaactgctgggggagatggaaattggagaaggagcttatgagtctaagtgatgtttctcagcagctagacagtgtcttgggggtcttctaaccacaaggctccatcttatctatggttagcacatgtggggtgaggtttaccagggtatgaaagccaggaaggcctccaatgcctaacaatcttcctggttgagctatgttgaaaacaatt

SEQ ID NO: 308417 - DNA, 1000 bp, Homo Sapiens
atcattgtggactctgcaaacccctgtacttgaactgtgctctggacccacacagagttgtgagaatgtgctgcgagcgcagcctgacttctctggcctggtgcagaatgtctcctggagaccagctgagggggccaagagctcaggtgactttcctttgcatcaatgtagaagctgttaaacaaggtgagcttgggccatgcggccaggtgtgcagcctacagccctgatggggagatggtggccattggcatgaagaatggagagtttgtcatcttgttggtgaacagcctgaaagtttgggggaaaaaacgagaccggaaatctgctatccaagatatcaggtacctaagtgggtggtctgggcatggaggagaaaggcaagcattctgcttaccagtggttcccattccagccacggctggaataaagaactcagttgtgagagggtcactttcaacaagccacctatgaaagaataccttctcccactctcactcttagacaagtctttgctaatttccataaaagtgtggttaaaattacttgtaaatgtcattctacatatttcccggggattcgatccagataaattgttgaattccgtagaatgccaggagaggctgaccacatgtgagtcacaaggtggctctcattgcctttaggcctggaaggcctgtcacagaccagccttcgtgcctgaccagccccaaacagccctcctcatggactctgctctcggattgctttttctagaatcagcccagacaaccgattcttagccgttggttcttctgaacacacagttgacttctatgacctcactcagggcacaaatctgaaaccgcattggctactgcaaagatatcccaagctttgtcattcagatggatttttctgcggatggcaaatacattcaggtatgcttggggtttacttatatctggggcaaccaataataacagcagtaataacaatggcctatattaatcgagtcctt

SEQ ID NO: 308418 - DNA, 1000 bp, Homo Sapiens
gatctctaccaaaaaactatgttgtccaggctggtctcaaactcctgccctcaaacaatccttctgccacagcctcttcaaatgctgggattatgggaatgagccaccacgcctggcaaagttttggtagttttcaaaagcagcagaaagatagccacccaactatctcctaggcaagataaatctaggccagagaaggagtttcatataataggctagtgatcccaaagataaaaaaggccaactgaagaagcagagagacagaaataatgggagcacagagttacagcagggaggatggcctgggaatctcctagactataactactgaactcagtcaatagataataatattaactgttagtgcacaatagtagtgttaatagtaataatataaaacacttatatagaatgttctacatttgttaatttatataatagtcacaacaatcctatgatgtagctactattgatatttttattttatacatgcagaaaaatgaagcacagaaggttttaaaatgtaagcttaaaaaaggatgcaggctccaagagggcagagaattctgccctttttattcactgcagttatcccagtgcctggcacatgttcaataattatttgttgaattaacagttaactgatccaagatcatgcagatggcatgacaggcctgggataggaactgaggtttgatgcctctacaattcccactgttaattactgagccatactgtcctagatgctgttataggagatgaacttcatgtgtctctcagcctgagttacgtctgcttgataaatcctcaccctcaaagctggctagctgaggaaacacttcctaacttgttttatgaggccaatgtcacccttataccaagagataaagacattgcaagaaaggaaaacatagaccaacattgctcatgaacctagatgcaaaaattctcaacaaaatattagcgtatcaaatccaacactgtataaaaagaattatac

SEQ ID NO: 308419 - DNA, 1000 bp, Homo Sapiens
gatcgggtgtgttcagagtgatacggccgtagaccacatttacttttagatagtgtatgttacttttagatagtgaaaaagtaataaaacttagcagagcacaaacacctcaacagaaaaagagtctagaccgaaataagaaaaaaaaaaacaacaaattactaacaaatatccaaaatatgataaacagttgaaagaaaatcaattgaaaacaataaaatactagttttcattcatgaagtcagaaaaacccagaaaaataaaaacaatgatcctcaattccggtaaaggtatagtgaattggacacttttgtacattgcaacaagcagtatgaaatagtacaactttcatataataataaaaaaagattttaaaaaatgggcatatccttaatacctgtaattatatccctaagaatcaaatagtgatctgagatgtgtacaaatataaatataaaaagaccactgtattatgtagatatgaaatttcttctcaacaaaaataaacaataaaaaaatcctcaaagaatggtcttttcatttaataagaagcttatgctgacattatgcatgctgttcataaaaaaattttggcatgagaaatactcagaaaaagtgttaaaataaaaatagcaaactataatataacatataaagtataaataaagcactaacaaatacaaaagagaggaaatatgtcaaattttgaaatttttttatgttggttaaagaagcataaattgtttaaatattctacttgaaatttgtgtatttttttagtttttgacaatgtgaatgttttcttcataacataaaaatttgattaaaatataaagtacagtcttgaaattgaaataaaatatgttgaaattaatgattagaggaaatagttgagaggactgttgtagggaatagctggaattattaatagatgttcctggaagcccatagacttctgaaaagtatatctaaatttagaaggaagaaaaattaatggtaa

SEQ ID NO: 308420 - DNA, 1000 bp, Homo Sapiens
gatctttgctcaggcattttccaacttcaaaagtgctcttattttattttttttcctatccatacaaatacacatcttttctttcaaatctttgatcaagcttcatagccttcattatgatcccaaattatttcaacttctaaatcagtgcattgctagtactatttctttgacacaatttatggtttatgtgtggaactgttgctaatcttcctagttccatgagtcttacatcatagtctgatctgaatagaagacactcaaacattactcttacattacttctttattcctaagttgttacttttgattctcctcttatttgatcgatgtgttttgtttttccaattgaactttctcagtaaaagatcgtctttctaaactcttgcatatctgatactatatttctattatcttagcttggaacacagacttttgctccagaactctttagatttgtgacattgtcatccagcagttaatgtagtagaggtagcttaggacaatctgatgtccattcctctttagttaaggtctttacttttgcctcaatacttgagagacatttacttattcttacaaacccaaaaataattttgagttaaggcttcagtgggatttcagagctcgagatcctctctctgagatcttagatgaggaaaaagaaatcataggtgacacaaggtaatcacatacaaaagtcacttcatttagggctagtcagttacccagtatctgccaaatgcagaacttctaaactggaaaacacaattaatgttttggaacttagtgaagttacctgcttgctacttccccagtgctggactggtaaaagagtggagaactaagacagggagagaaaggagaagaaatatattacacggcatataggatatgggcaactgggtcttagtttggctgcagacttctggaatcgacatggccttaatttttccacccaaggggtaaggaagctgagatagttatcttccccctcacc

SEQ ID NO: 308421 - DNA, 1000 bp, Homo Sapiens
gatcaggcagtggctggagccctagaactcccaagagaatctgatctttgtcttcagctaccagggtgggtagagaaataccatcaagttggggcagggttagacatgtctgagctgattctccttgggcagggcttgctgcagctgctgtgggggatgggtttgtggttcccgggtcaatggagttacgttaccagtaggattatggctgcctctgctgtgtcatgtaggttgccagggaagtgggggacagccgacagttacaggcctcacccggctcccatgcaatccaaaaggccagtctcactctcactgtgcctccccgcaatagcactgagtttgtttttaggcagtgggcaagcagggctaagaacttgccccaggctaccagcctcccagctgagaaagcaagcaggactttcaggtttcatacctccttgcctgcctgtgtctgcactctggattcactctctcccccaagttctgtccaagaaattttgcatgtttggttggaattgttacaaagttcagcttgaggtttctttttatctgtggtcttttcccagttccactggcaaccctccccaaggatccctgtgagacaaagtcagaaatggcttccctggggaccgagagagcccacagggctcttctggcacttcctctactcctgtatttcacttggctctctaaattgtctcagttctaggtagggtcaaatccttctcccataacctggaccttcgagttccccagtgagggtgtgtgttcaccctttcccactttcatactttgggcactcatagtatttgggctgtctcctgggtcctgcaggagcaatctgcttccttcaaagggtctgtggattcttttggctttcctggtatgttcctccagtagttctttcaggaaaagttcatgatgtatctccacatgctgctctgcctgtctgagtgggagctgcaatttagtcctgcctcccatctgccattttccccca

SEQ ID NO: 308422 - DNA, 1000 bp, Homo Sapiens
gatcacattgtaatcaacaatgatgaagagtgaaatctagtcatttcatctattggcacaggcaagtgagcaagtatcacttttcagaatttaggatgtttgataatattacacataaaatggtgaagattcaaaaatatgatctgttgaaaaacctgtgttttagggctgaatgtcaagtatctctcagtgttggtgatgattcttgtctggctatgattattactgttattaacactaataataatatgctacattggcataggaatttaccctttataattggattctcacagtatacctgagagatagttattatgaacctcattacagagatgaggaaactgagagatgagagacttttcaagattatgtggggccactctcaggtcttctgacaagtctattttctttctcattccaccatctctatgcactagcaaatcaatacatacaagccttttatctctcatatctgtgacacctgaccactcacccacaagtctcagccttctaaaggggtaaaaattctgaaatggcattgtttacaaatttgctcttgtatcaatatgaggaaattctaatgccactctacagatgaatacactaaggcctaggtagtattctaattcatggcaccctaataaaaactattttgggaggcagatcccatttcagtgacaacttcctctgaattgtcatggcccaaatattttttttacttcttttaatgacatctacttttaaacatatatttacatgtagctatttgttcccctacttgatggagaagtctttgaaagcagcactgtctcatttgtatttctctatcctagcagtacctgtcacaagtcttgcatttattcattcaacaaatgtttgttgaagtctatgtaccaaacgcagtgatacatgttggggtatactgataaatttgaaagacaaggttcaatactcatggatttctaattgaagaagaaaaagaaaaagaagtaacaaa

SEQ ID NO: 308423 - DNA, 1000 bp, Homo Sapiens
gatcctcccacctcagcctcccaaagtgctgggattacagtcatgagcccctgcaactggccaaggaaacattttgatgataggaaagctctgcaggtttctgagcaggagggtgacatgttttaaggccctgtggcagacagatgactgtgaatcggaatcaccctgcatcctttctaagtccggactctctattcatccctcgaaagacgattccgtcagtgctctcacttcctttgcccacaccacctctttatcttaagatgtttctgtggtttcagatgcatcacttttcccctttgctgctgaatctggttctctctcctatttttgccctccctgtgcttgcagcagtgttacaaaaattgtggacattcacttcagagttttatcatctttattttcaatttgctagaccaggttgctttcccctgtatgagggagtgccaatctctgattgctgggtaccaaaccacatcctggcctgtgtggggtaccatggaggaaggagataagacccagacccctggcagctcccagtttagcaggggagacaagacaacacatgaaaacaaacagagcacatcaaaaaggcaacaggtcaaaccaatgcagggaaacccctatcattaaaggtctaagccctgaggcctccctgctcatctccaggctcagaacctttctgagtcttctttgacctcatttagtatttctcttccatctctctcttgttggtttatctccaggatcaaccgctagagcagtgtctaggtgttgctttgaagcttgtatcgagatttctctaggactctctgcttcagcctggccatccccaactaccagccacatcacaaggactggacttgtgttagctacgctgcttctccagcctgaaggtgcttctttttttttttttttttttttttaaatggagtcttgctctgtcgctaggctggagtgcagtggcgtgatctcagctcactgcaacctccaactcccg

SEQ ID NO: 308424 - DNA, 1000 bp, Homo Sapiens
aagcttactctgtattctcactctccttttcagtgacatttttatgaaacacatgtggtaggcagtttgtgctttgcagcagagaaaactcaaataatgctttcccaattaaaaaaatcctggggtcttccaggaccggcccttccttgttctcctccatgctggtcaaactggcgatctggacaggctctttggagcaaggtgctcaactcttgaagaatagtattggcaaggacttggggatgtacttctctgcatctggggtgcagaaaagataagaacacagtccctgatttgcctctgcccctgttcttatgtttctgctggtgcatatcttgctgtgctctgcaacccccaccagccgaccccttacggccattcctactcgctgcctgacaacatgatcaaaggagggtggaagaggagagccaagtttaataaccttaccaggagatcagattgtctggggccaagcagaagtcctgagatagctgctgaatcctggccatttacagagcagcacaaaactagtcctgttccttttcctgccgcggttgccatggccgacccaaacaatataccccagcttcagcctcctttggcttcctaaccgccacccacagacctccaaacgtgggcaggaggaggtgaaaactgctcaccgatgggaattgaggagctaggtagaggatggaaaggggatctgggctgcagatcagcccggagggtgtaacgtggtaagcagacgtgctgcttttagctgctaggctttgcttctgtgagttttcacctcatttctaagtggaaaacagatcttaagaagaaaaagaaaccagctaaaaacccaacatgggacaattactatcacctttaaactttggttttagcacctttaaactctggaatgaaccgtgaaccagcaaaacaaatggaaaaaaaaaaaacaaaaagcagcgacctcctgggtatggtaatatctgaacagaagcgaggtttggga

SEQ ID NO: 308425 - DNA, 1000 bp, Homo Sapiens
cagcctgagggactgaagtttccacagttggcagaatctttgtttaaattggggaaataaaagggggaggagttgcagaggaattgaaaacagcacctgtcaaagctgcctatccccttccttctctcactacttctggtcccccagaggggctggtcccaaggctatgtggttggttggtgacagaaaaggggcaacaaagaatgacaagagaggctatgaaggtctgagcagcactgacagggctggcacagaccctgagccctcctactgggaccccaacctatgatgaggtctggagtagcaatacagccaagaaagctctgccaagactccagcaggtgcccattctttggtcccagaaagcacaggtgacttggaatcaggaactctgggctctagctatgtcactatccaattgtgtgaccttgagcaagtcacttcccatctctaggcctcagcatccttaaagggtgggacccacggggctccactgttcttccagtcctgcagctccaagtcttcaggctttgctcctgacagccagaagaggcccctgtccttatgtgtcagggatagtttggtcatggatactagaggttaaaactgggccgtgttgcctgaaggcatgtagaggtggtgctggtgcatcctgaacaccacactcaccaaagggatcctgggagggaagcaacaacaccagcctacagaagagcatcatttttgggcagaggagatgagacattctttagaggcttaatgtctcctggaataaagggaatcccaggcatagagatcgcttagcaaaaggcaggcccaccctgctgattagggcagagggtgaggcagtttggccgttggagccttaggcctgctctgccctttcagtgtacgggaaaggggccagctgtgtccattcaggccactccctctgctttagaaccagaaggtggctggcattattcgaagtggctgagggcacaggttttagaagactgta

SEQ ID NO: 308426 - DNA, 1000 bp, Homo Sapiens
ttttaatccaaccactttcgaagaatttgagcccgcccccaagacatgtagattccaaaaacccggcggtaaatttataagtaaatggccccaacccccaaaactggagtatttcgaaggttgagggttccagtggaggttgtaacccgaaaggaacttcacaactgaagaaatcattgccgagtttcctccaggcagcactgaaatgaatggagaacccttctctcgggacatctcacacgttagaaggaataaatatttaagagatacaaggctcagattggttttcataatacattgcacttgaagtttgaagacccaatacttgcaaattaggtctggtatggtctatgccattaaatgaatacattgtgctcaccaatatcattgactagaaacaccacacgtttaatgcagtgccatatgcactctcctttttacaaggcaatcacagattgcaaattccatagggctgtgccaaaaaacagtcatctctattctgtagtaacaaacaaacaattttggctcactaagattgaaatacatggcagacaggtattcattcttagatgactatggatttcgaaataaacttcataaactgaggtgggaattccaatatatcgcagtgtgggagcccaagacttttcattgccttttgctcagtaagattgtctacacaacactgccgcgggaggaatgacaagcagttgacccactggtgatacacacacgtgtgaccatgtaaacacgccactgcaggacggacgagcgtgaccgtgaagcgtggccacgccgcgaccccacttagagtgtgacctctctataatcactgctgcttttcttgttttgattccttctttaaacacagccctatttttaaaaatcttttggataaatattattcctattacaccatacttcatgtttgttaagcaccatcaacctccctcctttgggcactgacacaaaactgcgggttggtaattgagtcttagct

SEQ ID NO: 308427 - DNA, 831 bp, Homo Sapiens
ccttttcattactaaatctagttacatgcatatcaggaagagaggttttttgtttttgtttttccaaattcttctcaggaataagacctacctggactctccactctcttatagtggtatgggttgatacaaacttctttttgcttagatccaaaaggaaattcacaaatatccaacggctttagctcatgatgactctgcaaatccggccagcgccaaacacgacaatatataacatggggtaagccttttctgtgagaaacctgcaggcgtccatctaaagatctgggaatagtgacacatttactcggctgtcctggactgctcaaggctttctccagttcctccatggcaccctttttcttttttagtttcttcaccaaagcatcaactgccttttctgcccatttctcctcctcatcaccttgtttccagcccaacaatcgctttactgctggactagtaaaagaaaacaagctggccattgacgtcatttgacacaaatcttcggagaccttcctgtaactcaaagtcagtggctaccgaaagaacagatcacaggtgaaacgtcatacacaggtcctaagcagaagttccaattaaaaagggaggagtaacatttatcttcacaagtgccatatgcttctttcattgggtcaagtcctgaaagagaaagggggaaaggatcctagtttaaatcaattcaatatatacaaatttaaattaatataatcgaaaggcatattttattaaataagaacagaaaagcattacaaagtaaacaaaaaattgataaatttcctccaaaagttctgtgaccactcgattcct

SEQ ID NO: 308428 - DNA, 459 bp, Homo Sapiens
  misc_feature (137)..(137): n is a, c, g, or t
  misc_feature (429)..(429): n is a, c, g, or t
taccaaaatctttgaatcatacacttaaaaacaaaaaaattttatagcatataaattatacctcaataaagctgtttttaaaaaagtagccaataagttaaaaacaactactactataaaataaatgaagtgagtanttctcttacccctgctggatatactgggcataatctgaggaatcatattattgcttgtatccataggctgggaattatcttgacccatctgatcatcaggtggcatataggcaggaggaggcgtatcagctaagaggaaaaaaaataataattaaaatcttcattctgctcaaaattattactctaaaagctttagaaaattcttaagattaccagcaagcttcattactgaacatcacacacaaaaaaatgtwkgatactatcctagggctagggaaaaggagaacagacngcacacctaatggcaattgaaaacctacta

SEQ ID NO: 308429 - DNA, 1000 bp, Homo Sapiens
tggatatctccatttgtcaagcttattagatttttacctcttctagtcttctgccactgacaattatcatttctttgtgaaatcacttaccactcatccatcagtttccttgcctgatgtctcttcttccattctattaaccttgtggatttgtcttattccttttctgtcatttaagtagcatttttagtgagtgaggggataaatatttgaagacaacgtttgactcacattcctaatttattttataacaggaaacatgcatggagaattcaaatctgcttttgttctttggattaggtcttttccagattgggcctttttgggttttaattttgtaatagctttagttagcttttattccattctgatctcattttcctagagtcctctaccaagtctcactcaaaaatataaatactttggctctctttcctttatcctctatatcacaaatacttttataattcctttaattcctgtcacttcagatcctcacttgtgcagctggttctctttccaggtatctgcccatttatttgcagagtgtacgtgtcacagaccttgcagctttagtatcttatgtagtgtttaggggactagttttaaatacatgttaagaaagctttagcctatacttcaaaatatatatattaaaactgaggctattttgaagtttaaaaatattaatgatataagaagtatttcctttcatatgaggctgaaaattttccttcagtgtcaacctataatccaaccaaacccttcagggataagagagcactgtctcatttgtgtaatgatctttaacccttccaattacccctcccatctcaacaactttattttcaattcaaccctgaaggacagatgggaaaggcaagtggaaaactttaaagcctggagaaacacagtgatttcctctaggattgtagtttctccatttactatctttctacttgacaacattacagaaatatttagagtagacttttataaa

SEQ ID NO: 308430 - DNA, 1000 bp, Homo Sapiens
  misc_feature (803)..(803): n is a, c, g, or t
gaattcaccgggactaagaggccatcacacctggctgcggtaggacagcgaatcatcgatcttaccggctttggggacccggctctgcggcagcgctcttccggagcgagggcaggagactgtttcatggataaaaagtctcgcttattcttctgtccacttttatcttggtcgcttttctctcctctacgtgtcccccggggaggcactacggatgattttctccaagctcaagagagacaaactgaactttaagcgccaggggccccatattttgtctgctctacagatcccacccgcgggccacaccctcccttcactcccgtctctgggtcccacccataataacccgtaatgacagatcctccgtgtccccacctctttgcattcaaagaagttattcttcaggggcatatggaaagtcagtttctgctggtctccctcaaaaacttacactccacgagggcagcagaaaaaggacaggacgattaagtttaagttgtggaagactggttgggagcaaaagagttacttttctccaaatttgccatatcacatcgaaagcattttcttttaaccagagtgtagccaatcaaaattaactgcaggcgctggcaattaaagaacaagtttatctcaaaaaaggtttaacgtttggaggccattatttgcatcaggcatatggaaacttgcgttctgttaggtatgctgaagaaactgcttttgccagactgcctgagtctttgctgaggctgcagggacaagggagaaccccaccctgactgcttccaaaaccctagttnctgatttcctgcagagggcacctacaggctgaacctaaaaggcgaacaaattcctgcctgtcattcaaaagcagctaccttttctaaggcagcgtcaaggagggcactggaggtactcaacacagtaatgattactttaccaagtccaaggcaattgtcaaatgtggcaaagaaaaacacttcattgggtttttctt

SEQ ID NO: 308431 - DNA, 1000 bp, Homo Sapiens
aagcaccagatataaccaaaatctctgaactaggaaatatttgtattcacatgggtcattttccacacaatgatgcccattataaaaaagcctcctctcatattctatattttaacttccagagttttccactcaacagtagaaccacagtacttggaattctcagccaaggagtatataatcctactactacaatgtattactttaatacattttaaaaaatgtgttaagactgaaaattaaaaaaaaattcaattgtgataggttaataaactagttaattgtctagttgtttattttttaaatagaacagtccattcaacttaatatgtaggtacaacctcaatgctattagagattgattagttctttaaaaagattcacaaacttccaaattgtggtaagagtatcgtggactcacctctgaacactggagagccagctagctcttttgagccgagtcctcctccccctccaaatacaacaccctggtaaaaaaaactacagttctgggaacctcacaggtgacctcccctgaggaatgctcagacaaggggaagaggctaactcacataaaacagcaaacccctatgatttacagtggaagaaatacctacctacttatggtaggattacagtacctagcacagtgccttgtcggtagaaaatgtttaataataaatgcatggctgcttttttagcctgacgttcaacccttttgtaccaaaggaataaaaaataggtaacctgatacttgcccacctgtcagggaattttctgtccttaacaaagatgaaggcaaaataatgatgaactctatcatctttttctaaaagccatgacagaccattacccttatgtttacatttgccttcaacactgccatccgctacaaatttttccctagtgttataatttctaccttcattattttacaactgtttattatttagactgtatgctttttaataatatatgggaaaacattattttcattagt

SEQ ID NO: 308432 - DNA, 1000 bp, Homo Sapiens
ggcctggaggacgttgaataatttgtttttgtttgttttgtttgagacagtctcgcactgtggcctaggctggaatgcagtcatgtgatcttggctcactgcaacctctgcctcctaggttcaagcaattctcctgcctccgcctctgaagtagctgggattacaggcacccgtcaagggattttcctgcctcagcctccccagtagctggtattataggggcctgccaccacgcccagctaatctttgtatttttagtagagatggggtttcaccatgttgaccaggctggtctcgaactcctgacctcaggtgatctgtttgcctcggcctcccaaagtgctgggattacaggtatgagccaccacgcccagttgaggacactgaatttggcctggactgaaccccaaggctgcccccctgtccttgcagtcacagtgacagggagaaagcacaggtcacccttccttccacagtgccgactgagagcgccgccacacccccagagacgtgtgtcggagttgcccagcccagccaagctctgcccacgtgggacctcactgcattcccagcaccgaaagcatcatagttttccccagttatatgtagcataaatggtttaattataaatgtctcccttaggcatgataaacattttaacacccacgcgagtcagtgtatgattgggctagctcctgtttgtgtgagtcacatgcaattcctttcaccagccaacctgaaaaaagacctttctcttactatgtcatcagaaaccagacagacccgggtccctgcaaaatctcaagtgagcattttccccacaggaaaacagaatcttccactgcagctagagaaactccgaggaagagggacttgatgctttagacatcaaaatgagaaggggagggaggaaagaaaggggggagtctgtgaggcacaacagagaattcccccaaactgacatgaccgtgaccctctgctcagagggcactatcgacag

SEQ ID NO: 308433 - DNA, 1000 bp, Homo Sapiens
tagagaacagttttaataaatacatttaaatttttagtagagatggggtctcactttgctgcccaggctgctctcgaactcctgggctcaagcaatcctctgtcctcagcctcccaaagtgctgggattacaggtgcagtttcaatattaatgtggattttttttcctcattaaaaaaggaaagaattctatctgaaaaccatacttaacatagagtccattttctccagtaagttctccctcaaaaccagtcataagctttcacatataagctcttcccacaactattttgaagaaaatttgcttctgtacacgttctccttactcatttaaaatgagattttgtagttatttggtgacaaactattatttagatgactttgtccaaatatgtactgatatcagacaaaaagtaaatatctgcaaatatctgaggctgtctcaatttagacaataagaattttattcacatgactactgaagttaactgttgattcaaataagatgttctatgttgattaatgccattactccacaaatagtccctttttccaaagctacgttcaaatttcgtatggcatgcatttcacaatgaggacccggattcagggagtaggttagaaagcctatgatgagtcatgacaagctgactttgactaatagtcatcccattaaaaaaatgaaagccacaaacatggacagaaaccagtcatagaatattttaggatataatgcatagaatgattccctcaaacaaatcagtcctccagaagcacaggatgaaaaggatgtttgggaaatattttctgtaaggtcaccatattaaaaattatcctatacctatctttatttttttcagtcttcccaacaaagaatctgctatataatttctattaacagctctaaaagatggggaaaatattttatcctcaggcagacactttcagtttctttttcttggctttcagcactggaggcagagaaattttaaaggctgtcc

SEQ ID NO: 308434 - DNA, 1000 bp, Homo Sapiens
gaattctctgttttttctctaccatcctttccaggccttttcctcacctaatgagtcgtagagacgagggcccagagagtctgtaaagtggctggtgaaagattagtgtcccagggccctacatccgggaggtggttcgggataaagagaactagtcttgggaacaatgtaggtgggaacttaagggaatgggagagcggcccatagaggtggacggagggcgcgattggagtaaagcggaccctgtgtaggtatagagttgagtcaagtggagtcactgcctctgtccctctggtcagcgtgatggccagaggcctgggggccccccactgggtggccgtgggactgctgacctgggcgaccttggggcttctggtggctggactcgggggtcatgacgacctgcacgacgatctgcaagaggacttccatggccacagccacaggcactcacatgaagatttccaccatggccacagccatgcccatggccatggccacactcacgagagcatctggcatggacatacccacgatcacgaccatggacattcacatgaggatttacaccatggccatagccatggctactcccatgagagcctctaccacagaggacatggacatgaccatgagcatagccatggaggctatggggagtctggggctccaggcatcaagcaggacctggatgctgtcactctctgggcttatgtgagtctccaggggatgggagagagaagggctggttctggattgttgggaaactccacagtacttgaccttgactctccctcaccaggcactgggggccacagtgctgatctcagcagctccattttttgtcctcttccttatccccgtggagtcgaactctccccggcatcgctctctacttcagatcttgctcagttttgcttccggtgggctcctgggagatgctttcctgcacctcattcctcatgctcttggtaagtaacctctgacttctacctcaaat

SEQ ID NO: 308435 - DNA, 1000 bp, Homo Sapiens
gtcaagtttttttgtttatttttgagacagagtctggctcaattgcccaggctgaagcagaggagtgatctcagctcactgcaacctctgcctcccgggttcaagtgattctcccgcctcagcttcctgagtagctgggactacaagtgcacgccaccacgcctggctaatttttgtatttttagtagagacggggtttcaccatattgcccaagctggtctcgaactcctgaactcaagtgatcctcccacctcgacttcccaaagtgctgggattacaggtgtgagccaccgcgccaggccaagttttttttttttcttattggaaaagtgaaatatgcttattacagaaacctcagaaaatataaagtagaaaaataccaaaatttctttcataattctctctacccaaaggcatcggtcagtccctctccagaccagaagcagttagttctgacaccaacaagtggtgataagaggttgatagcctagcaagggggaagaagccaccaccaaaccaaacacaaaaaatgacactgcacagcagtctggggacatgtccttgaaggacacagccccaaagatactggcaggtgaggtagtgtccctaagatcaacaggcatcatcatgaatcctatttcagaatgccacaaagaatacattttagagaagattctaagagaaaaagctaaggtgattttttttttcagtcgttttttgttctcagacagtgtctcactctgtcgcccaggccagagtgcagtggtgcgatcacagctcactgcagcctcaacctccagggctcaaacgatcctcccacctcagccacctgagtagctgagactacaggcgtgtgccaccacacccggctaattttttttttttttttgtagaaatgggatctcactatgttgccagggcttgtctcaaactcctgggctcaagcgatctacctgccttggcctcccaaagcattgggcaggcccattacgccatgag

SEQ ID NO: 308436 - DNA, 1000 bp, Homo Sapiens
tagcagcaggcagggaagcaaacacaggggccagtccagattatcttactcaagaacattgccaagaggaagtgaaagtctgattcagtcttggtctgaactacatctccccacaccgtgagatcaccatatgtaccttggccttattattggtgcctgtgggaacattttcaatctttcttatcagtagaagtccatcagtgatttttccaaacactacatgcttcccatccaggccattgcacttagagcgggtgataaagaactgacagccatttgtactgggactgctgttcaccatggaaagcaggaccggagctgggtatctgattttaaaattttcatctgcaaatggtccctggtaaatgctggtgactccagtaacatctccattaacaaaatctccaccctgaatcatgaaatcctttatgaccctgtgaaaggtgctccctttgtatcctattggaacccgatcttctctgaattctccagtgcagaactgcccaaagttctcagctgtgttaggcacaatgtctacaaagagctggatcttcatgtggccaacttcctgactgacaatgctgacatcaaagaacaccacgggggctcagggcttgaatttgccaccaccatggctttgactcagaagcagaagtctgacatttttcaaaagaagacatacaaatggccaacagatatatgaaaaaatgttcaacgccactaatcatcacagaaatgcaaatgggaaccacaatgatttcattttaccccagtcaaaatgactattatcaaaaaaaaaaatgaaagataacaagtgttgggaggatagggacaaaagaaaaccaacactgttggtggaaatgtaaattagtacagccactgtgaaaaacagtatgaaggttcctcaaaaaattgaaactataattaccatatgatccagcaatcccattcattactgggtatatatccaagggaaattaaatcagtatatcaaagagat

SEQ ID NO: 308437 - DNA, 1000 bp, Homo Sapiens
attactattcttggaaatgcttgatgatacaggataaaaataaatacaacacacccaaatacaggatgatagtttttttgttagttgggttttttaaagcataatgcaggagtagatttattatagctactccaaatgttgaagagtgatacagtgaccacagagttaaaaactctcactgttattgctgtttattttacaataattggtttagtctacaagtttaaggcaaacatactaatgcatttgcttttcttcagaaatcataaagattacataaaatctgtaccaaaacttctaagaaatattcagtagttaaaaataagtctgattaagatgctttaccaggatacatgaatgaactaaggtggtatataatgcttttttaaaacaaaattttaaaaaattctgttttaaaggcaataaaggcaatctttatcttgtttgaacaatgcattctgaaaaggttaaacttcagaaattatttaaaggtaaataagattggcatccataaggaatactatttataaaataaatgcagttatagaggctactttaaagaagaataaaacttggacttctgagtatgatgagtgcacaataatgggccactatcttggggaacacagtgcggcattacaccacacagactggcatcgcctgtacatggtgctgctccatgcttctcagaaaaagagtagatccattttgtcagctgttttttatttgtttccagtgagcataaatgcgtaacatcattaagaaaacaaaaataaaatttgaaggaaggcagcccttttcaacaggaaggcagaatgtggcttatgtgtctccgtttagcactgccaggcagtttggcagcaactgtaggttaccctttgcatgcttcagttctaactctgccagttccactagtttttttttttttctgaatgcagcaatgcttcttgtcttaaaatctataagttcttgttttgcagactgagatttttttttttca

SEQ ID NO: 308438 - DNA, 1000 bp, Homo Sapiens
ggactgcaaactagttcaaccactgtggaagtcagtgtggcgattcctcagggatctagaactagagataccatttgacccagccatcccattactgggtatatactcaaaggattataaatcatgttgctataaagacacatgcacatgtatgtttattgcagcactattcgcaataacaaagacttggaaccaacccaaatgtccaacaatgatagactgaattaagaaaatgtgtctatttgattcttctctcttttcttctttattagtcttgctagtggtctatcaatttttttgatcctttcaaaaaaccagctcctggattcattgattttttgaagggttttttgtgtttctatttccttcagttctgctctgattttcgttatttcttgccttctgctagcttttgaatgtgtttgctcttgcttttctagttcttttaattgtgatgttggggtgtcaattttgcatctttcctgctttgtcttgtgggcatttagtgctataaatttccctctacacactgctttgaatgtgtcccagatattctggtatgttgtgtctttgttctcgttggtttcaaagaacatctttatttctgccttcatttcgttatgtacccagtagtcattcaggagcaggttgttcagtttccatgtagttgagccattttgagtgagtttcttaaccctgaggtctagtttgattgcactgtggtctgagagatagtttgttataatgtctgttcttttacatttgctgaagagagctttacttccaactatgtggtcaattttggaataggtgtggtgtggtgctgaaaaaaatgtatattctgttgatttggggtggagagttctgtagatgtctattaggtccacttggtgcagagctgagttcaattcctgggtatctttgttaactttctgtcttgttgatctgtctaatgttgacagtggggtgttaaagtctcccattattattgtgttggagg

SEQ ID NO: 308439 - DNA, 1000 bp, Homo Sapiens
tagtgtacctgccaacagatccttttcaaggacagtttgtttttatttttttccctttaaatgggccatactttgccatttcttggtatgccttgtcactgtttgttgaaaactggacatctgaatctattactgtggtacaactctgaaaagaagtctcctgttcccccggatttgccatttttgttattgctgtgtttattgcttttttgacagctctaggctgtacctgtgccatggttcagcctgaggtgtaaacgtaaggtcttctcgggtcttttctgagcctctccctgggcagccccatatatacaacacagttgtttttatacgtcctagtcttcaatgtctggctcccaaaaggggaaagagaaaaatgaaggaacagaggtcggggtagaaagctgaaatggaccaaaattaactgcaatgtgctgaccaagcctcccttgaaagctttaagccttcagtagattccgtagttacagaacagctgcatcaggcagatcctgcccgcgaggtagacatctacctgggcagccagattcctggtgctccctattccaccatcttcccagaatcctctcaatcttattcttgttctcaaagtcaaacttttaaattttgtctcaattttcattgtgaaaaaaggccaaggaacttggcttatctttctctgcaccacaggcaccgaaaaggaaggtgcctctttgccctgtgtccaccaagacctccacccttggccaccttccaccttttcagggtgggctcccggaggatgtgcctcagacaacatgtggtggtggggtttgcacccacagggaccacccgggcccaccgcgtctgggcctaacaacctactttctcactcaagtataaagtaaaaccaacaagacagacaaatttctagataataatcctgaattagagaaacacagcttgtttaaaatgcccatgcgcgttttattaataaaaactaacagtgccaagttaaacaagt

SEQ ID NO: 308440 - DNA, 1000 bp, Homo Sapiens
aagaatgatggatgcagaagacgtatttgaaattaggaaaaaatagtgtgcaaagaaaagcagctgctgtagtccaagtactggagaagtttggctggccaagtcaatataaatgagagcctaaaaaacaacacatctaggagccgttcaaagactgctggagattatctatttggattttgttttcattggtgaagattttcaatttgaaggctgaaggaaaaagtcaggaaagatggaaatactaaagatgccaaaaggacacagacttgggaaggtagctctgaaggcagaggacccacgctcaaagtaattggtagtactctcctccaatcattcttaactcgaagcaaataggagcttgggggttgttcttgggagacgtctccacaggagcagtcttaaaataaccttctttgtccactctgaacaaacactgtgtcaacaacaatcatcccctgcaggccactcctaaagctgacccacctacaccagttcaactccagcccccagcctccaaatccatttacacagaagtcagcttctaataagtgaagtctggtttaaaagccaaacataacggtacagaggttcccatacacttaatgttcacaggtagaatgatgcaccccatttaggtttcctaattgtttgctaaaaccacagcaaacatattgaaatatgttccagcagtgaggctccctcctgctatgcttttaagtggaacctgagggaaaatgcaaagccgtgggcagcagggctaaacagttgtgtaaaactgccactattgtggaattagaaacatgcacgtatttcttctcagctacgtctgaatgtcagagggaaagcctattgagagtgagtgctgatcaatagaaatctttttcgcttttttaacatgtgaccaggaaggatcagacattgttaagataatgaaaacatgaaaagacaaagcctgtgaatacaagataatatccaatgatacttgaaatattcagct

SEQ ID NO: 308441 - DNA, 1000 bp, Homo Sapiens
ggaataggcttttgggagccttctagacacctgaaaaaaatataaattactcttcatgtcaggagatcgccaatgtgaggggccacagcccccccagatagagcaatggaacctgggcgtcgtcttttgaaacaacagcttcaacatacacaactattagcaacaaaccagaacaaagcaacacctaatcctgctgctcaaagcttcagagcttcagtgatgttcacaaaaaagaaacctgtgaaagccaaggtgctagctggtcctgcaatgcatgagactctgggccagacaccttcctgcttctccaggccactctctaccctctccacctgctgctggctgggctttagtccaaggggcatggaaatcagaggatgaatggagggaatttattccttcagcttcctcctgcagggttacagcaggctggccatcccatccccagacaaagtcactccctaggttctaggactccctcccctccccacatcaggcctgagctggaatggcctattactagtttttagatagaatgcacaaccccctggggttcctacacctgctcttaaaacatcctcaaggttgcagtgagccgagattgagccactgcactccagcctgggtgacagagcaagacttcatctcaaaaaaaaaaaaaagaaaagaaaaaggaaaaaaagaaaaaaaaatcctcaaattaggctgggcacagtggctcacacctataatcccagcactttgggaagctgaggtgggaggatcgcttgagctcaggaatttgagaccaggctgagcaacatagtaataccccatctctatgaaaaattttaaaaatacagaaattagcgaggcatggtggtgtgcacctgtagtcccagctactcaggaggctgaggctggaagatcactggagcccaggagttcaaggctgcagtgagctatgatcgagccactgcactccagcctgggtgacagagcaatatcttgtctcaataat

SEQ ID NO: 308442 - DNA, 1000 bp, Homo Sapiens; identical to SEQ ID NO: 119948

SEQ ID NO: 308443 - DNA, 1000 bp, Homo Sapiens
atgcatcaagaaaaatattgttctttggtgcttttgacaaagggttatggttggacttgatacatccagggaaatggccaccatccctccagtgccttttgaatgcttacataagatagaaggtgcgattgagattgagtttcctagtagtgagtgtaattcaactcaaacaaggtaataaggaagatttgaagcctcttttactggggtttgtaaagataggggagctgtcattcatctaatagatgtagctttcagactgatgacaaatagcagactagatgtcctctctggtttccgtatctacagattcccatgatcatatgtgaaaaggtgattggaattgtagagaagatagaaagataaaaactgagctgaatgaccaaatctggtgatcactgcttcaatgagtcattctgcaaatatttatggagtgcacacatgtgccagaccctgtacatagtcgagcctagggcaacatcaaggaacaacctgatctccatacttaaggtaatcattgtgtagtggaggatgaaaggattgctactatttgtaattcataaaccctgaaaagtgcagttaaaatttctgtctactttctgcattgctcttgtgtagttcattatccctgaaatcattgctgtcactcctagatgtgtgacaatgtgactatgtcacagggaactctattatcagacggaaactggcaaccacttgtgtggtggtccctgatatgtgccaatagctccacttatttaaaaatagcttcccctgcagcctgcctgtcctacttgagacccatgccactgggatatagtgttagatcttgaaaagttcctttatgccattaacattagcagtatttcccaaaatgagttctatggtctattctttctgtaggacactcggggaaaaatatgaaaatatttaaacattttttaaaaatctgtactttgctatcccatctaatatatttataatgaacaataacatggaaagt

SEQ ID NO: 308444 - DNA, 1000 bp, Homo Sapiens; identical to SEQ ID NO: 119949

SEQ ID NO: 308445 - DNA, 1000 bp, Homo Sapiens
ggatccaaggtgacagggaatattcaagaggcaggaaagaaaacactaatcaactacagaacagcaggtatgccaccatttacattttaatatatctatatacagatagatagatagatagatagatagatagatagatagatagatagataggtacacacatgggtatgctctttatgcagagtctcactgttgcccaggctggagtgcagtggagtgatctcggctcactgcgagctcacgcttcccaggttcacgccattctcctgcctcagcctcccgagtagctgggactacaggggcccaccatcacgcccagctaattttttgtatttttagtagagacagggtttcaccgttgttagccaggatggtctcaatctcctgacctcatgacccgcctgcctgggcctcccaaagtgttgttgggattacaggcgtgagccactgccccccgggccctctttaatgtatattaaatagccttagattgaaagaaagaaactggtcttccagaggttgcttctggggagggaaactggtaggtaggggactgaggaaggtgtcttcattgtatactcctttttgatcatgtgtaaacccctgtgctagagggaaattttggaaatgaagaaaacaggaaaacactgagctaaagaaccaaattgttcacttacgacatgggaattatttttttctgcatataaacacacatatatagtctagggttaaaggtgaatttacaacttaaagcatacacctttgcaatattttaccaataattcataattccaaattagaaagcacatccttatactgttttgtggggtttttgttttgaggcagagtctcactctgtcgcccaagcaggaatgcagtagcgtgatctcagctcactgcaacctccacctcccgggttcaagtgattctcctgcctcagccttctgaatagctgggactacagtggcacacgcccacacgcccggctaatttttgtatt

SEQ ID NO: 308446 - DNA, 1000 bp, Homo Sapiens
ttttttttttttttttttttttttttttttttttttttttttttttttttttttttttttttttttttttctcatttaacttttttaatgggtctcaaaattctgtgacaaatttttggtcaagttgtttccattaaaaagtactgattttaaaaactaataacttaaaactgccacacgcaaaaaagaaaaccaaagtggtccacaaaacattcccctttccttctgaaggttttacgatgcattgttatcattaaccagtcttttactactaaacttaaatggccaattgaaacaaacagttctgagaccgttcttccaccactgattaagagtggggtggcaggtattagggataatattcatttagccttctgagctttctgggcagacttggtgaccttgccagctccagcagccttcttgtccactgctttgatgacacccaccgcaactgtctgtctcatatcacgaacagcaaagcgacccaaaggtggatagtctgagaagctctcaacacacatgggcttgccaggaaccatatcaacaatggcagcatcaccagacttcaagaatttagggccatcttccagctttttaccagaacggcgatcaatcttttccttcagctcagcaaacttgcatgcaatgtgagccgtgtggcaatccaatacaggggcatagccggcgcttatttggcctggatggttcaggataatcacctgagcagtgaagccagctgcttccattggtgggtcatttttgctgtcaccagcaacgttgccacgacgaacatccttgacagacacattcttgacattgaagcccacattgtccccaggaagagcttcactcaaagcttcatggtgcatttcgacagattttacttccgttgtaacgttgactggagcaaaggtgaccaccataccgggtttgagaacaccagtctccactcggccaacaggaacagtaccaataccaccaattttgtagacatcct

SEQ ID NO: 308447 - DNA, 1000 bp, Homo Sapiens
aatttttgtatttttagtagtgacggggtttcaccatgttggccaggctggtctcgatctcccaacctcaggtgatccgcccccctcggcctcccaaagtgctgggactgcaagcatgagccattgcacccgtgcacccggcctcttccggtcacttctaaccctccattcccactgacaaccccagagccatcacaggtagtggtctgtatcagctctgccgtgatttataaaatgggaaaatccactttaaataaaatctggggtcaccaaggtagggagggcatgagccttcagcttcccaggggcaggggttcaggggttctctccagctgctcttccagctcctccccagctgcagcctctgaagcaagttgggaccctcacggtcagtgttgaggatgactttcttatttgtcatgccctggggcgcctctggccttttcactacctccctggttaccacggccaaggccattccgcctcctacctctctccttttcaggaccatcttggcaaagaaccagtttcctctcaccacttccctgctgcacaagaccctatactagttcctcacagcctgcggaatcgactcaaagtccccatcagactccaagaccctacactgcagcttcacccgatggtacagcctcccagcctactctcctccagtcccgcaccctcaaagtctggttacccaccctaagagcagcagcagcagttgggaaattttcaggcccccttccatttctactgagtcagaactccaggggcagggcccagtgatctgtttgtcacagctctccgggtggtcctgatgcagcctggagtttggcaactgctgctccagccacactgacctccccagggctccatgtcaggagtacatgccccttccagcctccccacttctcatgctgtccccaccacatgcagcaccctcccctgtcttctctggccaatcaaagctccttccctagggctcctcacacacactctg

SEQ ID NO: 308448 - DNA, 1000 bp, Homo Sapiens
cagaagctctttgaacccagttcttttgtagatttccggaggcttcattatgtaggcataattcattaaatcattggccattagtgatgggcttaacctttatccccactcctctggagcagaaagtcctaatcctctaaccctgtgtttttatctgactagccctcctcctgaagctatctagagactcccagctaccagccatcttattagcattcaaaagacactcttatccttcttaatacaatgatttaaaaagctgtatgacaggaaatgaggacaaagaccaaatatatatatatatatcttattatgaatcacaatatcacagtcacatattttagccttctgaaccataagtgtgaggcatatccacataaatcccattttttaaaaaccaaaactttttgtctgtaatttcccaataagactataagaatttttgagtgaattatccctaatttgttggtaagagtttttagattttagatttaacaggttaaggttgaatatatcttatctttaatggttatgagatcatagattaatgctttttttctttttaaaagataaacattatgaatgaggaaaaagttaacagagtaaataaagcttttgtaaatgtacaaaaggaacttgcacatttcgcaaaaagcatttcacttgaacctctgcagaaagaactggtaagcagaaatcatttgcttttttttatggctaacaaattgaggctaataaattaaactcccaagttttcaaagcctgtaagttgagtgtaatttttagtacttggctctctagtactaggctctatagtataaatagcatattcagactctaaaacattgtcagaatatacagattgttctacttccaaagatatgactagaaaaattaaattgaataacagcttatataagtcatttgtctgctattgttgtctgtgtttttaaatataatactttctcctttcagattcctcagcagcgtcatgaaagca

SEQ ID NO: 308449 - DNA, 1000 bp, Homo Sapiens
tgatctgaaagagaaatgggaagactgaaggcagaaaatgatgtggcttctttccctttaccagttcaaggtcttcataaatttttctttttttttctgtaaaaaaagagatggagtctcactatgttgctcagtctggacttttgaacttctgggctcaagtgatcctcctacctcagcctcccaagtagctggaactacaggcatgtgctaccatgcctggcttagattctgaccttagcagtcattatatgaaggataaccagtttgtaacatggcctaaaataaaatgaacagttctcaggcagcccacccaaggaaattcacacataatgagaaaccagagatgtgttagagttaaaagggtaagtataaaaagttttactttttttgtgtaatttttaatacaagacatctaaagtcttaaacattaagttgatcccatcaggaacaaaatatggcacgaagttcagaaacaagaacatcttttttttttttttttgcacttaggcttttcagtcactatgcaatgattatcgattcgccaaggacagtaacagtcaaatactagagaaaaggagataggagaaacatcttttatttcttctaaagaggtgaaaataagatttttttaatatttctcactcataagatttttaaactcttaaaaatgcaatatcttcttttcaaagcacatgccatcttaaaaaaatcttagcaatgtacatttgcactcaaagaaaaacatgcagcgccattgtcttctgacaaaattctgcattaaaaaaccctatgcgactttctgcaaatatattccctctttattattcagggactccaaaccacaaacattcagtgcaatatttatcgtttcttatttccgtaggaaacacagaaccaatgatgtcttctgacaactgtttcctgatggttgagcaacagtctccctttgctttattttaaagtactttttttaacttgctgatgtaaggtataattg

SEQ ID NO: 308450 - DNA, 1000 bp, Homo Sapiens
ttaaaggccaaactctctggtggtaatataataaaactagaattcaataaagttaaataaaatcacagctatttgaaattcgaagtccacttctgaacacccttggatctgggagcaaattggcactgcatgtgtgcctgggctcctgaagggcctcacatacatggggaagggcagagaaagagaaacaacaacatccactacctctatttttaaagtcagccttactacaaaatacagaaagtattcttcactgggcagaccaaatcaactttgctcaatcttcgcctttgggttcctttaggtttataatgaactgtaagcatttactgagtgattattataaaggcaccatttgaagtacctgatgcccttttaatgctgtaatgcccctgtgaagtaggtcttactattatccctgctctagagatgagaaaactgaggcagggagagatgaagaagctggccccaaggccacaccactgaggagggaggggccagacctggagagcagggggatcccacaatctgtgcttgtgccttcctgctctgctgcttcccagctaggcgtgtgtgctggacacagccctcagtgatctcaactttgattatgtaattttaaaaagacttctcaagtttattgtcttttacaaaaaagggatgtaatctagcaagccaaagcagaaccaagcagactttgtagttttcatcaattttctggacgctccagccactttcctcaggtcctttagcaatgtgtggactgcccgcccaccgctgccccgaggtagggaagcaccacactacaacctcatgcaggctggattaaaacatgccctccacttcaggcttaggaaccagcgcccctcctacagctcacaagttgctcaagcagtggtctgtgagaagtgattctatttttggggttgtcccttttctctgcttttcttgggaaccattttgactctgtcaaatgttcactgacttctaggcactggca

SEQ ID NO: 308451 - DNA, 198 bp, Homo Sapiens
ctgtgggggaacatagaagacatttattcccggtgtcccccgaaagatcaaagcactaggaaataaatgcagattggcaaaactgtaaaaaaaaatatggacaaataaaaatgagagagagagagagaacagttttccagaatgaggcatgggtaactgggctcaggacgtcagctgaatcattgtaagcataaaaag

SEQ ID NO: 308452 - DNA, 1000 bp, Homo Sapiens; identical to SEQ ID NO: 119950

SEQ ID NO: 308453 - DNA, 1000 bp, Homo Sapiens
atgactgttggcaacttacctaaccactgtctcagcttcctcatctgttaaaatggggaaaatactagtagaactgttttgaggattacgtaatacacaaagcatgaagcagtgcctgggacacaggtaatacagtagttgttaattattacttctgtactcataaaatacttgaagacttaactcatgtagatgaaagatatgtacagcctttgtctctaagagtaaatcacttggatggtaggggataagcacatcaatttagaatatttctgttgtttggtaaattcagtgaattcactaaacctcagtgaattgtcactaagttatttttcaccattccctttgatcaaataaggtcagttaacttctaaatttggcctattgaacaaagtacagcaatagcaactacaaaatatttacaaatgtataaaggttttggaatttatttgccaaaccaggtgcatgcaatttccacaataaggcaggctcaaaacaagccttaaaagcctttgatatgttttattaattagttcattctttttaaaatacatttataaaaggtatgagaacaagcagtagtgtttcttttcaaaagactggattccttatttttgcaattggctgctgcaaagccttaactctacattcaatgttctaactattctttgaacagatttatagactgtacttaaaaacactaatcctcagttcgggaatacctaatagatacaggaataggatatgcagtctggtagaatgtagatggaactggactttgaaaaaaaaaacctgcattctaattctggctttttactaacttgtgaatatgatctttgtctactcaattatttgatgccttggttttctcatttaacaaagatagaagtacaataaagatgaagatgtattgctaaaattaattaataactgcttagtaaaataagatggagttgttacagatggatagtccatcctaatgtaaccacaagtcttgttt

SEQ ID NO: 308454 - DNA, 1000 bp, Homo Sapiens
gaattcgcggccgcaattaaccctcactaaagggatctctagaacttattcatctcgcacagctaacactttatacccatcgaaagtcaactctccattccccctccccccagcccttgataactactcttctactctctgttgccatgagtttgactatttcagatatcccatataagtggaatcatgcaaaggatttgaatagacatttctccaaagaagacatgcaaatggccaacagtcgtatgaaaaaataatcaacactgctaaacatcagggaaatgcaagtcaaagccacaatgagaaaggctaattccttgactctataaaatgacacattgtttttctaataaatttccattttctttaactttgcttgagttgggttctaccacttacaataataataacaccaataatttaattaaactaagtgcttaatatgtgccaggtacttcatatttagataactttcaatcctagagtaatccactttacagataaagaaatggaagcatgaaaagagaggttaagaaacttgcccaagtcacttggccagtaagcagtagaggcaggatttgaatatgcaatctgatgccaaggcctacatcctcaaccacagtgatgtagaccctctcccaaaaggagcatggtgtctctcctgtgggcagcctctcagcatctctcctttaggacggattctcacaggtgtaacttgtatctgatcttaaccatacaggaacaatacagaataagggcaggcatcatttgttccccaagaatatctttgagttctagatgaaaacatagagaaggagagaaactccatgaacaaacttgtgccaccatgattacgtctattgtttcagatgcatttcttttaaaatgataggacactagcctgcctcaaagtcctattaaaggcaaatccagaagtaaaatagcttcggttatacctgtggtttgacatacctcagcttctctggtccctagccctctc

SEQ ID NO: 308455 - DNA, 1000 bp, Homo Sapiens
ggatccaggtcttcagactctcaggtctggtgtcatcctagggggcttggtgatggccatatctttaatgtatttgtggagagtgaaaggctgtcagtagtaagcttaagagaacaggagacttgtgtgggaaacagtcggtatccattgattagactgaatcatgtagaattgctaatttcaccattttgaactatcgaaatcactatttggtatgactcaacctcatcctttaagtacacattcatgacagtgagtggttagacagtgattcctagattagtttgggatgggcagtgccttccataggacaaggccattcctggtagagacggagggagcaggctgtccttcagcatggggcccaggggacttcctggctgctgtgtcctttagcagggccttggaggatggaaggactctcctggcccttaccacaggggctattcaggaacagcctcctgccgtggcactggagctgcggtggccctctaagactgcagggacagcaacaggcacaaagaagtcaggctgcatgtggccccagtcgggactcaggggaggaaagggaggggttgcgggggtcaatgggtgatgtgcttcctctcccatagctgaggagtccttgcaatggccttcctgagccatcagcagcctatggccatgtgactggggaggagaagggatatagggtaatggtcttctgggcctgctgggcctggtcaagtctgaggaggagatagagaaaacaaagcagagaccctcctcttcatctggggagaagggacctgattctaaacggagatatgtgaggctttctggggcagcgatggaaggacaaggacagaataggtgtccttgttgccccatggagaatgggcttcaggaagaatctgcctcagtcattttccagaagtgcctgagaggtgcagggcccgagtctggttaggtgacagcgggtcaagaggaggacattgtcctctctcttgtgttgctgcag

SEQ ID NO: 308456 - DNA, 1000 bp, Homo Sapiens
ttttttttttttttttttagttgtttttgtttttaatttgtctccaataagcaatgtcttctgcccatccagcatgggaagtgggtcccacgtgaagggggcccaccacccactttgggagctgaaggcagagactcgggagccctcccggctcagactccccctacgctgggtgtgggttatattcagaggcccacacccacactggggtaggttaggtatggtttacttagccacaggcccccgggggcaggagacagagtgggggcccgaagctccctgtcctggaagagttaaaagttctggggtagccctggccccgtgggggcagttagagatgagggaggttactccttagcccaggagtggttagagacagtggggctggtagagatgcctgtttaagccttggcctctaggaggtgttagagatttgctggggttgggggcccagggttgctgggaccccagttttggggagggagctgtaagagattgggggatgttctgagctccccagacaagaactgctggttaagagggggccaggcccggttggggctcagctgtccctgaggagctcggcatcccgcctgggagatgcagctgtcactggggtttctccctctctgttgtcctggcctcgtccttggcaggtggcggggacttcttgggggaagctgaagtgctggggttggggacccccgcccccgactgggcatctatgctggcgtgctccctccggacaaggtcctccagctccttcttccatccaaggagctcagcaagggccaggcagccctggtcgcattcacccagccaggccacgtccctgtaggccttcttggagtcaaagtccatgcctcctccgaggcccataatcatccccaggaaagggtccgactggccagctttctccttgttgatgagcaggcgaggggtggagaggggtgccttgctgatgagggaggcaaagggctgcacctgcaaggaggtaccc

SEQ ID NO: 308457 - DNA, 1000 bp, Homo Sapiens
tttttgtatttttagtagagacggggtttcaccatgttaaccaggatggtctcgatctcctgacctcgtgatccgcccacctcagcctcccaaagtgctgggattacaggcgtgagccaccgtgcccagcccgcctctttattattttttttattatttaaaaaaaaaaattttttttttgaggcagagtctcactctgtcgcttaggctggagtgcagtggtgtgatctcggctcactgcaagctctgcctcccgggttcacaccattctcctgcctcagcctcctaagtagctgggactacaggtgcccgccaccatgcccggctatagcccacctctttaaataaataggtctgcttgtatttctacctgattccagatttccctgaatgtgaattttgactgcaaaggaatgcaaatcattgccttaatttaattttttatttttttgagatggagtcttactctgtcacccaggctggagtgctgtggcacagtcctggctcactgcaacctctgcctgctgggttcaagcaattctcctgtctcagcctcctgagtagctgggattacaggtgcctgccatcatgcctggctagtttttgtatctttggtaaagaccgcgtttcaccatgttgtccaggctgctctcgaactcctgacctcaagtgatctgcctgcctcagcctccccaaagtgctgggattaaaggcgtgagccaccgcacctggccccattgccttacttttaaaagaagaaaaccttaaacttcattccttttcaaagtgcaccgacatataaaaaatagtaataatattaaatccaagaagaacttagcagatatttatttcctacgaagttctgaaagttttcacatttctttctggattttttttttttcccttgaatcagagtcttgcccttttggccaggctggtcttgaacccttgggctcaagcaatcctcccacctcggtccctcaacaagggttacaggtgt

SEQ ID NO: 308458 - DNA, 1000 bp, Homo Sapiens; identical to SEQ ID NO: 119951

SEQ ID NO: 308459 - DNA, 1000 bp, Homo Sapiens
tcctcagggtcttgatggacaagtcagagctgtgttagtccggggcacatcagcctgctcatctgagttgcagagagaaggaacatatgcctagaggggcgcttttcagctggaggcatcactatcatcattctcgccgctagaacatcctgtagatgaagagctgctgccctgaactccaccaggcccctcttctgggacttcccccttcatgcctcccaccccataatctaacactgctatacttggtaggggaggtggtaggggacaggatggtaccacaaatgtaggccaaaacagctattgtttctagttgtgagccagtctggaagcaaggtcctcttccgtccctttgtgctccccccagaacctgctgtcccgcagcatttggccacagtatcccctggtaaggctgtcctcacacggctctccagagctcaggggagtggactctccttccctgagctccccaggaagcatcttggagggcacaagcagagcatgagcagtgtcatctctgcatgtctgaccacaccccctgtctggacctcacttgctctggcacctcattttgccctctggtttcgctgacagctgtttacgtgtctctaggaagaattggaactagtcatgtttctcctatctgatagggctgcttttggaaaacatggccccagcacaggtatcttaggaacggcccgaaagaggttgggcctttgggatacgggagtattgcatagaggaaccagactgcctgggttcagatctcagctctgccactattaatagctgtgtgtccttgggcaaattactcaacatctctggggctcagttttaaggggtagcttccttttaacgtatttgttacacaagtgatatgtaaatatatataactccatcatccaggattgatctctcttaacatctcagagtatgtcctttcagatttttttttttttttgagatggaatcttgctctgtcacccaggctggagtgtag

SEQ ID NO: 308460 - DNA, 1000 bp, Homo Sapiens
gatccactgcctggctttcgcatcttttccaaaattctcccccaaggaatatgaggaagaacacagcctcttgccgtacctgcttccctagaaataaccttaaaatagtgccaccttgggccgggcatggtggttcatgcctgtaatcctagcattttgcgaggccaaggcaggtggataacctgaggtcaggagtttgagaccagcctgcccaacacggtgaaaccccatctctactaaaaacacaaaaattagctgggcgtggcggcgcgcgcctctggtcccagctacacgggaggttgaggcaggagaattgctcgaacccgggagataaggttgcagtgagccgaggtcgcgccactgcactccagcctgggcaagagggagactctgtctcaaacaaacacacaacaacaacaaactagtgccacctttgtcagaaacacggggctggatcaaatgctgagggccctgtggatcccatttcaactgtgagagctctggttggttgcatcctagacccagagggatcccctgaaggaagcctcagcctgagccacagcttatcccccacccacgccaggtgagcctctcaccgtgtcccagccccagccactcccaccccacacacctgccccagatggcaagggcaccagaggcaggtgtgcagccttgctgcacacctggagagccttggggttctggagggggtagacagggaagtcccacctgggatcaatggttcagaatgctcagtgattggcaatctgcacccaccctattttcaaagcctggacaagaactgatctttaggccgggcgcggtggctcacacctgtaatcccagcactttgggaggcagaggcgggtggatcacaaggtcaggagatagagactatgctggccaacatggtgaaaccccatctctagtaaaaatacaaaaaaaaaaaattagctgggcgcggtggcttgtgcgtggtggttcgtgcctgtaatcccag

SEQ ID NO: 308461 - DNA, 1000 bp, Homo Sapiens
ctgagcaggcttcttctgaacaacttgttgtggctaaggaggaaaagaaaaagatatattttaaaagaaaatatacattatagaaaaaattaggtgtacatattttaaatacagatacttgtctgcaaaggaaagaggaaagtataaagttcaactggtatatccaatgttaaaagtgtttatacttggccaggcatggtggctcacgcttataatcccagcgctttgggaggcagaggcggacggatggcttgagcccaggagttgtagaccaggctgggcaacatggtgaaaccctctctctacaaacatacaaaaattaacagggtgtggtggcgttgcaactgtagtcccagctactcagaggcctaaatggaaggatcacctgggccaagaaaggtcaaggctgcagtgagccgtgatcatgccactgcactccagcctgggtgacagagcaacaccctatctcaaaaaaaacaaaaatgtctactcatgatctctctatattaaggaaatacaacataggttatctcagtgaaaacaattccaattcccaattaaattctggcatacaagccaactagcttgaaagaaacttaactgtttgattcactttgtttttagcctatatatcacaaaactgaggagtgaaggtacctaatttgttaatattttatttttttaaaacaccttcactgagacataatttacataccacataattcactcatttaaagtatattttagtatattcagagggttgtgcaaccatcaccacagtctaatttagaacactttcatctcctctaaaagaaatcttgtacccattagtggttactccccactaccctccacgtccctagccacctcccatgcctaagtgaccatgaatctactttctgtctctatgaatttacctatcctgacatttcatgtaagtggaatcatactatatatgtagagtcttttgtgtgtggcttctttcactggcctagggttt

SEQ ID NO: 308462 - DNA, 1000 bp, Homo Sapiens; identical to SEQ ID NO: 119952

SEQ ID NO: 308463 - DNA, 1000 bp, Homo Sapiens
ttctcccctctcctgcccctgccactcactgggcagccccctcagaccctgggcactgctcttagctcctctgccaccctcaagaaaacacaggagctgcctgctgctatgaggacctcattgttctccagagcagcctctcaccctgaccccttcccagagcccaatccatagtgtgtgggtggatggggatggaggtgagatcgagagctgggctttagcgcgcatacccttagggaggctagatgtctactctgcccccaagccccatcgggccccagctcgccactccaagtccctcctggcgtgagcgaggaagcgccctgaggatgacatgccagctacaccctcctcccccggaggacctagctttcagcacaggccacctggccaccagttccacagccctgtgagtgttcactggtctttctttcagctggtcggtccgctctctgctcctcccctcccttctgctccttcagctccatgctgctctcctgctgccactggccccagagcccacacaacctcctcagcagctcatgaaagtcggcttggaacccggaggaggagaagtagtagacaaaggggtcgacacaggagttcagggtgctgagaagcgtcacgtagatcctccacgccgggctttcaccgcagatatagcccacgacatgggacacgttgtagggcccaaagcagacaaggaagttgagcagcgtggccgccaacagccccgccaccctcctctgccggcggtggctgccccctctgccgaggatccacaccaggcggctgtagcagtagctggtgatgatcagcgggaccacaaagaggaccacagccatctccagccgcacgggcaggaggatggctagctggtccttccggaactccaggtagcaggtcccattggtgccctggctgtgggagatgtcccctgagaattctatgacgtagaccacgctgcagtgagcagaggccaacagccagcaggccacac

SEQ ID NO: 308464 - DNA, 1000 bp, Homo Sapiens
cactcagatgtttattttaattatattttaaaagtgtgagacagatgtcacaaatgatctttaaattaaatgaacaaaaattcaaataaaaaaaaaacagaatagaattccacatgtagaattctacacatagtatggctaggcttctctgtgagttggaatgtagagatacagtttttttctctacaaaaaggctgtataagatatctctattatcaagagatatgcttgctaaaaatgcagatttctggaccacatcccaggtctaatgagtcaaagtttatggagacagagcctgaacaaaaatatttattttaaaaagcaggccagttgatggtcacatacttaaaagtttgacaaaaaaagcaattgtgtagcatgtggtgggtgggaagggtactgtattgctgtcactatatctatgtagtggctgtatctattttctcccggacagaaatttcttattatctaagactcttgaccagtatatagggtcagggtttccactggcaaaatgctttgtataaaacctagccaaatgtaagacacagggaacaagacatgtgggccatatgttctgccaggaggcctacttcaccatccaaaatgcctggcagttgtcagaacttgcaaggggaattttgtttactttgtgagatgcccagtaggttccaaaggtcatttaggaataccatcacactgttgctagggaagaaatggtcttcaacttaagtgcatccaccgaacaggacatttgtgatcccagtattcattttatatctatggtcaatcaacagcattccttacattgtaaaatctcttatttccaagaaatactacttaaaaatgtctactactaataaataatagttttatgatttccaaatatcttttatccacaaaaaagctatatgattaagcattctgtacgatatatggtttgctatgtctgagaatcttgacataaatacagtgaaataatcatttcagaaataaattt

SEQ ID NO: 308465 - DNA, 1000 bp, Homo Sapiens
gatcagcctgaccagcatggagaaaccccatctttactaaaaactccatctttactaaaaaatacaaaattggccaggcatgcgcctataatcccagctactcgggatgctgaggcaggagaattgcttgaatccaggaggcagaggttgcagtgagccaagatcacgccattgcacttcagcctgggcaacaagagtgaaactccgttaaaaaaacaaaaacaaaaaaaactcaagcataggctctagtgacttgtttcagctaatatcacagaccaagggttttctgattctcaacagactggtgaccatttggacagactttgctttgggtcactgataaaatgggataagattctcttatcttctttttcttttttttttttcttttttgtccagagaattaggcattcattcagaaagagtattctcagattttctgcatgctgaggtgtgaagattgtcgtgttcttgtggggaagtagccacctatcatgctgtagaaccaggcctaaggtacataatcattacactcctctcagacagtgccagcacttattggatcgtctaaattgaaatcgtctcctttccaggaaagtctcctgcatgttatatgtactctgattacaatcacaattctagtgtttaggtttctaagtggcataacttcacccggataatttttgccttcagtggctactaggaggaacatttcagttgaaaagaaaacaaaaactgttaatttaagagatgcattagaaaagaaagaaaacaaaatttctcaggcccagtaagcagtagttttttattggaatgaatcgtatttgtacaatctccaaggttctgaataaaaaattgtttcagtaaaaatttccttgaataaagccattgaacaatttggcaaacttaagcaatatcctccccctcctattcctctagttgctgccttatatctaactcttctacttcccctttacccttctaatctttctcttttttt

SEQ ID NO: 308466 - DNA, 1000 bp, Homo Sapiens; identical to SEQ ID NO: 119954

SEQ ID NO: 308467 - DNA, 1000 bp, Homo Sapiens
gatccacctgcctcagtctctcaaagtgctgggattacagacgtgtgccaccactcctggccgcaagcttctcctttctgttttcctcttcctgacagagcaggctttttctcaatggaagtaaggacactttttcacccctacaatcttctctgctcttccccccaccccactccagtcttccctttgaacactaaaacataaagtatgacacttgcctcctttgctttagaacttgtacctttattaagggatcgagagcccaaagtcttttttggttaactcaacaaattgataattcgggtgaaaaggaccttgcacaccgaaagtgctcatcaacagttaatttttgggccaggcatggtgatgcatgcctgtagtcccagctaatcaggagtctgaggcgggaggatagcttgaacccaggaggtcgaggctgcagtgagctatgatcataccactgcactccagcctgagcgacagagtgagaccctgtctctttaaaaaaaaaaaaatggccaggcgcagtggctcacgcctgtaatcccagcactctggaaggccgaggtgggcgaatcacgaggtcaggagttcgagactagcctggccaacatggtgaaaccccatctctactaaaaatacaaaaaattagccaggcatagtggcaggtgcctgtagtcccagctacttgggaggctgaggcaggagaattgcttgaacccgggaggcagaggtttcagtgagctgagattgcgccactgcactccagcctgggcaatagagagaggttcagtctcaaaaaacaaattattcttagcattagcgttaccattagaattgctattaatagtattgtcattattatcagcaatttctagctctctttgaaatattcttaagcagtcatataccagttcccatgaatctaataggcttaagaagaggctgagaaatatttaaagcttatctcagattcttagtgttaagtcacaatctgtat

SEQ ID NO: 308468 - DNA, 1000 bp, Homo Sapiens
gatcttgatctcctgacctcgtgatccgcccgcctccgcctcccaaagtgctaggattacaggcgtgagccaccgcgcccggcataaagctcataaatatttttaaaggctatatatacatataatacatatgaatgtatatgcatgctttgtactacacataaatttgtaaaaatttcattatgatttgaaaattaaccagttattttaaatggaatgagaattaaaaagtattacagtaacattctgacttagaatattgacataatattcattcattacttatatatatgttttgttgagacggtgtcttgccctgtcgcccaggctggagtgcagtggtgtgatctcagctcactgcaacctccgcccggagggttcaagcaattctcctgcctcagcctcccaagtagccaggattacaggaatgtgccaccacacccagttaatttttgtattttttagtaaagacagggtttcaccatgttgactcggctggtctcaaactccggacctcaggtgatccacctgccttggcctctcaaagtgctaggattacaggcgtgagccactgctccaggccagtagtcacttatattttatcaggcacattttactgaactggattttattatcttatttatttgagatgagtctcactctgtcgcccaggctggagtgcagtagcacatctcggctcactgcaacctccgcctcccgggttcaagcaagtctcctgcctcagcctcctgagtagctgggtctacaggcacatgccggctcgtccggctaattttctgtattttagtagagacagggtttcaccgtcttgcccagggtggtctcgaactcctgagctcaggcaacccgcctgcctcagcctcccaaagtgctgggattacaggcgtgagccaccgcacccgcatgaactgaatttttttaaagagactatgtcgcccaggccttactcaaactcgagctcatgtaatcctcctgtttc

SEQ ID NO: 308469 - DNA, 1000 bp, Homo Sapiens
gtgagttacccagaatggaaatgtcttatacttggtcattttttatgctcctaagcacttaattatggatttatttaccaggttatgtacaagcttgatctttggcagtgctccatgttataacagatttattgcctttttttttaatacattttatggtttttaacttacatttaatataaaaatgattttggccaggcacggtggctcacgcctgtaatcccagcactttgggaggctgaggtgggcagatcacaaggtcaagaaatcgagaccatcctggccaacatggtaaaaccccatctctactaaaaatacaaaaattagctgggtgtggtggtgcacacctgtagtcccagctacttgggaggctgagacaggagaatcgcctgaacccgggaggcagaggttgcagtgagctgagatcgtgccactgcactcccagcctggtgacagaacaagactctgtctcaaaaaaaaaaaaaaaaaaaaaaaaaaagatcttatgtgaaatatctacgctgtctgtactttaaagtgtagtttaaattttctactttccagctgggggccgtggctcacacctgtaatcccagcactttggaaggccgaggtgggcagaccacttgcagttaggagttcaaaaccagcctggccaccatggcaaaagcctgtccctacaaaatacaaaaattagtcaggtatggtggtgtgtgtgcctgtagtcccagctacttgggaagctgaggcaggggcaggagagttgcttgagcctgggaggtggaggttgcagtgagctgagatagagccactgcactccagcctgggcaacaaagtgagattctgtcttaaaaaaaaaaaaaagaaaaaagaaaaatctactttctgaagcaaaattgtagaagaacataagctctcttgggtgaaatactaggatttcctgataaagcaaatccagaaaacataatttaaatagcattggctaaagtggctactgggt

SEQ ID NO: 308470 - DNA, 1000 bp, Homo Sapiens
gcgtgcctgtaatcccagctacttgggaggctgaggcaggagaatcgcttgaacccacggcaaaggttacagtgagctgagatcgtgccactgccctccagctggggtgacataacgagattccatctcaaaaaaccagtgccaggcatggtggctcatgcctgtaatcccagcactttgggaggctgaggcaggtggatcacctgaggtcgggagttcaagaccagcctgaccaacatggagaaacctcgtctctactaaaagcacaaaattagccgggcatggtggcacatgcctgtaatcccagctactcgggaggctgaggcaggagaatcgcttgaacccggcaggcagaggttgcagtgagctgaaatcgagccattgcactccagcctgggcaacaaaagcgaaactcctccaaaaaaaaaaaaaaaaaaagcaaagctgcacatttccagccatgcctaccacaaaatgatactagaagaaaatgatactaatgctaagagtggccccaagccctcacctagatgggggtggacggcatctctgcactggggcctagggaagctataggtgggggtctggctgcccagtgactgacctggttagtgtgggtggcctgcagaggacattcggggctttgcaaagagggtaacccatggagggcagccagccggcctcgggcaagggaagggcccggcatgggctctgggaaacactctggtgtcacctggcgcagtcttggcccaagtggccgcccacctgggccccagggaggatgcctgccagagcataggtggccctcgtgccctcctttacgggacccacatcaaaacctggaccagccccattccttggggaagctaaggacagaacaggccaggcgcagtgactcatacctgtaatcctggcactttgggaggccaaggcagggggaacacttgaggcccagactttgagaccagtctgggcaacagcaagaccccatctctacaca

SEQ ID NO: 308471 - DNA, 1000 bp, Homo Sapiens; identical to SEQ ID NO: 119955

SEQ ID NO: 308472 - DNA, 1000 bp, Homo Sapiens
gatcacctgaggtcaggagtttgagaccagcctaaccaacatggagaaacctcgtctctaccaaaaatacagaattagctgggcatggtggcgcatgcctgtaatcccagctactcaggaggctgaggcaggagaatcgcttgaacccaggaggcggaggttgcagtgagccgagatcgctccactgcactccagcctgggcaataagagcaaaactcagtctcaaaaaaaaaaaaaaatatatatatatatgtcagtgttgagtctaataaagatgttcctaataaggaaaactttaagtatacaacaaatactttctaaattatcagactggagttttctaaaaatggaacacatctatatttcattacctcaatcaaattatttaataaaatcaaaactataaaaggttggccaggagtggtggctcaggcctctaattaggattacattttgggaggctgagatgggcagatcacttaaggtcaggggttcaagaccagcctggccaacatggtgaaaccctgtctctactaaaaatacaaaaagaattagccaggtttcatggcgcacgccggtaatcccagctactcgggaggctgaggcaagagaatcgcttgaacccaggaggcagaggttgcagtgagctgagatcgtgccactgcactccagcctggcaaaagagtgagactccatctcaaaaaaaaaaaaaatttttttttgttatgcatatcataaaagaggcactctttctggctctagactcactgctataatgctttagataaataatgcaaaagttccaaggaggttcagtactaaagcacccacactaagctacaatccttagcaggagttatttgaaaagatagttccagccgggcatggtggctgacgcctgtaaaaccagcactttgggtggctgagaaaggaggatcctttgaacccaggagtttgagaccagcctggacaaaatagtgagaccctacctcacttaaca

SEQ ID NO: 308473 - DNA, 1000 bp, Homo Sapiens
ggatccaggacgacggtctgataggcccgaaaatccgtaagcgttacctctgcactttcaggacacacatccagggggtcgaccacagcatcattgtcaaagtcatcctcacacacatcaccaacgccattgcctgggcagagtgaggctgggtgctcaggaaggccctggccactgccattaggcaacaataccatctgttgggcctgcattcctgacatctttcccaccttgcccttcctcacttcccaacagggcttgctgcctccacctgggcaaaggcaacaccagtctaacgtgctctgggtccgcaggcttaccatctgagtccttctgattgggattgggtaccaggcggcagttatcgggaccaggaggcacataatctgggatgccatcattgtcatcatccccatcacactcatctccaagtccatcgttatcagagtccagctgggagctatttggcagctgtgggcagttgtccttggtgtcctgatgcccatccccatcgctaatcagaagaacaggtaccaaataaaggatttaaaggtactccttgtccttcccttcgcttctgcctgggagtctctggagcctgctctccatacaatcagacccctggcagtcagccaggtgaggtgaaggtctggcagtaggaatggagggatgactgtaagaataaattcctgctgaatagcaatagagaattaaggctaaatcatagaaggaatttagaatatactatggcctgggcacagtggctcatgcctgtattcccagtactttgggaggccaaggcgggcagatcacctgaggtcaggagttcgagaccagcctggccaacacgatgaaaccctgtctctactaaaaacacaaaaattagctgagcttggtagcacgcgcctgtaatccagctactgggaggctgaggcaggaaaatcgcttgaaccctggaggtggaggtcgcagtgagccgatatcactgcactccagcttg

SEQ ID NO: 308474 - DNA, 1000 bp, Homo Sapiens
ccatccaccacattcctgttttcttctgccagtgccttgatgtaccttttgctgaggtccaggatctgctcgcgcagcatggagctgctttcaggctgagttcgctgctggatggtaaagtgcagaagcatcataccccaaatgaagccaaaagtcaccaggaaaaagcccagcttctgagaggacaacttccacggagtgaagagagccattgctctctggcaacttcacctgtcccttggctcttaacgcgtagaagatagacacaaattcatggtgtaggttgagtgtgagagtctgctggtctcactctggctcctgtgtcagctggttgcctttcctcacttccattctgctgtgaaggaggagaagaattagccaagtggtcatggcacaatacagcaaaataaaccagaagccatgttttcacttgaatacctctaagtaaaatgtcaactcttaaatttgctggttcaatatcttatgattcaggaactgtaagctgaggggaaatctggctaggcaacaagaagctaagcaattatgaagggggaagtgtgcgtctgcgtgtgttaacaggtgtggtggggctgttccagcctggaccaaattcaaaacaggaagtttgttttgcaaggtggggaggagacagaaggatatttggcggaatgtcagcaaaaacggggagggtggagtcatatcaccatcaggcccttttgtgtgcctgtaacttaagcttacaaagtcattattatgtgcttctggcaaggactagaacatgcaactggtgaggtgagcaagaaagtggatgcccccttgggggtaactagacaaagaagaggtagattgctacatcttatttgagcatggccagcttttcaccatcagtgtttagtgatgagatggctctctcagggccaccaggcaacctctctaggtgcaccagcacagagaagatatgccagaggtacaagcaggggtattgctttcccagctacat

SEQ ID NO: 308475 - DNA, 1000 bp, Homo Sapiens
ccatcttttaccaggctggctcctgaaagggtgagaagctgctcaatgcacacgcgggacaagtcgggaaattagctgtaggtgcacaggatagaggagggagggaaggccacaagatttatttaaagatgttcaacaagaagcgagagagacacgcacctgaaaacctctgagccgtgaaatctcaggagtcctattttaactcgcggacgagtagtttccggtccctacttagctcagccgcgagtctctctgacagcacatcagcaactctgcaagcccttcagtgcctaaatggatttcgaaccttgcttgcattctgctctgctgcgaaggctctcctaattccccacctctaacttgtcccaacccacatcctgcctccctgggtaggagccagcgccttgcctctggggcttcgctagagaagcctagggcgcggtcgtttgcatccatccctgcggttgcaattcccaaagccttagcaatttgccactctatcacaggtgactgaaacttcacactagccttgctcaccttcatgacaacctcccaaacccgcttgctttgctttccttgccacttgcagtgagttttctttagagtggaacccagattccgcctcgaagttttgtaatttgcaacagcataaagggaactgaagaacattatgttaagtgaaatatctcaggcacggaaagacagacttttgagtcagcggccgaactttgtgcctaaattcttcgctgcgaacgataccaagataagcccaagctatgggacatcaggccaagaagtgctcacacgcaagacagaacaaaagtgggagaagcaaagcaaaacacttcaggtcgaccaaaaagattggcaagcgcaggcaaaaggctagaaccaaaatactggagatcaggaagtgtgtgcacaagtcactgacgctataggagtagccaatatatatgagccttgcatctcataccacatttagcccacccagtcacca

SEQ ID NO: 308476 - DNA, 1000 bp, Homo Sapiens
gccccatactctcctctcctttcccagctgggagagagggtctccagatcactgggaacccctttcttttacacgcgggagaacagtaagtgacatgctcacatgaatgacagagctggaagcagaccctgggccctgattccaagttcaggcccccttctggcacttgggggcccctctcactctgtcctcttcccttccctgctttctcatcactctttgagatgctggtgcaaaacgcggcctctcttcatacatttgcgaatcagggatggacccccaaacccctgtgccactgcccccttcccatcctgcttccccggggccctgcctaccttcttgctgtggggagcagtcttccagatgccggcagcagctcctcagccagctgggctcagctttcctggcctgaacctgaggggggatgggcttagagggtcagctggaataaacatccgtggaaaaaaatccaagcggtcagagccgagggatcagggccgaaggctgatgaccttccgtttggcctttgggctcaagttcctgtggtgtgagggtgtagagtgatttggtgccgggaagggctgtgcccccagcatcatcgtgtctgctcacacccaggacagggctggggcgggggtgtagaggtgggggcaaaggctttcttcatccaacttcctcccgttgctgttcctgagtccagtgcttggagggcagggcgtggggtgtgccagggacctcagtgttcctgtgggaagggactgagatgtttgctgtggaattctgaccctggtcaaggctgtcaggctgagtgggcaggaaagaatgtggaaaattgggaagtgggtgctgctgttaccccatcaggctccagctgggagtgagatgtgggggatgggtgcaggtctgagtgccagggagagaagccaggcacccgaactcctagccagctcacttagcctgcaccgtccataggggaagggctggggcggctgatgggttc

SEQ ID NO: 308477 - DNA, 247 bp, Homo Sapiens
  misc_feature (162)..(162): n is a, c, g, or t
  misc_feature (188)..(188): n is a, c, g, or t
  misc_feature (190)..(190): n is a, c, g, or t
  misc_feature (192)..(192): n is a, c, g, or t
  misc_feature (234)..(234): n is a, c, g, or t
  misc_feature (241)..(241): n is a, c, g, or t
ttgtcctcccactggcagggcagggtccttaggttggggccttcctccccgccctctacctctgcagttgcttccctgcactgtccgtcaccagcatgccattctccatttgctttgcttccttccctggaccgctgacgcccgtgacccctggcaaaaaanagacaaagggggcaagtggggttatntnangcaaatgctaaaaccaagggcaacaaaaaccggccacttcantgagganaccaca

SEQ ID NO: 308478 - DNA, 1000 bp, Homo Sapiens
tcctttaaagagaccggggacagactccaaagtggaattgctgggtcatacagtaattctgttttttttctggcatgttatttaaacagactatttgttagagcagttttaggttcacagcaaaatcgagcggctggtcatttcacgctttaaaggagctgtggcattctacatcccccagcagcacacaaggtcccaacttctccggatccttgggagcacttgtcactctgtttggggtggcagccaccctaatggatgagaggtggcatctcgttgtggtcttgatttgcatttccctgatgattagtgacactgggcacctctccgtgtgcctcttggccatctgtgtatcttcttcacagaaatgactgtccaagccctttgcctattttttaaaaattgagttgttaggaactttggttttttaaataattttaaagcacacaaataagacacctgagagccaacttataacacgccccaggatggacatggattcacactcatggtagaacagagctgagggtgcagtgtgggatgggctgacttgtggccaggggaaagacccgtggcctatcttgttttggggggcagggacccagaaactcattgctttcaggccttgctagaaaagcatacagtcgaacgagtgggtccgatgtggagtgcagtggcatcagccaaggctccgaggcgtttcttcccacttcacatgtcttttctgttgtttctgcgaaggtgtctcagggaggggcagaacccatggggtttggcttcctgaccctgaacgtctttgtcccaggcccttcactgggtctggaggaaggagggtgctgtggtcctggtggctcttgtgcctgcacccgccttggggccatctgacacccacaccctccctccaggccagacccagctctccagcttcccggctgcccactagatgaccaccaaggcagggcggctggtggtgctgacggctctgtgaggcccaggcctg

SEQ ID NO: 308479 - DNA, 477 bp, Homo Sapiens
tttagtgaccaacccatcttagagatgtaccaaagcaagttttataagaaataaacagatcagttttagaaataaagtgctaaaacatgtatctgccttcagtggcaatacatgtggttttctctaacatacaagatcagcaatgtagcttgatataaaaaaattatgttgatgcttcccattaggacaactattaactaaataatgagcaaggaagcaatggaaaaaggtgaaatgcatattgtaaaatatatctaccagcctaatacaattttctaccttaaatattaaaatataatattaaaggcaacttaatcattcttgaatttaaattaagttttaaaagaactttacttacttgtttgcacctaaaaagtaaccaccttggtgtccttgtccatattccagttgcagatcctaatagtacaaaataaaatatttagcacaatagtagtatatgacacaccatgatacatt

SEQ ID NO: 308480 - DNA, 1000 bp, Homo Sapiens
atttcagacatacagaagggtgaacaccaagttccagaggcaggcatctgccatggtgtttgaggaatagcaggggagccgtctggctagggaagactgaagtaggagctgttgcaaatgagggcagagaggcgatgggtccagatcatacagtgattgttggtcctcttaaggattttggtttttcctcagagtgagatgagatgggaagtattggagactattgagcagaggagacatgagctgactttaataggatgactctgactgcaggcttgagacctgactgtaaggggctaagggtagaggaaggccggttaggaggctattgcagtaatccaggtgagaggggtagtggctcagaccaagtgttcacagtagaggttatggggcacttgatattttttgaagacagaactgacatgattgaatatattagttttctattgcttctataagaaattaccataaattgagtggtaatttattgtcttaacagcttcgtagatcagaagtcggttgtcggtctcactggactacaatcaaggtgccagcaggactgtgttcgtttctggaaattctagaagatgatctgtttccttgcctcttctagctcctagaggtcactcacatcattcttcggccgtggccccttcctccaccttcaaagcccacaacattgcatctctccgaccttcttccatagtcatattttcctctgactgtggctaggagggtcctctgattgttaagactcatgtaattagattgggctcaccaggatcgtccaggataatcttccaatctcaaggttattaatttaatcacatctgtagagtcccttttgccatgcaaagtacatattcataggttccagggattcctacatgcacatctttggaggccattctacataccacatcagtcgaaggaccagatgtgggatttaagatagagaaaaatcaagggtaacttcaaatactttgatctgagcaatggg

SEQ ID NO: 308481 - DNA, 1000 bp, Homo Sapiens
tctggagtatggtcaatggtcagcttcatgggttttccttttctacacaaaatagcccggctgtccccaacactggctacaaccagttcaataccatctcgcaatagggctactgttgcagtagtcccagaggtcagaagagttgtggacaatttctactgcaagtcatctcaactaatgggacaaagagatgtgggaaccttcccgtagtccaggataggaaccgctggactccttcacctgggacagaattaagcagatctctctttccactgaagccccgcatatagtgtccacgggctctaggtctagagctgctgaccaggcacagttctcatcagcagacaggcgggcatgactcgaaaaggctttatctatttctagaaaagccaaggtcaacagagtttccaagttcttctccttaggaagcaaatccataatacatttctccatgtgggtatgacagaaatcagctgctgcaggtccaccgtgtccatcatacactgcaaagtacaggacctcatctgtcagctgagcgaagtcaaaccgatcttcattctctttccgtttgccaatctgtgaggcgcaccccacattttccaagctgattttgggaattggcttgccatacttaatgctgggtggcagcagaattggctcatcaatgcggttatcccagatcccaaaattgtcccaggtagctggactcccactaccatctgggtcaaaccgagaacacctaggctctgaagtggagctgtggcacgtgggtgtcacccgcctgtcgtcctgcagcaggcgggagcttagcagcactctccttctcacctggttcccaccacttctgaccaaagtaattaaggcagctgttgacataactcagctccaaaggactcagtgatgagggaaaggtcaatggaacaataatggaatgtctctggatggctacgtccctgaaaaatgttttaattagctaacggaggacgggggaggagctttc

SEQ ID NO: 308482 - DNA, 1000 bp, Homo Sapiens
catactctaaatgcctctgtcacatttctcaacttcaatataatgggaagggataacaatattcctggattagccaaatgggtgagaatgaggatccaaaaagaagcaatacacaaacatcatgatggaaggttcataaattaaatctatatttaattttatcaagtttttagagtattctgccctgttaaagtgtcctgagtttgcagatagtgttttaaaaatagagtatcttaaagtatagaaagagttcagaaaatagaacagcaacttttcctaccttgatcaccattaatcagcaccataaaaagtaaaaagctacacataagcacataggcaagcctagtccaccaaaaatacagtattagtaaatggatgaaatctcatgaagagtaacttaggaaggactgtaaggttttgaagaagtgactgacaatttaattgcaaaagacacagaatattaaggcataacaaagtaaactgaaatgaagtttagttatcaatattcatctctgagaaagttgtgaatcagttcctttagataacatgtggctcaggttgatttaataatggggctggggtgtctgcatctctatgctgcttttccagcactgtactgcctgtagtggaaaagactcttggagtccaccttgcgagatttctgcacagcttcagcaaaaagtttggtcacctgaaaatataatggtaggaatcagcaccctccatgagataaaagtgaatttttaatgaatgaagacaaaagtcacaagtgtctgtccccagttttcaaaggggtatgggataaaaggcataaaagttttttatgtaatggagactttctcccatgtctcagacctcaccatggggactttcttttatatctcagatgtcactgtgaatacgcttatttctcctcccatagggattaaaactgattctgcataaaaaataaatatgataggcagaaagttaatgagtctccactctgtttctccctgtg

SEQ ID NO: 308483 - DNA, 1000 bp, Homo Sapiens
tcatgtcagtggcagggttccaaatgagagaagtagtgcattagtgcttttgagacctgggcttggaactgaccatcactttttctgtaagcaagttacaaggccagcccagatttaatggttgaggaaatagactttacttcctgatgggaaaaattacaaagccatattgcaaaaggcatcaaatataatgagtggagaattgcagtctaatacaatgaacaagggaaagaagttatttaatcattgggggtctcaaaatttcctcaagaagtaaaagaatagaacctacattgtagatttatcaaatcagatcatgcttctaaaactcagcacaatgtttggcacaataactttcaacatatgacagagaaaatgattatgattaatatgatgcacagacatcgtgttagtggtaaagatcgcaaactgataccagatgctaatttctgccacgcaacttattagctatataatcttgggtaatttcctcatctgtaaaatgtgattattaccaaattcataggattgttataaaaattaaagcacttcaaacagtattcataagtgtttaataaaaacaatctataacttaaaaattacaaatttatatagttagcccgttttgcatcactataaaggaataactgaggctgggtaatttataaagaaaaaaggtttgttttggcttacggttctgcaggccatactagcacggcaccaatatttgcctggcctttgatgaaggccccaggaaggttacaatcacaatggaaggcaaagggggagcagactcttttaagccaccagatctcacacgaactgagtgagaactcactcatcaccagtggctctaagccattcatgagggatcatccaccatgacccaaacacttcccatcaggccccacctccacccccaacactggggattacatttaaacatgaaatttgaaggagacaaacatctaaacaatgtcattctacccccagcccccca

SEQ ID NO: 308484 - DNA, 1000 bp, Homo Sapiens
ctgcagcaagctgtgtgaccctgggggaagtcacaacatctctgaatctgtgttctggtttgtaaaatgccatttttctcctaaagtcattgtgagcctcaagtaaaatgtgaaatgttgtgcaaatgccaagaatcaccattgtcataagctgcgaagagagccagagatagaaagagcagggttgccgtctgcacgggtccctagtgctagaaccagagaccgaggcaggcagacaaagatctggtggccatggagagacactgccatgtgttctctcccttcctccactcagcccagccctaccccacaaaagaggcaggtgctcagtagatatttgtgggctcaaatacaccccagggtccgcatttctgcttcttccgacttgcacctcccccaggaactcttaagacctgacccaccactccaggtcccctccttacctcgggacacaaccgctgctcttggccttctgttttgagaaagtttgtcatcacgaagaaagagttcccctgtggagaaggagaggctaagaaaatgcaaggcctttgaaaagagaactacttaattataataatccagcttgctgggcgaacctctccacttttcctaagcttcctagaaatcaggattctgtgggcaacttggaatatgccaagggcttaatatcaaagctggacgagcagccctgctgagctgagggagagtgaaggagcgtttgaatgggttgaagagtcatttaccaatgcagtctcaaaagcagccttttcatgtttttgttttggtttttgttttttttttacgcagtaaaaatctcattaaattgaaactcaggagacctggggaggcgagggtaggggagcagccttcatcacaacactgttcagattttcccagactttaatgaaagggcactagggcatcccaccacctgagcaatcacaggattttaatgacccactgttagaaacaaacagcagcttgggcttcatgggtcttt

SEQ ID NO: 308485 - DNA, 1000 bp, Homo Sapiens
gatcctgtctcaaaaatatatatataggccgggcgcggtgggtcacgcctgtaatcccagcactttgggaggcagaggcggatggatcacctgaggtcaggagttcaagaccagcctggccaacatggtgaaacaccgtctctactaaaaatacaaaaattagctgggtgtggtggcccgcgcccatagtcccagctacttcggaggctgaggcaggagaattgcttgaacccaggaggtggaggttgcagtgagccgagatggtgccattgcactccagcccaggtgacagagcaagactccatctcaaaaaaaatatatatatatatattatatatatatatatacacacacacacacacacacacacacacgtatatgtatatatatgtatatacatgaaaaaagaaaaaaatgtctgaggtcctggcctccatgggagcaggtggccaaatccaggaccagcaaacagctctctctgccttcaccccctccctcggcccagcgccattcacagatcccacccacctggaacttgaggtgctggccaggcgcggtcaccagggtggagcagctcagccacagcatcaccagcacggagaggaagaggcagcaggccaggatccagcgaggcagacccgagcgcctgccccgcccggcaggcaccactcagctgcccaggccgggaccagggagacccgtacctccagtcccacccccctcccacccccaaggtcctgccacccaccgggacatgcaactgaggaagtcattgtcctgtggctcttcagactccaccttggccttgctgctggtcttgactcggatcttggccttcctcaccttgtccagggggcctacagggtctgagagatcagctgccactcagcgaccaccaggtctttgctaagaggccacaataaccatgaccaggagggaggaggtcaggacctggggcatagagtcctggaatggagatcagagccctgggagatggacc

SEQ ID NO: 308486 - DNA, 1000 bp, Homo Sapiens
gatcagtcccttcttcttatgtcagagctaatgagggcgacgtcaacagtcatagggacaggtagattcacactctgcctggaccaagaacgtcctggccactctccagcctgcacttcagagactgaccttgaactcccaaaccccatggcctaaccaatcacccatacttgtctgtcccgctggccagcactgttccctcaacctcaactgggatgctgctgcttctcggcaatctcaagtcccccagcccttccttctcctgtcttcaccttctcagccctccctgcttcagttcccactgcgttttcttgtaacaagctgacccctctgctattctggcactgatgcgtttcccttcaaagccaagcttcttgaaatggtggcttcacatcctcaccttctcattcacaccgtcgcaatctggtttctacttctgtgtcacgtcttcctaaggtcaccaatgccctcctaaaggtcaacaggatgatcaggtcggaatcctcatctctttgacctccctgtagcttctgatgttggaatctggggaaatgctctcttctgtaggccttctgccttccctccaacccctaagggcctcacaacgctctgggttccactccagtccccagttccttctctcctggttctgtgcatctgctctgagaatttcactctcaactatggaccctgtccagcccagctagagattggtgcagtgagctcccccaacagtctccctcccgcaggccaacacagctgactgcctccactcctcatcttggtcaatggagagcgtggcgcctcttctgcctccatacctttcctgagccatttcaagacccagacacgtactgccctgttctgattatcttcccccgagtgcttgacacgtattcagtgaagcaatagcaccagacagttcttacagacacaatgactttaaacttgggagtaaggatgcctggcagaggctaaggccgctcctacacaccagtgg

SEQ ID NO: 308487 - DNA, 1000 bp, Homo Sapiens; identical to SEQ ID NO: 119956

SEQ ID NO: 308488 - DNA, 1000 bp, Homo Sapiens
ggatcagctgttgcatggaaccctcagcactcggcgtttccttatacaagacttgcgggcactgtgggacttaatgggtctgggaaaagctttgttacataacttaaagtatttgaaaatgtcatgacaactgcatgtttgttttttttttctcctacctgaaaatcacattgacaacttttctattacctgtgaaaaataaaaaaggcagatttatacatttttcttattagttacctacagagtgtttatgttgtttgtcagcgagtatcaattcaacgttttgttggtcggtactagggctggaaacaaccgcaatgacattaaaaacctacaactattgctagatttccccgcataagaatccccatgctgcccttgatttgttctcactgtttttaattccagtcataattgacttgtttttccatccacaagataggctagaaattattttttaaatgccttgacttatttggttttgctgtccttggagagagagcattttacaactgatggagaagctggttcagatattagtatcttatctctagatgttcaacaaggacttgagctatctccacagcatattttccatgaattagtaaaatttatacagagaataaatttattctgcctattaataactaagttttagaacttttattcatggtcaatgtctagcccatatatacttgtaatatcatttacagctgtttttcttttatccccaaggacctttcctaaagacagttatgagttgagaaaattaagtactgattatctgaacgcattatctgtttctatcaggtctgttacctctttctgaatatcagtatattagaacctgttcctctattacttctttttttttttgagacagagtcttgctctgttgcccaggctggagtgcagtggcacggtctcagctcactgcagcctccgccttctgggttgaaatgattctcctgcctcagcctcccaagtagctgggattata

SEQ ID NO: 308489 - DNA, 102 bp, Homo Sapiens
tggccccaggggtcgaaccagtctagcagctggtactactacaaataatagaattttagcacagtaatacacagccgtgtcctcagctctcaggctgttcat

SEQ ID NO: 308490 - DNA, 1000 bp, Homo Sapiens
aagcttcttgggcagccgagggacaagaggggaggaggtggagaagggtgtccgtgtctgtgtgtgtgtgtgtgtgtgtgtgtgtgtgtgtgtgtgtgtgtagcggggtggctgcggttgcgcttcggcctgagcagatcccagcgcaaactttggggaagacacaagcccgggaaagtgagtgagcgcggcgcgatgggggtggggcgggatgcggatctggggccccccgcaccagtccactggaaaatccctccccacgtggacccccatccccaaacctgcccacccaaggtgcccgccgcctccccttaccgtggcaaaagtaaccatggcatccgtgtggccgtttccagggacgtcgacatgaagagaaaggtggacgcgagctcggtcattcaaagtctcccccaccccgccgcagccactacccagcaggggaaaaaggagaggaagaaagaaaggagagagaagaaagtagttgcgccgggctgcgtcgcggggcggtgcgcggacgtgttcggaagggagaggagcttcaactctgagtcccgtgaacagaatctgcgcggttataaccagccaacccggccagatggctccgcgctcagcgccttaaccccttccgcgccgcgccgccctcccccgccggcccgcgccgcgccgcgcgcgcccgcgccccagagccccccccccgccctcacttcgggacccgtggcggggaaggggtcatttctcctggcccctcttgaaaaacaaaaccaaaccaaacaacaacagcaacaaaaacttccaaatctgtagtattcttcagtaacccccacccttgagttcccttttagagatccaggaaaaaacgaaacgttaaatgtatcgtaacaggttacatgttagtgtcttcagcctttcttagtggttctttttcttgaaatttttctttttgatcttttttctttcaagattttctttacaaggcatcagggccttttcctgccttttt

SEQ ID NO: 308491 - DNA, 1000 bp, Homo Sapiens
aagctttgctattgctgctgttgacttctttcaagccaggcacagccactgggacctttgctataaccatcaagacagtgctatatcccaggcacaggaacccactgtaaatcttgctagatgaggggctagaagagaggacaagatctcacggaggctctactcactctctccagactcaggctactttcctactacctctgacgcttacctttcttgaataatccagctctgtttcttctgggagcctgcacaactgcctagaggaaggattacatttctaaccttccttgtttctaggtggggttgtataatcaaattctgacaagtgacaatgagaagtgatgggcgcaacttctggaacatgtcattaaagattggaagcctgccctgcctccatcctgctgcccaggcagtgaatggcatggctggaatgccatcttgggctaggagaataagaaccatcacagaggtggtagaagagaatctgaaagcagcctgggttttagatgaccacggtgccagtggccagacaagttctggtctgctggtcctcagacttacatgagcaaattagaccatgtctgcttaagccattgttatttttgtctgttgcagataggtatacctgatttctaacaaatagactagatacatattttttattcgcatctcctttagtattctcagtaaattatcatggtgtatctatgattttatatatatatatagagagagagagagtatatatagtatatatatggaatatatatagtatatatatatatagaggttacatatagagaatatatagagagataatatatatataataatatatatattctacctaattttgatacaatgtggagttcaaaatgtcttaagaatacatatagcttctaatttgatgattattttgttaagataaatcactttaacagcttttcattaaagggtagttttgaaatccgattttctgtttcttttttccccacct

SEQ ID NO: 308492 - DNA, 1000 bp, Homo Sapiens
catcttgttccaccctgtgcataaataaaaagtgatcttttataaagtcctagaatgtatttagttgccctccatgaatgcaaactgttttatacatcaataggtttttaattgcctacatagatgtctacattgaattaactctctttttggccaagcaatgaagttttgtagtgaagggaaggtttgctgctagcttccctgtccactagatggagagcttggctctgttgggggaattcatgaaagcaccatctcaccaaataaaatcttgtgctctatagcaccatggagtgaatgaagctttgacaacaattttaagaaactgggtcaagcatggtgcagctcagcctttttgttgctgttgttgttgtgagacagggtctcactctgtcgcccaggctggagtgcagtggcacgatcatggctcactgcagcctggatcatcccgggctcaagcaatcctctcacctcacccctccaagtggctggggactacaggcgccaccacaccaagctaattttgtttatttttatagatacaagatcacactatgttgcccaggctggtctcgaactcctgggctcaagcgatcctcctgcctcagcctcctagaatgctgggattacaggcatgagccaccatgcccagctgcaactcagtcttaacatttttattgacgctagagttagcccacaaagaacatgcactatgagcaagccagtaataattaagaggcctcgagggcacatactggatgccaatcactgttctaagcatcatacccattcattcatttaatccttagggcaaccttatgaggcaggaaatatttttcacattttgcagacaaggaccttgaagcacagagagggtgagtaacttgctcaaagccacacagctagtaagcaaccgattttgaatgcgggaagcctgcactcttaactaccatgctaccctccctctcagtcctcaaaaagagaattaaaaggcaagacc

SEQ ID NO: 308493 - DNA, 1000 bp, Homo Sapiens
ggaatacatgaaaaagaaatgacatcactcctgtttttctcccctcttttcccctcaaaagaaaaaaaaagggtattgaaaccaagaaaatttggaatgttcacatgagccaattagtttcttaatttaaatccccgtgtgaagagtgatgagttacccctgaatgacgggtagtcaaaacgcgaagagggagcaaacaataccactacaaaaagcatccctgatatcagaatagaagccaatgaggaagtaggccaaatcgctcgctgattcttaggcaaaaagcaactttagaccttgcatttctgtgctgcggtctctgctcaggggagaagcctattgctctgctcttgcctgcagctctgcaggaggaagggctgggagcaccagagggggccgcccctccccccgcactcgcggagtgcactcgcactctgtgcacctggatgtgggactgtgtaacttatgttgggggtatgcacctcaaaaatgttttggtccagggtatgttgaagttggccatgtactacagcagaggcagctggctaataaaactaggttttgagggagtcatttcaaatgacagcaacaatgactgagaaagctcaatgagatgggcataggaaattcacattttattcaaaagcaaaacttaaacatgaaatacagccaactacgctccttcctttcggcgttccgctatcttaactgctgaagaatgaaaaacaaaatgaccccagatttttcaaggtcaagtatgtcatcagacggacaacctgcaggtatcagaccctcatggaatctactttactgaagttgtcatgatgtcctgtttttgaggtatttaaaaaaattattgtgacagtggatgacacaaaatggagcttcctggtgagtttttaaaacatcaacttctgtggacccaagaagaaatttaggttagcaccaactaaaaagcagcctcagtggcatcgagtgagcaaagaaagctccttccttt

SEQ ID NO: 308494 - DNA, 1000 bp, Homo Sapiens; identical to SEQ ID NO: 119957

SEQ ID NO: 308495 - DNA, 1000 bp, Homo Sapiens
atgatgcatatttcacagataaagaaactgaggtgcagtgagggaaagggtgctggaagttcagttaagatggaatcagaaccttggtctctcaactcctagtccagggaagcaggcctcagcctcatcgatctgaggctaggcctgcttggatctgaggctaggcctaggacactgtctcaggcctcatttccaaacagtccctggtggaggcaggtggagccctccatctttaggcaggctggtgaacccagaacccacctgccttaattctatgaacccccctctcccttaccctgctccactctcatgcagcccctgtcacttgctgtgtttggagacaagattttatgggcagggctatgggattgcttgcctaaatccttgggcattgccattcccactgtatgtccctggagttgtgggacatggtgattccacccaacctcatgggctctaggaggtcagagctgccaagggccccacactggattggaaggttattgatggacaggcaccgccaaccaggaacatagagcttccaatggacagacaccactcaccatggacataggctcacctatccagggaactcccccttggcaagttagaaaagctgtcgtgtctgtcaccttgaaaacttcagagttttgctgggtagacataacattcatgtttgtgggactgttgtgtggtggcagaaaggagggggtgaagagagcaggggctttgaattgagatgggcttgcgcatacatgctagctctgtttcttagatgtgtgactgctctgagactccatttcttcatttgtaaattaagtgtaattattattatatgcatctcatagtgatattgtgaagattacatgaagaaatacttgtaaagcccatgacagtgactggcacatagtacatgctccatacctgttaactgtcattatcataattcactcattcaacccaggttgcatctattcacacacgcatcagtataaggccc

SEQ ID NO: 308496 - DNA, 1000 bp, Homo Sapiens
ggatcctagagagccatgaattcccagaacgcccctccagggaaatcttcctgggttgaatccaatactgactgtgcttatcccggctgggcaccctcccagggtcctgccaatgagccccgtgataagccgtgacagagagcagcaaggacattgcactacagcagtttgtgcaattttatcaacataaaggacatagtgttgagaaaccttgttctttgaaatcaagatcctgaaaaatgatgctgtttgaaatcgtctccggagcattgttcagagattttccaatgcagatcttacttgcccgtgtgatttaatattttgttctgtatttccattggtctcaatatcttaacaattctgctccttggctggaacattattttggtaaaaccccactgcttcatgaatgtatgttgtgcccccaacttcacaggggcaaatgtcccgagatggggccagcaccattgttctataactgccactgactttgccctctgaagggtgacttcattcatcgtgatgagtccaccagagacctgaggctgggctggagtctgcccaggaaggtgtagcggttttgattccacaaggggaaggaagaatggagctctccattggtgaatgaagcagcacctgtcttgatccacggaccttctctcatccatccactccttggatgaattgttagtggaatgaagctggttccactgagctccacagcctcagcttctgctccttaagccacacttttcagcatacaagcaacgggccttacctgagcccaagccgctgactactgaaaatacgattggagcttcaaaatgcagaaccagctgttctccctgtcattcgtggcatgctttaattctcttcctcctcttccactgccggcaaggctcctcaaagggcagtccttagaaaaaatctgagggttctgctggccaaacgctagggcaggggaggttcgacagcttgccttttatcttgtttatgctcc

SEQ ID NO: 308497 - DNA, 1000 bp, Homo Sapiens
gatcctgcgggccctgggagcttaccgagactccatcttccggcggctctggcagctgcaggcccagctggtcagctacagcctggtagggcccatcttgataccccccacccaacccaggccccaacctcatagcctccatgacctctgtcctttgacccaggtgttcgaggaggccaacacgctggaccaggacttggaggtcgagggagactcggactggccaggacctggtggggtctgggggccctgggcacccagtagcctccccacttccacagagttggagtgggatccggcgggggacattgggggccttgggcccttgggacaaaagacagcccggacactaggagtgccctgtgagctgtgtggccagagggggccccagggcaggggacaaggccttgaggtgagagcagacccccttgagggaccttctgccaggcaccctggggacatctctgcgcaccttctagcaagatcctgcccttccaaggaggtgtcagtggctctgtctccccctctatctctgtctctcggtgtctccttctatctcactgtttctctctctcgtctgtctctgtctacatcctcaagccccatctcaaattcactcctatcctgaggcccccagatgatgccccactcacctcctgactgtcccagtctctcctgaagtgccacctcttcagggaggcctgtcgtgacctccaaacatgagcactcctatcttcttactttatttcctaacagcactcaccacagcttgactttgtacatttacttatttttaaaaatttttatttattttttgagatggagtctcactctgtcacccaggctggagtgtagtggtgcaatcctggctcactgcaaactctgcctcccaggttcaagagattctcctacctcggcctcccgagtagctgggattacaggtgtgcaccaccattcctggctaatttttgtatttttagtagagatggggtttcatcat

SEQ ID NO: 308498 - DNA, 1000 bp, Homo Sapiens
gagccgagatgtgccactgcactccacactggtgacagagcaagctatgtctcaaacaaaacaaaataaacaaaaaatttaatacataaaaataataggccgggctcagtggctcacacctgtaatcccagcactttgggaggctgaggcaggtgtatcacaaagtcaggagttcaagatcagcctggccaagatggtgaaacaccgtctctactaaaaatacaaaaattagccaggagtggtggcgggcggctgtaatcccagctacttgggaggctgaggtggagaattgcttgaacccgggaggtggaggttgcagtgagccgagattgtgccactgcactccagcctgggcgacagagcgagacaccatctcagaaaaaaaaaaaagcaacttcagtgtactgttggagaaaatggaagccagactagtataaataataagaaaagagaggtgagcaactaggggaaggaactttttcaatgaatttgaacaataagcagggaaatactttggagggggatttggggtcaaggaagagattttatttccaacattacattgtataaagtatgtaattacatatagaaaagttgaaagaattttgcagtaaaatcactaaattttctacttgacattttactcggcttgcattatcacatttctttatccataaggaaggggatttttaaaagatggaagacagtcctatagcatgtttgtagcctagaatgtgattctgtagccaggggaagattcatcatataggaaggaaaggcaatagccaaataaaggagtgaagtccttgagaagtgaggggaatggaattcagagtacagggactgcctttgaagttacagaaggaaagaaagaggacatgggtacagaatcatgagtgtttgtggatttgatatcgggaagacatggcaaacactgcactattgcctaacagccagaccctcttcttcctcattaatagaacccaaaatttggtgtggg

SEQ ID NO: 308499 - DNA, 1000 bp, Homo Sapiens
gatcacctgaagtcgggagtttgagaccagcctgaccaacatggagaaaccccgtctctaccaaaaatacaaaattagccgggcgtagtggtgcatgcctataatctcagctactcgggaggctgaggcaggagaatcacttgaacctgggaggcagaggttgtggtgagccaagatcgcgccattgcactccagcctgggcaaacaagagcgaaactccgtctcaaaaaaaaaaagtgattattaaatataatatacaaaaaggcataaataatgcaaaacacccatgtccctatcatctagtttaaagaaaacattactaagagcattcatctctgactgcatcccttctccctgcccttaagtacctgctccctgctcccttgagtctgggatctttccttcccacgcctcccaccatgctggcccagagaggagggcgttccgtggtgcagtgcattgcaggtgggtgaacaggctgcactgcaacattgcagtaacaaatagagaaatcatgaaagcaacaaaagagagatgagaactgtactttagagatacaaatacaagcaattgcagagaccgagaccaaaagcttaggtcattaatatgttagcgtagacacggtgacaagtccaatgggtggctatcttaggacacagaaacctgtcagtgaacaaaccacaggataatgacaaaggggcctggactaggactgacgcctccaagctgttcctagccaaggtttcaccaatattcaggtgaggagggattgccatttaaaacgggagtaaagttgtggccacaccagtgtgttgttatcaggtttggtattagctggctggtgagctgcagaagtctattttaccgtgtgggttagtttctcttttttctttctttctttctttttgtttttttttttttttgagatggagtctcgctctgtctcccaggctggagtgcagtggcgcgatctcggctcactgcaagctctgcctcctgg

SEQ ID NO: 308500 - DNA, 1000 bp, Homo Sapiens
tatagggcgtcgactcgatcccttattgccaagccctatataagaaaggacttgatgaatgttgattagacgaatgaatggagttttcttcatattcatcctggattcttgaggttgtccctgggaacaggtgggcgttctggttctgataatgctaataattcctcaaagatgtaaagagcattaaagacttcactttaaactggtatttccagaaaaaaagacttgcaagcttgaaaactatttctgaagtatagtttgacttgtctgtctgttgcatattgtcagaattgttatcatttgtataggcagccctagattggtatttgtcccttatctgagaaattctatgaaacattagcatggtatatcaagagagttcatcacagcagttagataatcatcattgtaaggcacacttacaatacttaaaaataatacattaacgaaaaagtgatttttaaggttttaaagaagatgttaaaacctgtcattcaaattataaaggaactgtattcaattttagcttatgtagatattggctgataagcataaagtgtttagtattatctttagaactttattttgccaacactaatttaatcttgcaaacaaagcagttatttctttgcaaatcattttgtaacaaagaggcctttctatggttgtatttttacaaaaacatttatcccagttaaaatggaacacaataacattgtttaggatagttgctgaaatctgctaaaatacaaattgcaatgagatagtttggtgttttttagttgtccaaataacagctttataattttgttgttttggtattctgaggcaaaaagattagttaattttgtgaatctgtatgccttgggtccttagtacctggatggcctcttacaaatcaaaaatatcattctatgtgctatgtggtgagctagggggatggatgtcataatggtgagatcacaaataccagtgtgaaagctttcctgaagaagaggtc

SEQ ID NO: 308501 - DNA, 1000 bp, Homo Sapiens
ggatccctgcctgacccccgccagactcctgaccctattatctccacataatcccttgggaaccattgggaacatttaaggctgcaaataacaaaccccctgccaactaacagcaacttaagctataaagacatttgccacatttctttaagtctatggccagtacttgtaagttgcattctgatttcggagatgtaagaatgtggaaaaaaaaaaaaaagtagccagtggccattgtaagttgccatttgttataaaatgcgccccaatttcagagattctaaaatgtaaaaagatgtgcctcctggagtcaatgaactgtggtaattacctcatgtattgagaagtgcagaggtaggctgtttgttcattgttcatccgggacccatgctctatctttctgcttcaccattcttagcaagttggcattcattttcatgattgttgtttcatgatcacagctccaggcatcaaaaccacactcaaggcagggagagctgcacctggggcctctccttatttgatcctttcatcggaaagcaaaattttttttacacaagctgctaaccaacagcagatttatgtttatgtctcactagtcaacctggccttgcctaactacaagaaaagctagtaatcaagaactaaactttccagtatccataatgggaggcagacagtgcaagaggtttgaccaatacacagtgcaatcaagtccccagactcgcctcagcccaggccagggaatatttggttgggtgtggcggcatctctgcctcaggctccatctcaacctgattttctcctgcagcactatgagcagactgctcccttcaactatgccatggacatcctcaacatggtcttcactggcctcttcactattgtgatggtgctcaaaatcatcgccttcaagcccaaggtggccccccttctctagccccacccaccagtggatgaattccttgggagtggagctcattgcagagctctggggttg

SEQ ID NO: 308502 - DNA, 1000 bp, Homo Sapiens
gggctgcagcggtgtcatattggctcattgcaacctccacctcccgggttcaagtgattctcctgcctcagcctcctgagtagctgggattacagacgtgcaccaccacccctggctaatttttgtatttttagtagagatggggtttcaccacgttggacaggctggtcttgaactcctgactgcaagtgatccacctgccttggcctcccaaagtgctgggattacaggcacacaccaccttgcctggccaagcaagcatatgtgttcataagctgctaggagctgatacctctagaaactggaagaaacaagggccagggtttttttgttttgttttgttttttgaagagttttgctcttgtcgcccaggctggagtgcaatggcacaagctcggctcactgcaacctccgcctcctgggttcaagtaattctcctgcctcagcctcctgaagtagctgggattacaggtgcccaccaccatgcccaactaatttttttctatttttagttgaggcgaggtttccacatgttggccaggctggtcttgaactcctgacctcaggtgatccacccatctcagcctcctgaagtgctgggattacaagcatgagccaccacgcctggctaggctaggtttattatttttttcccccagaaaagagactgaaagttgaatttgccttatccaaaatgcttggaaccacaagtgtttcagatttcaggattagggatacttaacctgtaccaagttccaattcatggagaggggccatgattctgctgtgcttgagcagagagatctccttgccagagcctcacccaagagaaagaggtgggtacctgcatgcccccaggtgcctaccctgggaggtgggcacctgcatgcccccaggtgcctaccctgggaggtgggctcagaagttagagagcaagggcacagagtcaccaaaacctgtcccaacaatccccagacaatatgcttcctgctgagtccat

SEQ ID NO: 308503 - DNA, 1000 bp, Homo Sapiens; identical to SEQ ID NO: 119958

SEQ ID NO: 308504 - DNA, 1000 bp, Homo Sapiens; identical to SEQ ID NO: 119959

SEQ ID NO: 308505 - DNA, 1000 bp, Homo Sapiens
gatccatccaccttggcctcccaaagtgctgggattacaggcatgagtcatcgcactcgaccttgtggttgatttttctattgactccaattggttcacgtatccaccctctaacctaaggtttcttaatttcggcattattgacatttggggccaaatcattctttgctgtggggagctgtcctgtgcattgtaggatatttaatagcatctctggtccctacccattagctaccagcagcaccccttttccagttgtgacaaccaatataacatgtctccagacattgccaattgtcatctgggaggcagattcacacctgttgttgtcttaaagcatgtcttaaagtctcttctttggaactactgatgtgctaaatttaggggcaatcaggtttgcagaagcatgaattctgtggaagcttctaataaatgtttactcctctcccaccccctttaggctaagtctttgaagatgaaacagtctcttttaggtttgtctcaactttattttatgtttattcccttaccctctaacctgtattgggcacctaccgtgtgccaactcccggacaagttgttgagaatagaatggtgaattatataggcccagtctctgcttttatggaatttcaggctagttgagggatgtatggggggtgcacccctgtatacccttggaacttaccattctagtgcttgctgacagcatctgactgaacacctgagactctccacctgggaactttctcttgtgtggggcaggagcaaccctcaacatatgagggatgaatgagagatggtggataaataccccagcttcctcgccactctctgtgggaattcatggatatgatccacagagtctcccaaaggatgctctttgggattaagccccagttgcccacagcagcaacctactcttcctcactcctactagagctttctggaatgatcttgcgaataaattccttgcacttgaatcattggcccaagagaa

SEQ ID NO: 308506 - DNA, 1000 bp, Homo Sapiens
attagatgggataaagtaggtaagaagcctctggcaggaccctggtagtctcagtcaagttggcccctacccccttgaagaatgggcagtgggcagtggaggaggctgcccctgccctccaggacctcccaggcaagagcagccgagccctctcaggtggaccctctgcaacacccctgcctggtggctgcccggcccgtgcccagatcgctccatctggggatagttctgactgactaggcaccacctgtttccaaagaaggatttgacatagctgcttttccttgtaattcaccccaaccgtgtgtctgtagctccttgttcccctctgtggggacccacagcagaagtcaaatcccacttccccaagacagcccttttcacactcgagggcgacagctcggtgatcctctgcgtctgcacttttcccacctgttccttcgcttgctcctgctgtgaggtggttccaacccctccctcagcgaatttctccaaaacaaggcccacgggccacagccctcttgaagtgccggccacagccgtgtttacacgtgcttattctgactctttacataaaacccaccgttgctcactggaaatacccagtgggctgctgctcatttttccacagaaatgaggcagctgcagacagacccgtgatgctgacagacagggcttaagcctggcagggacaagcatgggtcccacccgcacacattggagctgaacattcacagagcgggtgagggtgagagttgctgactactgtgaccgcaagaatcccaccttcagacgggaccatccttaactcccctcgaaccatctgagaaggctttctcgagtaggaggtgagattccagaggctacacaaatgacagagagacagcctggtgttctaggctgccaggaggcacttgacaggcccgggaaggggacattcagagcggtgagtgtggagtggtttgtagaagggactttacggtcagacagctgtggaatc

SEQ ID NO: 308507 - DNA, 1000 bp, Homo Sapiens
aaaacaatatagtatagcaaatatttatatagcatttacattgtattgggtattgtaagtaatctaaagatgatttaaagtatacaggaagacctgcatacatgatatgtaaatactatgtcttttatataagggtcttaagcatccatgggttttgttacctgcagggagtcctagaaccaatccctcacggttactgagagatgactgtataggacaaactatctggtttcatccacaaataaggcacaatgaataaaaaagagatagcttgggaaacataaattattaaagaaagtgatatcaaccaattattaatacaaggtatagaacgtctatggattctgtttcaacaattaaaccagtgaaattacgagacgattagggaaatgtgaacactgattgtatatttaatgatgttacaaaattatcactttttaggtgtgataatggcatactgattatttcaaaatagagtcctattctttaaaaattgttactgatgtgcgtatggctaaaatcatatgatgttgggctgtgcttcacaatcatccaatggtggtgtgaagggaaggaggttggagaactgggtaggggtatagatgatatgagattggaatgagttgataattgttcgagttagctggtgggtacatggtagttcattaaattattctctctacttttgaatgtgcttgcaaatttccacaataaaatgttaaaaaaaaaagaagtaagggaaacttccaaggaacctctctctaaccctaaataacaacagccataatatcaacagcagctaaaataccacccttgagctaaaaccagagctgggaaatggaggcagggagaggtgtacaagtagcacccagaacagaaaagcagggtgagggcaaacaccgctatcaatgctgtagtaaggagagtaagccttgggctaagggcactaagttaagctgcaaccccagctaaggtgatcccaggtctacagtgtccctgg

SEQ ID NO: 308508 - DNA, 1000 bp, Homo Sapiens
gatcttataaaaattggatgcaagatagatatgtttgttatacaagctggggtgattttttttccgtgtcagaatatttctgcactttatttcaaagttttatataattatgaaataaagagggaaaagggtcagcctaagattagtaagatagatttatagtaatttaacaatgtattcataataattaacagctaatgactaacaactgacatttatataaagagtttaaacttcattgttacattcacatatgatacatgtgtaatgaatgtatgaataaatctatgtgacatagaatattttaaaatgttaaatgatgcttcactgaggaattagtaatgcatatgttttattaacgaatcattttattcttttgcattctaattgggaaatacaagaaaatataattctcatattatttatctatttcaccctattattatgttgagtatatagtgctctggagtctgtgtgtggaatgttttttagacaatattttggatgtcttagaatatgattatacggaatatgcagctattgcttaattactatatatgacaactttatttaaatgtttaatgaattggctaaatattaactcttcttctggcaagaatcatgtatgtgcatttaaggcacagaatattagtcatatagctgattagagatatattgtcatgaacaaaattgtattgttatttttttcttcttttctttcctttcttttgaagtatgtatggactgccaaatctgtgcctaaaattgggctaactatagtatttaaaataattaatatatatatatatatataatttttgcttttgaaaactagtatgctcatggtaagacatataaacacatataagtgaataaatatttttaaatttgtgatgcatacagttaagcaaacaaacaacaactagaaaattcatcatgaccaaatggagattatccgattattctagaatgaacggttagttcatcatttgaaaaaaaa

SEQ ID NO: 308509 - DNA, 1000 bp, Homo Sapiens
aaacaaataacttctaattaataaagtagtatcagcaattttacttggtgccttaagagactgatagccaggcccaaagtcttcaagatctctaaatacatagatactccaatccaagagagtatggtttactcaaaagagtctcaaataaggagaatggaaagagattttaatgccaattgctccctgttgtgattctgctactgattagctgggtggccatgtgcccatcccataagtattctgggctttgatttccatacctgtaaaatgaatgggttggactagaatctcatttctaactcatttctcatttcagcgctctcacattttaccaatctgtgatcctgagttcatgtggtcccatcttgatgggttcaaatgtcaagctgaaatacatccaatgtgaaacattcccttgaagggtatattccactgaccttcagttttagcagaacactccaaatttaccgaatgaagaaatgaatgaatgaagtacgctttattgatcctctttgcccacagatcctgagtactgagctatggtatttgtctctgcataaccggcaaggacacggactctccagggctgagactaaaaggggaaggcttacctcagctgccctcgatttccccttcagtgaagacatcctcatcctcaaagcatctcttatctaaagaagcaatgacaatgagaagtacctcacagatgttggaagaaacaacagaattgcctgtcctgaaactttaagaccagtaaccctggcagaagcaatatcagaggacttagcatagtgactggcaagtaacaagatttggataaaagctagggtgtaattataattagatttgggatttggtattaggactaaaattgtgattatgatttccattcttttcaccagcaatacttgcacacagcctcctgttgacttgataaagagcaagaaatgacagaatattggtgtgttttttttttcttttcacagctgattccttg

SEQ ID NO: 308510 - DNA, 1000 bp, Homo Sapiens
gtgaaagtaattttggttacatggtaaatgctattcagggagggggcatcaagatgctctgggggcatcatgctgcacctgccacctggtgcatttctgtgaagttcatctccttcatcctgtagcttttttgttaaagaataggcattgatcagtttcactcatgggatcaccaccagctctgcagctggtaacagagcctaccccataccttgacctgacaaggatttcctagctgatccctgcctgcctacaggttttcctgtgatgtattttccactccaaactcctttcacactcaatagaaaagccccatctctctgaagtctcccagataacccctgcccacagagatctgtgctttaccctgaactccacgcatccatgaccgccacctggggcagagctcattctgccgtcagggttgtctaccactattttctagttatctcacatcatcacaatgacaaacataatacttcctaagatgtatttaacaccctgtgccaagacaagggtagatgctgttattatccacatttcactaataagaaagcacaggcagagagaggtccagtaacttgcccaggatcacacagactttaaaggcagagcaggattcaaacccagccagctccagagtctgcacttgtccacgcaggcactgcatcatcttatcagcagagtcctgggaaactggctttgtctcagggagcgggtctctctttacccagagccgtttctctcggtgtctgtataacctcttcctattccctcctcctttccagtgaacagttcccttggctggtctccctcctcttactaagttacatttttaggaaaagatcagatgtccgcaatttaccactccatgtaaggtttacctgttcccctcgctgatgcccttaggaggtactggttgaggaatgtattaaagtcaataggaaatggggagcgactgtgtacttgatagttcataaacgttcttgaagaaataaat

SEQ ID NO: 308511 - DNA, 1000 bp, Homo Sapiens
cctcgttctctgctcttctaccacaccaaactgccctttttgcataatttctatctaatcagaggcacttggtctaatggctggtagagatgcatatttatattgcaaagagcattgaagcaaggaattttactcaatatgttcttttggaaaaccaaacatgctttatttcatttttttcacaatttatttaaacatctcacatatacaaaataggtacaatttaatttttctgcttgcccaagaaacaaagcttctgtggaaccatggaagaagatgaaaatgagactggcaaagaacaaatgctgaatctgaagaagaggacaactttgggcaaataatctgcatacttttaattgggaataagatggaaaatatgaatgctaaatcaaattttttaaaaaatacaccacacgatacaactcaatacaggagtatttcttctcaaattcttctagcaccatcaacattcttcaagtatctgaaatactattaattagcacctttgtattatgaacaaaacaaaacaaggacctcagttcatctctgtctaggtcagcacctaacaatgtggatcacactcatgggaaagtgttttgaggtagtttaaacctttggaagtttgggttttaaacttccctctgtggaagatattcaaaagccacaagtggtgcaaatgtttatggtttttatttttcaatttttattttggttttcttacaaaggttgacattttccataacaggtgtaagagtgttgaaaaaaaaattcaaatttttgggggagcgggggaaggagttaatgaaactgtattgcacaatgctctgatcaatccttctttttctcttttgcccacaatttaagcaagtagatgtgcagaagaaatggaaggattcagctttcagttaaaaaagaagaagaagaaatggcaaagagaaagttttttcaaatttctttcttttttaatttagattgagttcatttatttgaaacagactgg

SEQ ID NO: 308512 - DNA, 1000 bp, Homo Sapiens
gccattgaaatggtagttctgtctctttttctgacagtcctgaggcatcccgggaaatagagcccagcctttatccccggtccccagcacatcaggggaagtgcactcctgtccttattcctcactgcagtgcatgcagggagttctggccatcaggttatcttctatccgtctcctttcccaaagcatgctgggaaatgtggggatgtctccttagaacaacaaaatagttgcaacctttgaagtttaggagaagactagaaggttagtgttcagtgtgtgatctggaagcttgcatttgtaagaattaaagaaagaggaggccaggcacggtggctcatgcctgtaatcctagcactttgggaggccaaggtgggcagatcacctgaggttgggagtttgagaccagcctgaacaacatggagaaaccctgtctctactaaaaatacaaaattagccgggtgtggtggtgcatgcctgtaatcccagctacttgggaggctgaggcaggagaatcccttgaactaggaggtggaggttgtggtgagctgagattgtgtcattgcactccagcctgggcaacaagagtgaaactccatctcaaaaaaagaaaagaaaagaaaagaaaagaaaagaaaaaggaaaaggaaagaaacatgaaatgtggcttgacggtgaaggacaggtttattttagagaaaaccaacctgaggggggcttttggctgagttaggttagagagcccttttttttttttttttttacagactaaggatatttaagagttttggaagggggtgcttatctaggttcggaatgttttcatgtgaggaaaagtttattgtggggttggaaagtctctggtcggaagggaggctatctgggggttggcatgtttctggtcagagaggggtttatcttagggttggaatgtttctggttatgctgatggtagccattaggctgatgttttggggctggatttagctgattttttttt

SEQ ID NO: 308513 - DNA, 1000 bp, Homo Sapiens
tggggaacatagcaagaccgttgtctcgtacaaaaaataaaaaatgagtgggcatggtagtgcacacctgtacattatctcagcaacttgggaggctgaggtgggaagatcgcttgagccctggagtttgaggctatagtgagctatgattgtagtactgtactccagcctgactgacaaagtgagaccctgtctccaaaacaaacaaacaaacaaagggtttactctggacacattgtgcataatgaattggaagggagaaagtgtggaggctgggaaaacagcaagaagtgttttgtatttgtccaggagaaagaacaatggcagcttggactaggatggtggtggagaaggtaggataatgcttggctagagagatcgttttggaggccattggcatctaggtggtgactgctccgatatgctcactgagcaatctgccgtgaatttggcctaatctttgcctgcctgtgaggtgcctatgccttggatttactggcttccaaactggacggagcaagtgtccaggatatctgacaattacatttttcactataagtcaatactttgccattttggctttatcagtctcttgtgagctttgttagcatgaatcagtattaatcaacatgatcatctctggcaccttagtgagagagacttttggagccagagatttcagggacagaacctagacactcatgagttcccaaaggtaaatgtcacctgccagagatgatgaacaattaccttttctgggaaataacctcttttttttaacaaatgctttccattatcattttttaaaaattttcagtaaatctttaaaatcaaatccaccaattgtttctatctttagaacagcaattatttcacctagtgaggaaacatactgcccacctgaaaaagaactgcagagggagtgtggtttgaaaagtcgtatcaaatgtagaaggattcaaagtccaagagaatcttactctgtttccctgtgcatcta

SEQ ID NO: 308514 - DNA, 1000 bp, Homo Sapiens
cgatctcagatggtagtttaagtagcagtgtcttataaattcagatatgtcaacatatctgccaaaacaattatgtgaacccatgcattttggtgaaatgtgaagtgagtatcttgtaatgaaagtactcatattgagatttcaaaaaaaatcatttggaaaaataaactagtgaaacaataacatttttattttgaaaggataattcttaaaagacagttttatacagaataagttaatgaatttttcaatgtgtgattaaaatataaaactggccagggggaggggaatgtaagcagtaggggatggcctggataatctacctctaagatcccttctaacgctgaaattctatgatggaaatgttgctgaatatataaagctacggagtggtggctcattcagcatcctagacagtcacctttcaggaaaagcagactacggtgttttcatgggagtgttgaaagtcattaaaaaatgaattgatatatatttattgggtaccttctatgttgaagacactgtgctaggtacttcagaagattcaagggcaagattccttttcttaggaagttttcaacgttgtgtttccccaaatttttgagatgttgttatgaaatctgcccctgaagatgtatcctaagaaatctcttaaagttataaagtatgtttttaggtaattctgagacttttttcctgctctaggcaagggacatccagataataggccaacatgttattaataagaataataatccctgatgtattataagcaaggcatatagaaatatccacttttcaaaataatttacacaatttattcaagataccaagaaagagtgtctgtaagtaattctgcatggacatgaagaatgttagtagtagcacatactggtagaatcccttatgctgaactagtaaaaaaaaaaaaaaacaactaaacattgagtttttatttaagacagtgtttcccaaaatgtcttctacagatcctgcggat

SEQ ID NO: 308515 - DNA, 1000 bp, Homo Sapiens
cattgtagagctatgtgtggtggttcgtgcctgtaatcccaacactttgggaggccaaggccggcagatcactgagatcaggcgttcgagaccagtctggccaacatggtgaaaccccatctcgattaaaaatacaaaaatcagcagggcgtggtggcgggcgcctgttgtctcagctacttgggaggctgaggctggagaattgcttgaacccaggaggtggaggttgtggtgagccgagatcacgccattgcactccagcctgggcaacaagaatgaaactccatctcaaaaacaaaaaaaaaaaaaaaaggaaaggggggccacaaggcaacccatggtatgtctttcttttatttttccattaggttttaagcacaatcatctgcaagtgggactttcctttctggtttcaaatcttgaagcaacagaaactgatcacccctatacagtgccaaaaagattatggaaaccctgtcttgaaatagcttgcactgcaataattgctataaacagcacattcactactaataactactttattagaagcctcacaatcaaatctgtttacttgccctctgaaatgtttcttgtttgaaacatggtctcactctgtcaccctggctggaatgcagcagtgcaatctcgactcactgcaacttccaccttccaggcttaagtgattctcccacctcaggctatcgagtagctgggactacaggcacgtgtaacagtgtgtccagattaagttctgcattttttgtagagatgggatttcaccatcttggccaagctggacttaaaactcctgggctcaagcgatccacctgcctcggcctcccaaagtgctgggagtacaggcgcaagacaccacactggcctgaaatgctttaagactctaggattatcttgagttagtcttagcaatgaaagaccaagcaggtagatggtgaagggctaatggcctagtaggtttggcacaagactccataaccaaacc

SEQ ID NO: 308516 - DNA, 1000 bp, Homo Sapiens
ccagagttcacccatgtgactgttttgctgccttgcctgtttctaacctgtagcttgctgcttgacctagtttgcatgaagagtcttagccttgggttttaccttagagcctcacaaatgttagctgctattgttgtcattaagctttgatgagttttctgccttgaacctcctccttttaccaggattaaaaatatatcaacgacacatgccctgccctgccagctacttccattttatatacaagaaagagaaaactcagagatgttggatgacctcctcaacgtcataggatcttagatctagagaagaccttaaacattttctccagtttgttgccttttagcctacttagtttagtttgcttttagcaatgaagtctccctttcaaacaaagtcccatgggaggtccaagttgtaaagaagagaaaaacagagggctctgttgggaacagggttcaagggatgaatcctggcccatttatcctcccctctgcagggtttcccatttccagagaccttagagggaagggtccaaggagctctgtttggaaaatccccatccaaatcaacattcccctcaaacaaatgaggaacagtccccacaaagggaggtgacttggccaaaatcagacagcaagtgcatgacctcactggggcctgcctcttggactccagagaccaagcccagaatctaacagaaacaacctgggcaggtgaaaggaccacactcctcactctcctgactgtttactgaggtgtgtttgataagtggtcactcatggtcttgcactcccacctatggggacaaattcaatactccattcactaatctcataatttcccagatgctcctttctttacaccctggttgttggggggcaagtctttttattttctaggtattgtgaaataaaatatacatacagaaaaccgcctaactgcatccatgccaagaaatagaatgttgtctggaccctaaaatcccccaggtgctcct

SEQ ID NO: 308517 - DNA, 1000 bp, Homo Sapiens
cttgaatctgatgaacttctttttccaggaatgaagtccagagagatagatttgtctaagagcttcatggctcagccgcaggtcaatcccgtccggagtgaccgtgaactgaaaggccacagcttggtgagcttctgccatcttcagagagtacctggaaggagaaggagaaaatgtaacacagtggaacgtgtgaccagacactaaaaaaccctcatacagaagtgccattccttctgaacttaagttcttcctcgccacttaacagatttaatacttttcatcaacagaccaattccatcaccacagctggcacccccttgcctgtccaccgctacaaagacagtcgccacctctgcttagagccccaagatgatcatcaggagtcaggcccgtggtaccccaaccctggccctggacattccctggaaccacgcctccaagccagcatccaggcccgtggtacctcaactctggccctggacgtcccccagaaccacgcctccaagccagcatccaggcccgtggtaccccaaccctggccctggacgtcccccggaaccatgcctccaagccagcatccaggcccgtggtaccccaaccctggccctggacattcccgggaaccacgcctccaagccagcatccaggcccgtggtaccccaaccctggccctggacgtcccccggaaccacgcctccaagccagcatccaggccacacctactgacgtaaagcccacggcgcttcagcaactcgcacagcacagacaaatctcaatcttgcagccaggcccttggaggctggcattagaagaggcccagagtgtccacgcaggagtccacgaaggagcccacgacagccctagactctgaacttcgagcgcagatcaatcccaaatgcctctgcctctggtgtctgtgtggctgctctttcgagaaactgttctagggtttcggagagacccacgaagactccatgagtcatatgcgcagacacct

SEQ ID NO: 308518 - DNA, 1000 bp, Homo Sapiens
gatcatgacactgcactccagcctggatgacagagcgagactccatctcaaaacaaataaataaataaaaataaaacaaaacagaaaccaaaccaaccaaacaaaaagattatagtctatagcggaagaccagacattgttaaatagaggttaagttctaatcactttgcttaaattgttaggtaaataaataaaaataccaggaaatttctagatcagaaatccccagcataacgtcttaagaagtattttaaggcctctactcatacatcttacctaataaaggtgaggagactactgacagtttcaccaagtaataagaaaatgcttttagacaaaggactgttgtttcagtcaagaacaaatctcatgttgctcagagaacagccatgccaaattagtctgctgctcttgctaggataatcaatgatgaataacttttctctttggtgttctcttctaaaacatctataccatctaccaacatttgggaatttacttttcagtttttctatcaaaattaatcccctgcttgctgtatattcagcactttgtccctttgaagtatctttggaaacataatcttgccatcttccttttctaaaagggctagtccaagctcaaatgatgaagtaggtgatatttattttcagttttcctttatctctttttagcaaaaagctccttgcatgcctgtggtcccagctactcagcaggctgcggcaggaggatctcttgaggctgaggtccaggctgcagtgagctgtgtttgcatcactgcactcacgctccagcctgagcgacagagtgaaaccctgtgttaaaaagaaaaaaaaggctgggcgcggtggctcacacctgtaatcccaacactttcggaggccgaggcgtgtggatcacaaggtcaggagttggagaccagcctggccaagatggtgaaaccccgcctctactaaaaatacaaaaattagctgggtatggtggcgggcgcctgtaatcc

SEQ ID NO: 308519 - DNA, 1000 bp, Homo Sapiens
gatcaggttctgaacaatggaatgaaggcagaagcaatgtgcgccatttctaggctgggctcatttaaaaatcttccatacaacctgcattccctcttcccattctgtgacaattttagaggccatatgtaccacataatggaaagaacctaggcttgaatgaatggatggagcagagctacccctgtcccctagaccctcactggactatagaatatgagtgagaagtgtcagtggctttgttacagctcagttgcttgttacagctaaccttattatcctaatacatcatccctcattccactgaagttcatctaaacaggtcctatatagattacccgtctaaaccatcaatccttctgaagtctcttttgaactgggtcccaccaacactaagacagatttctaattccccatctgcagacatcctgactgctgacattcctttctcactccccgcagatatacacattccagacatatcttctcccacaatgctgggtcaaggatacacctactgagctatcttccagatgattgagtttattggacatgtcagggcttcctcctctcctgttaatccccatgcagagagacctctgatgtccctggggcatgtctttgtttactgtggctcagacccaaacctaggtgttatctctgagtcctccctttcctctgctcctacaacaaattcattacaaaatacagttggatttgccctgtcctctctctccattccctctgccaccctagtccagccaccatcatcaccacctacctacctgcagcagcctcctaactggtcctcctctgttcgtctttccccctctaatcctctctccaccaagcagctggagcaatcttttaaaaataatagccatggccgggtgcagtggttcacggctgtaatcccagcactttgggaggctgaggtgggtggatcacttgaggtcaggagttcgaggccagcctggccaacatggcaaaacccatctct

SEQ ID NO: 308520 - DNA, 1000 bp, Homo Sapiens
gatcccaaagggtgtcagccgcaagctcgatcgacttgcctacattgcccaccccaagcttgggaagcgtgctcgtgcccgtattgccaaggggctcaggctgtgccggccaaaggccaaggccaaggccaaggccaaggatcaaaccaaggcccaggctgcagccccagcttcagttccagctcaggctcccaaacgtacccaggcccctacaaaggcttcagagtagatatctctgccaacatgaggacagaaggactggtgcgaccccccacccccgcccctgggctaccatctgcatggggctggggtcctcctgtgctatttgtacaaataaacctgaggcaggatttgttagcctctgtctatgatcctggggatgggtttggttgctccatctgttggtgtgggagaagacatgggtctggatggtggggtgtgggtgggagtcaggagatggggccctgaagtgcaagaggaggacctaatgaatgagaaatgattgggggcttttgggaagctcgggcacatagcttgctggactgtgtaacctgccgagcaaagggagaaatttttttttttttttttgagacagaatcgtgctctgtcacccaggctggagtgcagtggtgccatctcggctcactgcaagctccgcctcccaggttcacaccattctcctgcctcagcctcccaagtagctgggactacaggtgcctgccactacacccggctaattttgtttttgtatttttagtagagatggggtttcactgtgttagccaggatggtcttgatctcctgaccttgtgatctgcctgcctcggcctcccaaagtgctgggattacaggcgtgagccagtgctcctggcccaaagggagaaatcttaaacatcctcatgaggtcttaaagcttactgcaagggaggggaaggggccccgctgagcagctctgcactctggcctgaggtgtcccagatttgggctcttttggtgcacc

SEQ ID NO: 308521 - DNA, 821 bp, Homo Sapiens
tcagatgccactgcttagatcagtgatgacgcgagctttcaccagcttccgcagaaactctttctctcgctggatattgtgcgtccaggactcaccacaatgtcatagtcgtcaattcgtgaccccagagacttgttggcaagaacgcctccattgcccacgatgatgcagcggcggcagcggaggctgtccaaggcaggggtcaggcggtactctttggtgactgacaagatggctttgatcagattgtcttgacctttgatcccaaaaggcggcacgaactcccggattctagcccacttgcgaaaggagtcatccaggaacatgggtgctggcttggagaacctttcccagcatagttcaggcatcagacttcaccaggacgtctccccagtcaatctctcatcactcctccagctgaagggccttctctgtgtccccacaatcctctgtcttcacctctggcggagcacatatgcctggatatgtttttgtctccatgcaccatttctcttagctcgggggaagatggccgtcatcaaggctgaagcatagccaggcttgcaagctccctctgaaaagtttgcgtacttggtggctaattcagcaggcagtttagagtccagattcaggaggaagcccaaccgatcatactctgagcctagtgtttgtccagcggagtcaaaggaaagaaccactgaattggagtcctcctcccactggagtaagtgtagcttccacgcagaataatacaaaaatcccagtaccagaaagaggcagagggctagcagcagattgcgcacaaataccaagagtcccat

SEQ ID NO: 308522 - DNA, 1000 bp, Homo Sapiens
caatttaataaaaagcagaaaattcaatcaatcatcagtcaatcttttcatttccaaaaggatcaaataacctatggggcattaataggatctattcttttaatgtcttcaaggaacaaccagaacgttttaagcaattttcagtatgatgatacaaataattgaaacaattatctttcaagtttcctgtctaactgggtatttcaaacaaaaatgctaatattgctgaagtgagttgatacatgctctgaaatccccacatcacttgacacctctgggaaatttaagtggccttcatatttcaagctcattaataccagtggaaatcatacctgcaataagagagatgaactttcagcacataggaagctgcctttccatcactgatgaacagggtgtaacagaaaggtgactccaggctgtatgtgagtcgtaattcctgtcatgtagttttgttacactcagccagtcatatacttttattttcacctcttttgggcaacaataggaatttgtgaaatggtttttgtggagtcaagagtaagtctgtggttggcattatgaatctctgatgccatggccagaatctctgcctacctactttctctatctaaatcaggacacatctattattgtatcactggaaaaaactgagacagatcatagagctgaacataatccaagatacacataaagctatgagtaaagttaatgtacaaagtgtatatggagtgtacaatctgtgtacagtggtagaaagtgacccacaaatttggctaggacctagagaatagcaaaagcaaagagacaaatacaatcagtgacaagtcagtgcacatgactagtttgaaacaaaatattcataagaaacagttttcctggtgtattacttgttttcacgctgctataaaagatacctgggactgaaggccaggtgtggtggctcacgcctgtaatcccagcactttgggaggccaaggcgggcagatcacctgaggtc

SEQ ID NO: 308523 - DNA, 978 bp, Homo Sapiens
actctcgggtagaccactaacaaacagggaaaatgtgaggcatcctggagacctgctgaggtggggctgagagaaccacggagtgctggagaggagcccgggcacagctgaagatgctgagctgagcgttgacccggatgcagaaacccccaccccaggtctttccaatggcgaaagtcagggcaggggaagtagatctaagaggggtcagtgcaggggtgaggggtcaccaccagggagatcaggggctgaaagttctctccaataggcttagtgctggcctttcctcacagacaaatggggggcaacgcttagggcagctcccaatagctgggcaggggaagaactgggattcatcctggatccatgctgtgactcatgcacccaagggtcctggggcaaggctgggctgatacaatcagaaacctccatcactgctgtcctgtggcacctgcaggtcaggaacacaaacaggactcacagcatcaggcccttggccaggaggagtccacacaacacagagaccaggagtttggggccagctgagccaaggcagatgggggcacttgatttccataatgcagattctgtggaatccctgagcttgttttcctgcaactggatggccccatctgtgtttgttgggagccaggtgagggtccacgtaggagacgtggttggggctgcaaacaccaccaggctgacatctctgagaacagtgacgatgtttttggaagtgttgtagatttcacaccagtaggatcccaagtcctccttcagctgaatcatggtgattttgaagatgctagcatttggcttgtcccagattgtgtaatgagacttctgaactgctgtctggggcttggagctggtgacaagtaaggtacaccgacttggagatgtctgctgacaccaggatttgggctgataggaccctctcttgggtgagtactggcattgcaggaagagggtctgtcc

SEQ ID NO: 308524 - DNA, 1000 bp, Homo Sapiens
gtatctcttccaaactatcctcctattctctgtttgagaaatctccctgaaatcttcttgattgaggagaagtctcccgaaccaagactctttttactagttaggcagagccaaccgagaccccccaggagccaaaccaagacagacaccccatgttgtagctacagacacctcacaatggagctacagaactagttgcgaaaaggaaggagacattggcagcacctaggatactcaccaacccagacaccctacaatggggctatagacagacaccctgtgatagggctacagttatgggacgtctccccaggactatttctctattaaatccatgcccattgggtcgggagtgccctgtcagtagagagagtaccagagtcaactcccagtccaagtgaactaggtggctgcttgggctggcccctggatccattgctggagggggctactgaaccacgggcaggtagccacaagggcaatcctggatgagcctcgaaatttgtaaccacccaatggattcaccttgcccactgcttagacagagctgatttattaagacaggggaattgcaatagagaaagagtaattcagccagagccagctgtgcaggagactggagttttattattactcaaatcagtctccccaaaaactcggggatcagagttttcaaggataatttggtgggtagggggccagtgaatcaggagtgctgattggttggctcagggatgaaataacagggagtcaaagctcttctcttatgctgagtcagttcctgggtggagaccacagaactggttggcaggtccaggtggggccgtccagttggtagaaatacagaaacctgaaaagacatctcaaaaggctgatgttacctttaagagtaactggggaagttgcaaatcttatgacctccggaataatggctggtaatatctagaattccagcccctctcattctaacttggtggctggtggcctttccttcatttta

SEQ ID NO: 308525 - DNA, 1000 bp, Homo Sapiens
cttccggaatacaacatgtttccccgcaaaggccgtggactccctagaacaaatttccaatctcattagcaggtgatagaaaggttttgtggtagcaaatgcatgatttctctgtgaccaaaattaagcatgaaaaaaatgtttccattgccatatttgattcactagtggaagatagtgttctgcttataattaaactgaatgtagagtatctctgtatgttaattgcaattactggttggggggtgcattttaaaagatgaaacatgcagcttccctacattacacacactcaggttgagtcattctaactataaaagtgcaatgactaagatccttcacttctctgaaagtaaggccctagatgcctcagggaagacagtaatcatgccttttctttaaaagacacaataggactcgcaacagcattgactcaacacctaggactaaaaatcacaacttaactagcatgttaactgcacttttcattacgtgaatggaacttacctaaccacagggctcagacttactagataaaaccagaagtggaaataaggaattcaggggagttccagagacttacaaaatgaactcattttattttcccaccttcaaatataagtattatcatctatctgtttatcgtctatctatctatcatctatctatctatctatcatctatctatctatctatctatctatctatctatctatctatctatctatctctatttatttatgtatttagagatcaggtctcactctgttgaccaggctggagtgcagtggtgagatctgggttcactgcaacctctgcctcctgggctcaagcaatcctcccacttcagcctcccaaatagctggggctaccatggtatttttcagtagagaccgggtcttgccatgctgcccaggccagtctcaaactcctggcctcatgtgatctgcccacctcagcctcccaaagtacagggattagagttgtgagccaccgctgc

SEQ ID NO: 308526 - DNA, 1000 bp, Homo Sapiens
ctttgtgcatcaaatcatagaattagaagaattaggttacatttcccctttgttcacactcagctgccttgctcatgcacagctgcagtgagcaacactgcactgtgatcctgcaggcaacagagcagagtagctggacatgtgggcactcgggtgaaatctaggctcagccacttagtagccatgtggctttgggcatttaacctctatgcgtttgtcttatttgcaaaatgaggccaatagtgtacctgcctcatatggttgctataaaaattaatactataagtgcttgtaaagtgtcctaatcagtaattggcatacagtaagcccttcaataggtgctattatgactgatgatttaaaaaaaaaaaaaaatcagccccttcagtaattagaggacatggccttaagcaaaataagtttttaatattttactgggtaaaaactgaatcttttcccaatgtcatcagcacttttcccagagccttaataaaatttgccactatatgccaacaaaatctactctcccctcctctgtgaatgagatctttcctctacctgaagtacaatcacctatactcctgcccctgactcttaggaggcaagatgttggttatatcctgtactaaagaaagtgtagtcaggcacagtgactcacgcctgtaatccctgtccgttgggaggccaaagcaggaggattgcttgagcccaggagttcgagactgagcaacatagtgagaccccgtctaaaaaacaaaaaataaatgaactgggcatggtggcacgcacctgtagtcccagctactcaggagaccgagttgggaggatcgcttgagcccaggaagtcaaggctgcaccaagccgagatggtgccactgcactgcagcctgggcaacacaagagctacaccctgtctcaaaagaaggaaaaaatctaatttattgggttaaggaactagggagtagtggttatccaacctctggctagtgaggtctctcct

SEQ ID NO: 308527 - DNA, 687 bp, Homo Sapiens
ctggtaacagaaaggaagagtgaattcagggacagtcatttactagataaagaagtcagtcagccacagaaaatcagttgcaatagaggaaaatttctggcagccttctctgtcccagggctggtgctaaagccatactgaagtttgaagaccattgctctaaatccattgctcatctctagctgcatgttagaatcacatgatgagctatcaaatcagagttgtagggcatggtgtaaagggcttagactttaatgttccacagttcctcatttgagaactagtctaaatagtatttttcggtccctcagacaatatgtccacagtgtcaaaagccaacttaagccctgtaatatagctcatggtatcaagggtagtcttattctctaaagaacatatttagattaatatgctcccttttgagacattatccaatagctttgctactttttaagctatatgtgagcaataccattcgatttctgggtgaagtaaaaggatgatttcaaaaacatgaaaggatgaaaaacatccttgaaggatcttatctgccaatgaggaggtgatgaaacaaaagcctcagagggcttaatgagtcaagtcaggtactgacttttggtaaaacaagtggtgtgtcctctggaacagttggccttttcaggcttgtccagaatttgtggggctcac

SEQ ID NO: 308528 - DNA, 1000 bp, Homo Sapiens
atgagcactctgaactcaacacattcaaaacagaattaattcccatcttgcctgcaaagctgttccttccctaatgaacaacatatctacccaatcacgcaggccagaaaccagactcttccttctccgctatttctgacatcaaactaaatcctgtcaaatttccctcttgatttttcaaatctagttatctccttccctctagtcactatctgagcctcaaaggccaatataatcccttacctggctgtctccagtccagccttcccacaaggcagtcataatcatcatccgatgccactcaaatcagatcatgccacacccatttaccatcttttaatgactccctgtttggagggaggtaaaaagtgaaatgcaaggaccttgtcacagagcttgtttacctctccaatcttttcttttgcgtgaccacccttgaactcttcccttcagtcacaaagaactacatacaattctcctcaagtgcagatcctgctccccactgtcttagctcctgatttgttcatgtcatttccttctgggaacactatcttcttgcctctgtacttagtgaacactattttctcagcctctgtacttagtgaactcctagtcttccctccacattcgcctttccctactcccatgtgactaaatttagtgtccttcaaatcagccctctaagcaccttgaacttgttactggtgcacttatcgactatgctttctgtttacttggtcagcaacatatctagaatctgatccagtgccttacccatagttaagagtagaataaatagttctctaataaacagcaaataacatacatatgttgccatcttaaccctggcttgtaaatcctttcttttccttggaacttcatattcccagcatctaaaacactcccctaaataaatcgttgtcaagtgatactaaataactatatcaaaatcacctggtaaacttgagctaaataagtatttccagccctaactccccat

SEQ ID NO: 308529 - DNA, 1000 bp, Homo Sapiens
ggtgtcacttcatggtaacaacggctgggtctgctgtgggctgcagtgatgtttgtgtgcatgcatgtgtgtggtttttatgtacctacttttggctttaatttgattttttttaatgataacacattttgtgactgtaggagagaaaaagatgccctctgcttaaaggaaagccagggtaaactgaataccctacagctttccacaaatacatgtcttatcatttattaccatactatttcatgctttactaataaaaatactcaccaatttaccagtaccttgaaaagaggatctttccaagaaaattaatataattatcaaacaacaaataacaaacctgacctttgtgggtggcaaatggtaaatataaatgtttaaagtttaagcatcaaaataatgctgttatcagatattgatgaacttattgaacaggtctgactgaatgtaagacctgtttttagcaccaataaaaaaaaatattgagatttctgttctgcaaacttctaactgtgctccctgacagcatcttttgggtaaaggaacaaatgtgctccaaggagtaactgttaggtacctgatttacaatataattagattgccaaaaaaaaaaaaatcaatccaagtattttctcctttagctagcattattaaaacttttaactttcagagaagagtttcttcttccttaaagttttaattctgaggtagacatcatgcaaacaaacatcaagtgcagccaacttccattgacaaacatgattattaataataaattaataatcagaaatgcccgttagaaaaagggacttgaaagtttaggaagcaatgttgtttagcagtattctggcttgagtttccaaattccttcaccaccagaagttctatggaaagtgcacagatttctcaatagttctcggaagacacaagactgtgatgcagataacttggattcaaactcctgcagtatctccctggtgctggcctggccatcagtgtg

SEQ ID NO: 308530 - DNA, 1000 bp, Homo Sapiens
ctaccaggtggacagagagagaaagtgtttccaggtccatatattcttgacaaactaccataatcaacgctgccttcccagctggactgaggttggtaagttggttttgaaggctaaaacaaaaattttagatgttgaaaaaactaccttacatacaaaggagacttaacaacctaaaccattgtaaaaaataaccaactcttgtgaaatctgccatttgaagtaaaactgccatttgaagaagactctaccccctctctcgatccgcagggtgactggctcccacccagcccaggctatgaagacacatgtgcctcgtctgcgctccagagagcatctactgtcaccaagagttaaaacaataaaacatcatatctttaaaagcaacataacaaaagatacgggagctgccaaatggggcccggaggaacactgacaagtaaggtgtcagtctgtccctaagaacaccaccattcccacagacagctggactgggtgggttcaggttgactggacggagctgagtggagcaggaagctggcgggcttcgggagcttgtctcgtcccgcttaccacgggtgctagcttatgacagtccagagcgggggtcttgagactctgttttctgggctcttctacgcaaacctggaaatgggcctttccacatattagttacaaccacgaaaacagtgagccaaaaacaaaacaacagctgcattttgatagcttatctaacagattttttttttgtttgtttgtttttaagacagagtctcgttctgtcaccaggctggagtgcagtggtgcagtcttagctcactgcaacctccaactccctggttcaagcaattctcctgcctcagcttcccgagtagctgggattacaggcatgtgccaccacacccggctaatttttgtatttttagtagagacagggtttcaccatgttggccaggatggtctcgatctgctgaccttgtgatccacccgcctcggcctc

SEQ ID NO: 308531 - DNA, 1000 bp, Homo Sapiens
tcatcattgtatccctctgcttaggacaggcatgggattataaatacttgctgagtgaatgaacaagtccctcaatatgcagataggacaagactgagatagatgacgccacttacttgtcacactgcaaatcaagaactggggtcttttgattctacctcagctctttccattaaacttccccgattcctgtgttcccttctgtcttagtggagatctcaaaactaattctagattccttggctgccaaggtcagtgactcatcgtactactgaaacccagctggaggccccttggtgtttggtatcaccaacagaatatcctttatgagtgtcaccactggcatcaggaggttctggggaaagtgaaacccttcagcatcctcgtcctgatggttggccacaagagtgacctgttggtgagcactgggtgacaccacagggaaagaagctggctgcctctttggggcattgaaacttcagccaagagcaacagtaacattagcacagcctctgaggagctcactcagtgtatctgtgagactgtgaagtgggggggacatgggatctaactcagggtgggagggaattttgaaatgcagggtctcatcctgggccaagcttcaggacgcagaggaccaaagcaaatcaaggtggctgtgcctgtgctagtgacccttgggtaggacagccatcctccctagagcccacagaactctcacaatccacaagggccatgctgggcccaggacaggatgatgctaggtgccactgaaggacatgacccagaggtctggaaggcgcctggtttcttctgcatgatggtgaaaacaccaggatcaaagataacagcaactaagaagagatgggcacctgcacagacatgcctatcctgaggacaggggcctactcccatcctttctcagggacagggacaaacacagctttctccaggagttccagaagagcaggtcaaaaagggtttttaggccgggcgcggt

SEQ ID NO: 308532 - DNA, 1000 bp, Homo Sapiens
ctatatccctcgatcacattcagatcctcttcatgttttattttcagtaagtgtattcttggtctttctattgttttctctagttgaaatagcagtgcctagccaatcaggaacctgtacctcttcacaaccagaaaaaagtcacaaaaacaaaagttaaggacaactttttattgctaccagaggcttttatcatcagtacacagttctgactgcaatacctttttcagactgcaaagggagctcaggatccagaagtcattaaaagaaacataaggctggggaggcagggggagtaagttctattagaaaatcctaatagcttaacaaaactagggtactaaattcagttataacatgttacagacttaaatcatagagctgccccaacatctagacagtctctcctactgattataaatgagtgaaaactatcagttagaaaaatctaatttaagttgttaatacatgtttctttggtgagcacctggatatatttatcacaaattcttttatacaaatgtcgaaaatgctttcaacaaacctaagtgtcctaattacatgccacttttaagcatcactttaaggtaaacaaaaatgaaaaccataattttaaattaaaatttgaaatgagacacaaaatcaacctggtaatatgagaactttttcttttgccatctctgattaatatgggacaattccaaagtacccttttcagactaattggaacttgagtcatggctgtcacactgaaataatttgttcattcaactgcagtgaaaatcaatatagatcaacatgcataaagttcagtaactattaaatggagaagcaagcaaaagcaacaggaaaattaaatcaggatgctgagggggaacaggattgctggccatgaattttaattgaatttttgacggggcaagctacgttacattatggcagaaaaaaagtgcaactgacatactacaaagagattttttaagtttaaaaaaagtttgga

SEQ ID NO: 308533 - DNA, 1000 bp, Homo Sapiens
cacatatataatatgcaatatgttggatagtatatcctttgtaagtacttaaattttaaaaatttagatttcagattaaagtcttgcaaaagggccagactaggtgcctcatgactataatcccagcaatttggaaggctgaggcgggaggattgtttgagcccaggagttcgagaccagcctgggcaacatagtgagacttcatctccacaaaaaattagccagtgtggttatgctagtctatagtctcagctactcaggaggctgaagtgggaagaccacttatgcccaggaaaccaaggctgcagtgagccatgatcataccactgcactgcacttcagcctgggagacagaacaagacagaccctgtcgccccacacctcccctatacccccggaaaaaaaaaagtgcaaaaaaaaaaaaaactagggtgagagccatgaaatagctgaaggactgtctgaagaggggcagaagggagtgttttggggtgacagaaacattctattgcttttttgggtggttactcagatttctacaactcgttagaaggaaacactttatcatgttaattatacctcaatattgtaaatgtgcatggaagaaatctcttgttttcaagagtttttcttttgggttcacctaactatgtacctgactgctgcataaagtaatccatggcacttaataatttgactaatcagattacttctgttcttcattgttagctccagtatttttcttacagctaccttggattttgatgcctaagaacattctctgacaggttggaaataaaattaaataaaggattgattttcaaataatgtggtaagtgaactgaataaatgcatttttatgttcgtactaccattatgctataaaaaccttaataaccagctgaatctctttcttgcaaatagggcatgaagccccagccttctttagtcttctggcacagtgaaaacaagtgacaagatggcccgtccttccatgaat

SEQ ID NO: 308534 - DNA, 1000 bp, Homo Sapiens
gaggctgaggtaggagaattgctggaacccaggagacggaggttgcagtgagctgagatcatgccactacacttcagcctgggagatagagcaagactccgtctcaaaaataaatgaataaaaataaatacatgtttgactaaataaacatcaaatctctacttcaccaaccaagtctccactttaccaattactagctgtgtgactttggactagttaattccctgggcctcaagttttccatcagtaaagtggaaatactaatatattctatgtgtgttttaaagtcaaagagtgtctatgctgggtgcggcagctcacgcctgtaattccagcactttgggaggtcgagctgggtggatcacctgaggtcaggagttcaagaccagcctggccaacatggtaaaaccccatctttactaaaaaaatacaaaaaaaaaaaaaattagccgggcgtggtggtgcacacctgtaatcccagctactcgggaggctgaggcaggagaattacttgaacgtgggagccgaaggttgcagtgagccgagatggtgccactgcactccagcctgggagacagagtgagactctgtctcaaaaataaaataaaataaaataaaataaaataaaataaaataaaataaaataaaataaaataaaaaagttaaagagtgtcttagttcttattatcctcagagcctgggagaaagcagttgctcaacaaatgtgtgaatgaatgaatgagtgagtgagtgaatgaatggatgaaatcctgtcccattctactttagggttcctggcccagagctggctgtgacaaaccaaccccgaggaagggatacccaggagctcactcaccaaggagcttcatgaactcatcataattcttctcactctccatctcgaacttgccggtgaaagccatgctgctgggaggctggaggccagagagcagagggatgaggagaatgggtggtgctgaggggtctgctatcccagctt

SEQ ID NO: 308535 - DNA, 1000 bp, Homo Sapiens
gaggcagagtgtattgagaacatgagagaaaacaaagttgggggcagagctcagcctggccgcaggagctgcagaatgaagggcgggctcttccattggtggccctcaagggtagaagggagcaggggtccagggcaggggcttcactctgttctgggagaggccaggcctgaaggagctgagctcactcacaactcccccacgcataccccctcgatctgtgtgaaatgagctcactaagaaggcacccctgttcccatggagacaagcccagagctcacaaaaactgcaggctcagcccagcatgggcactgcctccaccaccccttgccccactggggaacccagaactagggctgggaaagagaagtgggtggtcctcggcccccagccttgcgaagcttccatctgaatcctgccacttgtgtctgtattctctcaccccccacaaagcctggtttggtcgggggctgtatcatatcacctccaaaagtgtcagaggcgatgggaagtctccagctacctgacttaacamcctcactgtatgaatgtggaaactgagacctacagacacacatgcagttggtctgttagaatccaggtctcaagtcccagattttcctcaaaattctaagatctcctctgtcccttcccactgcactgctatgcacctgccccagctcctgccatgctcctactgtccccaggcaatcctgagcctaagccagcccagcccagcccaggcccaggcatcccttggcctcctgcagcagctcattccaacccttccctcaccaggtcaccctcacagccatctaacgccacctgtcctttggcaatagcccatttcctttctctttcttcccaggggactgtcttgtcacttacaaggcctttcttcaaagcaccagcctatcctctcaatcctcacagattgttacagctagaaaagccctccttgtataaatgataaaactgaggcccaaagagaatgtgagtg

SEQ ID NO: 308536 - DNA, 1000 bp, Homo Sapiens
tttttttttttttttttaaagtcactgaattttattgtatgtaaattatacctcagtaaagctgattaaaacataactgactatgtatcaaaatatgaagaaatacatttttcccacttgcaagtaataattataatctttcagtttgggttcacaatatcttttccccctttgtaggatgatagtctcaataatcacatacattaaaagcccataatcaagtttttcctatggaaacaatgtcctctatgatccttaccaagagtagtgagtccctctgagatagatgtgagaacatacatgagtacaggaggctctaagttgatgatgaagctcatatggtcctgagtgagacattccaggagtggataataagactggctcagtttccggtattgtagcaagtcactgtgggacactgacagcagcattttgacaaaagcctggagtacattgtcaaaatggttgtccccatacaacttgaagacgccaaagctgacataatttccacacaaggcagacttgagagctgaatagcagatggagatgcccttgagtttcattggataaatctgatcttttgagaggctcccaagggacaggatctgattaccataagtgcaaaccattttactagcttctctgaagagaagaattccattaggagatgatacatcaaaattcaaacgctgggatctgttttgcataagttctgccataagtttcaagatgggagttgtacatgttggctctccataccaccgttcaacagcattctgaagaaggggaaggtacgttgggtacatccagtcaaacagcatggtgtagctggtctttgtgttcagtgcaaaggcaatccctcgaagatctcttgccagcccgatcaacatacgctttacatcttcttgtttaaagttgttgttgaatatttgtaatactgtttcaaaagcaactgtaagaggcagcatgaaattctcaaattcatcctcatcttcaccca

SEQ ID NO: 308537 - DNA, 1000 bp, Homo Sapiens
aagccttcccgcttctttaattggtgtaacagacatgacgttgtatacagagcacactcaggcccaatgatgcggggacagcagggacggatggggagatggggacactgctcacacatggcccagagaaacagacggcacacggacagaccagacgggaggggctgagacgtgaaggctgtgatggggtgggcagtgggactcagaccgagccagggaggggtggggggtctctgctgaatccctctttagaaatcaaagagaaggcaggtggtggggcgtgggggtgtggtgggagtgggactaaggcttctattctaacaggcctggggggtggcagtcagcaaggcctgcctcaccctttggttatgactggtcaggcctgagccctgcagctcagcacccaactctgtaaacatttttggtatttttaaaggacgctgccctccctctcttagtttcagaaagactggtacttcctcaagaggagaatgtgccaaaaggaatctgaagggaggtggaaagcagacctggatacagaagagacttcccatgggggggcaggctgcccaccttgccatctatggctgagggccgctgggagagccccaggggactattgctgttgtccttggcatggctggcggctgggcaggcaggcggggagtgaggagccgtgggggagctgcccccctggggagaggctgagcccactgcccacagggcctcccggcctttattgcaggagggcccgagactcttccaggtgcttctctggatggctggtctcccaggcagcaggcaagacaggataaggtggggccaagagaggaggaggcactggccacagggcccctgacaggggctgtgattgtcgggccaagcaacttcctgctgggagcaggggggtcagatattgcactttcactgcaacagttacatgaaaacttggtccataaaataatcgttgctttatacataatgcctgaaacaacaaaaa

SEQ ID NO: 308538 - DNA, 1000 bp, Homo Sapiens
aacaatcagaaatgctttaatcacctcacaaataatgaagcaggcacaaatttacaagcctgagtttcaagaaaatgaagcaaggtgatgataaagatatttcattggggctctgctattagctgtttttattttattgtagatatttaaaatagttacattttcaattttagaggtctgcatttttccagttccaattcaattagctacacggagatattcatattgccttgactgttttcacaatgcttattttattaatgatctcaaaaaacatgtagtgcatctttaaaagtctcctccttagagtcttgtcaaatgtgagattagccaaagagcctcatcttgagaattgaaagtaagtttccagacctcaggtgcgacattctgactgccttgaagatacaatggggtggtgaacaactggacatttggggcttcctgaaggtgctcaggtggactatttctggaacccactgaaggtttgagtttctgtaagaagactagttctactgttgacacatttttcttttctggaacaacaacacacctgaattcacttaaagcatggcatttgatcacatcaaattgtgcacccggaggaggtatgtttcgagatcgaatgcgtggataaaaaacacagtcttccttcaccagtgcaatgtgggtgttcagaaggactagcgactggcactggtcatggccagagtcacccatgactttcactgttgtgtagagcagtaactgaacttctgccagggaagggacattgacttccatatttccatgaagaaagtaaatcatgtcaaccaaggtagtctggaatttggatgacacctgaactccatttggcaaaactaaatcagggatttctgttttccaatcaagagaaagctgaaccagatcttgctggagcaagggatgattagcgcaggcagcggcatcaggctctggcatcaggacacacaggaggtcacgacacagctcatattttagttta

SEQ ID NO: 308539 - DNA, 1000 bp, Homo Sapiens
ttttttttttgagacgggagtctcactgtcacccaggctggtaggtgggaatcttaacatgttactttcttaggagggaaaagtgacaattgtcggcaacttactcctttcctagacttgatgataaattaaaaaaagaaaaaaagcaagcaaacaaggtccctccagtagtcctcttcactccccacaaaccaaaccaaacatcaatcccccaattttttaacaatgaaagttaattgaaggaatgtatgaatggacagcaaaatttctatcgataattactcaacattttcaaaacaagaagcattttacaactactatcatatatgtttatcgcatgattttagaaagttctgttggggccatcaatacaccatcctaaaaaataagcaggttcaattttcatttgtttccatgctccaaactttgtaaaaaaaaattccaatcaaaagaattaaaggcaaattttttagtctaccgggtaactattatagtctattgctttaaatctttcctcaaagagaactaaagcctaaactgaccttctgatttgactttttggttctagatgtttatatcatgaactccccaaaaggacaaaattcgcccttcagcacacacacctcaggtgtttttatgtgcttcccctagtgactagaataaacatctacacaacagcccggaacgtgttgcatggggcttttgttttctttccagggtttcacacgaactcacttctactaactcacttctacaattccctatgtagggtaaactttggaaatgaaactcactgacaaacgttccagtacatttaagctggggatatcgtattctttgggatgtttgtatttctccgaccccaaatatattaataaaaacttttttctgagccctcttcggtgggggatagagtgagaagagaaatgggagagggcctgttaattttcaggtcatcttttaagttacagaacagtatatactgactagttatcttaaa

SEQ ID NO: 308540 - DNA, 1000 bp, Homo Sapiens
gatcatgtcacttccctgcctcccaggataataagagcaaaaatcagtattcaacacgatgtcctgcaagtccctccacagtatgggcgcttgtcacctgtcagactccatgtctaatggctgtctcttttgcatactctgctccagccatcctggcctctgctcgccctaaaacatgccgggcacagtccacctcggggtctatgcacttgttcttcccttcacctggaatgcttttcttcaaaaaatccccatggcttgctttcttacttccttcaggcctgaattgaaatttcactttccctgtgaagaggccttgattaccttctttaaatacccccctctcccagcctcaaagtttcataaccatcagttaccctgcttgatttttcccacagtcttattaccagttgaccaaagatatttacttacttggttttttcacttgtctatctctccttactgaaatgtaagttccatgatggcagggatttttgtctgtctggttcaattctgaattctcattgcctaaactgtgtccgacatgtagtgtgtgcataataaatacatattcacagagtgactgaatgaatggatggatctctcccttcaaaatgatattcagattccctctatagtcttcattctaactaccagcccccattctggacttaccccttgaggtctgtgtttctgtgatgttctatgcactgggtatccctctaacaccagaaccaagatgaaaaaacagatttcctgatcctcagcctaggttctgtccactctatgatctacgacgtgcatattttcaatggtctgttagtggtgcctaaccacgaaggcaggcttagccagacattctgatcgtgcccaagagtcctatttagaaggtcatatgaacaggctctcttgcccatacatacaggctttaaaaagttgaatgatgttcttgttagactctgtggtttaagaaacacagtgcaaaagggagtccattatt

SEQ ID NO: 308541 - DNA, 1000 bp, Homo Sapiens; identical to SEQ ID NO: 119961

SEQ ID NO: 308542 - DNA, 1000 bp, Homo Sapiens
tcacatatggtccaaactctttgagtgcttttaaaacatctgacccatgctttaggagcagggcttacgcaataatgaagatgttctttgttttatttgtttgtttgtttcttggagacagagtctcactctgtcacccaggctggagtgcagtggtacaatctcagctcactgcaacctctgcctcctgggttcaagtgattcccctgcttcagcctcccaagtagctggtctgccaccacacccagctaatttttgtatatttagtggagatggggtttcaccatgttggccaggctcaaactcctgacctcaggtgacccacctgcctcggcctaccaccgtgagccaccgcgcctagcctgttttttgttttttgtttttttgagatggagtctcactccgtcactcgggctggaatgcagtggcttgatcttagctcactgcaacctccgcctccctggtttaagtgattctcctgcctcagcctcctgagcagctgggattacaggcgcctgccatctcgcccagctaatttttatatttttaatagagacagggtttcaccatgctgtccaggctggtcttaaactcctgaccttaagtgatctacctgcctcagcctcccaaagtgttgggattactggcgcaagccaccgtgccgaccctaaagtgttcttgtacacagggtattgtcttacactacagggaacctggattggagttgaaggcagatttttttcagaggttggggtggaagggtgagaatgtgagtgttcaacttgagaggagaaagggtaggggtggaaggaaacatcacctgtatagggattaatactttgctttttaaagttattttaacctgtggtctgtttctgtgtccaaataataactgcagtaataacaaatatttgagaggttagttagacctgagcaaaagcctcgttttattaaacaatggggcctggtgattgtcccactgtctgtcatcagggatatc

SEQ ID NO: 308543 - DNA, 1000 bp, Homo Sapiens
ctgtaatcccagcactttgggaggccgaggtgggtggatcatgaggtcaggagatcaagaccaacctggctaacatggtgaaaccccgtctctactaaaaatacaaaaaaattagccgggcgtgatggcgggcgcctgtagttccagctactcgggaggctgaggcaggagaatggcgtgaacccgggaggcagagcttgcagtgagccgagatggcgccactgcactccaaactgggagacagagtgagactccatctcaaaaaaaaaaaaaaaaaaaaaaaaaaaaatcagaaaggacaagaaaaacagttgactgtgttaggatgcaaggctgaatctctgcacattctatttcctctgaggcagtgcttattttccaaggaagaatttttgggtgtgctatactggaggtctcccttctcagggagagtcatcacttgctccaaaacgctggacctcagctcaagggcaccactgcaggaggaataaaaaggtggagccacgcaacaactcgtctgtgttccgcactaggctctttttgagggacttccagaaatgacagcatgtgtgcagagaacagaaagcaaagttacactgttacagaaggcacagaaggaaaaccttcggctactgctatcagtggaatttctctgtagccagactgaggtctggtggcatttgagatataatatagatatagacctacaaatacagatctccaggctgttcattcaacaagtctttattgagcacctactctgtgcccagcactgcactaggtgccatgagaatacaagagtagtataagatgttatccgccctccaggagcttacaaaactagaggcagaaataagatgtacatgtgactcaggcagcatgtgacacacacaaagtgggcagctctgagacaatggtggtcaagtgaccactgaggcccagagccgttggaacagtctcttagaacagggtggaggacttaaaacttggatgaacaggg

SEQ ID NO: 308544 - DNA, 1000 bp, Homo Sapiens
actgggtcaacagctcttgtgttactctaccttgatgagatattttacctttgtgaaattttctttatcatttgtaaggctatttctagatccgtgaactgcaagttatatttttatgcatttttccccaaggaattggaaaaagtctcaatatcaatattctattctatatattcttttaaaaatcaatgtctgaagagggaagttgtaatgtaggtgtagagaatgtccttctctggctcagagtattaggaagttggactaggcattctgtagggcccagggctcctcttgactattgtagcctgagtcttcataccttccctgaacactctccattgatgactatatagccctttatttatcctttccctcatcagcatgttgaggtgtcacatttcctcagcagtcttgctggcgtgggtgtcatgtgttgtggggaggccggggtggggtgggggtgtgtgcggggtggtcctttttctgctgtccaaggtcctgaagatgtgtttctgtgtttcctgaaagtttctcagtttcccaaatgcaagtttgagattttatttgtttttgaagaaattaaagagatgataggtgatctgctaatgacttattggaagtcataggagaatggagggaactacccaggtgatggtgttagagtttgattttctgttcttttttttttttttttttttttttgagacagagccttgttctgttgcccagactcgaatgcagtggtgcagtggcgaattctcagctcactgcaatctctgccgcctcccgcgttcaagtaattctaatgcctcagcctcccaagtagctaggactataggcatgcaccaacatgcccagctaacgttttgtatttgtatttgtatggggttttgccatgttgcctgggctggtctcgaactcctgagttcaggcaatctgcctgcctcggccttccaaagtgctaggattacaggcatgagccactacacctggcccagat

SEQ ID NO: 308545 - DNA, 1000 bp, Homo Sapiens
cacctaataccactacccaccatttgcattttactttccaaacccatctccccagtctaactcttaagaaaaatggccacagcagctatcatccattaactcccaagtagcttgttcttccccccaagcctgagatctgctcttttcctacttctgaaaaatggctccctggtccctgattagtcaaatcatcatttttcaagatctaccctcaagtgaccctgtcaaataatcaggccctggataatctttcccttttttgagtatgtggcaacttagaatctagagtacgacatattagacaattgatcaaattaattatctattcatgcttacttttaagtcttctctaaccagactattaatgaaggcagatcttgtctcttcccttcttatataccccacagtaccgtacattttggctagatgatttaataatttttgagagaatcaataccctggtccctggccacagggcagagcacctcctcattcatgagattaacttggacaatgagacccaaattctggctaggcgtcgtggctcacgtctataatcccagcaccccagcactttgggaggtcgaggtaggaagactgcctgaggtcaggagttcaggaccagccttaagcaacatagcaagacactgtctctactaaaaattaaaaaaaaaaaaattagttgagtgtggcggcacatgcctgtagtcccagctactcaggaggctgaggtggaaggattgcttgagcccaggaggttgagggtacagtgcactctagcctgggcaacacagcaagaccctgtctcagaaaagagaaaaaaaaagaagttgggcacagtggctcatccctataatcccagcactttaggaagtcaaggtaggtgaattacttgaggtcaagagttcgagaccagcctgaccaacatggtaaaaccctgtctctattaaaaacactaaaattagctgggcctggtggtgtgtgcctgtaatcccagcta

SEQ ID NO: 308546 - DNA, 1000 bp, Homo Sapiens
ttcctcccttatctgtagaatgtggataagatgaccaagaacacatcctagagggcacgatagccaggataggactgttctaggaacacacacgaggcgtgttaaagaagactcagaaagatgaaaaccaggaaagagccctgtggccgagatctactctgtatcctagagtattttatgtactttttgaagcattttttcaccagtacttaatagcaactgttagatcaagcattagctccagaggagtaaaaatcagattccacagatttgtactaatgtatctaacacaggtggtaatggcttttaaaaaaaaaaaatgaaaaacagtccaggccgggcgcggtggctcacgcctgtaatcccagcgctttgggaggccgtggcgggcagatcacgaggtcaggagttccagaccagcctggccaacatggtgaaaccaagtctctactaaaaatacaaaaaaattagccaggcatggtggcaggtgcctggaatcccagctactcagaagactgaggcagaagaatcccttgaacccaggaggcagagattgcagtaagccaagactgcaccactgcattctagcccaggcaacggagcgagactccgtctcaaaaaagtccaaacacactaggggttaaataagctgcttctctttccactgtttattattaatgtacaaaatatacaaaaccaaaaaaaaaaatactcatcctcaaatccattttggctctaacccaagaccctgcacaaaacccaaccaatccactgttttcatagaaaacaactgatgccaaagtgaaggagagaactgggaaagggcaaaatcatcttgttgaatccacccaggaaggcgcctggtggggattcagaggtggttgacagggtgaagtacctggaagcctccttcacgctggcaaggttccaggtgggagcagggagtgagctgactcccaaaggcagtgcatgtagtgtgactttcaggcccagcacgccg

SEQ ID NO: 308547 - DNA, 1000 bp, Homo Sapiens
gtcagagccagaacctgacttaaacctgtgttccaagccctgatccttgaccttggagtggaggcagcactgaagactgctacgcccaagagaaggaggtggaggcagccaagaatctcaggagccagcttcctctcctcgtttctctccttccttcctttccatctcatgctgtgtaaagctgctgtgtaatttaacttgtaaataataaagtttaactgactatatgagatagaatttcacatatcactttctctagatcccaaatgttcccacaagctttattccaaaaataattttatttaataggtattaaataatgtatagaaggaaaaggagctggtgtcaggttctgtttacgtccttctcttaccctagctcttctcgtgttttgcctatttttttgggcattttcttagcatggggatcttctagctccttggccttataataatggggagccacctccagaagccaactgctctcaatctccagtacctaggagagagaaaagatcaatggagttcccttctttccaacatagatcttttgttgttgttatttttttttcttaaattgaaacagagtcttgctctattgcccaggctggactgcagtggcgtatcatggctcaaagcagtcctactgcctcagcctcccaagtagctgagactacaggcacacatcacagtgcaccattaattttttgtatagttggggtctcactatgttgcctgggctgatcttggcctcccaaagtgctaggatcctgccttggcctcccaaagtgctgggatggtttacaaaaatgagccactatgcccagccccaacctagatccttatgtgtatggtcaaaagttatctttcctctttgactgcagggctaggtgtaaaggtgcctggctctattattatatacccaaagggcagatacacctctgtatgttattcaagataccaaataagctattcccaagaaaagtctagaacaacatgcc

SEQ ID NO: 308548 - DNA, 1000 bp, Homo Sapiens
taaaaaaaggataactaggcgggattgctaccttatggtcccattctaaaacaatctgtaccatctactacctcatacttttaagttcacaatgcaagtctcaaagctaccctgaaaacaataattccttttgccatgttttcaggaattctaggaactagtattattcccaacattccttctattttagcatgcttttctgactataatacactgttggggggaaaaattaactctaaaactcttgacagtatataagtaacttgcttttctcccattctagaaagcctattgtatgcaagaaagcctattgtatgcaagggaagaagctacattctagcattcattttctttctaatagagccaggatcttgctttgtcacccaggctggaatgcagtggtgtgatcatggctcactacagccttagactcctgagctcaagtgatcctcccaccttagcctcccaagtagctaggactataggcaagagtcaccatacctgagtctagcattcattttttttctctttttttttgaaacagtctcactctgtcacctaggctagagtgcagtggtgcgatcttggctcactgcaacctctgcttcccaggttcaagtaattctcctgcctcagcctcccaagtagctgggactactacttggcatgtttcaccctgcctggctaatttttgtatttttggtagagacaaggtttcgtcatgttggccaggctggtcttgaactcctgacctcagatgatctgcctgccttggcctcccaaagtgctgggattacaggcatgagccactgtgccgggccaagcattaatttccagttgcttctgttttattagtacttacttacagcaatttatttgggtagcaaagttgaaaacctccagcccatccctcagtcttggtcaggaaaatattctagacaacaggctcaaacagtctgatttaattaggaagttaaataagttgaggtggggtggagtg

SEQ ID NO: 308549 - DNA, 1000 bp, Homo Sapiens
taactccaggtgtttctgcttgaaagacagctcagagatttgggttatcaggctcactgccgtggcttccatcgctcattattctgggatctggcctctaaactctaacctatcagtacacaacttaaatcatagtgcacagtggtttgacctgtgtaagttttagcaggactattagattcgggacctaggccccaagggcctattaattcaacttcacattgatttatctttattgtgatcctcattatccaattggctcattttgtgaatatcatcaaccaaaaccccagggtttttatttcacatgaatggccatcaagatgggtctgccttgtcccatccctgcaactgacttttaattttctttttgagacagggtcttgctctgtcacccaggctggagtgaagtgatgcaatcatggctcgctgcagcctcaacctcctgggctcaagttatcctcccaccttggcctcctgagttgctggtgcacaccactaagcccagctagttttatatatatatgtataaatgggggccagagtgtgctatgttgcctaggctggttccaaactcctaggctcaagaaatcctcctacctcagctttccatagtgttgagattacagggcatgagccaccccactggccgattttttctttccaaccaaatttgaaccctttaattgttctcttggtggttgcagctcatccttccaagcctctgagataactgaggctcttgattctggtttctggttctggtttccattccaacaacctatcccctacccccagtggggcatttgcacacttgatcagcataacccagggattctcccctgggatttccagaccctggggagccagatgggttctagaatttgggcaagaaaaagaaattacaccttttactaacctctaatagaagtttagcatttcctccaattatgaatatgggtaaaaccaccagtagtattagcagtacctgtgacttgtc

SEQ ID NO: 308550 - DNA, 1000 bp, Homo Sapiens
tttaggtcccatctgctcgctcgctctcccactaggatgtaggctctcagggtccaagtggcccccaggctaatacagtgcctggctctgacattcctgttgaacgagtgaatgtttcatcttccccactcctagcatttatcatcttccagaagaaaagagttttaaaacaaaagttgagaataaagaaaagcaggagcttcccaaacatttccaaagctgcctagaaaaaggatttgaaaaggtgccacccatagagagagctatgggtgggaccacttctcacaatctccaagagagatggctgcagggagaattcccacagattcccagaaataacatttccaaacaatggctccttctgtagtcgtctttatttagagcagaattcagactcagctggtatcccccagggcaaccccaggatggggaagggctggtctgtccccacccacttctccaggatcctcccagcccccaggctggctttccctccaactgtcagctgcttagctgctcatctggggattggagctggagcatctgtcaaggttgtctccttgacaaacagcttcctctttggaaatggcttcactcaggtcctgcaggtcatcgagcaggacagagagggaccctgggaaggaagacagcagatgagcaccagacaagggaaggtgctcgtggttacagaggaaacagggctggcacaggaaatgaggaatgggagagaggaggctctttggtccaagctgggcatcgctaaaagaggctaagggcctcgaaggaccgcagagaacaacactcatcatgccagagtctgaagaggagattcctgaagtgcgcgcatttgtcccttgtccctttgtgcttggcccaagaccttttatggactccctggtgggcactgctgctgctacaggtgcagatgctgaacactctggaggcctggggctggacaccacagatttcttcttatccagtagggaaggaagaactgtca

SEQ ID NO: 308551 - DNA, 1000 bp, Homo Sapiens
tccccatcagcgtacttggactgcagcagccccaggtaggcctcccacgtgttgcccacagtcttgctgcaggtgaagcagcgcacacaactcctgagctcaagtggtcctcctgtgtcagcttcccaaagtgctggcatgagccactacgcctggcctgatatatatatatatgttttttttttttgagacggaatttcactcgttgcccaggctggagtgcaatggtgtgatctcagctcaccacaacctctgcctcctgggttcaagcgattctcctgcctcagcctcttgagtagctgggattacaggcatgtgccaccatgtccggctaatatttttgtatttttagtagagacggggtttctccatgttggtcaggctggtcttgaactcccgacctcaggtgatctgcccgcttcggcctcccaaagtgctgggattacaggcgcgagccaccacaccaggcccgcgtgatgtatattttaagacctcttttgctggtggaggacaggctttgtgtgagggggagggataaacagtgggagcaagggggccaattagaagggtgttggggaggctcaggggagatggtggctcaggatgatgggctgggtttggacagggtgtggaggggcttgcaggtggatggtggaggagtgtaacgaaggtttctgcgtgagccctggagggaacagatgagatcacgccattgcataataaggtgttccttactgtggggtagcggaccaggcagggaacaacctgggaggaatcaaattttattttggacatgttacttctgaaaggctaacagacttccaggcagaaaggtccttgagggaaacattctaggggtctctctgggaggcttagatcaaggagctgagaccaaaaggagaatgggagggaggagacgagtacaatagagttggagccaaggtcctagaggcggataggtggattcctgagggaggaggaaggggctgaggttgctgga

SEQ ID NO: 308552 - DNA, 1000 bp, Homo Sapiens
  misc_feature (5)..(5): n is a, c, g, or t
  misc_feature (27)..(27): n is a, c, g, or t
  misc_feature (31)..(31): n is a, c, g, or t
  misc_feature (57)..(57): n is a, c, g, or t
  misc_feature (60)..(60): n is a, c, g, or t
  misc_feature (65)..(66): n is a, c, g, or t
  misc_feature (69)..(69): n is a, c, g, or t
  misc_feature (77)..(77): n is a, c, g, or t
  misc_feature (103)..(103): n is a, c, g, or t
  misc_feature (107)..(107): n is a, c, g, or t
  misc_feature (180)..(180): n is a, c, g, or t
ggggnttaagggggccaaggattaggnaaanaaggttaaggggaacccccatggaanggnaggannaanaccaaccnaaggaaaacccatttagtttagcaancatncaaaggcttatagaaacccacaacttttcaaaataaaaattcaggagcaaggtggttttatgggtatattagnatttgagtcttttcaaatcaggacttcttctggaaaacccaggctgtctgactgccagaactatctagaaagaatcccaaatgcccaacagtttgagtggctacagaaacgataacatttaacacagaagattttatgtaaccataaccagaaacctgtgttgatacctggaagagtctggaaaaaacaccaagtagaaaatcagagcagaagtttgcaaagaagaattatggagctattcagagaatgatgatcaaagttaacagactgtatgtgtgcatctaacactgcgtggagaaagaatctttatttttttaattaattttcattctaaagacagcttaataattatgcttattataaggcctttacataagaaacaaggaaaattaaatggagattccaagacttgccatctttcaaataaggcacagtgagaagggtcaagtttctccactactataattctctgaataggtaagtttcctacaaaaaaaaaaaacccatatacttttctgctcatcaaccctcttatttcataaacagacttttaatagccagtcatttgttttgttcatgtcagggacaatcaatagtttgattaactattcaaactacttcttgattggccgggcatgatggcctgcgcctgtagtcccagctactcctgtggctgaggcacaagaattgcctgaatccaggaggcagaggttgcagtgagccgaggtcttgccactgcactctagcttaggcaacagagtgaaattctgtctcaaaaacaaacaaaaacaaagcacctcctgattaagccttctcattt

SEQ ID NO: 308553 - DNA, 1000 bp, Homo Sapiens
gatcttgtggtttccttcaagaaaatcccaagcatgtagattttttcctctcctcacattgtggcttgagaaaattgagatggagcctgtaaacataattttagagtaatttaagtagtgaaccaaaaccaagaacagaggcatgctttccttgatttacatgagtgtcaaagtatttctcatgcaaacattacttcatccaaattcacttattaactaaaaagatggctgagcagagacaatggttaggaaaaaacactagtggaaaattaaatgctctttgatttacttttttcccttttttatttgaagtatcatcagttgcaaaagcaaactaaaaattcctctacttcttccatggaatcaaataaaattaaatctggactataacatataaatagaacataaccctaaagtaagattcagaacacaactatttgcttaaaaaatgtcgtttgctttcccttctgattgctaaataagaatgcatttcaaagcctttggaacggtaaaacaggctttctgaagatcgttagaatttccaagttgagaaggtgttttctcaaaccgattaggaagcaatgaaagcctcaacctccctgactacggtaaaatgaggcatctcccaaatctatgaagagcccgttagagtagtgcttcaggttcctctcgaaaaagctgggcgagagttcccactaaggcgaagatcattcacaggtgaagggagacagagcaggcgatgggcaaattggcagagaatgctgccctgggattttgcccactgttttagcctcagagctctccacacaaaccctggaagcgtctaatgctgggacagctcacagtgggacactagaacaaagtctgcctttaaatgtgggaattattcctaaaatgtctttgttgacagctggtgaggcacaaaataaacacaggcctatttgcaagtaagcgagaattagcataatcagcagctgcagccttacccacggacacagaa

SEQ ID NO: 308554 - DNA, 1000 bp, Homo Sapiens
agcatgatctctagcattccgtgtggacttagttcttagcagaaacttcaagtttcctatttcttagataactggtaggaataactttcatctgatcccactgatgattcactgaccaggaggccacttctaacaacctactgaagtgtgcacattattttgacagcctcaaatgggaggctacccccttgccaggaatacctcttctgaaggaccctgactggttaagctacatcaaccagagtccttcctagggattttcgatctagtagtctctctgggtagcaaagctgtgacgtaaaactcacaggcgcagtggctcatgcctgcaatcccagcacttcgggaggccaagactggaggatcacctgaggtcaggaatttgagaccagcctggccaacatggtgaaaccccgtctctactaacaatacaaaaatcaaccaggtgtggtggcgcgtgcctgtaatcccagctactcgaaaggctgaggcagaattgcttgaacccaggagacggaggttgcagtgagctgagatcgtgccactgcactccaatctgggcaatagagcaagactctgtctaaaaaaaaaaaaaaaagctctggcactgtctacagccttgtttcctgctaagaagtcaaaggagcagatgcatctggtcttgctctgagcaataatggaagaaataccaggacacaggtggaggcctgcaatgttatgaccccaactcccacaggctcctgaagcccacatacatcctgcctttctgaagtcttggctagtcatttcccccagaatcctttcagtgaaaccccctttttggtctaatggcttctgtcacctgcaaccaagaatcctaacaaatacaaccagacaacactggtatctgtaggcttcaaggctacttcagcagctttccccagaatttactaaatacacaatcactgaggtactgtatttcttaaggcccttgtaagtgccagacactgtgctaaatact

SEQ ID NO: 308555 - DNA, 1000 bp, Homo Sapiens
  misc_feature (955)..(955): n is a, c, g, or t
cagtagctgggactacaggcgtgcgccaccacacctggctgatttttgtatttttagtagagacgggggtttcaccatgatggccaggctggtctcgaactcctggcctcaagtgaggggctcttttaaacaaccttgtatgagctccatcccagatccctcaatgcctgccttggccccaaagtgctgggattaacaggcgtgaggcaccatgcccagcctggttattttttaatttaataaataaataatgtatgttcccttgctcaaattatttcctcttgccaagccttaatttcctcatctaaaaaaatgggaataatactgcccacctccctggacttgtcagtattaaatgagagagtgtctataaagcacccagctttagggtgtagcacataatgtgactacaaggtcaagtgtgtagtgattggtgggtgttgcatctcctcccgctgtgctggggagcccttccccgactcctctcctctcctaggtgttctctccctcccgactcccacagcagcccttcaagaaggagggattctttctgggcagatggctgcctcccagcctgcaggccccagaggcagggcttatggcttcctttccccggctttttcctggactgtctagggccccgcatccagcagaataataagaactgtgcaggcctcacccgattcacccctgccctccctttccatctctcactgacatattttcaaccacaaatatttattgagtgcccactgccccgcctgctgtccttccccttcctgctgggtccctcccctccaccaaggcctaaaggggtgaagatgtctgcaggcagcagggggagaaaaatgaggctaagaggaaggacccaagagagctccgaaatgaggtggaagccacatctgactggaagtttcattcactcaaagccccacatcttgggtattaaaaagangcagagttttgggattaggcgtaaacaggatgagtcacagctcag

SEQ ID NO: 308556 - DNA, 1000 bp, Homo Sapiens
ttttttttttttttttcttttttttacttgggagtcttaatctgtattaaagatcagaatcatacacagtttatatttattagatactgtttttcagacatatacatgaatttcattgaaaagttatagtacaactctttgaatgaaggtatttttaatccatatttttatagatggagaaacttgggctttgaaacaaaaagtaattttccaaaggctatacatagaggcagaattcaagtctggtttctacctccaagtttagtgatattttctacttttgtcttttacatggataccaatgtttgtcaatattaagaattatctagacccataagtaacaatcactgaaattatttttctagcaccttatatgttatagactttaatacctgtggatatgttaaataagtgctgcctttgcctaggggtctgcatttaaaaggcagcaaaaaaaaacccatagcttctcagttcctttcatctgtggttttggccttctgtgtggtctgatttgaagggcttttctgctctttttctttttttcattttcccataattggacttggatttcctccttttggtcctaaatgatttgcaggcttcaaagcctttctactacattgcagacactgccggtatgggatgttagttgaggattaacatctgtagctggaagaaagataattgccttttttttggtttctgttgaggagtggagggaggaatgatgataaaccaggacgtgagtggaagccattgtgacatggcacatttgtctacgttctgtgaaagtaaaaagcctctgatccagtgaaattcttgtccaggctcaactgggctacttgcatagggactcagaataatctcatcacatctccactttgctgggcaaacccatctgccagccactttttggcaaaggtcatgcatgagtaataccaccatttgctattctcaaagagtcaggatttcaagagggggatggcattctgcagca

SEQ ID NO: 308557 - DNA, 1000 bp, Homo Sapiens; identical to SEQ ID NO: 119962

SEQ ID NO: 308558 - DNA, 1000 bp, Homo Sapiens
atggaggccctgcaccagccgctgggatggacacatgtgggcaccttgcatgggggccgggtgacttcaagggctggggactatttgctgttttctgtgaaccactggagcaccacctccttgttctccttcacccacttgatgttggctttcgtcttctccagggcttgctccagggcccgggtgcctgagccgaagcctgtttcctcgttgtccttcttgaactgctccagctgccagaaaaacaaaagattctcagtccggctgggtccctaacacagccttgaggaggagctctctcaggcctctggctttccactcccactttagagtccccatggatgggaccacaccctgttccagggataggcaggacgtccaccttgctcccgggcaaagtccttgtgaacacagaggttgcaaaatgacaatcccaggcaaaacctggctcagggagattctggccttcaggtgtaatattttattataatatcaatccaatcaagagagtagagaggggctaatgaagcaaccagccaaatctaaaatgtggaaatttctataccacaaatgatccagttgcttcagtaaataaatgggtttaaaaaaaaaatactcctacaaattagaagagttatcagtcctggaggttctagccaggcaatcagccaagagaatgaaatgaaaggaatccagaaaggaagaagtaaaactatgtgtatgacatgtttgcatacataaaaattttaaggaatccattaaaaaatctattagaactaatgatttctgcaaggttgcaggatacaagagcaatacacaaatatcaattgtattcccatacattagcaatgaaaaacctgaaaatgaaattaagaaaacaattccatttacgatagcatcaacaagaataaaatatttaggaataaatttgacaaaataagtgcaagactggaatgccaaaaactacaaaacatttttgaaagaaattaaagaacaccta

SEQ ID NO: 308559 - DNA, 1000 bp, Homo Sapiens
ctagaatgcgaagcacagcatgtgaccatgggttggctgtgggtggcaggccttgcagtctggtgcctgtcctggggcagggggcagggcgaggggtggcagacactcaccgagtggtctctctgcagctgagtctgaatcttcctccagttctcttcgtcgtagttcacccggtaatagcccgtcacattgaggttcagcaggacccactcattgcctgatgtgctgaagagatcgttctgggctgtggagagggacgagacctgggcagggctgctcagaggccatgggctgacccctggacctcttgcaagagcagctgcccccgcagcctggcaccacctcaccctcaagctgctggggagacgctaagggtggggaaggaagggatgaggaactgggctgccagtggcttcacagaccatcaacccatgaagatgacatgccaccccaaacctcagaacctgccctgcctccctaggctctgcacggccaggccagctgccaggccgctcacactcagcaatccaggctgttcctcctccttgccctcctccacactccatcacacctgtcacccaagtgggaaccacaggcagctcctcctctcccttcccctcccattcacccagacccccagtgctgctgtctctttctggggcttagtgccccttcctccctgtgggtccccctcctccctcactcctctcatactttgtttcagcagccagaggtcagggccaataggttgctcatttcccacctgccccatccactgtctcctgcagcccctggggcccttggggaccagctttatctcttgggcacacctctgccctagctacactcagtccccacactctctcctacctctatccctggcacttgctattccctttgcctggaattcttttctctgccacattagcctgtctgattcctactcttcctctaagactcagctcacctcctccgggaagccctccctgacctctccatg

SEQ ID NO: 308560 - DNA, 1000 bp, Homo Sapiens
aagcttgtttgaatttaaacacaaaaattccctgttctgtaacttgatggggggctcccagcagccttgccctcagagggaattgtaggctaacgacttttgagtaatacattactcaccagagcttcttagaaatatcttctgatgcaaattattactttttgagatatctttgctctgttcttgaattccacctgtcattcccctcttggggaccccctgcccccgaatgcatgaaaaacaacatcactgagaaagctgggaaccaatttccttctgtgtacctactctagtatctcctcctgcttttcagttgaggcatatgtactctgcagtgcccatggctaaacatcccttccgttagctctgtaacaggtatttagactcttatttattgtctgttctactatgtcccatacacaaaagttaccaaggtcaccaaataagaaaacttttctatatgttattggatttgataatattgtactccgtacccattttatcctgtgaataccactgacatccttagaatagttttagaaatacttcctgttttcctgattccaggaaatggaactgactcatgggacttgcaatattatttttgtaaaattgttatgaaccagactcaataatttaaacttcaaccaaacttatcttgctgtcactctaagtatgtagggtttatggaattatcttggaaacggcaattgatgaaatccctccctcatttttttaaatggagcagttagataatagtgaattaagatttcctggagagccaactgtaagccttcaactggcagtgaaagatgaacaaagactggatgacatattgaaattatacctagtacgtaaactcgtatcaaacacttctaatctggcaaacaatgcaatgagtgacagcaaatgcaataaaacagaaacctagatcaattatcttggaaagattgcagtcagcagataaaaatgggaccatggagtcttctgaattaactag

SEQ ID NO: 308561 - DNA, 1000 bp, Homo Sapiens; identical to SEQ ID NO: 119963

SEQ ID NO: 308562 - DNA, 1000 bp, Homo Sapiens
tggatcatgaagttggcatatcaaaatgtttaacaggctgggcgcggtggctcacgcctgtaatccgagcactttgggaagccgagacgggtagatcacttgaggtcagcagttcgagaccagcctggccaacatggtgaaaccctgtctctactaaaaatgcaaaaaaatcagccaggcatggtggtgcacacctgtaatatcagctactcgggaggctaaggcaggagaatcgcttgaacctgggaggcagaggttgcagtgagcctagaatatgccactgtactcgtctgggcaacagagcaagactgtctcaaaaaaaaaaaaaaaaagtttaacagatactgatcaacagcctctggaaacagttatagccccaaccacagtgcataactgccttgcaaacagcagttttgatgagaaacaaatgaaatctaaaaatatgccatccgcacatttggcatataatttttagggggttcgaaggccccctgacctgaagcccacacaggactcctggctaagaccccctttacaggaagaccctaacaggtcaatgaaaagctgtgattgcatctttttctccgaaacatcatctgaactcctcaggcaggagctactgtagtgtgggctgcctgtgactcacttgagtagcttagcccaggaggacagagacaggaaactgccacgcacagctctgtggttacgtgaacctgacaattttcttgtgtgtgtgtcctgcaggtgattgcaaataactaaccaaaagaagtccctgggactgtttcagacttggaaaggtcacagaaggaaaataatattatataaagtgacaactatgcaaatcacatcttgatgagggttttattattattattaattcagaaatccatcctaacatccagggccctaagaaccagaaataggtcaggcgcaatggctcaagcctgtaacccctgcactttgggaggctaaggcaggctgatcgcttgagtccagg

SEQ ID NO: 308563 - DNA, 1000 bp, Homo Sapiens
cctcttcctctccactcaagatcacccagcctgtgccccacctgggctcatggaacctcacttctgagatgccctggtctactttatggagttcttattgttcaaaactgaccttgcctattttgtggcacaacaaatacgtctgtaacattttgtcttcctagtctttccaagtgaaattgctccatttcttcataagatgagagtagtctgttctttatcactgaactttcttcactgagtcttggaatatggattttaccttaaaaccacagacattcttcctttctgagctgaatgctccatttctctaaatgtaggcaaatattaaggaagtttattttgtcactcacagtttaaatttatatttttacatcatccttcaaacaagattacctagaaacttctttatcttaagctattagtactcatagtcattaacaaagtgggctaacttaaaaactcatacttaatgccggccgcagtggctcatgcctgtaatcccagcacttaactttgggaggctgaggtgggaggatcacctgaggtcaggagtttgagaccagcttggccagcatcgtgaaaccacatctctactaaaaatacaaaaattagccgggcgtggtggcaggtgcctgtaatcccagctactcaggaagctgaggcaggagaattgcttgaacccggtaagcggaggttgcagtgagccaatatcgcgccactgcactccggcctgggcaacaaagcaagactccgtctcaaaacaaaaaaacaaaaacctcattatagatgaagtaaggactattttctttcttcaagtttttttccttaataattagctttggttattgtagacaccagatgatcaaatcaagctttctccatggtcagtgccatcagagcctgtgacatgttcaagacctctttttggcatctgaactgacacaatatatacataataaaattaaataagaaattatgttaagacacatctatttat

SEQ ID NO: 308564 - DNA, 1000 bp, Homo Sapiens
gatcttgtctcaacaaaaaaattagctgggtgtggtggtgcacgcttgtagtcccagctccttgggaggctgaggcgggaggattgcttgagcccagtttgaggctgcagtgagctacgatcgtgccactgcatttcactctgggtgacacagcaaaaccctgtctctaaaaaagaaagaaacaatgggataagtactacaaatacatgtgtaaagatgttcattgtagcactgtgaaggcaagaaaaaaaagaaaaaagtaaaaaagttgaaacctaaatgtccatcaataggacatcgaacatgtgaatcatgtgaaatacaactcagcagttaatgggcatgagaccagctggtgtggtagctcacgtctgtaattctagcactttgggatgctgaggcgggtggatcatttgaggtcaggagttcgagaccagcctggccaacatggtgaaaccctatctctacaaaaaaaaaaaaatacaaaaattagccgggcatggtggcatgtgcctgtaatcccagctacgggaggctgaggaagaagaatcgcttgaatgtaaagttcaagttcatgagaccaatctttacttaacttgaacccaggaggcagaggttgcagtgagccaagatcatgccattgcactccagcctgggcaagagagtgggactctgtctcaaaaaaaaaaaaggtggggggcatgagactaatctttgtgtagcaatatacaaggattccacaacacactgctcagtaaaaaagaaaggagatgattgatgcttacttgaaacttgaagctaaggaggatgtgcctccaccccccagcatagcgaactccttcagatacaggcaaggctgagctctgccccagcagctctgatgcagtctgctggagaagctcctacagccagttgattcttttgcactcccctgggaagaactgctttagaaaacctggttaaaaatcctcaaaatgcccaaaagcagacaaataggaaa

SEQ ID NO: 308565 - DNA, 1000 bp, Homo Sapiens; identical to SEQ ID NO: 119964

SEQ ID NO: 308566 - DNA, 1000 bp, Homo Sapiens
gccagcacccatcctggcacctggagctgcctgcccagcggcagcagccaacatgtgtgactgcagtggccagacctcatgcttgttcacatacccctcctcactgctccacgcctggtttgcccttggcaggcatgggatccaggccagtattatacgccaagcacagcctgcgatgccaagtgggcagaacgagcccagcaggccaagcaaaactcaggcaaaggcgccaccagccatagaagtttctgtaagaaaaccaatatccaaagatcctataaatacgacattaaagtgacaatccatgagaataagaggttactctaatgggccccccttaagtggagaaccattgctgaatgggtcaaagaaagaccaaagactctgtatgtgaaggacctgacctgccactgctggctttgaacaagatggagaaatgggacatttaggcaaagaatgcacatagcctccagaagctgagaaaagcgctcagattgtcagtcagcaaggaaaaagggacctctttcctacagccacaggatttaatttctaccaataatgtgaacaagcaagaaaactaagaccatctcccatagcttccacaaaagaatgccgtcctttctgaaatgtcatacgttttttgtacttcgttttggaatgctactccatcactctgcccacagagatggtgtgggtaacatgtatgagggaagcaaaggtttatttactggagggtcagaggaagtataggtggtattcctagagatcttaagacagtgccaaaatcatgagcaaattcaaaccctactattatccacaagggggaaaaaacacattaagaaacgagaattcactgtttatttgtgcaaagaaaaaaagatatgctgctactgcaatttagccactgctctgtttggtggccagcctcttatctctctcttcagcaacagtaagtcgaatgccctttcccctgggcagggaaatccaaggtttattgccc

SEQ ID NO: 308567 - DNA, 1000 bp, Homo Sapiens
cactgtgctgaaccaagtttatgaacttcataaagatcttgtggcaactacaaaggatgtttagatagcagtagcttgacagaagattttcatgatatattagagaagatgggacatatgcaagataaaagaaaaaactgtctatgaaatggttgcttagccaaggagtaaattatattgtatgttgccccaagctgtgggcccagtgaatggcaggatggtgcagatggtgatgcgaaatgttgattgtatctcgtaaaataacaaagaactctatctctgctacctgggtatcagataattaagacatcaaagagcctcaaatgacccttattttgaggttattttacagattatgaaagtcatcttcccttcacttggctaactgatccacaattaccatagagaatttatgaagtacaaagtcattgtaacattatgctggtcaccacatagaatgagttaatgcatagagtttagatatgttaatctatttaatctagttttaaccagtcttcaggtatctaagaaatgctgtgctcacactggggtagtgactgtgagaaatataaaagcagcatcaggtttggttcctaacctgatggtgtatacactctgtacacaacttttttgggactagttttacaattactttgtacaataaagcaatctgagaatttgcaatacatcacgagacatttggaaggccaggagccccagacactcagatgataactttgttcatagaactgaaaagcagacaaaacgtaaagaagccccagcacataagtaagcacaaggagtgtgtaaatctagcatttattgagtgtctgctttgtgctcagcactgctcaaacactgtgagcaaatacaaaagatttaagagactgggtacccacttcagagggtgaacatacagttggaatttccattcactccacagttagagaacagtagaaatgagtttctatcaggcatgctctgggagttcacggaggcc

SEQ ID NO: 308568 - DNA, 1000 bp, Homo Sapiens
catgggagatgtgaaggaagttatctcacacatgatatgtcttcaaggagctaaaaatgccagtggataaaagcaaaacacatggaaaaacaaagtacaaataataatccgtgtatattgtcaaaaggaacattttatcaaaaggtaggattgtagctaaggttggcttgccttcttccctcttttattcaacaaacatttaatgaaggcccactatgtgccaagcacttggtacatgatggtgaataaaacaaacaaggtttctgccctcatttacagcctggtaggggagacagaaatgaacaagtaaaagtagcatatatataaactgcaataaatgcaatgaggggaaaagacaagatgtggtgacagacacagaagtagactgctcagggactgaagggcccgggaattgtcaagacttgaggaagaaggacaccacctgagtcaagagtggtgggggtggagagctgagaaggcccaggaaaagggcaggaaagagcacaaaattagaagctgagaggagaccactcgggctggagcttagcaagaaatcaccatttaatgaggttcaaggggaaggcaagaaccagttctcataaaccaaggtgaagagtttacattttaaatgaggggtaatagaaagcagaagggttctaagcaggggggtgatcagatttatatttaaacaaccaaatcctggccaggtgtggtggctcatgcctgtaagcccagctatttgagaggctgaggcgggaagatggcttgaggccaggagttcgagaccagtctgagaaacatagtgagaactcaccttaaaaaacaaaaaacagcaaacaaccaaaaaaaattaaaaaccaaaactactctgttatgtgagaacagactggaggaagaaagaatggaagtttttttttttttttttttaaaaaaaggtcttgcccgggcgcagtggctcacgcctgtaatcccaacactttgggaggctgaggtgggtgga

SEQ ID NO: 308569 - DNA, 1000 bp, Homo Sapiens
aaccacaagagtattgactggggaagtgataaaggttcatgaaatcttcacaatttatgttcctctgtcagagcctcagcaggtccctccgttcggggtccctgacttcccggaacacttcacagctgagttgctgccattttttaacaccaaaacaacgttgtgatgaaaagctcatatataattttgtacacacacaggtgtatgggtaggctggattccaagaaatgggactgctacttcaaagaataatttgataggtattgtcagattcccctccacagagtattttaccgtatcatactcccaccaacgggagagtatacatttcccacatcttgccaacagaatatgtcaccaaactggggtttttgccggtctgatagacgacagatactttaatgtgcatttctcttattatgatgcagatcaagctgtttattgaatttaagggacatttgggttttcttttttctgtgaactgtttgttcatgtccttggctcattttcctattgggttgctggtcttttcctttgtatctgaaacctctttacttaacagggagactagaataagccagattttcctcaacactatagaaccaccgctttcatatggccttaaagaactcatttatgctactctctactcctcagaaacagaagtctccttttcctagttaggacaatttattttgtttctgatttaaaagtaatatattttcattacagaaatattggaagaaatttaaaaccacccacaaccccactttcctatattccttttctaagcatatgaagtaaaaagacagcaaattcctctgtcaaaatcccagcgcccagaggaggccatcagtaaacatcaacggcttgttgtatatcctcttaggttgttcttcccattagacacttatcttgtggaaaaagtttcaaattcacacatatggtcatatttaaggcctgagatctatgcaaacaaagtatcttcctggcattgtgg

SEQ ID NO: 308570 - DNA, 1000 bp, Homo Sapiens
tctgtcttggccacctctgtgtatctcctatatgtcagaacagtagctggcatatgatggaacgctgacatgacctttctcttgcctcccccatgcccagaggtgattgtggccttggctgtatgtggctccatcctcttcctcctcatagtgctgctcctcaccgtcctcttccggatgcaggcccagcctcctggctaccgccacgtcgcagatggggaggaccacgcctgacaaccactcagcccccttccctccacctcctaggggaggtgggctgggccctcgctcctgactgttgctgctccccagcccatggacaggagatcctgggttgggcctccctctgatgaccccagccagatgagcgagtggggctcagcgtggcccatggtgcctgtcactcagcattcccatgcctgatgtttaccaagtgctgtgttggacactggctttctccaaacaggatttgcctcctccacgctccctacacacctgagatgtaaactggcagtcagtgttcactcaggacctaggattagaaaatggcagagttggtgctggatccaccttgcacttctatcaagccctgttctttttcctccagcctgaagtcttcggcaaatagctcagagggacacggtcttgcctctcagtgcttattttagtgggaaaaacagctaataccaggggtacaaacattggctcccaaggaactggatcacccaacagccagccagccacatttccctgtgtctggctagagccaccattagactcagacagaatgcttcaggaatcgttgtcaccccttcaactggagcaggacggaaggttgtctgtacttgggagggagtggggagtggtgggaagggagttgcttgtcacacgaatcaggaaactgctctccctcagctgggctggggtctccagggacctgagctacatgcaggttgtgagctggaaaagaaagttctagactgtggcccagaatagggct

SEQ ID NO: 308571 - DNA, 1000 bp, Homo Sapiens
cctctgtacaaagagctttgccttttgtgattaaaagcatatcctggaaattactcgatgtcatttcaaagagagcttcctaatacttcactgtgtaccataggttacccaactgttcttctatggatgtgcgtttaggctgtttccagtgttttgtaatgacaagcaatgctgcaatgagtaaacctgaacatacgaacgaattttcatatggttggaggtgtgtcttcagggtagattcctagaagtgagattcttgggtcaaaagataagtgcatatgaagttccccttagacattcccagattctcctctaacaggtgagatgtggttgtgcaaaactggaatgtccatcagtttggttttcgatcagcgaggtatgagagtgcatgcatctccacggccttgctgagtgtgttgttacagtttttatttattttttttgcaaatttcttacttttcaggaaagaaatagtatctcagtgtacttgaaattcatttctctaatgatgagtgaggttaaacattttatcatatgtttaattgccattttttggtctaattttgtgaattttctgctcatgcctttccccattttcccattagaaaagttgtgataagaaacacatgagatctaccctattaataaattttccagtgtacaataccatattgttagctatttgcaagttgttgtacagcagatctctagaagtttttgttttgtgtgactgaaactatgcccactgaacagcaacttcccattttccccttcccctagcccccgcaaccaccattctgctttttgcttctatgaatttgacgattttagatacctcctgtaagtggattcatgcagtagttatccttctgtgactggctcatttcacttagcttaacatcctccaagttcatctatgttgtggcatatgaaaggatttccttctttctaaagactgaatagtattccattgcatgtatataccacattttctttatcc

SEQ ID NO: 308572 - DNA, 1000 bp, Homo Sapiens; identical to SEQ ID NO: 119965

SEQ ID NO: 308573 - DNA, 1000 bp, Homo Sapiens
gatcctcaattcttaagaaacataggctaattcatacatgagagactctacaaacctgaaagatgtgacaatgcttttggcaacacctcagacttttctgaatataaaagaaatcatatgaatgagaaatcctagaaatgtgaagaatgtgacaaagcctttaaatggctgtcacacttgattgtaggtaagataatatactggagaaaactactagaataaacaatgtggcacacatttaaccaatactcatgccttattgcaaaggaaagcatttatatactagcctgggcaacagagagactgtctgggaaaaaaaaattgtgaatgccactaatatcttctcacatcttattcaacaccagagagttcatactaaataaagtattaaaagtgcaattattgtcactagatctttcagaaaataaaagcccttaaaatacagaagaatatttattttgaggaaaaacgttacaaatataaagagggttgtagtgcctttacttgtatcacagattttattgtacacattttgtactacaggaaaaccttaggtagttgttccaactttgctaaacatcagggaatttatattgaatgaccgtgcaaatttaataaatttggaaaaacatttttacaaaaactacagaattataaaacacaaaagagtttatactaaaatatatttttgcagatacagtaaatataaaaatatttaatccaaaattgtttatgtaaatatagataattcacagtagaaatacctatctctcaaacttcagacattacactaaatcagactgctgagtataggaaaaaatccaaaactaaagttgttaaaaagaaaaatcatttgtatatgactttgaaagaagtagacctttgaagagttacatttacatttaaagtatacttttatcttaaaaataccgatttttttttttttttttttttttttttgccagacacagtggcttacacctgtaaggccaatactttg

SEQ ID NO: 308574 - DNA, 1000 bp, Homo Sapiens
gaattcatttcttcttctttttcttttccctgtgcatcaagcaacaagtgaggtgcctttatatattttgtatcataaaatcttcatgagaagtctttgaacaaataccactgtccccattttacagttgagaaaacaggttggaagactccaaagcccagcctgtgcagctctccctggtaagggctgagcgctgccagactcccaggccaaaggtttggtttctttaaaatattggggatgaggggaggagagaagagcaaagatcagtttggatgatctggaaggttcttcccaactctaagggtcagggattcttatgattctgacaaccaactctgctatgagagaactcccccaagccccaaagcccactttactcaagtcccctagatgactcaaaaggaggaaaatgaaggaaaggagcatgaggacacactaaggagagggggacctgctccctggaagatggcacagggctctgtccccctccttacctttcttggcatttacaatcttcttgggcttctgggttggtggctcggtggtgacctgggtcaggagggagaagaggcagaggaggaggtaggccccccagagctccatgctgctgcgcgggcgggggctgctgctgcctgcagcgggtctgggtccgaacgcagtgacagccacggcccaggctgcacgtcttaaggcagcagccaaaggacctctgtccaggaaaccctccccaacttggctgcaggcgtgccaaaaaaataaaacaaacacacaagcctgcagaaggatgaagtcctgagggccacagagcctctctgccagggaacacccacgcagcatcctggccctgccttctagaaagaagcccttatttcctaggattctgagaaacacacggtggttgtcatcacatctgcggagcagctaccttgggtaggggctgaggctggctgttcactaacattaactcacagaagcttcacacccaaaccacgaggga

SEQ ID NO: 308575 - DNA, 1000 bp, Homo Sapiens
gatccatggatgggtttggagatttttgtaaaccttttgatactgtatgcaaaattggatgtgtgtgtgtgtgtgtgtgtgtgtgtgtgtgtgtgtgtgtgtgtgtatctgtatgttctagtaagtgggttcatagctttcatcaagttctaaaaaccgccaaaaagactaagaactgctactttagggctttggtgaaaagtaagtagtgaagagaagtaagcgcctttgaaaccagtacagattctactttcttaacactgtaagtcctcaatgtcctagataggttggaaactgttatcttaagtgaaagcacattttgttataaggttgatgacaaaaataaattagtttcattatatgtcttttccctttaagtcccagtttccaagaccctatcaatgatgttaagtgaggacttaccgtattagtgatgttaagtgaggacttaactgtgttttctcatcctcagctgcaggtgacttcgtgactgttgcagagaaaaataaatttgaatcttcgacaaagaacccttaccactcctggttttaggtctcatgggtactagactctgtctctgggacttctttcattccctaactagctcttacagattcctttgtactcaaggggccagttatctgtgcctggttttcaaagtgacatttggtgaaatctacagtgttaagactttcaagactaggccacgtactgtggctcacgcctgtaatcccagcactttgggaggctgaggtggaagaatcacttgaggccaggattttgagaccagcctgggcaacatggcaagacctcgtctctacagaaaaaaaattttaaaaattaactggttgtggtgacatgcaactgtagccccacctattagggatgctgaggcaggaggattgcttcagcccaggagttttgagaccagcctgggcaacatagccgtcattttaaatcgatgcttttcctgtctttcatcttagggtacattcagcct

SEQ ID NO: 308576 - DNA, 1000 bp, Homo Sapiens
ggatcctagtattcaaattagcataaggatcagacatggaatataatctctgaggtgaatgtttcaaacaatgtttgaagccccctgggatcacacaattaggagttgtgcctatctcaattactttcatactgtttctttacatgatccaatgctaatcaacaatttacctggttaaaatttagttggtttggttatgctctgaagaggacactcccttcttatgttttctgcactcaggcaggagacttgtaaaggagctaacaacaaagggatttttaaccttcaaagccttaattagaaaataagagcaaatggtacatttttaaagaggaaccaggaatacatattcttgtgggcttttgcctcattacatttgttaataaggaatgccaaaacatgtgcaccaaaaagcgttcaaggtcttttggtagtaaattatacttgtaaatttgatgtaagttgatcacttgaagaactcacactctttgaagattagaattcataaatgtatgaaagaattaaatggttctttcctctagtgatataaagtattaaatgacagaaaaaaatgtgttcgaaatcaactgcggaaataattcattttgaaaagtattcaataaaaatgttaaatgggaaaaatatgctaagcccgtttctgctggatgaagaagtaaagcagaaacatgaaaagggcaaatttaaggatgatgggctgggaaatgtcccatcagcctcacagttttactttttgttattcaactatggcagttctaggcccagtaatctattccatccccataagacaaagaaaaaaagactaattctgatcagcagaaaactggatggcctctaggaaccttcaagagggcagtagctccggatcaaggagaaatgaatgcctttaaagaggcatcttagattgttttgttaatacataaaatcctctctctttatcatgcagaagtctcatttcaaaaggaaaatgcaagtcaatgag

SEQ ID NO: 308577 - DNA, 1000 bp, Homo Sapiens; identical to SEQ ID NO: 119966

SEQ ID NO: 308578 - DNA, 1000 bp, Homo Sapiens
atggttactacgtcagcagagcagcctagtctttaaagatacattacctgataccagtcttcttataaaaatcccatgacaaatctacttgagtattcactcttgtttttaatgtttgccatttatttttaaaatacttaattgtacatacttgtggagtacattttgacaaggtttcatacaagttgattccagggaaagagataattattgggagaaacatatttaaatcattgttttaacctatattaatctgtcttgctttctactaatagatttctggctgctcaaattcacattgcactggaaagctcagacatcaaggcaagttgagtactcatgggtattagactgtcccacgtgggccttagcctcagacagttattttgcttttgtgacctttaacatactttgtgatttaatgaatgccatctgttgttaaaagctgcaacacaggaactgctccacctcatgaacatactgatcatagctaagtctcaggaactgttagtatcataaacggtaataacttttcctggaagaccataaaatttggggattgcttgtaatatagcaaatgacctatttcccctaaaaaagcaatttgaaaacaatcctgagaaattacccttaggacacagaagtaaaataaattactaaagagtaattttaaaaaagtataataaacttttataaacttaaaaaaaaaaaaaaacaactggaattaaccttggaaagtcatctctaaggcctctagctttcatatgagttctctaatgactccttctcatagaaacctcatccataataccacagttctacctcttcactccaggttaagcaaaaagggaaagtctcacattcagaagtagatggaagtaataatcagggtacagtagaaagaaatccaatagacaacttcagaacaagttattttattttgatgaataaaagcagtagctggcaattgaaaaaaagttatttgctcaataggacagca

SEQ ID NO: 308579 - DNA, 1000 bp, Homo Sapiens
tgtgactgaggattgtcttctcaggcaaatagctagaggaaatgtaagtgggtacactcccattgagagtaatttggcaatatgtaccagattacagatgcatgtatcctctaacccagcaatccaacttttggaaatccatgctacagatttgcctgcgcatgtatgaaatttgtatgttcaaggttattcactacaatacagcgttgtttgtagcagcaaaagactgaaaacaacccaaatgcccatcgataaggacttgtataaaaaactacatacatacacacaatgcagctgttaaaaaatgagaaagatttctgtgacatattgttgagtagaaaaaaaaggaaaaaatacttcagttgactataagaaacacctaactataattaacattaataaatactttttacaaagaaaataaatctttattatttggtccttcacagaaaacatttgtagactcctggtccaaataatggcatcttcttcttcttcttcttttttaaacgggatcttgctgtgttgctcaggctggactggggctcactgcagagtttgagctcactgcagcctcaaactcctggactcaagtgatcctcccacctcagcctcccatgtagctaagggactacaagcacatgccatcatctctggctttttttttttttttaactttttgtcaagatggggtctcactatgttgctgaggctggtctcgaactcctggcctcaagcaatcctcccaccttggcctcccaaagcattatgaatatgggcatgagccacttcacccaaccaaatggcatcttttatatgtttttggtgaactaacagaagtacaaatagttaccttataagtacagatagttaatttcctcttcctagtttccgtgtttctctgcagtaatgtattacacatctggaagacctgttgcatgacagcatcttgtctcaggtcatcacggcccttcagaataattaagcatgaataaacaag

SEQ ID NO: 308580 - DNA, 1000 bp, Homo Sapiens
tgtgtaggtaaatttactctctggggaaaaaagaaaaaggcaaagaaaagaaagccctgctttatagcttttgttcgtttacatggtataaaggcttccaccacagccaatttttttttctttttctttctttttttttttttttttttaatgttcatgttttgctctgtcacccaggctggagtacaatggtgtgatctcagctcactgcaacctccacctattgggttcaagcaattctcctgcctcagcctcccgagtagctgggattacaggtgcccgccaccacaccctgctagtttttgtatttttagtagagatggcgtttcaccacgttggccaggctggtctcaaactcttgacctcatgatccgctggcctcggcctcccaaagtgctgggattacaggcgtgagccaccgcacccggccaccaaggccaattacaagccactaacctgacctcactgacacacgcttgggatgacaggcacacagtcagctctccgggccagtatgagacactcagtaccgcagggcatcacagttagattcagacagagggaggagtgtgtccctcttctgagaagtgtgacagatgattgtgaaaggggagagtgaggagagttgtctgaactcaggggtgtgctcacggaaatcggtttatgaaggagtacccatgggtgttgagaacattgattcttctaaacatcccatgcctgggtactccttgggaaggctgtgccaccatggttccaagtgcagcaatttggaggctaccgattcaaaggatggagtatggaccttggagtcagccacaccagggctcaaatactgcctctgtaatttatgattattgagaacttgggcatatagtttcaacgtcttgagtctcagttatctcctacaaaatacaagaggccaatacctaccttgaaaggtttgagagcaaaaggtagtatgcatacagtgttgtatccagcaggtgctcaacagatgaat

SEQ ID NO: 308581 - DNA, 1000 bp, Homo Sapiens; identical to SEQ ID NO: 119967

SEQ ID NO: 308582 - DNA, 1000 bp, Homo Sapiens
tatttttgtagagacggggttttgccatgttgcccaggctagtcttgaactcctgagctcaagcaatctgcctgcctcggcctcccaaagtgctgggattataggcatgaaccaccacacccagcctgatttgtgatacaaattcttaataaactaggaatagaggggaacttcctcaacttgataagcagtatctacaacctacaactaactttatacttaatagtaagaaactcaaagctttcccattgaaatcaggaacaaggcaataggccgggtgcggtggcttacgcctgtaatcccagcactttgggaggccgaggtgggcagatcacgaggtcaggagttcaagaccagtctggccaacatagtgaaacctcgtctctactaaaaatacaaaaaaaaattagccaggtgtggtggtgggtgcctgtagttccagctactcgggaggctgaggcaggaaaattgtgtgaacccaggaggcggaggttgcagtgagcggagatcatggcactgcactccagtttgggcaccagaacgagaccgtctcaaaaaaaaaaaaaaaaaagaacaaggcaagaaagccacctctcactgctccttttcaacattatactggaagtcctatctaatgcaataagacaagaaaaggaaaaaaaggtatacaggttgagaaggaagaaataaaactgttcacagatgtcatgatattctatataaaaaatctgaaagaactgacaagaaaactggaactaataagcaagtatagaagggttgcaggatacagggatacagatgtcaattgctttctgatataccagcaatgaacaagtggaatttgaaattaaaaactcattaatattcacattagcatccccccaaaatggaatatttaggtataagtctaacaaaatatttgcaagatctagatgaggaaaactacaaaactctcatgaaagaaatcaaagaactaattaagtaaagagatattctatgt

SEQ ID NO: 308583 - DNA, 1000 bp, Homo Sapiens
gatccgcccacctcggcctcccaaaatgctgggattacaggcatgagccaccgctcctggccttaatttttttttttttttttttttttgagacaaggtcttgctctgtcatccatgctggagtgcagtggtgccatctcggctcactgcaacctccccctcccagattcaagtgattctcctgcctcagcctccttagtagctggaattacaggcgtgcgtcaccacgcccagctaattttcgtatttttagtagagacggggttttaccatgttggccatgctggttttgaactcctggcctcatgtgatgtgcctgactctgcctcccagagtgctgggattacaggtgtgagctaccacacccggccacaatcattaatcttaaaacaaatttaggagagccagggcagaggtaagggatatcaaaggagggcagagattcttccttcttggtcctcaaccatcctgaagatggaattccctcgaggctgccacctggagtcccatggaagaaacggggaacggaaggttaatctcacacaggaaggccctggacaagttggggtaattctcaccatgttgtccttgccagaggagcacggaaagtcctggaaggtgaactttctcactcagggtttggggaatcccaaaggctccagaactttggaatcaaacaaatctgggcattaatttcaactctctcacttcttggcaatgtggcttcaacaaatttcttgacctctctgagcctctgttttctcccatttctctgtgaaatggggctcataatatccacttattgggttattgtgagggtcaaggagcccacctttgaaaggtactctagatgccccataagtgggagctccttctttccaacaagagcatggggaggcgaggccattgatcaactctgccagtgatgcccaaggggagtgtttcccgaagacctgaagggctctttcctcacccagacagagctctgccagcaatcaga

SEQ ID NO: 308584 - DNA, 1000 bp, Homo Sapiens
cgcccttcccctccctccgcggtgaccccgccccctcctccgcggtgaccccgccccctcctccgcggtgaccccaccccttcctccgcggtgcccctccccctccctccgcggtgcccctccccctccctccgcggtgaccccgcccccctcctccgcggtgaccccgccccttcctccgcggtaaccccttagaagctctaaatggcgctgatgtgtgttcttaggaatatgttctcaaccttcaaagctcaaaaggctcacgtgatggtgtctaagcaacgtgtgcgcatccgtgaggacgtggtatctgcatccgggtggccggcgtgtccctctagaaacgaacaggcccctcccgtcctccatggcgatgtggcccaggcacaccctcatcagcactgcaggccccggcatctgagcagccatccctgcaggaagcccctgaggcttggggtggccattgccgccacatggtcctgccagcctcactgcaggtctcctgcctgcggctttggcgtgtccaccacactcagctaccgtgcaggtctcttcaggccaccacaacaaacgacacaggccagcggctcaaaccacacgcacccgtcgcccaccccggaggctggggcacccgtcgcccaccccggaggctggaagtctccaccctggggccggcagggcaggttcatcctgtgcctccctccttggccggcagtcggtgtctcctctgtgcgttcacctggtggccccctgtgcctgtctgcatccttacctcttccttgtccttcacgggctggtcatcacgagccagttatcaccagccagttatcacggccggtcatcacgggcggtcatcacgggcggtcatcacgggtggtcatcacgagccagttatcaccagccagttatcacgggccggtcatcatgggcggtcatcacgggtggtcatcacgagccagttatcacgggccagtcatcatggggcggtcatcacgagcca

SEQ ID NO: 308585 - DNA, 1000 bp, Homo Sapiens
attgaagaggtgtagcattgcatgagatggaggaaagtgaggtggcacaatctaaataagatgagctgggtaaggattaggcaaatccaaagctttcatcttaggttaaaacactttccttttgataattatttgttcatttctagattaaaaaattgactctaataggcaatgtgaatgtgataaccaggctatacggaatgatcccatgattataaggaagcatcttagaaaagtatttgcacagatcaaacaaggtgaggtcatcaatttgcttttccttttattataaaagtaaaataaaaaatagcatttataaatccaacattttttcctttaaagtatttgatctaaaaaacatatttacaatagcaaaatgcagaaaagggggaaaataccattttcagcaatgattgtaaccatgtttaaatattgacaagtattttttttttttttttttttgcaaatcagagaaataaccacattagaaaaagcaatatgcctttttttttaaaatggcacatcaagtgactctcattttaaaatatctcttttcttaacccttaatttgaatgcaaaatgatgctgtggtcagaaggaatgccaggtggcgaccgtgatacctttaatgacaataggaacgtagcagagggacaacagcaatgacaacagaaagcagctgtgatccagcagcagctggcaaagcttagtaagcaacctcatccccagatgcatccgctcagccagtgttgtgattgctagatactatctgtaagtgaaccaaactaaaattcatttatgaaccaagaaaggaagccaagttgaaaaggtctcgagttaaatcgagaatgattcaggcgggccggctctctgagcacctttggatgcacttcagcttctgtcttgtggacaacgcagtggaattttagggctttggtttacacggtgtgggaaattgtcagcaggctaaattttgccttctagaggtccttcctgccca

SEQ ID NO: 308586 - DNA, 1000 bp, Homo Sapiens
tctgtaggatgcaaggtgccatcttggaagtggagagcatgccctttgccagacattgaacctgctggtgccttaatcttggacttctcagcctccatgtattctttataaattacccagtctaccgtattttatcacagcacaaataaactaagacaacatctttgttactcataaatgtataaaacatacagaatttagttcattgccattggccattttttaaatataaatttgtatgatttatgaatagcgtgtcaaatttatataaacaaattttgaaaatttctctttaactatattttagtacattcttgatgtagaattacttatttttgcctctgcatttatcctgtaataataaggtgaaccttagcttcctttcctagattaccacaccacaattagttaattagtaaattacgatttcctattatcaaatgaaatgtgatattctcctggttgcaattgcacaattgtcaatagtactgaattatcactgtagtgtaggaacacagtttgttctcaaatccagggacttctacccaacctctccaagaaatcttcaactttccacattaacagaaatatatttttccaaagtaaacgagacactatttttattctattctgaaatgatcaaacttgcactacttcgtgctgagaaattagaaatgatgattgagagtaataaaccggagttaggaatgttgaggctgttgttatctttaataagaaggagatttgtgcaggagctatgggtgtccttatgtaacataaacgcaaactgtgtcatttccagaggagagtaaccatgatgatgaggggaatcttttgaaggaactagcattgctacacagtatctaccccaaagtctataaaatgttgccattcactaaaagaagtagtcttactgatttgcacagccatgaattaaagggataaaaataattttagtataagggacataattctctttagaaattgaatgtgaggtagt

SEQ ID NO: 308587 - DNA, 1000 bp, Homo Sapiens
acctccagggactctgttttaattggctggggatgggccctgggcattgggatgctttaaagctccccaggtgattctaatgtgcagtcaaggcagtcaaggttaagaaccactagtatgatgaaaagaacttgacccttggtgttggtcagaactaggttcaaatcctgcctctgccccttaataacagtggaacgtcttaagcctcagtttctttgttcagaaactagggataataatactacctctattggagagaaggagctaatgtatataaagcacttcacaatgcctggcatacaggtatcccaatcccaacactcacatgctccaacacaccatgctctttttttcttttcttttcttttcttttcttttcttttcttctttctttctctctttctctctttctttctttctttctttctttctttctttctttctctttctttctttcttttttttttggacagggtctcactctgtcacccaggaaggagtgcagtggtgtgatcacagctcactgcagcctcaactttctaggctcaggtgattatcccacctcagtcctcccaagtagctgggactacaggcatgcaccaccacgcctggctaattttttgcattttttgtagagaaggggtttcaccatgttgcccaggctggtcttaaacccctgggcttaagcaatccacttgtctcagcctcccaaagtgttcggattgtagacttgaactactgtgccgggcttatgctaccttttaaaccattaagctccagcagtttgtagaaattatccatattcaactttttgtatagatcaaaatacataaggtagaaaaaagctaatgaggaagaacattgaactcgaggttcaacatttagatctaggctttctggcccagaggagtttgatggcattttacttcagtgaccgaaactttgaaagtagaacacaaagtagtctgcatagtttacacatacttggttgtgcaaagac

SEQ ID NO: 308588 - DNA, 1000 bp, Homo Sapiens
atccatcatgatcaagtgggcttcatccctgggatgcaaggctggttcaacatacaaaaatcaataaacgtaatccagcatataaacagaaccaatgacaaaaaccacatgattatctcattagatgcagaaaaggcctttgacaaaattcaacagcccttcatgctaaaaactctcaagaaattaggtattgatgggatgtatctcaaaataataagagctatttatgacaaacccacagccaatatcatactgaatggacaaaaactggaagcattccctttgaaaactggcacaagacagggatgccctctctcaccactgctattcaacatagtgttggaagttctggccagggctatcaggcaggagaaaaaaataaagggtattcagttaggaaaagaggaagtcaaactgtccctgtttgcagatgacatgattgtgtatctagaaaatcccattgtctcagaccaaaatctccttaagctcataagcaacttcagcaaagtctcaggatacaaaatcaatgtacaaaaatcacaagcattcttatacaccaataacagacagaaagccaaatcaggagtgaactcccattcacaattgcttcaaagagaataaaatacctaggaatccaacttacaagggatgtgaaggacctcttcaaggagaactacaaaccactgcttgatgaaatgaaagaggatacaaacaaatggaagaacattccatgctcatgggtaggaagaatcaatattgtgaaaatggccatactgcccaaggtaatttatagattcaatgccatccccatcaagctaccaatgactttcttcacagaattggaaaaaactactttaaagttcatatggaaccaaaaaagagcccacattgccaagtcaatcctaagccaaaagagcaaagctggaggcatcacgctacctgacttcaaactatactacagggctacagtaaccaaaacagcatggtactggtaccaaaa

SEQ ID NO: 308589 - DNA, 1000 bp, Homo Sapiens
atgtgtccatgttgttttatctaaaccagcctgaggaacaagaaccctggtgttcctccactcatcagagccatatcattttggtgcatgggcgggaaaaggaaaattcaatcatcagactggtgagtatggagcggatctcaacttcaaatctgtcctttaatctcaagactttcttccagctaccctgtcaccaaactttctattggtggtctcttaccctctctctgggtgttcaatgtgcaggaatctttacagttcagggaaaacaggtctgtcagaaaagatcgtgaatcacggcaggcagtaactcaataaatgtttctctctctgttttccctggcaagcacatggtatttctaagccgcctagtagaaatcaggctctaggcctcttttgggaacgggaagtttttgcttttaacagttaggagtaagatgtcttccctagccgaattttagtctcgatattgtccccactggcaggaaaacggccattaggctcctacgttcctttaaggcattgattttgtctcctattaagacagtactgaattagtaaggggatttttgagtccggaagttaaccagaaccattcttccatgagtaaatgctttagcatgggctataatagcagaatacacagttcaatctagcactccccctcccttaaaggggccttgcccaattacatggtttttcttgaaatccgtgttttggaaggcacacaggccacgcaagtctagaaggtcaaagggaaataaaaggcagagtactgattgcttggggacagcgtgaccaaggaactcagttcctctggtgccacagcttggagggtcacacctgcagtcatgggtggcacatttaagcaggtgccgggaatcctggagcaacagagagaaaatagttggggggatgccctctattgttttcatctccaccctggatcacatactgaaaggaaggagactaaaaggacgcttttattctcacttctttt

SEQ ID NO: 308590 - DNA, 1000 bp, Homo Sapiens
tctaatgtcttggctgtcattgttgttattatcgttactattcttattgtctctttctctccccactgtaatatcaggtctgtgagggcagggatttttatctgctttgtttactgttctatccctattgcctacaacagtgcctggcatataataataataaatgctcagtaaatatttgtgaaatgaacaattgcagtttccttagcccaagatgactactactgctgtctcttccccctactctcttctctcaagaacctgtccaaactacaaggcttattatgaatgccatgtattccatggaatacttcatgattttctgatctttctccccaagctaagtttaatctctcatttctttgaattcccataataacttacttatggttttcttacatctattacatttatttgcctttcatcttagtcatttttatctaatctcgcttactagatattaagttcttaaacggcagactgtgtcttactcattttatatcccttgtgatgctagtataatgccttgaacatggtagatgctcaatagacatttgctgattgaactgaatctgttttactatttatatacttagttgtatacaaattttcagatttctaagtcatacttccaaggtattaaatctctgtgcaatttatttcttaggtatcctaagtgttcaagcttagaaagactatgcttttttatctgcagttgcagaaaaaatagatttgtcttaaatcttgttttaactacctaaggaccttataccagattatgaaattgtcctgcatatatgatcctaaaggggaaggtttatcaaatatagcaatatacagctggaattcaatgatctagtacatcacctaagaactcagatgaaaaaaggctttgtgcagataaagtgtgtgtcacaagatccatgcacttaagctcatgcatgttacatagtgtaagattctgagatactcgcttataatttatttactcatcattatg

SEQ ID NO: 308591 - DNA, 1000 bp, Homo Sapiens
caagagactggaagtgtgttattggaggtcaattctgatttctttaattgctcatatccacatgtgctcaaaatttccaccattctgaggagagtggatggttgatacagcacatccttcttcaaagagggaaaaggagcaggtgaatgaaggatgcctccctcgccttcaacaagattcagccactaaaaaattaagcagggactccaaatgctggatttccaaaatggaatttttcctcgaaaattccctgtactcaccactaccatgagaagtctcatagaaaacctgagaagtccaagggaaaaaaatgggggtagcgggtggaaaaaatgagagaggaaaaacaactcttgaaaagcaaataggaaaacccacccctagctgcagtaaaggtaggtcggaaatggcaagtgctggccttaaccctgtgtttaccccaccagtatccagaaatgcaagctgaacattgtgagtggggccccagttgttgagctctctgttatgctaaacaagcacccgaggtggactggcccaaccatctgctagagacatgcataaatcgagggaaggtagagcagtacagcatgtgtataatgcggaatacatgggaaaaagcaaaagcgcgtcattaaaaagcagcagaaagcgaccagagaacagaatgtggtgggcagagattagtgttccaattattatcaatgttaataaccacacgcagggaactccaggttctcttgttcatcagacatgaagcctctgacagtgcagggattaggaggactagctcagccattagaatttttgttatttatttgatttcatgacacttttcccatctggacaagtactggatgacacagagctcttctttcaagtgtatgctttccccagtataacattaagctttacaaaaatatataggaaaccaaaaaatagagaaaaattcacctgggcacaacccctgctaatattttcatctatgtttttctggtttttg

SEQ ID NO: 308592 - DNA, 1000 bp, Homo Sapiens
gatctgggaaggagtcagtcagagagccttgggccagagtttcaagggctctgggagtggctgccaggtgagttgaacagtctgattttcagtggggtcccacacagatgggacacggcttaggaggaatcctgggccgcgggcattccttggcccagtggtcagatttccggcacatgtagcaagttcctgtgggaggaggttctggaggaatgcctggccgctgcggttcaggcgtttggaagttcttgtgtgctggagatgtggctggggtttgtctcacagtggaggcaaggaattgcaacttttttctattattgtacaccttgaagtcgagtttaattaaatcctgttgtggggtttgagggccggaatttaatttttggagttttatttaatgtcgggagcagattgggtaataaaatgtatcttgagaataagacggccttttgacattttagggtctagggctgtaaagtgtctcagggttgcttccaaacaagtaatgaactgggctggatttttatatttgatgaaaaagagcctaaaggctatctgatttgggataaagaaaaaggagaattaactttgactatgcctttagctccagccacctgtttaagagtaaattgctgggcaggagggggagggctagtcacggaacaaaactgtaagccggaccaggtgtgaggagaggaggtgataaaaagattatagggtggaggagcagaggctgaggaagaattgggacctagctcggcctggcgaggagcagcctggggaggaagggagaggtcagatgggtctgtagaaaaggaagattagaaagactcagcgatgctttgggttggtactgaggggacaggcgggagggaaagaaggaagatttgggatgaattgcactgggcacagagactaggaagggactgatgtgtaaaagaattcctggacgtcaggcacctcagaccgtttgcctattttacgacaataattatttaga

SEQ ID NO: 308593 - DNA, 1000 bp, Homo Sapiens
gcttaaaaagaagggacagaggcacagaatatcggtattaggatgggtcttagcaattttgaaatccaactcagagaatttttcatgtattgaaagcaatgctcagtaaggtattccatgttgctcaaagtcatacagcatgttaggatcagagctaatattagaactcagtatttctcactccctaaaattcagtgcttttaaaatatatcctactgctatattgtcaccataggctctgggttttattaatagcagataacaaaaagcagcatgggactttatttggactggtctagtccttgaggataaaggggaaaaagccccactttgatcttcctgttttctaacggcaacgagaaccaaaaccagccacacttacattctgctaagactagaacactgtctaaaatgaaatgggtttgatattccactgtatttccactgtattcattagcacttttttattcttttgagaatgtcttacccaaacaaatagtttgattgttcattataggaccttcctgaaagatacatcaactcttcaatggaaaacattaacagaaaatttcactataagattctttcaatccctgatccccaaatcctcaccttgctattttcacctatcttgggctgttgtattatgatgtttgccattcctaatcaagttcctatattgaaagacacatcttaaaccacacctttaattctcaataaattctgatcctttcttcctctcatctgagacactgctgcagctttgcagaggcggtagtctcccttcctgtgggtaacaatcaaatcagctttgtcttatcaacacgttgtgttagcgatggagccaatttcttaacagcaactttagagctgtggaaaggacatcaggatatcttttcacagggggtatctgtgtctgtaaagttcttaatgtcaccacatagcatttacaagagcggtacggggtgacaaagactctctccttgaccaaattttagca

SEQ ID NO: 308594 - DNA, 1000 bp, Homo Sapiens
gatcagatattgagggtgatcagacatcgaaggtaatcatatcaagtttaagaggattctctctaaactgacttagtatgactcctcctaaaactggactctgcaagcatggacatggcagtctgaggtcaaggccaaatcaaaagagggctgagaggagcctgattgaagtttggtcaaggggaaagtatttgtcagtaccaggtacctgcattcgatgtttgggatacatcataaaacagaatagtgaaaaactctctgctttaaggaattcatattcctatggagggagggagaaaaaatagctttcattgaaaagataaaatttgaaaaagactaaaatgttaggaacttagaaatgcaggaatctggagaatggtttttctaagtgtaaacagagtagccagtgtgagaaccacaaagttgaatcatgcgggtcaagatctagcaaagatctataacatttcttctcaaatatacatacacattcacagggaatcttttaaaaatgcagattctgatttattaagtataggaaagggagggttgatattctgcattctgacaagctctcaggtgaggggaaagggtactgctgttccactgcctagactttgaataaaaatagtctaaggatagatggaatgcaatattcataaatcccattacaagtttaccatcctgaaaattttggaatcaaggcagaacttcagccttatgcttccagaattttttatcatcccatgctaattccacaaacactttttaaaattaggacaaaaaaaacctcaaccaaaattggtttaagtagaaacaaggaatacattatttcctatagctgagctgcctttatcaccctctagaacttcaaaaattcaaaggctgtcatcattagtctcttttcactctgcttttctttgtattgggtttcattttcaggcagattttctccacatggtttcccccttagcaactgagacatatcaacacagcttctagt

SEQ ID NO: 308595 - DNA, 1000 bp, Homo Sapiens
gatctaacaggttcttagagaggtagggaagcagtcttctagccattacaaaaaaaatcctctggtgatgggaccaaaaaatgagggagaccccaccagctgagctgtgctcaacaactatttttttttttttttttttttttttttgagacggagtctctctctttcgcccaggccagagtgcagtggcgcgatcttggctcactgcaagctccgccacctcctgggttcacgccattctcctgcctcagcctcccgagtagctgggactacaggcgcctgccaccacgcctgactaattttttgtatttttagtagagacgaggtttcaccgtgttagccaggatggtctcgatctcctgaccctgtgatccgcccgccttggcctcccaaagtgctgggattgcaggcatgagtcactgcacccggcctcaacaactgtttttaactctaagcagattattggtaccagtaaatgccacatggtgcagtggattgttgaaacgtaagtggaaaagagtgtagagatgtataggatttcatgtagcctgtgtcctgaagagaccctgagagactccgtttgttagtttacacaacaaaggggatagtcttaattaaacttatcaaaaaaggtagtgacatgtgggtatgctactgcatacctgctccttcagagtgccctgacagcagccacaacaagagaacagagaaaaagcaacagagcaccatgccctagtctgtcagtgtccatggcacagtggctcctggccactccctcctaaagatcgaccagaatagagtggagtagtaagcatggcggccatgtccccctcctctctccaaacaacctctaccactgcatagcccggcacataggcactgcgatggtgttcagaccagcagcagccttctgggcaccactgtcccaggaacatcccagactgtgtccagattaggcccccctgcatcacccccagggatcctgggcatgaaactgggc

SEQ ID NO: 308596 - DNA, 1000 bp, Homo Sapiens
caaaagtcaggtctttaaaacatttcagacttattaagaaacatttaggccaggcgtggtggctcatgcctataatcccacgagtttgggagaccacggtgggaggatcacttgagcccaggagtttgagaccagcctgggcaacacagcaagaccatgtctctccagaaacaaaacaaacaaaagaaacaaagaactgtgacaaatatataaacgacctgctgcctggaaatgaaagagttctatgcaaggaatctaaggactgatttaatactttcttttaaaacaactaaatagcaaaaatcctttttttttgttttgagacaggatctctgttgtccaggctggaatgcaatgtcgtgatcacagctcattcaaccttgacctcccaagtagctgggatcacaggcacacaccactacacccagctaattaaaaaaaatttctgggctgggtgcagtggctcacacctgtaatcccagcactttgggaagccgaggcggatggatcacctgaggtcaggagttcaagatcagaaacgtggtaaaacccagtctctactaaaaatacaaaattaggctgcgtgcggcggctcacgcatgtaatcccagcactttgggaggccaaggtgggtggaatgcctgagctcaggagtttgagaccaacctgggcaacatggtgaaaccccatctctactaaaatacagaaaattagctgggcgtggcagtgtgcgcctgtagtctcagctactcagggggctgaggttgaatccgggaggcggaggtagcgagatcgcgccattgcactccagcctgggcaacaagaatgaaactgtctcaaaaaaaaaaaaaaaaaaaaaaaatctttttctgtggagatggggtctatgttgctcaggctggtcgtcaagtcctgggctcaagcaatcctcctgccttggcctcccacggtgctgggatcacaggcgtgagccgccgcacctggcccacaaagcttttcc

SEQ ID NO: 308597 - DNA, 1000 bp, Homo Sapiens
gatcatcgaggctctgtctctcagctgtaaagtgaggacagtaaggaccatctcatggtattaagctaaaacattcacggaaataaatatgtaatgctcagagtaagatgccacctagtgaacagtgggcctgagtatttggtggtggtcattagagagcagaggcgctggcctcagggttcagcccacagttctgcctgtggagaggagactcagtgacaagagagaaaaaagtgtccgacatcctggggactgagaatctgcctctcagggttggacagggcagggcctcttctgcctccagcaccccaggcctctctcctctgattctatcagggacggaggccaaggttggagacccctaggccttttcacctaacttggttttcaaattcctcccactaggacttgcctgtttcagccttaaccatggttgggcctgacctacacgggattgagagggtcagtaaattcgtccccaccactgactgggtcacctacctgggcagtacacatgctgctctcggcaactgtttcttctcctgacacttatgattttatatacaaattgttggaagttatgtcgtaatatagtccttttggtaagagtatatatggtcaaggatactgtgactgaatttgaagagtaaataatacagctctgtattgagctatataatgactagggctctctttattttggggacagagtgagaacttcttcacttataaggtggctttgtcttgattggtgaaaatagagaattatttcattgttgtataaaagttcaggccaggcacggtggctcatgcctgtaatcccagcaccttgggaggccaaggcaggcagatcacctgaggtcgggagttccagaccagcctggccaacatagcaaaaccccatttctactaaaaatacaaaaattagctgggtgtgatggtgggtgcctgtaatcccagctactcgggaggctgaggcaggagaatcgcttgaacccag

SEQ ID NO: 308598 - DNA, 1000 bp, Homo Sapiens
gatccatcaagcctcaataagagtgagcaaaaatgaaaaggagataatgaaggtctattattttattttccaagcaccagtaaagaaacttattcatagatctttgagaatgatacatttgtttaatattaaaataatgttatttttctgagtcacatttttgcattaccagtgtattactgggctatggtaggaggaaaagagtaataatgaaatcatgaaatggttattaaagcttcccttcaaaagtcttatttgttatgtctgtcctttcgattgaccaagggaagtcacacagccaagaattatgtcggtgagacagggaatatgacccctgcacacagagggggaactaaatacttggggaaaaaataacactcagaccacctttccaaatatgaaaactagggcaatgctgtcagagagcctgattaagtcagtgtaaggaaaatctatccctgttactcacaatgcttacgcaagcacatgtacttctggaatatctttatttccaatggaacatgtataagcccaagaaaaaattagcttgtgtcactgactgtttaaagcttgtatattaaatttaaaaagtgttttccatattgccaaaagacatatccacaatcttcttccttaattgagatatgataattttagtgtttttttttccatgcagttttttttctctttaatttcagaaatttggcaaaaagctgcaataccccattgccttcagggagaactttgttatagaaccccaagaaggatgaacctacaagttaaatctcttggctttttcttcctaaagcttgaactactcctgttattgtgcaagatgttatagaaagagacgagataatgcttttgaggagaaggggagaagaatggtgagggtgacagagaggagagagagagagagaaagaaggaaagagacactgaacagaaaggaagattactaagatgagtagatggtgggtgactgcatagaggatgtggaga

SEQ ID NO: 308599 - DNA, 1000 bp, Homo Sapiens
cattggggaaaatattcatataaatcttaatggctacataaggaagtattattaaaacaaccaacaaacaaattgacattaagtcattcccaatttggacagggaggacacattatggcaaaaattagattttgctaaaaacatttcaaacttcactgcaattttaatcatgtcctcaatttcggcaagcctgtcttccaaacttatgcttttaataacttgaatccatgacaattttttcctattctgatgataaaagagccaatacatttttatacaaaaggatttattaaaaaaccagtaagacactactacatcatgacactgtcacactgggcttttaacacaagacttgctctacaatactgggggaaagggcataaaacacaaattgattctgaagcatagcaattaagaaataaaacaatgaaagcaaatttcttttaatgagaactcagaattaaacttcagagggacccaacgtcatacttccattcagggacttgatacaaaaaatttagtttgaactgctattagcaggtggcaggagccaccttcaaatgaatcttcaaattggaaaatactgcttcaccacctggagacaaagaagaaaaaatagaagtcactctgggcaggctacaacacttaacaaaaatttacataaaactgagttatccctatgttccactatatgtaaatactgtataacattaaatgtgtgatatgttttataaattaaagctgaacagtagagtccatgagctgtaaatccacatgtgcaccactggtttaagatgtgatatgcttttacaagtattctttaaaatataaaaagctttaaagtatttacccaaagaactcataaaaaggtcaatttggtaaaaggacattttgacccaagagcatctaatatttaagcttattttattggataagcatatctcttgtccatcacaagttatagaaaagttatatacgactaaaagaaaaagttatctac

SEQ ID NO: 308600 - DNA, 1000 bp, Homo Sapiens
aaggcttggtttcaggattcttcaatattattttcataccacctctttcttgtttttgtgtgatagctaatcattctttgatgttacaaggccaaatagacattaagtagctgagcattgctttctgtttgtttgttttgttttgtttttcagaggcagggtctcactctgtcacccaggctggagtgcagtgtcatcatcatagctcactatagcctcgaactcctgggctcaatcgatcttcccacctcagcctcctgagtagctgagactacaggtgctgtaaagaccctgtctctatggagaattaggctggcatggtggctcacacctgcaatctcagcactttgggaggccgaggtgggaggatcacctgaggtcaggagttcaagatcagcttggccaacatggtgaaaccccgtctctactaaaaatacaaaaattagccaggcatgatgatgtgcacctgtaataccagctacttaggaggctgaggcaggagaatcacttgaacccaggaggcggaggttgcagtcagccgagatggcgccactgcactccagcctcggtgacggagcgagactctgtttaaaaaaaaaaatttaaattagccactacccctagctaatttttaaattttttgtggagagagggcctcactgtcttgcccaggctggtctcgaactccaggcttcaagtgatccttctgccttgacctcccaaagtggcgggattacaggtgtgagccactgtgcccaactcattacttttttaaaaaattactttccatttctagtttatatatgacaggtacttactttaagtagtaaatattatgtttaacaataaataaaaatgatcaggatttcccccgacatgctttcctttcttctctttttcttcctttctctctcattttatcccttctcctgccctttttggaagtccttattggaggaaaaaataacttgccctatttgtttcctcactaattgttatc

SEQ ID NO: 308601 - DNA, 1000 bp, Homo Sapiens
gatccaaactgaaagcttttatatgacaaatgattccacagaatcgctgacaaaaataaaagacaaacatcctggcaaaaaatatttacaatgtatgtaaaacaaaggattcatagccctgacatacaaagagctcctacaaatcaataaaaagctaactaaagaaaataatttacgagtcacaaaagaatacagatggctaaaaaacatagaaaaagatgttaactactgattagagaaatacaaattaaaccaatcagattccattttcttaactattagataaaatttttaaagacagataatagcatagggagggtatgggcaaaggttcattttcatactcggcaataatataaattgggacaaccattttagatagcaatttggcagtatatttaaatttaaatacttgtacctttcttttacccagaaattccacttctttttttttttttttttttttgagggagtctcactctgtcgcccaggctggagtgcagtggcgtgatctcggctcactgcaagctccgcctctcaggttcaagcaattctcctgcctcaacctctcaaatagctgggactataggcgcccaccaccacgaccggctaattttttgtatttttagtagagacagggtttcaccgtgttagccaggatggtctccatctgctgacctcgtgatccgcccacctcagcctcccaaagtgctgggattacaggcgtgagccaccgtgcccggcccagaaattccacttctaagaatctaccccatagaaacataaaagagtcttgagataaatacataaaaatattcactgggctgggcgcagtggctcacacctgtaatcccagcactttgggaggccgaggagggcggatcacctgaggtcgggagtcaagaccagcctggccaacatggcaaaaccctgtttctactaaaaatacaaacattagccgggcgtggtggcaggcgcctgtaatctcagctacttggga

SEQ ID NO: 308602 - DNA, 1000 bp, Homo Sapiens
ttattattattttgggggttatatttgagatattccagaatttccaggattgaaataatttaaagccagagagctgggagccttccacatattgtgtatcttaaagagtaatattggggatttacagactttactcagtgaatttactgacggtggtctgaacatacatgattaaaaaacttagaaaaggcatgacaatagttctgtcttccgaatttctggatacatcaaccttcaactgctatgggttactaatctttaattttaaagagtattatgtacttaagtaaagataaattctgacaaattgggatagtttgcatcagtaagaaagtttattgaaattcattagtaaatgagaacacaaagttgtttttctttccattaaagaacactttgtggtaaagtgaaaagaagaaatacagaaaccacaaaacaccttgtagacaccttattttcaaggtctatttccatagaccatcaagacagaagtgttttcttggagactttgttttccatgcatctgtaaataatggtctgtgtgaagggagactctttcctcttgatgcagtttaatagtagtgtttcttggtttctgattcaaccatagatgaaagaactctaccgtcgggcgccacctcttcaataattgtcttgattactctggttttgttagtatctgtgtgaatgatggaaaaaaaattttaaacagtctgtagggatccttagtaattaacaagcaaatattgtaaaaagaaggaaatttcaactttacattgttaagcccaaaaaaatgcttaaggtatgacattttgatcatgccatttttcacggctggtgttaagagtagtttgtgaacaaatgcaaacggaaccgtctctaagatttttaattttttaaaacaactctagagcttaaagcgcaaaaaaaccatcacaggaagttaaaactaattctagattaccccagctagtttctgctgaccttggtcccttagatg

SEQ ID NO: 308603 - DNA, 1000 bp, Homo Sapiens
aggtcctggttcggtgatggcacaggggcacacataataacttcctgcctttcagggagcacagctcagctccacagcaggacacctgagcagccagaagctagaaagatgcaagcctgcctccaagtggtcacatgtcataactgcagcccacaacccagaccctccaggcagaggtgcctgggcagcattgactatggcaggccaggcagccaccatcatctggctctgaagattccacgtgctcaggtgaaagagaggtgccggttctacatgagcaaaggagcatcaaagtgtcacacacacatgcattcagactttcaccttttatcatggttttagaaataaggatgcataggccaggtgtggtggttcacgcctgtaatcccagcactttggggggccgaggcaggcagactacctgaggtcaggagttcgagaccagcctagccaacatgacgaaaccccatctctactaaaaatacaaaaaatagccgggcgtggtggcacacgcctgtaatcctagctacttgggaggctgaggcaggagaatcgcttgattcagtggaggttgcagtcagccaagatcacaccattgcactccagcctgggttacaagagcgaaactccgtctccaaaaaaaaaaaaaaaaaaaaaaaaaaaaaaggatgcatgttcagtgaggtcaaataacctactccacttagtttgtaagcatcagtcttgggccaaaagtcatgtccacttgatgctgggattccacttcaatcaaatgaggcaattggactctactgcagctaactgctacttacacatcagaattacccaaggagctttaaacatatttatctatccctctgacccaggctgactgaatcagcatccctgggtgtgggctgggaatgtgtcttttcagcacacttccccagcaagataaaagtgcctctgtaaactgagagcaggaaaccagtgggcaagattgtcaactcatggagtcagg

SEQ ID NO: 308604 - DNA, 1000 bp, Homo Sapiens
ggaggaaggtcctttgacgcacccattccctaagggattccaggtaggagtcaccctgaatcctttggggaggggtgaggagcactgtcccatttgaaggggtctgcagagcctccagacatccactcatcccatctttcaccccaactcagggtgacctaattaccattttcttaacccccactgcccacccacaaagagtggacagcaaagagatgtacaacagtcatcaacagacatttattgaactcctgatgtgtgccaggccaggcaccaaggaggagcacacagaggtattagataaagtcctggcccttgaggaacttctggatgatctgaggaaagaaaagtaggtgggcagaagcttctgtcaatcccaggcttctcccctctctctgtggtctcaggaaatgggagagccagaaaggggtaccttgtacagtgtccaagacatacatgcacaggctacacatgtacaagacatgtgcagagtccacgcaactacaggacacgtgtacagacacaaggtgcatatgtgtcacatgtgggtgggattcatgtgcagagtccatatgtgcataggccatgtgactatggcacaagaactccatctccccaagtcaggctggagagaaagggggagaaccccagggcctctcaaggcctctcaaggctgaggctggtactggccctctgtggccgtgaagaagtcctccagcacactgcgcaggtagtcaaaggtgggccggtcctctgggcgctccttccagcacagcctcatgagttggtacagctcctctggacagttgtcagggcgcaccatgcggtagcctcgctccaggttctgaatcacctccgggttggtcatccctacgggttgatgggtgaaaggacatcaaggtcaggcactggaagcccacaggcaagggtaatgttcggaatatttaactggcacagtgtgagcaccaatccaaaagaatcttggtcttcatcaatggta

SEQ ID NO: 308605 - DNA, 1000 bp, Homo Sapiens
aagttcattataaaagcaatgcttttgaacttcctaataatgactttattcactattttacatttggctcatgctagaagacagttacaagcatagaaaatggacccaaggacaaacatttacttgggagggaaataacacaaagaagcatatcaatcgatgtctttgtcagtcattctgtgaccaaccaggagcggggatggctttgctctagattctggcagccagtagaaaccatctctagaaaccatctcatctttatccataatggtaatagagcacagtgttctctagacatgtagatctgccacatggaaagctatatcatgatttcttcttggagagtgggcagtttcagcaggacctgtaagtttgcttaggttttctgaagatatcggcattaaagacttacacattccttttgtcctcctaacgtatttcgtaaccacactctcaacattccaataagttttgaacttggaggcacttagaacataacataattacatttctaattttgtttcagtttgatatgtgtcccttccttcctttttttggtagagacagtgtctcactatgttgaccaggctggtcttgaacacaccaggcctaaagtgatcctcctgcctcagccttccaaaatgcaaggattacaggtgtgagccacgtgcctagcctatactccttctaatcaagttgttttatttatttatttatttatttatttatttatttatttatttatttattgagacagggtctcgctctcttgccctggctggagtacagtagtgcactcttggctcactgtagcctcgacctccggggctcaagtgatcctcctgccttagccccacaagtagtggactataggcacacaccaccatgcccatctaagtttttgtattttatgtagagacaaggtttcaccatgttgcccaggctgatcttgacctcctgagctcaagtgatctgcccacctcggactcccaaaatgctg

SEQ ID NO: 308606 - DNA, 1000 bp, Homo Sapiens
aatgtatgacgtgcagcaagtttcatccaacagtgggttggacgctgggcgtggtggctcatgcctgtaatcccagcactttgggaggctgaggcgggcggatcatctgaggtcaggagttccagacgagactggccaatatggtgaaacccggtctctactcaaaatacaaaaaaattagctgggcgtggtggcgggtgcctgtaatcccagctgcttgggaggctgaggcaggagaatggcttgagcccgggaggtggaggttgcagtgagccgaggttgcaccactgcactccagcctgagcgtcagggtgagactgtctcaaaacaaaaaacaaaacaaaacaacctttagttgaacatctccagaaaaaagtggaaacaatttcttttttaatttagcaatgtcccagaatgatgccaaaagataaatatggtaaaaggtggttagtaacatacaacataaagcccaaaggcttgtatacccaactgagtgaaactagcatgtttaagaatagagtaggagattgggaaaatgtaaggaagaaaccaactttccaggttaaggcttaattctgattgaagtaaaaagttttctatttggaatgacagcttgactattctactttgtagtcaagatgaatgaccagcataaaataactggctggtttatgacaaaatgccaaatgttgggggttaaaattgctcattttacttaagatgtgacccagctgatagacactaaattagaggaaagtatcagtgtcagcaaagagtaagttaaagacattttatactggcaaaatactttcctaagtattgtcagtgttctgctggttggaacttaatttgagacagaatgttatggctggaggggactctagaaatatctggtccaaatcattttacagatgggaagcttgctaaaagctgaaattaggcaaaacaacttttttttttaataaagactcttgagttagtagaaaaaaatagtatcacc

SEQ ID NO: 308607 - DNA, 1000 bp, Homo Sapiens
cagtgttcctggttcctatcttgctgctgctgcaggtgaagcctctgaacgggagcccaggccccaaagatgggagccagacagagaaaacgccctctgcaggtaggtggaaaaaaagacaggagccatacagagaaaacaccctcttcaggtaggtagaaaaaaagacgggagagtctggaggctcagggtgaggtctgtgtgaggccaggccccaggtcactgatgaggctagggtgagacctgacataggtctggtttatggggggtaactccagccactgatggttatcatgtgaaataatagtgtcggctcaccatgggccagctgagcttgcatgcaacttctgtgtgtgtaagcatggtgcatttggctggcttttgtcatgcttcaaggtggcccctgactcccccagtgttgaaaccctagaggaggcagctaaccttaggaatggtgtgtgtgtgtgtgtgtgtgtgtgtgtgtgtgtgtgtgtgtttgagttggggctgtgattgaacacagaccagaaaaaacctctagaaagagcatcccctctctggtgaaggctaaggatatgggcaattgggactgcagccctaggcttcaacgtgtttttcctattctaacttctcctttctggttcaggccagggtcagggctcagtccttgtccttttcccctgttccagaccagaatcaagaacagttcgaagagcactttgtggcctcctcagtgggtgagatgtggcaggtggtggacatggcccagcaggaagaagaccagtcgtccaagacggcagctgttcacaagcactctttccacctcagcttctgctttagtctggccagtgtcatggttttctcaggagggccattgaggcggacattcccaaatatccaactctgcttcatgctcactcactgaccctccctccctcctgggctccaggtcacaactcccaaaggagatgcaggcatggctctctgcctctgatcacca

SEQ ID NO: 308608 - DNA, 1000 bp, Homo Sapiens
aatgttagggtgttccaccttgggtgatgctaaattgaatcacttggttattgtggtgaccattgtaaaggtacattttcccctgtataattgatacctcttctgtaggattatatttaaatccttgtagaagatcctattccacaatagcttttcatccaatagttttagcatctattgatgaacgttacgtgaaaaatctatgaactgctctttatgaacactttttaaagcctttataaaactattttctcttactgtattttcactttttgcttaacctaaatttggccctttttaaaaatcctaaaatcatatggcagttttagaatggtagctggttgctgctatagtttgcatgtttgtcccccaaaatctcatgttgaaatttgatcccagtgttggaggtggggcctgatgggaggtgtttgggtcatgggggaagacccctcatgaatacattaatgccgtccctgggggtggggtgtgctggggaggagaagcaaggagttctcaatctattagttccctcaagagccggttatttaaaaagagcctggcaccttctccctcgctctcttgcttcctctcttgccatatgatctctgcacatccggctccccttcaccttccaccatgagtggaagcagccggggaagaagcagatgctggtgccatgtttcttgtacagcctgcagaactgtaagtcatataaatctcttttccttataaattatccagcttcaagtatccatttaaaccaataagaaacaaactaaaacaattgccctaagttgaaattcaccctcagggtcgtcttctaagatgcaatttaaattatcttctctacagcaattcaggacaacaaactagcataccccatgttcctcaaatatatcttctccagagctcatgccagaccccttgtccagacttcctgggtggtctcctctctactcatctaacaccctggcatatagttggaaggcccactgggctg

SEQ ID NO: 308609 - DNA, 1000 bp, Homo Sapiens
gttaactgactgagaaaacactaaatttctgtctatttcaaagagaaagacttgataatggctctacggatgtgtgagatcagttttaataggataacttttttttattattatacttcaagttttagggtacatgtgcacaacatgcaggtttgttatatatgtatacatgtgccatgttggtgtgctgcacccattaactcgtcatttagcattaggtatatctcctagtgctatccctgcccctgccccccaccccataacagtccccagagtgtgatgttcctcttcatgtgtccatgtgttctcattgttcaattcccacctatgagtgagaacatgcggtgtttggtttattctccttgtgatagtttgctgagaatgatagtttccagcttcatccatgtccctacaaaggacatgaactcatcattttttatggctgcatagtattccatggtgtatatgtgccacattttcttaatccagtctatcgttgttggacatttgggttggttccaagtctttgctattgtgaatagtgctgcaataaacatacgtgtgcatgtgtctttatagcagcatgatttataatcctttgggtatgtacccagtaatgggatggctgggtcaaatggtatttctagttctagattcctgaggaattgccacactgacttccgcaatggttgaactagtttacagtcccaccaacagtgtaaaagttgttcctgtttctccacatcctctccagcacctgttgtttcctgactttttaatgatcgccattctaactggtgtgagatggtatctcattgtggttttgatttgcatttctctgatggctagtgatgatgagcattttttcatgtgttttttgattacataaatgtcttcttttgcgaagtgtctgttcatatcctttgcccactttttgatggggttgtttgttttttcttgtaaatttgtttgagttcattgtagattctggatattagcc

SEQ ID NO: 308610 - DNA, 1000 bp, Homo Sapiens; identical to SEQ ID NO: 119969

SEQ ID NO: 308611 - DNA, 1000 bp, Homo Sapiens
gacggcagcggcctcccacgctggctccgggctctctttaggctgggtctcgcgctctgtcacatccctagttcgggctcatcccctagtgggttctcttgccttacggagcgagccaatggtgaagcgaagaaggcggcccgtgccgctcccaaccaatagacactctctttgtacctctagccccgcccccgcgcgtggcgccattttcacctgagttaggtttggggtggagactgggacgcgccaaggttagtgggcgttttggatccgtagccaatctgcatcgagtcctggcttcaatttccccattcccttatcagtcgatcaaaacggggactcattaaggtctgtacccgcttcttccgctggtgaaattagcgttgcgttgcatcctttcacctccgcccttttctaggtagagtaacccttagtataatgcaacgaaactgttacaagcagatcacacgctatacactgcaaccaccccctccccagctcttcagtgctcagaactcctcagtcctaatagcggcggtcattctctcttctcccgacctcaagtcagaagaactagttagaacccaggcctctcagtcctactgaccaattggcatgaagaccctcaatctccatatgccagttctaaaaagccaatcaaacgcctaaccaccagtgggcccccagatggagcaatcaatcagaatccagacccatcccagacctcccatccaattagaacccacaaccctcagtcctaaggataaataggcaccaacccttcatctctcttgctttctctcctctgtgtcccactcagagcaaccaatcagaatggggatccttcagttttccagccaatcaggcctcccccacatccaactatgcaatctgtccctgccctgatcaaaccaagcaggaccaggatcctgccatcttcaggctcatcatctaatcaatcataaactaaccatgaaccaatcacagtctgctctctctt

SEQ ID NO: 308612 - DNA, 1000 bp, Homo Sapiens
taagatttataagcaaatgcagagaactctgaatagccaaagcaatattgaaaaggaagaaagttggaggactcacacttcctgatttcaaaacacaataatcaagactatgctgtactggtataaggataaacatatagaccatgggaatagagttgagagtccagaagcaaaaacccttaaatatatgaccaactgatttttgacaaacaattcatggaagaaaggaaatcttttcaacaaatgatgttgatacaattgaacattcatgtgcaaaaaaaatgaacttagacccttacctcataccctgcctaaaatttaattcatgaaacatgaaacatagactttaagagctaaaactattaaacttctacaagaaaacatagaagaaaacaatcatcaccctgaattcggcagagttctttgatacaacacaaaaacatgagccataagagaaaaatttgataaattgggctttataaaactaaaaacttttgtgctgcaaaagacatcaatgagaaaatgaaaagacaagttataggctggggacaacatatttgcaaatcatacacctaataaaggcattgtattcagatatctattcttacaatttaataataagaaaaacaactcaattaaaaatgggcaaaaaattcatatagacatttcaccaaagaagatacatgaatagttaatagtggtgaagataaatatgcttatcatcaccacttattagggaaataaagattaaaaccacaaaaagataccactgcatgcctactagaatgactgcattgaaaacaaaaaaaggactaagtgtttgcaaaagcataggggaagtggaaccttcacatatttctggttttcattctttggaaagcagttcagcagtttcttaaaaagttaacatcaaaagtctgaaacagcacaaacagacaacctaatgtcacacctcaaggaactagagaaacaagaactaaacccaaacccaggagaagaa

SEQ ID NO: 308613 - DNA, 1000 bp, Homo Sapiens
cacctccccaatacacaacacagcagcttgatttaaactgataatacctcctctgaacactccactgtcttcctgtctcatacaaaatgaaaaccaaagtcattttaatggcctcaaaattactcaatcttcctcccttcacacactgaaacacataactatgaccctatctcctaatattatgcttctcattttaataaaatgaacaaacttttgataacacttaccagaagaaaaaaaaacagaaaataaataaagaaaatgaatgtaatcagaatacaagcaatattaagatttattattgaagtatatagtcaactttatgacaaccaatttgaaaacttaaaggaaatggataaatctctcataaaattaaatgtattaaaactggcttaagatttctggttttggggctgacatgtaagaaacttggaagtcaccactccaccctaagaacaagaaataagctgaataaactgaaaaattagcaattcttcttacatccattagagaaataaagtcacatggcaaactactgccctcagaattaaagagacagaaagatgggtacagagaatcactacatactgaaacagaaacccacaagcaaacacttccctacgaattagtaacaggaggaaaacctgaactgtaattgacaaatggcttaaagctcagtatagttgagtctgagagttaaaaactctggggagtggcagacacctctgagatttacctcttggatatcttcagtgttcacagtaaatacataagaaaaattcccttaggatttcagtaggtggaggaaaaaataaccattttgaaatactccatagcatctgttcttcttaacaagacccgtcctcaagaaaaaccattttaccttagcctaacctcttggaatttcatcagtacctaaccaaccagagagaaagttaatgtcgaactttagattcctctaaccttcgatgtgggggagaaatactcaatttcatctttt

SEQ ID NO: 308614 - DNA, 1000 bp, Homo Sapiens
ctgcattctctctctacattgctgaagttcggggcagcccagcttgcgttggggaaggaaatcgctaagaagtgtgaaaccacaggagacattgcccagtacctcggctggtgatatcagccccacaaagcccttagtgatctgaaagtttcctctcccagtgcagaaatcattccagatttctctatagaggccaggtatttgccctaaagagattcaatcaattcatgagaatcaaggagtagatctaaattaaatttgatctttcttaagtctggttggtcttgctttgtttacaagtaggattctctacttggtttccaaaagaacatgtttcacagaaacaagctgattgtaggcaaaccagaaaaccttcccaatgttcagtaacacattgttttaattctaatatataaaaatgtttactttaaaaggattcaccggagaaaacagaaaacacacaatcacttattttttcacccacataccaacaatgaacattgttttatctttgtctgcagaaatacacagacacacatataaatgaatggcatgcctatttgtgttattactcagtagaaaaaatggccaaaggacatgaacaaatatggcacagaataatataaaatagaccttaaacataaaaagatgtttatcttcactcacagtaagaaaaaaagcaaattaaaaccacaatgcagtactatttttacctgtcaaattagcaaaacccaacattaagcagtaggctgtcagcactcacacacattgtgggagaaggggttagggccatttctatggagggcagtttggcagtacccatcaaaattaccagtgcatatgttcaaatgacataaaacactatcattcatttcagcattttttataatagcaaaagactggtactaaaccaaggcaccgattgaaagtatgttcaccagtgaaaaatatctgtatttagctgggcacagtggctcacacttgtaatcccagcactttg

SEQ ID NO: 308615 - DNA, 1000 bp, Homo Sapiens; identical to SEQ ID NO: 119971

SEQ ID NO: 308616 - DNA, 1000 bp, Homo Sapiens; identical to SEQ ID NO: 119972

SEQ ID NO: 308617 - DNA, 1000 bp, Homo Sapiens
gatcacgccattgcactccagtctgagcaacaagagcaaaacttcgtctcaaaaaaataaaaaattaaaaaataacaaaaaatgagacagaaaacaaatattttgtttcattattgcttgttagttgattaaagtaattctgcttccactttattttcaaagacactaattgctacactgaataaaaccttaatggagtttcattataagtatctattatcatttgattattttctacatagaagcatgcaaaaagtttaaaattcagtttcatttgacttagtcttgactgtaatgaaggactctacgaagaggggacacagtgtttatgagctggagtcctagtaactgcttggtggcagagtcccagtcattccccagttcaagccatgggcagatagatgggtactgtccttcagttcttcttacccattcacttgctttctttattgcttcaaaagcccagggaatattcttaggttaaaaaaaaataaatgtttcagatttcagaatataacatgtgaaatgtaatgtggtactaaacccatcacattatatcacacaaaatgattctgccaaaagttaagatatttaataaaagcagttttccttgacatcttccggaagttcttctaaccatctgaacttgagcttatgcactgcattgtcaagtgtcctgtgccccccacctcctggcttccacgtgcctccaggcatccctgctgcctacaggacagctcaggttccagcctctctacagttgtttgtggttgtcccctttccaagcttctcagtctaaatcctatccattcttcatgcacaaactcaagtagtatttcacaaacgaggcttctgtttctctctccttcccactgtactgacttgattaggtcccttcagaatatctgacagtcccccatgaaactggcatctgttcagctgtgtcacataaaccaggaacaacttggtagaataagcttatcgagtcaagtgtgtgtcc

SEQ ID NO: 308618 - DNA, 1000 bp, Homo Sapiens
ttttttttttttttttgcctgttcaaacttgtatttattttctaagaggtcgggatgagggcatggggatggggatgcataacttgggtttcgggaggagccacagaccttggggagaaggatggagcctcctgccctcagtcgtgctgctagtaggggtgattcagggtgtgctccatgatggtccgaagcgccatccacgtctcctgggccgtggggatgatctgtgtggccggcagcaggaagccatactgcccagtgtcccggagctcaaagctgaaggcgtacttgatgccactgtcataggcccagtcgacggtgatcccactggccacatagagggtggtgctgatgctgccaaaaatgtactcgatcccatggaccttatacaaggcctccaccgcatccttggcaagatcgtacaactccctctgatttgaaacgggctccagcaatcggccgtaagggtacataagcatctgagagtagctgtggatggagatcagagccttgaagttgccatgggctgtgatgaagttcactatggcagccacctccggctccgactgaggggagggcccgtgataagtttctgagcaggggttgctgttagaaccatttcctccaaaacccgacttccagttcctgttgagatccacgccgatgcagaagattccaggtctgatggacttgttcttccgccataagcggttcatgctgtgggtaaaagcaaacccatcagggtttgtgacgagctctatgaagatgtccatggcattcagtatgtctgtcaggacacggtctttgccataatcactgacaatcttattggcagtccagatgccggtggcatgggtgatccactcccgggagtgaattccagtgtcgatccagatggctgggtgccgagaacctccagtgctgaacttcaggacaagaatggactggttttcaaagctgttgccaatctgaatttttgagacaatatcggaatgctcca

SEQ ID NO: 308619 - DNA, 1000 bp, Homo Sapiens
ggatcctggcagagctccagggagacatctggggtccgtattgccatgaagcccctggggctaggactccctagccattccttctccactcctggcaggctgagtgaaataaaggacttgttatttcatctcgaggcctaccggagagccttgccttgcaaaggcagacagtcagtgaggaagactatgtggcacatgaagacaccagaggtgttcctcaggatcaaagtatgtacaagcctttgtgaatattttttccttctcacttggcaaatacaattcctgagatcaataacctcgtctttttaattttttcctcgtctttttaactatttataaaatattgaattataaaatatgtaattataaatactttaattataaaatatgtaattataaatactttaattataaaatatgtaattataaatactttataaaatatgtaattataaaatatgtaattataaacattttaattataaaatatgtaattataaacattttaattataaaatatgtaattataaacattttaattataaaatatgtaattataaacattttaattataaaatatgtaattataaacattttaattataaaatatttaattataaacattttaattataaaatatttaattataaatattttaattataaaatatttaattataaatattttaattataaaatatttaattataaatattttaattataaaatatttaattataaatattttaattataaaatatttaattataaatattttaattataaaatatttaattataaatattttaattataaaatatttaattataaatattttaattataaatattttaattataaaatatttaattataaaaacacaattacctcatctttttaaatatttttgcaaaatatttccctccataatttctccgtttccatttttattctgttacttaaatcacactatgtgttctagaggttttgctgtgccagaa

SEQ ID NO: 308620 - DNA, 1000 bp, Homo Sapiens
cccagttaaccttttaatgggtcccaaaattctgtgacaaatttgggggtcaagttgtttccattaaaaagtactgattttaaaaactaataactaaaactgccacacgcaaaaaagaaaaccaacgtgtccacaaaacattctcctttccttctgaaaggttttacgatgcattgttatcattaaccagtcttttactactaaacttaaatggcaattgaaacaaacagttctgagaccggtcttccaccactgattaagagtggggtgggaggattagggataatattcatttagccttctgagctttctgggcagacttggtgaccttgccagctccagcagccttcttgtccactgctttgatgacacccaccgcaactgtctgtctcatatcacgaacagcaaagcagcccaaaggtggatagtctgagaagctctcaacacacatgggcttgccaggaaccatatcaacaatggcagcatcaccagacttcaagaatttagggccatcttccagctttttaccagaacggcgatcaatcttttccttcagctcagcaaacttgcatgcaatgtgagccgtgtggcaatccaatacaggggcatagccggcgcttatttggcctggatggttcaggataatcacctgagcagggaagccagctgcttccattggtgggtcatttttgctgtcaccagcaacgttgccacgacgaacatccttgacagacacattcttgacattgaagcccacattgtccccaggaagagcttcacccaaagcttcatggtgcatttcgacagattttacttccgttgtaacgttgactggaccaaaggtgaccaccataccgggtttgagaacaccagtctccactcggccaacaggaacagtaccaataccaccaattttgtagacatcctggagaggcaggcccaagggcttgtcagttggacgagttggtggtaggatgcagtccagagcctcaagcagcgt

SEQ ID NO: 308621 - DNA, 1000 bp, Homo Sapiens
ttggtggtctcttcacaccgacacgcgtgataattattatattacttttaactaaaaccctttcagagtctcgcagggaaggctgtatatatctcataaaatgttggggcccactggatcagacaaggccacaaaggccaaagggaagtaaagatctcattatttctcctaataatttccctgtcctttgtcataaatggtgggtaggctgttatggtgatggcagattttctttccataaaatgtccataataggacatttgaacagaagggaaaaatcaaattgctgaagttgaaagagggcaatgcaaagaactttggagaaagaactgtacagagaagtcaactggcagataggaggaagtttaaggggaaaaatatagatgtctaaagaatacatttattcattttccacagtgcaatttggacaagaagcctctttcttgcttctttctattctcattaaatcattagagctcaagcaatccttctgcctcagcttcccgactagctaggactacaggtatgtgctactatgcccagctaattttttaaaaattagattttaatttggtgaactatttctgtaggaaactacaataatacagcccaggcacattgatcttgggtgaacaaatcagaaggaatgaataattctgtgttcctgggactctgacaatttcatgaacttggtactctgagtaaagcataggaggagttatttcataaaatgtggagcacaatcatgtgacgaagataatgggatccccatttcataaataaatctgaagttcagagagagtaacaactggccagggtcacatcacggagacagaggcagggttcccactgatgcctctgactccctgtcccaggcccttcctcctcccgcaagcagaagtgcagggggcagagctgaccctgtgcagtgaaaatctgagggctgagttcctattggaacacaagtgaaagacttcctggcttctaatctcaggataag

SEQ ID NO: 308622 - DNA, 1000 bp, Homo Sapiens
aattcctgacctcaagcaatccacccaccttggcctcacaaagtgctgggattacaggcatgagccactatgcccggtctatttttctaattttattgttttttttgaggggggatggagtctagatctgtttcccaggctggagtgcagtggcgcagactcggctcactgcatcctctgccctgcctcctaggttcaactgattctcctgcctcagcctcctgaggagctgggattacaggcacgtgccaccatgtctggctaatgtttgtaattttagtagagacaaggtttcaacatgttggccagcctggtctcgaactcatgacctcaagtgattcacccgcctcggcctcccaaagtgctggaattacaggctgactaattttattgtctatacatgcagccccaaccagaatataagctccataaaattgtggatttttgtcttattcccgctgaatataacagcccatgcctagaacagtgccttgctttcatgaatatattacattccggctggcgctttccttcctccaatgcatgcacagctgaaaaagcccttatctcccatcgcactcctgttgccttgtcccatgttctgacataaagcggatcatccacatgtggggatgaatcttgtgccccgctggaagagatccctgtggctgccggccctggtgcctggggtgagacctaacagtagagagctcactactaggaaaggagaggcattcccaacacagagaagtaggggcggacaggtcccgaggctggagggcgtgtgcagatgggtcgggggagcaaggggctgtcagcttcattaaggctgagagcaggcaggagcgaaacagctggctttgctagccagttacacactcaccgctgtccacggatccctgacactggacgactgttgtgccggtggcccccccaggctgctgcagtctgaggagaaaagccagatggtgacactgcgtctctcctgccccttacctcc

SEQ ID NO: 308623 - DNA, 1000 bp, Homo Sapiens
gacactgtgatctgctcaccaggtgggcaaaaacaaggggtctgatggcatcacgtggggtgagaacgtggggtcaaggggctggaaagcactccagagagaaacaccgaaaatggggttttacagtcacacaaggagacgagctcctggatgtcggctgatcacagaaaacctggcaacagccaaagggcaccccaagaaggtaaggcccactgtgcagccactaaaaaggcggaacagagcacagatgctggtggatgcaccccaaaccagctgagctgggagctgcactcccgggtgagctgactccacttggagcattttttatacctgtgaaaggtgacatggttttgttcatgccacagataaatacatacagaagtattttcaaagcagtcttgaggggtgcaaccctcacttctaataagaggcctcaggagagagacttgggccctcagcgttacccctaacattttatttctttgacaaaaaatgtctgggagtgggctgagtgcagcggctcacacctttaatcccagcactttgggaggccaaggcaggaggatcgcttgagcccaggagtttgagaccaacttgggcaacagagggagaccccatctctacaaaaaagaaaaaaaacaaaatatctgggagcaaatgtagcaaaatgtgaatgcctgttcacatgcagtggcaggtatgagtattatatcattctttgtactttttgattttctcccaactaccaaaacaagcaagagtacttcctttccatctgggttttacccatatgctttgcgtgtgtgctcgtgaagaggtgaggtatcaatgctctaggtgacacactgggcttcccagagtcactttttttttttttcttgagacagggtctcactttgacacccaggctggtgtgcagcagtgagatcacagctcactgcggccttgacctcccaggcttgggtgatcctcccaccgcagcctctctagtagctgggac

SEQ ID NO: 308624 - DNA, 1000 bp, Homo Sapiens
catagcccatgatcttaactgcaagctaaacttacagggtcgtctgagaatctctgttcttccctgtgcagttgaaacaatcaatgtggctgtacttttgttgtaagacctggctctttccgactcgctgacgtttgccatgcttgtcctgagcttctccagagaaatgctgtcttctggcaggaaaagataaaaacggctgatataaatgagtcaccacactcgctataattaacagtgatgcaagagccagatgcaaaataagaggggcctctggacctgacttttaggctgcccaaactttgagctgcacttcaatgtaaaacagtctccatagctaggcttccatctgtttgagacgcattttaaatgaagaaataaaacccggaatgcatgcaagccccaagataatggagctgagaggggctgcaccaaattaatctccttatttacaattcaaaaaccatacaccagaacagaaagagagtttatagtttatagataatatagatctttgctttcacactcagttgccctggaaaggctgagcagttttcaatctgctgagctgatttatagcaagtacagctgtaaattcaattgtactaggtgttcagcctatgccctcccagtgatgtatctgaacttttcaaaaggactagttgtcattaacatctctctattttcttttgctgatctgggatgatgggatgcaatgacaatctgcttaaaataaaccttaaaaccttaaaacataatcaccacatcatccacaaaccccattcaaccacagcatgagcacaatcactctgtaacacaaggtgaagatattctctgttgcttctaggacatataagtccctcctgaagtttgacagagagaaataaattgtggtcaggacctggataggctcactagtagccgtcgatgtcggtggcgtcttctcttacctgtttaaaagaggctcagtggccttgagatttgaacacaatacagctga

SEQ ID NO: 308625 - DNA, 1000 bp, Homo Sapiens
cagaccggagagaagacataaggaggcaggaaagcctattggaggtcccctttggtttggaggccaggatggagggaggagtgagcaggatgcagggtctgcccagccagcctgggaggtatgaacagctgcatctcccagctctggggatgaggggggttgggggctggagaatggtggccggcccagcccagctttgacatttggggtggagggcagacacagagccgatgtcctgggagggaggcctggtggggtctacaaatggcacgaggccaaggcccagggcaggtaccaagcctacaaaggtacaaagcagggtcctggccctcctgcccctggtgccccttgtcctgctccccaatccccaccacacctctccctgtgagcggagccacggctgcatccctgtggtgaggagtctgtgcagggagaggcaggcatcccctaaagaggaactgaaagcccaaaggaaataacccccaacagtggattttaggccacagaccgggacaagggagaaggcaaaccgtcgggccaaaccaaggcagcatttgcggtccccttttgcagggaaggatctgattaggagcacacaggccctgccctccccaccaacacagtgtgcctccctggggcgagaggaagcccgtgctggtgctgccaaccccccagagaggaccagagactgctggaaaccaacattttattgagcactcctgctcctcggaatctattccagtagattctttgccgagggcatcacatatcacacaggggtgtgaccagcactccccctgctacctgccgtgtgggcaggggcaggagtgaatggctcttcctgggcacaggccacagttaaccggtgacaattgcagagccataggaattcatcttttagaaaaaacgaaaactggaataaaaaaaaaacaaaaaacctgagtataaaacctcagcagtgttccagcactatctcggggtttaaatataaaaaggcatc

SEQ ID NO: 308626 - DNA, 1000 bp, Homo Sapiens; identical to SEQ ID NO: 119973

SEQ ID NO: 308627 - DNA, 1000 bp, Homo Sapiens
caagatctttgagggaaaggatttatgtcttttaaaatttctttcttttcctctcaggacctcatgcgaagcatatggtaaatagttagtgactgctgcttaactcagtttatcctgaccaatacacagaacagcaccagccacaattaggtatttaataaggatattttggattgagacaaggatcctctcagagtcagacattatcttggcatgcctttttttttttttaatttattgggtctctgtgactgtagtcagtgacttggtgtgtcttttgtaatgacaacattaataataaagccttcagatgacatggtgtaatggagttcaaaaggtctaagtctgaatgccagccctgccacttattaactatatgaccctgggcagggcactgtgaactacagtttccttgtaaaagaatgatgttcatgggggccttagagtggttgtgaggattaagttatatgccaaaagtaaattatctagcatagcaaatggctgtaataggtgttcgataaatgttttttttcttttgagactgaatttcattttgtcacccagcctggaatgcagtggtgcaatctcagctcactgcaacctccacctctcaggctcaagtgattctcctgcctcagcctctggagtagctgggattacaggtgcgtgccaccacgcccggctaattttgtatttttattagacatggagtttcgacatgtggccaggctggtctcgaactcctgacgccaggtcatccacccacctcggcctcccaaagtgctgggattacaggcgtgagccaccatgcccaacccaataagtgtttttattacagaaaatttaaaatctccgtcactttttactttattgattttcaatttgcttctttacctggatcagaaagataatttcaaattgtttggaggttgagtattttctgatagtgagaagttggtagacattctattaacagagatgattttaaaaatatttttgg

SEQ ID NO: 308628 - DNA, 1000 bp, Homo Sapiens
gatcctggttctgccacttatttcttctctagtgttggactagttatttaaccttcctgagcctcagtttcctcatcagtaaaatgggaataataaggtgattgtgaaactcaaagatgataatatctaagaaactctacagtctttggaagacaaacgaggaaatgatgacacaaacatcaggatcccagttccctcagggtggggcaggggttgtgatcagggaagaacacagggcttctagagtactagcagtattctatgtcttgacctaggcagtggaaacctaggtgtttgatttataattatttattaatctgtacatatatatttaatatacatatgttatgtttcacaatgagaaaagaaaaagtaaatactttggacattttcctgctcagtataaatgtaaaagtagtactaggaagtgcaaattcccatcttcacaccctcagaggaacctctgggactctaaatttcgcctggtttcccagggaattgaaagcaggtagagagtggtagggctgtggctgagtttgctggatggcaaggaccagctaatgagtacagattccagttataaattcagaccaatgtcgttttccttgctggggggtgcccagaagagcagatgactttctgggaggctgtcagtccactccaaacagccctccctcccgtggtctctctcccccgcagactgctgaggacagagggcacatctccccactcttgaattcctgcccggggtggttctgacccctgcaaagctccctagaccccagacaggcccctttccacacctacccaccgcccctactcttcaacacagccccttccttgggcctgggcaccccaacttgctggccccagacaaggacccctgccttccccagccccccaaacccccaacatccccagccctttctcccctgctatgggttcccctagactttgaggaacactctgccactgagcacaggcatcaccccctttcatc

SEQ ID NO: 308629 - DNA, 1000 bp, Homo Sapiens
gatcaatgctgcttttttttttttttttttttttttttgagacagggttttttgctctatctcccaggctggagtgcagtggcacgatcacagctcactgtggcctcaaccccctgggctcaagcaatcctcctggctcagcctcctgagtagctgggaccacaggtgcaggccaccatgcctgggtaaacttttcaatatttcacaattacttgaaaaccagctaatttttaatttttttttttttaagagacaggggtctcaccgtgttgcccaggctggagtgcagtggcacaagcatatctcactgcagcctccacctcctgggcccaagccatcctcctgcctcagcctcctgagtagctgggaccacaggcctacaccaccacatgcggctcatcttttatttttttgtagagatgggagtcttgctatgttgtgcaggctggtctcgaactcttgaactcaagcaattcttccatctcagcctcccaaaatgctgggtttacaggagcgagccgccgtgctgggacgggttaggggcgggctggcggcagaggcgccgcggaggggtgctaacggtgctaacgctgcccgctccccgcccgcccgcaggtgcgcaggaggatggtggcgcggccctaggcccacgctccgcaccatgacctgctggctgtgcgtcctgagcctgcccctgctcctgctgcccgcggcgccgcccccggctggaggctgcccggcccgctgcgagtgcaccgtgcagacccgcgcggtggcctgcacgcgccgccgcctgaccgccgtgcccgacggcatcccggccgagacccgcctgctggagctcagccgcaaccgcatccgctgcctgaacccgggcgacctggccgcgctgcccgcgctggaggagctggacctgagcgagaacgccatcgcgcacgtggagcccggcgccttcgccaacctgccgcgcctgcgcgtcctgcgtctccgtggcaaccag

SEQ ID NO: 308630 - DNA, 1000 bp, Homo Sapiens
catttattgagggtcaacagcatgacttagtcaacatatgcaaataagttattttaaaaatacatattaagcaaataattaaatacaattgtgttaactaaatcttctgttttacttcattgattttaaatataaaattgtttctgtctttttttgtaactttggtacaccaagaaatatgaacattcattatattcaaatggataaagttttctcagggaaatcattactcttagatattattagcattcacttgaaagtatggaataaatctacaatcagtacacatcacagattttaaaaagaccagtgcatacacaaagaagagaagaatctgataaggtggatgaggacagtgatagatttacaaagcttgcaatagcacttgggttttgcctggtgttgtgacaacgtaaaacactattacaattatgtagggaaccattgtttacagaatagcatcaaaagcaaagaaagaaactcttcaagtggacacaaattagcccatttatgaattttgaaacattccttaatttaaggcaaagttgaatattttattatagtgaactctgatacatttatgatcaacaggctccaactttatacttaataaaatgtttactaactgtgttaaaatttattcttgatggttagtagacaaatcttattttaattacctaaaatattttgtcgtgtttcttcttaactgactgtcgaagtgatttttaattcttaagagaactgaatactacattattctgtaataaaactttcaacttaattttgagatactggaatatccatagtatttaagtccagagattcaatatgcacaattatactcagatcacaaagtgtacttaaactctattaagagtaacaaaaatcatataatttttctaaataaagtccacatgtttaaacaaataaataaaataaatatttaaagaggatttaactatatttcaatgaattataaactaatagattatttatactt

SEQ ID NO: 308631 - DNA, 1000 bp, Homo Sapiens
ggatctgcccgcctcggcctcccaaagtgctgggattacaggcgtgagccaccgcgcccggcctatttatttttattttttgtagagacgaggtctcagcatgttgctcaggctggtctcaatctccaggcctcaagcaatcctactaccttgacctcctgctttggtctcccaaagtgttggtattataggtgtgagcccatgggttgttttttagtagaactgtttcggaaggaaaaggactccttgatcctggctctccctatcagagaggcatgcaccctgaaagtcttctggtcgtggcagtcggttttcctaatctctctgttaatgtgctatgaaaggctgaaaacttgagtatgcagtgttgctgataacggtgagtgactgtgacttctgatgtgacagctcgtcaacatctgaaggtaccggcgcttggggaaggaaatgtgacccatccagcaaggcagcaagttgtgaaatatcctgagaacatgcatctacactgaagtttcgcccggagacagactcgtgctcctaaagatggaaaccaccacccaaaggtgctgagacttcaaaaaatcctaattcctggccttttaaggaaaatttgcctccaagttttcagctagaaggtcgctggagtacctggaaaagaatccaatgacacagctctttagattttctgtaaggacattaacaacaggatacacattgaaacagctttgtattgatcttccaaagtatcaataaaatctctattaggaaagaaaaaattcctttcctcatagttgacaaaattagtaagaaagcaagaaaaatgataatacaatacaaaaaagctcctcaggaggctatggcgggatcacctgagcctaggagttggaggctgcagtgtgctatgcccacgcttctgaagagctactgcactcctgtctgggtaacatagtgagacacccatctcttaagaaatatacaccccccccaaaaaaaaataata

SEQ ID NO: 308632 - DNA, 1000 bp, Homo Sapiens; identical to SEQ ID NO: 119974

SEQ ID NO: 308633 - DNA, 1000 bp, Homo Sapiens
actttatctgcatagttatactttgaagtccgttctgaatcttagatgctacatttatataaatacaaagcataatagctatctaaatgtagaattgtatgtttaaaattatatgattacatcaactgatgtaaatcacagattttccctagggttctgtttcctgaacattctgtaacgtattagttagcaaagtcttttttttttaaaactgagtctcgccgcatcaaccagaccggagtgcagtggcgtgctcccaactcactgcaacctctacctcccagaatcaagcaattcttgtgcctcagcctcccgagaagctgggattacaggcatgcaccaccaagaccagctgatttttctattttttttttttagtagagacggggtttcaccatcttggccaggctggtcttgaactcctgacctcaagtgatctgcccacctcagcctcccaaagtgctgggattataggcatgacccaccacgtcctgccagcaaagtcttcttatatattcccttacgataaaacaagagaagtggaatagtaaagggccatagtctcaatcaaatgaggaaatcctaatgggaaccaggaatgagggattgaacactcttcacataaaatattattttaaaacaaaattgttctgtcaacagctgactttgagtccttgatcgatctctcagacccatgaatacttggattgcacagttgaccttatcgcattgttagggtaagtgctatacaaaggcacattcagaccctccattgcatataggtggcccctgcaaaccccttgcctgtgtgtgttctggaggtgccactaaacttgggggaagcatcaggagatacacttgaaaaaactctttttactaagattaaattattaactaactttcaatttcctttaacttattagagacatctctacctgtaaataggtaaagattacactctccagtcaacagctgtcattctgtcatatcatcagatacc

SEQ ID NO: 308634 - DNA, 1000 bp, Homo Sapiens
atataacaccttgttaattatgtttaaggtaataaagtggagataaaaagataaagtggtaggttaagggttttttttttaagaatattaagtggaaaaccattataaagggtataaactgtatttttttttaaggcataaggatgaattagtaaacttaaactcatcttttaaaaagatccacatataaaattgaaatatttatatcccgtcactttgggaagccaaggtgggcaaatcacttgagtccaggagttcaagaccagccagagcaacatggcaaaactccatctctacaaaaaataccaaaaaatattaggtgggcatggtggtgggcacctgtggtcctagctacttgggaggctgaggcaggagaatgacttgcaccagggaggcagaggttgcagtgggctgagatggtagcactgcactcctgcctgggtgacagaatgaaaccccatctcaagaaaaatatatatatatttcagccatttgccactaatagtttaaacattttattgctgtaaggagacgctaagtttatagaattcctctcaagcagtaatgttggtatgtttctcttctttctgatcacatgctttttctttttcccatgacaggctaaagaatccctgaaacaggcgcgtcattctctctgtttgcaaatgcaagtagaagaactcaatgaaaagaattaatcttacagttttaaatgtcgtcagattttccattatgtattgattttgcaacttaggatgtttttgagtcccatggttcattttgattgtttaatctttgttattaaattcttgtaaaacagaagtattgtttgaagttctcaactgagatttttactttttggatttttatgacttgctaatgttagaaagggcttgtatgcgtctatcaaagcaacagtggctgctgttagctaaaaatccttgtcagcttgtcccacgtttattctctatgtggaggtgaaagggtctgtgcttggcat

SEQ ID NO: 308635 - DNA, 1000 bp, Homo Sapiens; identical to SEQ ID NO: 119976

SEQ ID NO: 308636 - DNA, 1000 bp, Homo Sapiens
ggatctcccatttcagcctctggagtagctgggaccacaggcacatgccactacaccctgataatttttttaaaaaaattatttctagagatgaggtctcactatattgcccaggctggtcttgaactcctggtcaaatgatccacctgcctcagcctcccaaagtgttgggattccaggtgtgagccactgcagccaggctgcccatcctatttggctcatcattgcaacttctttcattttccattacttctttttttcctgtttgtccatcctagatattgctccaaacacgtttttttgttttgagacggagtcacgctctgttgcccaggctggtgtgcagtggcacgatcttggctcacctcaacctctgcctcgtgggttcaagggattctcgtgcctcagtctcccaagtagctgggactacaggtgtgcgccaccacatctggctaatttttgcatttttagtagagatgtggtttcaccatgttggccaggctggtctcgaagttctgatctcaagtgatctgcccgcctcggcctcccaaagtactgggattacagacatgagccacggcacccggtctcccagatgttttattttattttatttatttttttttgagaccaagtctcactgtgttgcccaggctggagtgcagtagtgtgatttcagctcactgcaacctccacctcccaggttcaagcgattctcctgcatcagcctcctgagtagctgggattactggcatgcgccaccacacccgactaatttttgtatttttagcagagacagggtttcaccatatgggccaggctgatctcaaactccttatctcaggagactcacccgcctctgcctcccaaagtgctgggattacaggcgtaagccaccgcacccggccccaaatgttttaatattggaagaatggtaatgtcccaggacattgagactatagatgtttactaatatttggaagggctcataaatatgtca

SEQ ID NO: 308637 - DNA, 1000 bp, Homo Sapiens
catcccggcgggcggcctggcacggcgcagctcaggagggagccggggcctgaggctttgcgctcacggcctcggagcccgccggcttgcccacgaagcgctcccccgccaccgccgtggtacggctcgccctgaccaatcggagcggcccgggcaccttggcaccgcccttcggttgaaccatttcctcggggggagcacggaggagtggggcggtgccgcgcaagggaggcaagggggcggggccaagtcgcccagcggcagatgtcagggtcttcaggcgaggtctgacctagctagcgccactctacatacggataggtgtggggatagtgagacccagaatggacgggctcgcccgagctcactggctggtgaagcagacgagcccggaagtgaagccttctgggactcaacgattgttaaggcccgcctttaccaggactgaagcggagaggaggcagttcaagctgggagccccagggtgggcattccagaggcggtgacacctgagcagtgtctttaagagctcgcagaaggggcatgccagcccacagggaccagcccctagagcaaaggcctccgaggagagacagcttgggtcttcaggggcctacaattccttctctgttctgcggcacaaaatgtgagaggaggccttgtaaaccagctgagggttatcagcaagggaggaaggggattagattttgccaccgagtggcacaggactgtcgagtggaggggagcaagatgagtcagggagaccatgactgtgggccaggtaagagggaaggtctgtgtcagtggagatggaagaaagaaatgagcttaacaactctggaaatggagttggcagggcttgatctcttcttcctggaatactctttccccctttatcctatccccactttccccttatttggctaacatcctttgcatgtctagtgggcagttgagtgtccaggtctcgaagctcagctccagtctggagatagagctg

SEQ ID NO: 308638 - DNA, 1000 bp, Homo Sapiens; identical to SEQ ID NO: 119977

SEQ ID NO: 308639 - DNA, 1000 bp, Homo Sapiens; identical to SEQ ID NO: 119978

SEQ ID NO: 308640 - DNA, 1000 bp, Homo Sapiens
tggcatcctaagcatgagtgtcattgcccacgagggccctgagctgcgggcatccacatccccaggccacatcgctgcatgtgaggccagacgtatcatcccaaggccaccacaccaggtggctgcaaggccggtgggacaaacctggctcctgcctcctcctaagcccaccagtcctctctgccctggagcagcgctcatagtacagatgggaagactgaggcaggaatgggcagcgattgggtcccagccacccacagtgggtacagaggtctggctggcctaggaccagttgggagggatggggctgccccccacatgtgccccacacccttggcagcggcaaatcccagcccctgctccagggctccaggtgtgtggacagcaggttcctttgcagggagtgcgagcaagaacacaggccagggacgcccagcgactggagtgggtcacctggcgccggggggagggaggagcgggtcccagggcaaggacgacgcggtcttcacgggagcctcggcatgatgtgggagcggagttgtcccccaccccccaggtcagctgcccgagcgccgccgggcgaggccggccgccagcgggccatctgcatgacaaaggcgcgccccggcggtgcgagcgggagaggggcgccccgagctccgcccgcccgcaggcccgcagctgccctgctaagcctccaccccgcggcccggagatttggggggcgggggcggcacgcgagcccgggcgctcagctgtgtttgctcgggggggagccaggcggggcggcggggctggggcgcgggacaaaggcccggatctgaccgaccccgcaggtggcgcgggggagggggcggacgctccgggagagggcgatgggggaggggcggcctcccggctgcccaaccccagcgcccagaagctgagaccccctcggggggccgcagtccccgaaacctggcctggggatcacctgggtcctcctccaggcccccggccc

SEQ ID NO: 308641 - DNA, 1000 bp, Homo Sapiens
gaaaaaagtgcttccttagctcatttggaaagagattgagattagaaaagatggttaatttgtatgtatttatagaaataaatagaatacaaaatgaggcttttaaattttttcccacatgaaaatatgatactttaatcattacgttttacattgttagtttgcagacaggcataattaggtcctcagttgcagaaatcacagacatctgaaggccagccctttaatttggccaccgtcttaagatttctctgctccttcctttgctcctcctcctactgcacagtttgaactgatgctgttctatataaggtacttttccacctacctcatctctgactacagtgctatatttttcacacagtaaggacaggtgttgtgttaatctcaccatgccaacaatcagggcaccacctagcagagtcagtgaaggccaaaataaacagtggaagatagccatttggtcatacttttttataagaatgacatcttcagattggctggctggactgtagaagcatgaaaagggggttccatttttgtgatcgaagaattcttttatgtccagagcactgttgagcaaatcatttctatcttggtggcacttaggtgtgtaaaagcactaggaatatggaagagggaaaaagataaaggcactgtcaccaataccaaatacttaacagtttctaattatgaaatagcttcaggctgaagttattagtgggcagtttcaatcttagaaggtggtaaaatattacatagctcatgggaaagggttgattggagggccacagtgaaatggccatttccagtcattaagcaaggatgtggaagagaattcttagtttatatgacattgcaggagagtcagtgaccaatttcataaggaatatgactcctccctacatgcaggttcttggactcttggacagtatgaatccgtttgtccattgaacaaaaatgtattgagccttactatgagctttcaacacctagtaat

SEQ ID NO: 308642 - DNA, 1000 bp, Homo Sapiens
ttttttttttttttttttttttttttttttttttagaactcctaattaatacaagtccctgttttcagaaaatccttcatgtgagctatttcttttcactttttcttattgggtgcatgacattttacaattcttggtttcagcagcaacccaaaaaggcgtaattgcaaacttacacatcaaaaatgaaaaaataaaagcatcatgatttgaaacaaaaactaaaacaggctaaaacaaaaatacaagcagcagcaaaatcactgaatctacatcacagcatctttttgaacacagggaggttagttggttaattattacagtgctctggtagttactatcttagctttgacagtttaaatatttaggaatgcacatccagaagcggcacatgtagaaaaaccatggtagccaagagctatctgaactactgctgcctgggccaccctattccaatcaacatggatttccagagttgctgttctatggtaactctcagtgagagagacaaagaaatagaccatttttagaaaccaagcaaaaaatggatgggaatacaatacctggaaagtttatcaagcatgttgacaagtttcatggcttcatattctttttgttcttctgtcatttcatctatggggtttggcattggttcctctaaatgaccagtgataagattaatgtttggttttgcatttttgtattcttcagtgtctgtgtcctcatcctctgagtaccaattatctcctcttcctccagccaagaggcccctggccgccaacagtcctgcagcattcccatagccagtgtatttcagcagactatccactctctctttgcaaaggacaaaaaggaattcagcagcaatttgcttgactccaaggtcaacatgtgtcatgaggcgcaccagcttatttctcacagttgagccaacttcaggtcgatttgtcacatccctcaacggtggtaaaacctgatctttgagaaattttcggatgtt

SEQ ID NO: 308643 - DNA, 1000 bp, Homo Sapiens
gaattcctcaatcttatacaagattttgaactggcgattttatgaatcaaaaattaaattaaatgaattgcacataaagatatggcatatgtatttttactacattgtgggagaaaaaataattattacacaaaaaaaactatgtcttacctgatttcagaaataacagaagtagaagaaccacttccttatgttccattttgggactggccagcagtgcccagaaagtgtgtcccaatcccaggatgttgttgacttacatgagagtaaacgcatccacaaaccagatagtcaaattaagttaatgattctctcagagacccatgccactggctcagcagagttcaaacattacctgaatttttagaagcccttttctgaatccaaccatccctcagtcccctaagagtggccagagaagaaggactccactgagctgacattccagttcagtaagttgtagggacagttttttaaaagaatctgtaggtaggggagcaccaacccataacatactgtaagcctgcagggttctccagcccagtcccttctagaacccttccctgtccacaaccagtgacggattattccaaacgttgttcagtttcatttgacctagtttgaaaaccaagttccaataatgaataactatgggagcttgggttgctgtattcggtctctgagtagcttttccacctacccaggccacaatcaataataatcaccattgaacatccttgaagcaattcttttgaaattactttgcatcaaagattgcacaagaactgctttaagtagaaggactgatgtcagcaatcaagggtcccaccgagggctgcagatagttcttgaccttcacatgggaaggcgtcattgagttctgacactctggcaatcctctaggactcaactttctgataagctaataaatggaaaggtgaaattagataaagacattattacctcatgggacaactaagcattagaggttagtctaaac

SEQ ID NO: 308644 - DNA, 1000 bp, Homo Sapiens
gaattccatgcagaggaactattaggtgctaaggtcctgtgaggccagtggcgatggcacctgctaggaaagtaggacagtgtggcttagcagaaagagctgggagaaatgtggtagagtcaaggttggaacaaaaggaggggtcaagccatgcaggtgttaggccatattagagatactgtctttatcctaattgtttgcaaaacctgtcaagtgtttataagcaactggagacaagatcagatttgtcttgaagggatccctagagttaaaaggcaggaacacattggtgtgggagagggggaagagtgggtgagaggagatgagactattgcagtaatctaggcatcagatcgtggtgtctttgatcagagtggtaacagagagtaggctgtagagaggtttgaagtaaaataaatgacttggtgacaaataggatgatatatggcatgactcctgagttcctctgttggtcaaaatctttccaaattaaggattatgctagacctgacacatttattctccaaagaaatatttgctttcaatgactctttggattcatttattcaatcaatatttatggagcacctattatgtattattctggctgctgtgatacagtagacaaggcagtctctctaatagagcttgtgtctgttggtgccagaaactctggctaaggtgaaaattagtgcaatcacaatggaaacagtaaactactggaggtcaatttttcttctggcaaatcagaaaaaaaatgttcttagtgctttatgatttctaaagtcccttactactttataaaaccagaaaggcaggaaggtctaaaatgaagagtcagagaagacaatggggacaccaaggtcacaaagctatgagaaatgattactttgcgtcagttcttccaactctaaaatcagggttcctcctccttttttattaagaccataatcaaggacattgaaaaaaacagcctgctgaggaaggggtgctttttaat

SEQ ID NO: 308645 - DNA, 1000 bp, Homo Sapiens
gatcctcttgaatgaagttctggaggaagtttctcttgagacagtatttctaggtccatgttgacatgaaatcatctgatgataaaatggtgacgattcagagctctgttaccatcttaaagatggactcggagaggaaggagaactcgtgtcccctgcagggggttcgtgggcaggtgtccccatcaggcccgcgggctggaagtgtcgctgctggggatgaaagcagctgctcctctgcacgcctgctggtttcctccttccacgcttcctttctcactttggacacctgattctataggccatgtgcaggctgtgtatctggtgtgtcccctgatagctctgcaggtttgatggaattcatcccagggtgcgttggccacgggtgatctaccaaaacagtttgagttttaaattatccagtgcagtggttcctagactcactttgtgcatggaggcagccccctcttcagatggagtcttagataaaatgagtgaattcactgggtgggcagctgaggctgcctcagagtcttcagaggaaggccttggcctccaaccccacaactctaaggttctgagaaggcagaatgctaaactcgaccaacttttgattttcttttcaaagtacactttttcccccccgagacaagaatcttgctctctcgcccaggctggagtgcagtcacgctatctcggctcactgcaacctctgcctcctggttcaagcaattctcctgcctcagcctcctgaggagctgggattacaggtgtgcgccaccacacctggctaatttttttatttttagtagagacagggtttcaccatgttggccaggctggtctctaactcctgacctcgtgatctgcccgcctcggcctcccaaagtgctgggattacaggcataaaccaccgacttttcttattttttaaatggtagggcagtatgcacataggtattaatttttaatcaacttttttgagggataattagagaca

SEQ ID NO: 308646 - DNA, 1000 bp, Homo Sapiens
gaattccaaaataccgaccatctcaatggagtctcttatagatgaccacaaaactaagcttctttgtcaaagagtttctcaaaaatgaaatttctaccaatcatgaaaatagattattgtagtagaaggacccctggactagaaatttggtggcctgtattctagtccttgtcattgtagtagaaagtgcaactgtaagcaagctagtttgtaaaatgacggggttgtattaggtcccttgtacctcagtattttattatttgtttatggtattgtagttttcacacacactcttaattgatctgtttgccgtgtaatgaggtgcacctagtaaggtgcacacgaagaatctttaagccaggacttgtaataatataaagtatacaataaaggactgtttaaaaagtgtaacacatgcaagaaataatatgctgccatgacagagaatatggatgttctctatatagagatatggggcaatcttcataggttaggtttgaaataatgaaaagtgctgaagagtagataaagtgtgtgtgctgaacatctgccattggtccctccacagccattcttcaacctcctcttagactgctctgggacaagggaggtttgcctgcctcaacaggcccctgccctctggttccagttggagtcagccggtggttgcatgagcaaaggtcagagggagggaggagagtggctgcaacacctaacagcaggctgccctcctatacactgtcctctccactcacctctttctgccacacaattcttataactgcttcctaccgtggcttcttcctcccatggcctagggatgggtacagcatcccgctgttactagccccaaagtagtacactttaccgtattgtttttctacacctgccttaattaaactgccttcaaattaccaaagttgagagtgtcatcgctttcctgctggaacactgatacaataggctatcttttgggggtggggagagagagaaaaaaaat

SEQ ID NO: 308647 - DNA, 1000 bp, Homo Sapiens
aagcttgtatccactggaatatttaccccctcatttgctaactagtaatccagctcttatatacccctcacacctttctcagctctgacatcaggcagctcagagagcctctgtcattaatttccatccctatagatagaaagtacctcacaggcagcagaagcggatgggtcattattacattaactcatcagtaaatattaacgtagcaaatacacagtgtccttgtgcagttaatggtgtgtcatacacagcagaagtttgaatttgccatctttgtaagacatgagtaaatttccaagaattaagtgtatgttatggtaaggaactgatagaaaagggtaaggataacaacaaatgtgcatatatgcaaacagagaaatcacagacttttggtatatctaaacccaagtgacctcaatggctgaatcccatgaagcttcaggaataaatggagatataagggaaaggtgtataaaaagggcataaaagagaaatcaaaagtcatttacaatgaggtgaggggagatttaaaagcataagagtaatggaagacctactctgtggtagggattattctaggtaccagagatatgacagggaacaaaacaaaattagaatgaacaaatgctacataaccaaatgaataaaaaaattcatttttcagcacttagatagagatccataggtatatgtagtcaagtagtttttggatgaccttttccattcattcttacacagaaattttacaattattttgaaagaacagatttgtttcccattagctccatgagaacattatgaatggcttagctcacacagtactttgtagtttgtcttttaaaatgatttgctttttaaaattttctccaaattgctttttctttttcttgtatttctttctctctttctttttttttctttttttttgagatgaagtttcactctttgttgcccaggctggagtacaagggtgcgatctgggctcactgtaacctgt

SEQ ID NO: 308648 - DNA, 1000 bp, Homo Sapiens
cactgttaacaccacgcatctttatttgagtgcttcccacccagagtgcaactccgcagggcactccaatctctgcgccttccagcaccccttgagcccagttagtctggcctggggcctaccaggcccattcctgagttctggacaccagcctctggggaagggaggccagcaggtaccaggggcggttccatcagccgtcgctatggaagcgggggtcttgggcatctctggagtttgactgtaggcctggtggacctggcccctcaggctgcagcacctggctctcatcacagcctcctcccgtgactcttcagtgtgcggctgaggctttgacctccagccggcagtccacagatgcctcccccagcacatttatggccttgcaggtgtagaccccagaatcaaaggggctgggtttccggatctctagggtgcagacgccttgctcagagagggcgcggtatttggggttgccctggatctccatcttgtttttcatccagatgatcttggcttggtgaagctcgacactgcagaacaactgggtgctgtagccaggggtggaggtgtggtcagccaggggctgggtgaatgagggggcttctgagaagtctcgctcaataaaccctttaggtttggcagcaatatctgccttctggatgtgggcgagctccttggtgacggtggccgaggtgctgagtccacacaggttttctgagaagacccggaaggagtacgagttgccgatgatgaggtcagagatggtgcaggtggttgggtggtagcgctccagcactgtgaaccattgccctgtctttttgtctgccttctgcaccatgtagcccaggagctctgtgttgcctgtgtcctggggtggcgtccactgaagagcagcattgcagccccagacgtccaggagcctgatgctgctggggggtccaggtttctcaatcaccaggatgtcaatgactgccttggcctccaggtcttccacgcg

SEQ ID NO: 308649 - DNA, 1000 bp, Homo Sapiens
aagctttctcaattttggaactacagataaaggattatagacttgtaatatacataaaggccttttatactttgcattagacgaagagagatacttgctgcccattttgctatgacctcctaatcgttcttcaaacacaccagacatactcctacctctctctgtggaatgtttgactcctgtttgtgtctggctcactctcttgtctccttcagatctttgcccaaatatcactcaagtctttccctgatcactctcttttaaattttaaaactcctttccctaccagccttccttgccctcctctttgctttgtttttctctgcagtctttaatacaatctcacatactatgtattcctcatttattcattcatttgctctctttgcctgaaactagaaagtcagttctgcaaggatggggattttggttttatttattcattgttatagctctagcatttagaactgtgcctggaatatggtagatactagtacatggcattttaaaagaggaagagagtgttgtttgttgtcacatacttggaaaaatatggaaaacatatattctgtttcttactctacagatggactttctaggtgctagacctaaagtggtaaataagaatagataggctgatggttacaatctggggtggggagtggctagggatggggagacaggtaacaagaaaggcaatttcagatggtgggaaatagtcatagatggatgctgttacacttttgaaggagaatgatacaatacacagtgatgattttagcttggtggtcaaggaagccctctgagctgagttctgaaagacagaaaggcactggctatgcaaaactgtgggaaaagagtattccaggcagaaggaagaagaaatataaaagcctaaggtaagaataggcttggcattttaaagaaaaaggttcagtgtgctaaagcacagtgacaaggagaaaattctacaagatgaggatgggaagtcagtaggggc

SEQ ID NO: 308650 - DNA, 1000 bp, Homo Sapiens
tactggtataaggatagacatacagatcaatggaacagaacagagactataattaggcccttctttttgaggtcctagcaatggtcaattgattttcaacaaaattaccaaaatgtgtgggccttttcccacaaatgatgctggaacagtttgatgtccatatggaaaaataaatgaatctttacccttacttcacaaaatatacaaaattaacttgaaatggaacatagacatactagttttatattgctgaataacaaacttagcagccataaacagcacacatttatcatctcacagtttctgtgggtcaggtgtccaggcacagcttagctgggtcctctgctcagggtctcacaaagttgcaatcaaggtaatggccaggctgcattctcatctggaggctcaactggggaaaatctgcttccaagctcattcagagtgttggcagaactcatttcctttaggctgcatggttgaaggccctggctttttgctaagcagcttttagttcctagagaccacctgcagttcctttctatgtggccttcctcaatgtggctgctcacatcaacaagtcagcaaagagaatctcacctcggggaggacccagaccttcttttaagggttttgtgctgattaattcaggcctacccaggataacttctcttttgattaattcaaaatctactggttgtgaccttaattatatctgtagaatccctacactttttccatattctagtctatattctagaagcaagtcacaggtcctgctcacactcaagggaaggggatcacacaggtataaacaccaggggttggaaagatctgtctgccaaaacagatctaaacataagagcaggactaaaaaagttctggaaggaacacaggggaaaatttttgtgaacttaggttaagtaaagatttcttaaaacacaaaaactcaaaccataacaggggaaaaagtaaataggacttcatcaaaatcaaaactcct

SEQ ID NO: 308651 - DNA, 1000 bp, Homo Sapiens; identical to SEQ ID NO: 119980

SEQ ID NO: 308652 - DNA, 1000 bp, Homo Sapiens
gatccccagaggttcctcgaagccgcacccctctccccagtagattccagacccacctctaaattattattattattattactattactattatttgaggcagggtcttgctttgttgcccaagctggagtgcagtggtgtgatcatagctccctgtagcctccacctgccgggctcaagccatcctctcacctcagcctcccgagtagctgggtctacagttgtgcaccaccacgccgagctaattttttttttcctttttgagacagagtttcgctctgttgccgaggctggagggcaaaggcacgatctcagctcactgcaacctccaactcccgggttcaagaggttctcctgcctcagcctcccgagtagctgggatgacaggcgtgcaccacctcacctggcttttttttttttttttttcatatttttagtagagatggggtttcaccatgttggccagactggtttcaaactcctgacctcaagcgatctgcccgcctcggcctcccaaagtgctgcaatcacaggagtaaaccaccacgcccagcatccaccgccaaattaggaatgcaaaagtctccttcaagtagggcaaggcccccacatacagacacacgcgtttgaggtttatgctcattttattataaaaaaatacagaatccaaagttgattgtgacgggaagagggaggcccggtcgccagctccaggcctggcaacgcggcccgccccgccgaccccctacaaaagccctctgcccaccccccaccaccgggcgtgcctcgagccgccggccggcggccgtacacaatatatatttatatataatatatataaaacacagagtcaggaaaggcgggtagaaatatgaaatccgtataaatgtgttgtttccttcattaaagtgtcttcggggaggagtttctttttttttttttggtagtggttccctcccttttgtcctttttttctttttcttagaaacattatcaggtc

SEQ ID NO: 308653 - DNA, 1000 bp, Homo Sapiens
ctcgaggatctgaagtttcaggccattttctatcattggctcatcagacatcagagacgaagaagctgctgcattctctaaaggaaatattaacaaatattgggagcaccagtatttgtcatgaccagtgagtcgctgcaagaatggcatagaaagctgtgggtcaagaacaaaaacactctggaaggcaatctcagtgtggggatggaaatagagttcagcctaactgcaaaaaaaaaaaaaaaaaaaaaaaaaaaaggttggggaaaaacaaagaattctctcccctcttttttcgtatttggacatagataagtaacaaaatgcccttatgtgattgggaacttgtgttagtttccagacaatgagatcttgttatgattgacgcagagttaaaacagacaaaagtagttacttgccaaacatttattattaatttttcacagtccaattatttcaacaagaatatatctaaggtattatcaataggcctcaaatgattgtgggcaaatgggtcttgtcaaagggcctctagaaatttgcccctatgttcacacatttttcccttttacacccccaacatgctctatgtgatctcttattggccctagagtaagacagatgtttatgggattctgagcagcttccttctaacaagctaaaattaacaaaggttcataatattctgaaactcatcaaaacttggggaagtagaatgaacactatagactacaacagacacagttttaaaatttgaactcatttaaattctaaatacctcattatttcttcatgagattatgtgtttaagtggagttgagtttaaaaaaaatctaatttaaattctaaatcttcaaagctaaacctattcttaacagatatttcttccagtaatgggctgattttacaggaagtttttatgcagaggtcactccccctgcactattcaagggttataaaaatttagttacctggaatttgtgctaactatgccacaaaa

SEQ ID NO: 308654 - DNA, 1000 bp, Homo Sapiens
aagcttcccctcattcgcccacctggaatccccttcccacctggcttaaagaacccactcatccttcaagatccaactgttccctaactcctagaagcttcctgaaggttggacgccacgcctgtctggcccctgccgccaccccacccagagcctgcttggaactagcacgtgatcagggcttagaaacatctattgaaatgaatctggcattagccctgggccaggctcataacaaaaccagatccaagatctcactccctgatgctttcagaagcaaatgaaccttccctgcttcttaactgcagcctcagcatcagctgacacagcctgggaggactgcgggtcaccatggcaaccagcagggcaccgcgcagtgaccccctccctcccctccagtgggatggtcaaggcagggaggcggtagcggctcctcctgacctctttcttcttcttggcttcttctaggttgctgagcagtgtcttgcgctcttcgtttgttttttctatgagagtctttatctgtttcaccccgttgacagcattttgaatttccttattgacgtacttacttccctgattggacatttctgcaagagaagtgcaagaggcagaatgaggcgagaggaagaggtggcctcaggaccctggaatgagctggatgccagaaaggcccgttcagttcaggggctgtcaaggctgggacccccactcctgccagcaggcagcagcatgccccagccttgccctggcacaggctcccatcacaggctccttgctgactgcaccctactgcttagaaatgcagaccatgggagccggcacacccagagttatgcccagccactgccatgtgcccctggagaatgagctgggtgcagaagaaacttggcaaggaaaaaaaaaaaacccagaagtgtcacgtttgcagcatcaaaatataaaatattgttattttggacacaaatctttctagagttcagtttaaacagatatgtgt

SEQ ID NO: 308655 - DNA, 1000 bp, Homo Sapiens
gattggttctacaggcctcaagacccataggattcacaatatgagttatgtgctattcgttagacagtatcaagggatgcaatacattttctgcacattttttgacgcattatttaaaatcagaaagaattttaaaaaggcttatctaaagtgcctagccatattcaccctcaaaatggtataatcaaataatggcattgaccttagaatatctgagtatttgttgactattaatatatatggtacattatatatttttggtggatgtattgatgattacaaggtgcaaggtctccacatagaatactgaccataaagcacttactgttgggtgtaatgtatgttactgtatcgtgttactctgtgtcgagatgtcatgggggatgtggagccaacggtttggcctatgggaaggtctggactcatcatttgcatcacttgaatttctggccctactaaaatattgccgctcatcacaggtcccatacaaccctcagtcgtgctactattgctcatgtcaggcacaccaggactagccagtactctctcagcatagattacattgttgtaatctgctaactcagcaggtacacaaatattcccttgaatatcatagacaggtgccattactgcttcggttactacaacattgggtgcaagctgaggatcaaaaataattgtagtgggttgcacacatggatcagcattaccgtaagtctcagtcacaataatatccccatggaccacgggttcagatgctgccatttcttcttggaattcaacttctgagggagtcaatcctgaagattcattaacaaagtaattaggtccgagcaaagggaggtcagtactgattggtatacaagcctggtgtgaaggaaatggttcaatttctgtgtttaagcagatctcagcaagagtcctaaattttggatctaaagtttccatgcagctttcatctaagtcatccacaatccaactgcaacaaccaatagagcct

SEQ ID NO: 308656 - DNA, 1000 bp, Homo Sapiens
gcggccgcaattaaccctcactaaagggatcatataaaagtttttgtgtttgtttttttaaatataattcctcttattgtgacttacataaaccattcattacatgtttggattttctcgtttgtcctgaacttccctgcatcttaaacaaccagtcattttactctaggactaaatttaccatacaagattctttctaatatgaaattatttccctttaagctttcttaccaaaaaatcctctgtattgttataactttctatcttgtttcgtacataaactttaagctttgaattagacaaaaattattcacctttttaaaaggataccattttttttagcaagaatgttttccttcaatatatttttattggaaaatatccaaatatgaaatatctattatctaatttaatataactttagattctaaattatgacgtttgtctgcaagtatttattctaatacatttacctaattattttattttaatcatttacttatttatgaaaactgtgatattcatcatttaacgttatgaaactgctcttgcaaaattataactgagacagtaaaaaacatctgccctaactgactccttgttgcttctaacctccaggccatccttgttcattcctggttggaggctgaactaactttgggaggaacgaacttagtttatagtttagttttgaaacaaaaatgataagagccctttcccaaaacaaacctccttactgcctgtggactagactgtctaaagccacaggattagaatttatggtaatcttactaaattcaagctgtagctatggatcattaaacaaatattaatgtcttcttttttttttttttttgagatggagtcttgctctcttgcccaggctggagtgcagtggtgcaatctcagctcactgcaacctccgtctcccgggttcatgccattctccagcctcagcctcccgagtagctgggactacaggtgctcaccaccacgcccg

SEQ ID NO: 308657 - DNA, 1000 bp, Homo Sapiens
gatccatgaacatactaaagggaaattgatggcatacccagggttaccatttacagatggcagtactgaaatgttaatttcaaaaacattcaaactgtagttttcttctgtagacatgggacaagcaatttttatcatttaatcatgcagacttggttttaaaagaaaactcttttaagatgttctttgcttttaatttatagccttctagtttgcttataacatatatgcttatttttaaagaacattaaaggttaggcctaaggaatttgtgtgcaaaattggtcattgattattaagaaaataatatagaacctttttttatgtcataaatacaactttaaaaggaaggggactcttcagagttgcctctgaggagcacatatgaaaaagaagggcagaggtttactgcagtggtaaaaaataatccacctagatcaagactattccaaaagtgaatttaaaaagaaaaaaagatgagatggtaagatatgaggaaataatgaatgcattgtgactttccacctccccatacccattttcatagtttggtgagtagaaagagaaatgaggatgctggcccaattttgattcccagtggatgaggctcacacagaactgccctgcttcttgacactattatgatattaaaagtaacttgtatttttataagttattaccatcttggcacacttgcattcattttagtcaagtactgtcacctttagatttcaagcttgcagagtcttaaaaaaatacacattggagaacacatagtcttttaacagtaaaatctcagcttattagaatgtttagtgactgaggtattcagagtcagtcagaaaagtatctttaggatttcagcatgtggagatgtctttcatagagaaaccggggagagtcaggcaaaccctagcacgttgagcatggcgtatcctcatctgcacgggcacttagacacctggacaagtccattagcagtaaggcaggatagaggggt

SEQ ID NO: 308658 - DNA, 1000 bp, Homo Sapiens
gatctccacaaaaaatttaaaaattagctggctgtggtagtgagcacctgtagtgccagctacttgggaggctgaggtggaaggattggttgagcccaggagactgcagtgagctatgatcatgccactgcactctagcctgaccaacaggtgagaatttgtctcaaaaaaaaaaaaatactcaaaaaactttcctataagtcttgagtctccttcgtaaaatgtattcctaacatttttgctgaaaatttttgcatctatgtccataagaaatattggtctataattttattttcttgtgatgtcttcatctggttttgttatcagagcaatattagcctcataaaattacttaaatagtgtttcctcctcttccatatttttaaaaaggtaaaagattcatgttcattctttcttaagctattggtagaactcaccagtgaagtcatctggtctgggctgttagttttgagaggttttgattactgatttaatctgttataggtctgttcagatcttctatttcttcttgagttggtttcagtggtttgtgtgtcactaggaatgtgtccatttcatctaggttacctactttgtagatatacagttgctcacactattctcttccgatattttgtaacttcagactatatatgtatatagtatatatattaagtcatagtatatcaaccactgcaggcacgattcctaacctaactccccttatgtaattcccacaactcatagaattgtccctggaggtgcagaagcaagtagacaggagtgtcaccttgagacagaatcaggcagtgatgcagctcgactggaatcaggcacagaaatctggtgacccaggtaatggctgagatggggaggtggtcagtgaagcttcatggtgggaaaagatgcccaagaatgtgaaaaataagagatttaaagattaaagggaagtgtgggatgtttggagtggggctgtaagaggagagtccagctgaggagg

SEQ ID NO: 308659 - DNA, 1000 bp, Homo Sapiens
atgaagaaaaagaggtttaatgaactcacagttccatgtggctgggaggcctcacaatcatggtggaaggcaaaaggcacatcttacatggcagcagacaagagagaatgagagccaagcaaaaggggaaaccccttattaaaccatcagatctcgtgagacttattcactaccaccagaacagtatgggagaaactgcccctatgattcaattatctcccaccaggtccctcccacaattatgggagctacaatttaaggtgatatttggatggggacacagccaaaccatatcattctctccctggcccctcccaaatctcatgtcctctcatttaaaaatcaatcatgccttcccaacagtcccccaaagtcttaactcatttcagcattaactcaaaagtccatactccaaagtctcatctgaaacaaggcaagtcccttccacctatgagcctgtaaaatcaaaggctagttagttacttcctagatacaacggaggtacaggcattggctgaatacacccatttcaagtgggagaagttggccaaaacgaagtggctaaaggccccatgcaagtctgaaatccagcagggcagttaaatcttaaagctccaaaatggtctcctttgactccatgtctcacatccaggtcacactgatgcaggaggtgggttcccatggtcttgggcagctccacccctatggcattgcagggtacagcctacttctcggttgcttttacaggctggcgttgagtgtctgtggcttttccaggtgcatggtgcaagctgtcagtggatataccattctgatgtctggaggacggtggccttcttctgacagctctactaggcagtgtcccagtggggtctctgtgtgggggcttccccttccacattgccttaacagaggttctccatgagggcctcactcctgtagcaaacttctgcctggacatacatgcatttccatacattctctgaaatctaggcagagg

SEQ ID NO: 308660 - DNA, 1000 bp, Homo Sapiens
accttttccacaacattttattttaaataaaacttcaagtactcttacgtaggtacaaaaaaaatctgatctatttgcctccaacaggccaccacaacacacagtagataaaacacagtggttacaaacgtcttttaaatttatttctgaggcaaggcaaatgggagggaaatgtttctatgaaaaaatactgtgtgcgtaggaaattgtcacaattttattccacatggatacaaatgattatactttaatttaggccctggtggcttaaaattatataacaaaatagaaaaatggaaaactaatatcccctacaccctgtttcaaaggcaggcactaccaagattaaggagacgccacagtgttggtagaggataattactgtacagactgtatagctatcattaccttcagacgaaaataaaatgctacaatcctctaaggcatgaacaataatgtctgcaaacaatatatacacataatacatatttaaaacaagacttaatataaacaagaatgaacagtatatacatgtcaattttttcactgttttgaaatacaatttaactacacaagtgatgcagcaacatatatatataaatgtacttgtaactctacagtaaagtttctttttggtgcttttatagcacatcagtgtaaacagtttaacttggctttgttttatattttaaaacattccttgtattttcaagatttaaagcaattttctagttcttccttttcacagaaaacgaagattctggatgtggtttaatcataaataattcataaaattaaatacattcactaaaaaataaactacaaagtaaaaaaatgaaaaatagatatttattgagagggaaaggagaaccatttcccacattagagctctggtgttgagtattcagtgcgatttgatatattttaattgctattgcactataacaccctttcctttgaaaattctttgggtgtgcttccctgttctacctaaattagc

SEQ ID NO: 308661 - DNA, 1000 bp, Homo Sapiens
ggatcagaaagagaaagcgacttccctgcagtcacatagtgacaagctggacatgtctgactaaaacctgtgctttttccactgtgttcttgggtctcttggacttagtaatggggatttaaggaggaggaaggcagtgagatagagccagggttcaggatttggggctgggagggtgttaataaagcgtttggctcaggacctcaaagccttttgcttgtgtgtgcatttctcacagcctcacgtgcccaggctgttggtgctggggggtaggcctggggctgccgctccctttcagaatccttgcctggcctcagaggggcttgtgtctaggaacctcagcagaaccctgcaagggctggctgggaccattggtgagatgagccatgcccgggagcatggaagaatatatgttcctcttcagtcctgtaagcacatgggctgtgatgaggaacgcgttggcagtctttagatgaacgctgcttctttggaacttgctgggtgttagcttttggtgtggcctttgggagtggactctggactgcagacactgaactacaggtttcccatctggaaatgagttcataggactggatgatctctatgttctttctaatatttctttactcgtgggatctttatgtttcattcataattttaattataatgtttctatgtttatgttttgactcaagtagtgatcactacaggccgtctttgggaatgcagtagaattttagtttcatagatcctaaatatttgattgtttttatacatttgatgattggacaccctacatagaatacttttttaaggtactagcaaataatatatgaagggaaaagaaagcattcttcctgtagcatctcgaatataaagattttgttatttagtattagattttaaaaattattttgtatcctctgatttcttatagatgaaaatatgcctactaaaaaacaatgaaaatactttttcagaatataagcactatatataa

SEQ ID NO: 308662 - DNA, 1000 bp, Homo Sapiens
tgtgtgagtggccctcagcgcccgagtcctggcgcacacgtaccacgcccaccctccagctctgcagccccccaagggccacctcccaggcgtgcgagccctgtgagaagacacgggagcccagcaggcagggcgccgaggagaagcgttccgggttctccacctgcacgcggtagccatggttggtgacgctggtgaggtcgtcagacacggagagccagccagctgcggtgttggggtcaaagctgaagggtactgcaagcagaggcggaaatggggaatcagcaaccctgaggtcccttagccacacgtggatatctccagccccacaaaccaaccactgtgtcacacctggccccaagtccatgcaaggagtggcccaggctggagtggtggcaggggttgggctgtatcccccagaagatatgcggcagtcccaacccctggtacctccgagtgtgaccttatttgggaatggggtggttgtacacatattagttaagatgaagactggaggagggtccccaatccaatatgacctgtgtccttaaaataaagaggagacagacacagatacacaggggagaatgctgtgtgatggcggaggtgaggatcaaagtgctgagggggagccaataaggccaagaatggccaggagacaccaggagacggaagaggaaatgaagactctcctctacaggtttcagagggggcctggtccttccaacatctggattttggatttctaccctccagaactgtgagagagtcaacttctgtcattttctagtttgtggtccttcgttatggcagccacaggaactcatacaggcagagactcttaacactcacacgaccaaggggatgttaggacagcacggcccattcctgagtcagtgatattcctccccgtaaaaccaggacactgtggctcatgtgggctgcagtcgccttgggagaggcaggcccagatgcaggaggtcttttatcatacaaaaca

SEQ ID NO: 308663 - DNA, 1000 bp, Homo Sapiens; identical to SEQ ID NO: 119981

SEQ ID NO: 308664 - DNA, 1000 bp, Homo Sapiens
tatatacacacacacagtattatgtatactagttattatatataatataatatatatactgtatatatacacacacatatattttatatatatatataaaaaactagtacaccattttggcattccaccttgacataatgaattagaatgaaggaatgaattggggaagttagaagatttactcatctactccagatcttcaccttgcttattttgagagaggcaaactttccataagagaaaggtctttgggaggccaaggtggacagaccacgaggtcaggagtttgagaccatcctggttaacacggtgaaacctcgtctctactaaaaatacaaaaaattagccgggcttggtggcgggcacctgtagtcccagctacttgggaggctgaggcgtgagaatggcctgaacccaggaggcggagcttgcagtgagccaagatcacaccactgcactccagcctgggcggcagagccagactctgtctcaaaaaaaaaaaaaaaaaaaaaaaagagaaaggcaataggtctttatgttgttgtcatatttctcatattttatgcaaggaaaaataaaatggtaaattatacaagtagatatatcacagcaaattccccaaaattgctcacattttctaaactaaatattccaagttcttgacaagttcttgacaattgcccaaattctcaaaaattgtccacatattacagattttcccaattgccatgccactatttatacaaatatttttaatattgattatcccccttcttacttctgcttcctccctctcttccttccttttctcctttatttcttcctttcttttttccttctctccctccttccctccttccttccttcctttcttccttccttccttccctccttcctatcttcctcccttccttcctatcttccttccttcctttttaaaataaactgggctttattcagagcttaatcttcagattgtgttctgaattttcattgacaa

SEQ ID NO: 308665 - DNA, 1000 bp, Homo Sapiens; identical to SEQ ID NO: 119983

SEQ ID NO: 308666 - DNA, 1000 bp, Homo Sapiens
gatctaataatcatgcagctctctttatttaatggttatgtttagcagtctgcttttacatttcttagtaacagtatatgtgtttatatatgtgaataagtacatatgcatatacacatgtggaactatcttacaatatttattcagaatatctaaaatagttttccatgaccatttattaaatctctgtgccaggaagcatgatacttacttatatacatcaccttacttatagttgttattaccatctatccccattacagaataagaaaatttaaattgacaagagaaaatataaaaaacttgccaatgaccatatacacagaaatcagatagatcaagatttaatcaaagattacgtgattttaatgactgttcttttgagtattactgtctcatccaaggaaagaaaaggtagtatcatagtctaataatgacatttcataatttcccacagaaaattttcagaaagaatgttgaatatatttattaagtttcaggatatttttaactgaagtatatgtaaattttattctttcatccaaaagagcagttgtccaaattttgggagggtgcaccattttattttggctttcataaacattatttactaggtttaattttcccatatttacatttttcttcctttaactataggttttctttttccctaaagtatcctcaaactgatatcttaatcatatctcaggttaggaacttcttaggattatcatttacagtagttaaacatgattagtaagaaaaaatgctaactaaataaaaggagagtatgttagacttctttcttctactcctcaggttacactacaagttttatttggcccagctttttgtgttagtaatactttcaaaatcttcttatttatcttttgagcttcaacataggaactttatatttttcaaagcgaaattggtgttgtttgcctgcaaataaaaaatatgatatgatcacccatttatctattatagatgtcaatgt

SEQ ID NO: 308667 - DNA, 1000 bp, Homo Sapiens
gatcctcttcattgatgccatatcacaatgcaatatatataggtaatattttttacttctttgggtttattcagatgcattccacactgactggcattccattagtaactgcagaaattaatggctatcctgacaccatactagggttacagttatgcataacctggccctctaatttatatcgtgattattcattgcctatatttggatacagaaaaaaaaataagagagggaggtatctccggttatggttgatctattcattcttttgtcacaatttacagaattgattttgccaactaatcatttaaaaggatgcaaatatatgagcaaaattaaactaaaaatggaaacaccctgggaactttagattaaaaacgttttgttacaatcaactatatgtacatgcttcacttggcacttctgttactacaccaaaatagtgttgaatttatggaattcatattgttgtaagggacactgatagtctggaagagatcaatcaataagttatttctatcatcatcatgttattatccaggtagagagttggtggttgagaatatagtctgttattctaataaacatttctatagagctttgaaaatcttaatgcctaaaaaaatagtaatcacttgtgtaccactaagttgtttgccttaagtcactggcaggtatagcgtactctaaagaataatgaaattaaagtggaagtagtgaaacccagaatgagttaatatgccaggcttaagtatcctcatttacaaaatgagaatgaaaaccatttcctaaaatatttgtgtgaagaatgcagtgttaacaaaacataccaagctctcctctaatgtatgtcatgcagtaagaacccaatgaattcttgtctgcttattaaatggagtgtaaacagataatatacaataaaacattttgttatagtaaaagaaaataattcaaacctgaaagtcatttgaaaacactctttcagaggaagctttcaaga

SEQ ID NO: 308668 - DNA, 1000 bp, Homo Sapiens; identical to SEQ ID NO: 119984

SEQ ID NO: 308669 - DNA, 1000 bp, Homo Sapiens
acttgacatggccatcatgtagccagatactaatatttagattaatttccgaaatctaggcaggtatgtaattattaatttgcaaaggagagaactgaggctcagaagttgcaccaaaccatgaactagtggagctgagctttacaaaccaaggctgtcctctactatacattatttctcctcagtacacaataataaattggttcaaaattatctagacctttaaaaagtatataatggaaagtgcttttagtattaaagttttcatgaatgaccctaacaaattttgtctataagtttactaaaatgctgacatcatttataatccttcatttatttgtaaaaagatgaggacacacattaagtgaagtgcaattcattttgtcttctacaaaataagttaattttaagcaaaccaatctcaatgatgataaatgcatgtcattatttatttagatgtttcagctctcgcactaagtttttacaagctggtgaacactgacaaaattatttctcccacagaactataaccacacatccccagacagtataaatatatggttgaactaacattaatacacatcaccattttatcaattacataataaaacaaattgtcaagtatccaaatattaagttacccagctccaaaaggcatataaaatattagatgtctgctcaattcattagcagaaacccatttctttttttgcaagagaggttgggaaggaaaaaaaaaatcacactttcaaacaagaataagttggtaaacacacttctgataagtatgggaaaaaaattacaagaatttcaggaagtttatgattacaataacaaagcatctctaccttttaaaaaaatattttactaaattaaagagcatattctacatgtttgcacaagacaaaggcaacattttgctaaaaataattaatagccccctcccattcttttctcaggccctccctgttaagttgcacctcagagtgcaaacattaaa

SEQ ID NO: 308670 - DNA, 1000 bp, Homo Sapiens
tgagcaagtgtctctaaacctcctggaagctgccagctgtcaagtggcatttcattccgggggtactcaaagaaaattcagtccttgttctggccacaatccagttcgggaaagaatcctgggctattacatgaccagagctattaggatgctttaaaacagacagacagacaggcagacaaacatagtatagtgaagtcagattaatcacaatatgatccttccattccaatgttctgtgctgttggaaaaaaggaactagttgaatttcttcaaattcatggtgtgccgacatctccacctggggttgatcttggtgtatggtgtgaggtagagatctaattgtatttttcccatatgggtagccagctggtccagcatcatactgaaaatgaaatctatcctttccccactagtttattatgccagctctgccatctactcatgtattggttctaaatttgtatgagtctgtttctgggcttttgattttgtcccctgggtcaatgtgtcttacttgctctctgttattacagctttataagaagtcttcttctcttataggaatgattctcctatcttgttactcctcaaacttgcctcggctgttcttgacccttgcatctttgtaagaatttttgagatgggcttgtcacgtttcatgaaaactcttattgaggttttcattggaattgccttaaatgtatgaattaatttgaggagaaatgacatcatcctgttaattcttccagcccatgaacagggaatctcgctgttcagtcagctcttcttttatagacatctcaggtgggtgtggtatgtgtatgagtcagggtcccaggaagaaacagacccccacccctcccacaaccaaatgaagattcctgatgaaaaaataaatttgtgctcataaaaaagcttaaaatgatgatgtagaaattatccaggcatggtggctcatggctgtaatcccagcactgtgggaggctgagatgggagg

SEQ ID NO: 308671 - DNA, 1000 bp, Homo Sapiens
ggatcacctgaaccgagtttgtgtcactgaactgcagcctgagagacagggtcacaccctgtctcaaaaaaaaaaaaaatgtatttgcaactatggcttgctccttttcatcacaggtatgctttatctaaagcagcctccgccttccctctcaccaactgtcttgttacccatctagcttctttttttccggggggggggggggtggtggtacagagtctcactctgtcactagacgagtgcagtggcacggtctcggctcactgcaacctccgcctcctgggttcaagcgattctcctgcctcagcctcccaagtagctgggattacaggcacgcaccaccacgcctggctaatttttgtatttttagtagagatggggtttcaccatgttggccaggctggtcttgaactcctgacctcgtgatccgcccacctaggcctcccaaagtgctgggattacaggcgtgagccactgcgcctgaccacccatctagcttctttatagcatttgtcactacctgacactaccgtatgtatctcctttattatgtttacacttttattgtctcgactcccgatttgaatgtacattctttaagattagggatttgttgaacttatttgctgctgtaaatacagcctggcaggcagcaggtgctcgttaacgtttgttaaaaataatgtgtgagcaggctgggcgcgatggctcacgcttataatcccagcactttgggagaccgagggggcggatcacctgaggtctggagttccagaccagcctggccaacatggtgaaaccccgtctctactaaaatgcaaaaaattagctgggcgtggtggcgcgcgcctgtaatctcagctacccgggaggctgaggcacgagaattgcttgaaccagggtggtggaagttgtagtgagccgagatcgcctcactgcactccagcctgggcgacagaacgagactctctcaaaaaacaaacaacaaaaaaagtgtgaa

SEQ ID NO: 308672 - DNA, 1000 bp, Homo Sapiens
ttgaattaacctcagcaggaagctcaggattgaggagacaactggcaagggggcagaatgaggcaccattcctcaggtactattttactgcctcagatattattaaactaatagcataattcaatattttcacaacctccaaattcaacatttcagatagttgaataactctcagcacatgcctccacctgacaaaatacaaatgctcttgccaggcacatttgccatcttataagaagctctttcaggatctctgccccaatcctggcattactgtgaaggtgcccaatggaaattatatctgagttggcagagagtggagtgaaggggatattgatgagtctcatccagaaatgggttaggcatttcaaggaaatatctaccattctttttggagaagacttgggtaacatttttcttccatttaacacttcaataatcataacaaacatctttgtgtgcatgtcttcttatagtaccgaactgggagggaaggacagaagttctgctctcaggaaacttttcttttctgtggagtctcacccctacagtgaactccttgcatttcacaattgtacaactcttacccacagagttaaactctggtgtgtgttctctgatgctgcataaggcctgacctatgcctaaatgtttttctacattcactacattcataaggcttctctccagtgtgaattctctggtgctgggtgagggctgagctctgattgaaggattttccacattcattacattcataaggtttctctccagtgtgaattctttgatgttcaataaggatagaactcctaccaaaagccttaccacatgcaatacattcatagcttttatctccagtgtgaattttcttatgctgaataagggctgagctccggctgaaggccttcccacattctccacattcataaggcttctctccagtgtggattctccgatgcctgatgagctctgaactgcccctgaaggcttttccacattc

SEQ ID NO: 308673 - DNA, 1000 bp, Homo Sapiens
cccacatcagatggggaaattgaggctatagccctgtacccactcagactcctgagtaccccaggtcggggggatctgaggcagtggctggagccagcagcctgccctccagctagactgcatttctgctctttcctctgcccttccctcttttagttttccgctcttctttctcttttcccattctcatcttcttctctgtcacatctcagacctgcccaaggagggctggtagcatctgaagcacttggggttgcaaaggacctgccatgtgtgaggggttgccacaggcccctactccaccacatcaagggctttgctgtccgcgaggatgttctgagacatggggctcaccctgcctcccttgggtcacaccttttggtgcatgtccatgacttatttggtgctcagttcgtggtcaggaatgcagcctcacagtgacacatcgttcttgtggaacaacatgatctgatctgtgattcagtttccaggagttcctggaaaaaaaagaaaaacagggactgcgtggaactcttcttctggactccaccaggggccctgagagcacagttttgacacaggtgcagtaagttcttagcaactgaagcccttacaaagtagcaaagcattccatgctgggaaacttcattttaaaaacatcttgtttgagaaacgagttaggagtgttcccaacttggcttccagctaatgtaaacactgaaaacaaattaatcatttggagaaagagaacaaggagtttaatgttttgaagtgtgggagccaacatttccagatggactcttcatgtgttggggtcagaaaggaaagaggaccagcctgggcattggaggatctgggtagccctgggctccgctactggccagctgaatggcctggggcaaaggaccactgcctctgtttcttcacctgcaataagaggagtgaggaacgccctctgaagtcccttccaccccagtgagccagcactcttggcctcagc

SEQ ID NO: 308674 - DNA, 1000 bp, Homo Sapiens
ataaatcactggcaaggccaatgtcacggagtattttttcctatattttcttctaggaattttatagtttcaggtcttatgtttaagcctttaatcaactttgagtagcttttatgtttagtgttagataaggattcaattttatccttttacgagtggatatctaattttcctaacaccatttattgaagtgactatccttgtctcattttgtttttcttgtgactttgggaaaaattagttaactgtttgtgcttgggtttatattcaggctttctagtatgtttcattggtctatgtgtctgtttttatgcccataccatactgttttgatcactatagctttgtagtataattctaaatcaagaagtgtgatttcatgttttttcttcttcctcaaaattgctttggctattcaggtgcttttgtggttccaaacaaattttagaattatttttgcaatggcatatgagctttgaacagtgtgctattcaggtggatagggagaacttaaataataatgacttttaaaaagcaggtgtatattttttcccaatagtgtttattcagctgccaaatgtggaaatgaattaccactgtagattgatattgacagaaatagcaataaataggaagacccagctcctcttcttttacctcctaatatttctctagtgctgaaaaataggtctctgaaatacaatttgtacagtcctaacctaagcatcacaaagttgagtacaggaatatggatctggagccaaggacccataggtaaatgactagtacatcttcccccctgagcccctctgtcctctccaggtctgccatacagatgccatctatttgcttccgtatggcagacctgattgcattttctgggttacatatcttcctctttcttgaattagatactcttctggtatatatttttctgtggtttaggagactattctaacggccggatattattactggaacaccactctccaaagtcttc

SEQ ID NO: 308675 - DNA, 1000 bp, Homo Sapiens
gactgatttgatgtagccggtagtatgataatttgtagttaaatgaaaatacagatagatccagaaaataagtaatttcccagtagccagttaataaattacagacctagaataagcaatttaacaagattagaaaagcaactctgatacaaacgtgttgataacaagtacaataagcatagaaaatttaatgaacatattaattaaaagcattttagaagaaaaatagaaaatcatagtgaaacatttcatataaaatatttagtagaattaatgttacattgctataacaaattcacatatttttaacaaaaatttcttcatatgctattttcactctctgcttctttctttttcttttggttttaattaggcctccttttgatattctttggatgaaacctataagaggaagaggaataaattaatgtgtgataaaataacacaatgaaatgttttatctaaaatcttctcaaagtaacttttaatatttaaatccaaaagatgttattgatttaaaagcctttaatttgtccatgtattcgtgtagaacaatttatttttaaggacgttactttgcatatatgagttaataaaaatggataagcatgccgttcatttttattattagttcctcttctgttacaaatccatgcttgctttatttttaaatagtagaaatgtggttgtatgtggttgattaagttacagatagtttttatttgcatttttatactcttcttagtcttttataaacatgcattacttttatattcagaagacattaataaatatgttaaaattttgtgcattacaagaaagcttaaaacaattttggtatagtcttttaaagtgaatgcttagtatttgaacactaaaagaataacatgtttaatttgttttaaattgattctttttctatgaggacattaaaagaaattacagttacatatctagcaatattatctaaatgtaattgaagaggacatttattagctag

SEQ ID NO: 308676 - DNA, 1000 bp, Homo Sapiens
agtggttgttgcagaaactgtaaggcctgccaagtgtaaaatattgattctggtcaggcgcaatggctcacacctgtaatcccagcagttcaggaggcccaggccggtggatcacttgagcccaggagttcgagaccagcctgggcaacacagggaaacccaaaaaataaaaataaaaaaatttaaaatttagctcggcatagtggtccatgcctgtagtcctagctgctcaagaggctgcgactggaggtcagggctgcagtgagccacgatcacatttcagcttgggtaacagagtgagaccttgtctcaaaaaattaaaataaatttgctccctggctctttatggaataagtgtggggagccttggtcaagggttgagtgactgagacaggctggaggacaggaccatggaggagaggagggcgagaagccaggaggcggggcgttccatcaatcacagatcctataatcaccaagaatgaaaatggtcccactgagggagtcacaggagctggagtgacgatggtgacccagggggtcagtggaaccaatacacaggccaaggtctctctcccctccaaggctttcttctaattaattgattttatttatttattttatttggagacagactcttactctgtcacccaggctggagtgcagtggcccgatctcagctcactgcaacctctgttgccttgattcaagcaattctcgtgcctcggcctcctgactagctgggattataggtgcataccgtcatgcccagctaattttttgtatttttggtagagatggggtttcaccatgctggccaggctaaggcctttaaactcagaactccttttgcctgacagttccctgcaatcctttgttctggaaaactgctgctcatccctcaggaggaggtcagaggtcatctccagaaccctgttctaacctcctacctgggcccagggatgtcctctgggcccccaaaaccctgtactggtctgag

SEQ ID NO: 308677 - DNA, 1000 bp, Homo Sapiens
agcctattggcacagtagaagcaatcaataaatgttaataactatccaagaatctgaagttaccataattataacacatcaagacacaaaacaaaattacaaaaggaaatttatttcaaaagcataaggggacatttacatttaaacaagatgataaacaggtgtcttgcaaaagaaaaaaatccatggcattaagtttttcattcaaattcggaagcaaaaataacctaagttgtgcactattgccttaggaaagggaaggggaagggtgagggataagggaacagtcaactcagtatcaaacttgagaaagtaaagtcacttctgctcagttctgagtttacaaatatgcttataaagacaaaaagtggtaaaattatatttaatgttcaaatttatttagctgtagtctctataatttctgtacttgaaatggctttgggccactggctgatctatctctgaggtccagattagctggtcagttttcaaatggcaattttatattcctttgttcagattccaagggagtttaggttcagctcatggtcttttggaatgtttagagattattgccaccactccatagccaagctgaccaacttttgctcacttgtatcattctagcctttcagaactattttccccatacacatgtgcagtaattctaataaaggagttttgcttcttctgcagtgtagaggtaatggtaatgaagacacctgcattggaatcacaaactattcctcagaaaaatacatcagactactagaaatgtcattcaggcagttgatttgaatagcaaacttggggagggaagattaactgtgaaacaaaaatatacgaaacattcaaatgcagaacaaagggtctatgctactaaaaatgcccatgacattaaacactccacaaaccccccatctgttgttttaacctaaaaattctattggctaacttatacaataattttgattaataacctgagaagttaaaatcttga

SEQ ID NO: 308678 - DNA, 1000 bp, Homo Sapiens
ccttcatgtctctgcttccagtcttttctctgtacgtcctgcagccaggcttgggctgctgcacggctagagatgctttatcatgaaacctgcagcaggtgaaggttctcccagcaaagtttttgcagaaaagtgatgcactaagtgaactgttcttcaaatggtgtgagctgggagtgaggtttctggcttttcagcacatgggtgatgttcttgggtgaacgatgtttccccaaaagatatgtggaagtcctaaatctcagtgcctctgaatgtaaccttaattggaaacagagtctctgcaggtgtaattagtgaaggcgaggtcatagtggcatagggtgggcattcatctaatgactggtatcctcagaaaacaagaaagatttggagacagacacatagacaggggatggccatatgacagcggagtcagagaccagagtgatgctgcccacaagccaaggaatgccaaggatggccacagccgccaggagctgggtgaggccaggaactcccactgagtctgtggagggcgtgtggcctggccaacacactgatttcaaacctctccagaactgtgagagaatacattcctgttgttttaagccacccagtttgtggcttaatttgtgactttgttaaggcagcaatagaaaactgacacaggataatgatgttcaggaatgatgtggagagccctgggggtggttctgttccatgcttgttggatgcttggcatttctggccaccacaatgtatttactgagaatggactctctgcccagtgacagaaaatgagtatggccctggttcctgtcctcagcttagcatgggagacaggaggcaggaatacaagcagcagcttcagaggcaacaccaggcaaggccagggttgttggaggcgtgggctccagccactcccaagccggggctctgaatgtggcccctggtgctctctctggtgctccctgacaaatatggccctgggtgagaaaac

SEQ ID NO: 308679 - DNA, 1000 bp, Homo Sapiens
tcttccctcagtttacccagttaatttaaaaggattactcccagaaagctctcccagagcaggacctcacatttataaaaggggaaatggagagtcaggggaagcagtattttgggtcatgcaaaataggatgatattggcagaagaaaaggcagaatccaggtttcacaatttgtacttaacacaaggatcttaggaatttaaagatgatctttgagagttatgggagatggtgtgagtgtggggacatcgtatccagaataacatgtcttattttacacaacaaatatgttcattaaaaatcatgtttcaactttttataaaggtattttggtgcactgtgggacctggtttttgaaagggcatatgtacaatagataattttcacctaatggcccggtgtggcggctcatacctgtaatcccagcactttgggaggctgaggtggatggatcacctgaggtcaggagttcgagaccagcctggccaacatggtgaaaccccatctctactaaaaatacaaaaattagccaggtgtggggtggacggctgtaatcccagttacgggaggctgaggcaagagaatcgcttgaacctgggaagtggaggttgcagtgagccaagactgtgccattgcactccagcctgggtgacaagagcgagagtcttaaaaaaaaaaaaattcccctaagttttctgttaaaaatctaggtcttcccatgtattccaacaaaagttgacccccaaatccaataattaccatataataaagagacagcaacatctaatctgttaccccctaaattgaagttaaaggaaggatttctggttttcttcttcctctaaacttcgttttctcattttctcccactctgactctccattgtactttaaaaaatattgacactgtttgtcagatatgccagtatgtgtgatgtttgatttctccctgcacagaggacctagtaaataaccacccaaaaatactacctattttcca

SEQ ID NO: 308680 - DNA, 1000 bp, Homo Sapiens
gatcccaccactgcactccagcctgggtgacagagtgaggccctgtctctacaaaataaattagccaggtatggtggcgcacacttatagtctcagctactcaggaggttgaggtgggaagatcacttgaacccaggaggtcgaggctgcatgtgctgtgattacaccactgcactctagcctgggcaacagaacaagaccctgtctctaaaaaaaattttttggctgagtgaggtggctcatgcctgtaatcccagcattttgggaggccgaggcgggcagatcacttgaggtcaggagtttgagaccagcctggccaacatggcgaaaccctgtctccacgcctggctaaatacaaaaattagccaggcgtggtggcaggcgcctgtaatcctagctactcaggaggctgaggcatgagaatcacttgagcccaggaggcagagactgcagtgagccaagatcaggccactgcactccagcctgggtaacacagtgagactctgaaaaaacaaacaaaaaatttaaagtaaaaaataaacctccccattccttgatttcctcatctgtcaccatcttcacaggatagtgccactcgagtgggtgacaagtattggtaagtatcgttctccctaataaggaatcagacagggctggggcaaatcccatttaacacggccccggcctattgagtatgcttttgagacactgacacatggcttccccatgatccatgattgaaatgtacacattcgccaggcacagtggctcacgcctgtaattccaatactttgggaggctggggtgggaggacagctcgagcccaggaattggagatcagcctgggcaacacagcaagatcccacttgcctaatctcaccacctgaagaccctcattcatcctgggtcgccccatgccagtctgagcatccccccacaggttaatctccctacaatgtgaaacaaaacttagatgatttgtcccgctgctcatcaaaga

SEQ ID NO: 308681 - DNA, 1000 bp, Homo Sapiens
ttggagaccagcctgggtaacatagtgagactctctagacaaaacctaaaaaaatcagcggggcgtgatggtgcatgcctgtagtcacagctactctggaggctgctgtgggaggatcacttgagcccaggagttcaaggctgcattgagctataatcatgccactgcactctagcctggatagagcaagaccccatctctagaagaaacaaacaaacaaaccaagaaacccaacaacgggaaacatcctcctctagaatgggggtcagaaacatctgtctgccttgttccctgatgtctctccagcacctagaacagcgctcagcacgagtatgcactcattagttttttgttgaataagtgactcgtttgacacagcaattccacttctaagaatctttcctaaagaaatattcatacacatgcagagagctgtgtgcacaataatgagaggagcaaacaactggggaacgtttgcaaatgtttattaactgtcagtgactgatagaggggaatcggatgaggggagtacaagcagatgggaggtgcttatagtgttacttggtgtgtgtgtgtgtgggggggtgtgtaaatgcagaggaaaaaatctgaaattaaacactcagacctcccctcagcagtcacatctggggagagaggagggtagtgctgttctatggagagaatacctgactatacttgttttctaaggtaggtgcatggatacacaaaccgaaatatgcattaagcatgtattgctgaacagtgaaaatgttaatatctaacagaatggcacactgtaagaaagtacaacggaaacgctaacatcgaactcttggcacactaagaaaaatgacgctcaacttttcactgttgtgaacacttgctttcacttgctatgcaccttatgatgaggggttcgcagccacgcccatgttcgtgaaaggtcaccacattctgcttctcatcatgggcatgtgtcatatccctgaggctgagg

SEQ ID NO: 308682 - DNA, 203 bp, Homo Sapiens
tcctgcttcctggatctctggaatggctctggttcctaccctttccaagttggctcctttgattctgtgagctcttacttagcttttcaattagcaataatcacgcctcggataaacctcattggctacgatactgccactgtgcaaagctcctacgtagctttatagatttcctttttccttaagttagcctgtgtccattt

SEQ ID NO: 308683 - DNA, 1000 bp, Homo Sapiens
ttgcctttcttcagaatagatgatgggaatgccctgacaatgaataagtagtgacagctgaaaaattatgatgatgatgatttttcattcagggtttttatttttattcaactatcagcaaacagcagaattaacacaacattcagcaactccagaccagcttttcttacccccatgaagagcaatcaatttgacagacacagatgtagggattcctgataagcggtcagctagtactgctgcccatctacagggccatgccccaacaacagcaaagccactctccctactcctttttccaggattgctctttaaagggaccagagtgagatactgacgcctattaaggcaactgagaggcccgtgttggggctgagcctcattgcgagcctctggttgtctagcgatggtgccataaaaacacactgctacagttctggtctcaggatcacaaaggcagaggcaaccaatccttatttatttatttttaacctcccttaaagattctttgatgctttgctctattactgtagacctggtctatttctgccaaattttttctttaaattctgggttgctattttcataataacaatttgatgaccccatcacaataccaaaatatcccccaaaatgaagttcaaaattgatcaaaacataaaacagagtgagtgactagaatgataaaggccaggcagcaggaaaagtcaccctaagccaccatctcagtgctcaggtcttgtctgtccaaaggggagtgggaagaggagaaagctatggtacatgcagcactgaactggagaacacagctcggggcctccaggacggttcaggtcgccgagctgccccctacttcccagacagctgctcctacaatttgggcacatagtcgtcccactcggcctggtaacacgtgccggccaccgggaccccgagcgcgtactttttacggggggacgccaccttgaatttgccacggtggtctccggagcggttgctg

SEQ ID NO: 308684 - DNA, 1000 bp, Homo Sapiens
ctcttaatctttagttttaattaattattgccacaactgatctagcaattaatagtacatttcttgcttttatagttgatttaattaattaattaattaattttttttttgctggccatgttttatttgtccttttacttcaaacaggataaccaaagatatagacagtattcaataaaataaaatagatgaaacaaattctaagagactgtgacgccacatgctacatttaacctaattttattcatgcttgccttgggatggggaatagatcattcagtgaaaacaaaatgtcttatcatgtacaacttttaaactataataatgatgtaccttaattacttccatgcacacaattctaacattcatttttttaaaaaaataaacacaattaagacttctagagcattttataataaagtaattcctaattaatttttctttgtagctagatcaagcacctccaaaatacaaattcctatacacagtgagcacgttacttaaaatgagtatgtggaccgccttaggataaactgacatagattcggctaggtaggcaacaaaccatagtgccaaatggaaaaagtgtatttgcaaataaattttaaaaactaagttaatttttataattaaatacagaaaatatattgatttgctaaaataaataagatgtgatgtattaacacttcactataaagaatgaataccagaacatttataaacagtgaatgagtcttattaagaatagtttactacaatacacactggctaaatagaagtgcgttttgtgaagcactatgggtggtatgttttgccgcatatttttgttactttgaggtagataacacacatataccaaattcagcattcattttcagttgcttctggtatcgtgtgttttacgaaatgtgtacagtatgaaaaacttgaaactactcatgaatgaaaaatgtcttaggataaaaatagatattttcatgcaattatgtacagtctcact

SEQ ID NO: 308685 - DNA, 1000 bp, Homo Sapiens
tttcagaaacaaaaaggaaaacgactttaaagatacaggttaaaggctgaaggggtgtagaaccaccccccgcctccttccctccatccttcccaaatatcccagaatgagtcaaacctttctaatctcgtagcacagataacaagcaactcagtaagactagacggggatgactgagggccaactcattacaggactacaggaaactccttagtcctaaacccgaatgcatccgtgaccatggtaacactccctacctgaccaaaagctatcaaacgctctgacaagtgtttacagctgctttctcaattactgaagtggctctgaaaagagcctttggggttaggtggttgatctattgcgtcccttgcacactcttacttcgagctggtgtacttggtgaccgccttggtgccctcggacacggcgtgcttggccagctcgccgggcagcagcaggcgcacggccgtctggatctcacgggatgtgatggtggagcgcttgttgtagtgcgccaggcgggacgcctctcccgcgatgcgctcgaagatgtcgttgacgaaggagttcatgatgcccatggccttggacgagatgccggtgtcggggtggacctgcttcagcacctcctacacgtaaacggagtagctctccttgcggctgcgcttgcgcttctcgccgtccttcttctgcactctcgtaacagcctttttggagcccttcttgggagcaggagcggatttcgctggatccggcatttttgcgcgaaaaaagagaacagacacttaaagaagtaatccgaactaccgcaaaacgggctggttatgcgctacttatagagcctgtatgcaaatgaagactcgcaaagtgctgcgctttaattggttaacttacaacggtgtcgtcagagggggtggagtctatgtaaataatagattctagtcttgcttccttaatggtcactgtaacaaaagtcttgttatccaatcagaatgttcca

SEQ ID NO: 308686 - DNA, 1000 bp, Homo Sapiens
ttattagtcaaaaccgcatactataaaaatgctttaaaacgcagcaggagatgtgaagacacaaattaacaagcgtatagtgacacatggctgtcagaacacagtaaagaatccacactgcttcccccctttacctagaaaaggagagttctaggccacctcctcctcggcatactcctcatcctcctcctcctcggccgtggcatcctgatattgctgatattcagacaccaggtcgttcatgttgctctcggcctcggtgaattccatctcatccatgccctcgcccgtgtaccagtggaggaaggccttgcgcctgaacattgctgtaaactgctctgagacacatgtgaagagttcctggatggccgcattattcccaatgaaggtggctgacatttttagcccccggggtgggatgtcacagacggctgtttttacgttgtcggggaaccagtcagcaaagtagctgctgttcttatcttgaatgttgaacatttgttcatccacctccctcatgggcatgcgacccctgaaaatggcagccaccgttaggtagcagccgtgacgggggtcacaggcagccatcatgttcttagcatcaaacatctgctgggtgagctcagccacagtcaaggcccggtactgctggctgccccggctggtcagtggggcaaagccgggcatgaagaaatgcagccggggaaacgggaccatgttcacggccagcttccgcaggtcagcattcagctggcctgggaagcgcaggcatgtggtgaccccactcatggtagcagacaccaggtggttcaggtcaccataggtgggtgtgggcagttttagggtcctggaacatatgtcatatagcgcttcgttatctatgcagaaggtctcatccgcgttttctatgagctggtggactgagagggtggcgttgtagggctccaccacggtgtccgacaccttgggcgagggcaggatgctgaatgtgtttatgatc

SEQ ID NO: 308687 - DNA, 1000 bp, Homo Sapiens
gatctccgaccccgggcgggctccaaggggcccagggcccaggacaaacgcggcctcggtgcttttgcaggtcctgcagcctcgcgtttcagagccccgggccgggcccccgaggagctcccggcactctcgcctcttgtctttcagctcctcaatcagtttgaaaacacaggccccccaccggcagataaagagaaaatccaggccctccccaccgtccccgtcactgaggagcacgtaggtatgagagctcagcctcccgagtagtgggaattacaggcacccgccgccacgcctggctcatacttgtattttcagtagagacagggtttcaccatgttggtcaggcaggtctcgaactcctgacctcaggtgatcctcctgcctcggcctcccaaagtgctgggatgacaggcgtgagccaccgcacccggcctcgagcatttccctgaaggtgggctgggaggagagggttctgtccaggtcccctctggcagcccgggggacacacacacggcttttctcccctcgctgggctcaggggcggcctccggctgaggctgtggagtagcctgcccttgaaggctcggcaggccccccacgcccgctgtgaccgcagctgcacactcccgcaggctccgggctcgagtgccctgtgtgcaaggacgactacgcgctgggtgagcgtgtgcggcagctgccctgcaaccacctgttccacgacggctgcatcgtgccctggctggagcaggtgagtgccccgcccacccgcccccccaccccgaccgcggccctcccgcctctaacctgccccttctcccgtccctgcctctgtccccacaaagcacgacagctgccccgtctgccgaaaaagcctcacgggacagaacacggccacgaacccccctggcctcactggggtgagcttctcctcctcgtcgtcatcgtcctcctccagctcgcccagcaacgagaacgccacaagcaactcgtgagccca

SEQ ID NO: 308688 - DNA, 1000 bp, Homo Sapiens
atttatcggtttcactctaaattatattgattaacaaacctattatgatgtatgcatgtgcttgactaattctccacaggcaataatgtaaatactttaagaaatcctcaaacatatattatattttgggttgcttttcaccctgaattattcatgtacagacagttctactttgattttattctgtattaactttaccttgttgcatcacatttaatatttacaattttctactaaaggagatgagctagtagagaaacaggagactagcaacacataccttctgtcatcagaaagtcacacgccccttagtggagaggtcaggttacctcttaacgacacaaaagacatctgtgatccggtgaaaccccgtctctactaaaaatacaaaaacttagccgggtgtggtggcgggcgcctgtagctgcttgggaggctgaggcaggagaacggttgaacccgggaggcgtacttgcagtgagctgagatcgggagccactgcactccagcctgggcgacagagcgagactctgtctcagaaaaaaacaaaaaacaaaaaacagatatctctgatcttcacagactgccctgtgaaagctcagagtgaggcaagagtgcaaaaagcagattcctcatcaatgtatcacttcggatttgaacaggaagttttcacactagggccattttgaatcagtttatctcatcatacacctcagaatataagagactgagctgctagggtgtcatttagtttgtccattttcaagtgacttttagaaattatttttatagtaaacaagatttggggagaacaaagactactacccatgcagttgtttccatctcaatcacaaacactaaaatcttatacctttttcagagtctcttacatgtttaacttctacatttacacagggtggctaaaacttgggattacgtacttctttatcatatacccctataatatcactgctaatatgacgataaatttttaaaataa

SEQ ID NO: 308689 - DNA, 1000 bp, Homo Sapiens
tctaaaaaggtaaaaacaaaacaccgcagccaaaggaaactccttgagtcctttaatcctcaggtttacgtaaatgttattaaggtccgtgagaagtgccaaataagtttaaagcacaaaaatcaaatagctgcaaaatttaaatccatgttggtctggtaggtaaccataaattaaaaaaaaatttaacttcaattcaattctcacctcgtttacccttactattggtgtacttattcttgtagactgttatattatgccctgccttcaaggttttatgcaaaaacttgtctctgctgctcttacagagttaactcctaactatcctccaccctattgaaaaaaaattacctctcttagaaggacaaagaattaagtcaaaacatattaaacaagactgaggaggaattatgaaataaaaaaagggggaatattgtaaaaagtaaagtagaggttcctcttcaaagactttcctccccatctaattagaaataaacagtaacttctcttagaagcaaaatttattcaaagacctgtgctcctaaatatttgccctggcatgcttatactggtccaagcaagcgttaggtcatagcctgttcctcttccttatttaaaagtgtttttatctttctcagcattccacaagttacttcctccttcctttgttctcctctacctttgcctcttttaaaaagttctaagttgctagccaatcgggacaaatacagaatgtgaggtcccgttccagccagtggaaaccggacacagcagtagtgtggacatgtcaggttataaatgaccctgtctcctttgttcggtgtactctcatggcagaactgctagtgagtgtaccctttctgcaggaagtaaaaaatggccttactaaataaattaaatttatgttcaagtcctattcctttatgacaccggggaacaagcatttcaaacaattccattctaataaccccaagtcttagctttttacggaatcaattgt

SEQ ID NO: 308690 - DNA, 1000 bp, Homo Sapiens
gagctcgaggatctattgtctccagaggtatagcttgtgcctttcgcacaccttgtgccaaaaacggaaaggttcctacttgaacctcttcattctaatagaggtcctcccctgtagagttataccacgtgatggaaccctgacccctttcatcatttgttgctccaaacaaccctttaagattctaccttcctctcccgattctagtggcctgactctagatagactgattggatgtgccatatggaaggtgatggactctcaacagtgaaaaggctggcctcataccttgttcatgagtaagagtgcagcctggatgtgtgatcatgggacccttgctgattacttgaaaatgcccagcatgaagtttataacttccactaaaaaatctgcacaaccggctgggcgcggtggctcacgcctgtaatcccagcactttgggaggccaaggggggtggatcacgaggtcaggagatcaagaccatcctggctaacatggcgaaaccccgtctctactaaaaattaaaaaaaaaatagccgggagtggtgacaggcgcctgtagtcccagctactggggaggctgaggcaggagaacggcatgaaccccggaggtggagcttgcagtgatctgacaccagccactgcactccagcctggccaacagatcgagactccatctcaaaaaaaaagaaaagaaatatgcacaatctgctcaattattccatccaagggaggggttgactggacatgtatataaacactgcacttctaccagattcctgctctccagtaggctcaaccaaatgtatctcaaatgaagtaaattatgtaaatgtaagaatccatataaaaactaaagaaaaacaaactgtaaataataataacaataataagccacactaataaataaaaacaagcatgtagcttaactggcatccaatcactcttttgcttcattgccttagctctggctcaaaccctatgtcctccttctaattg

SEQ ID NO: 308691 - DNA, 1000 bp, Homo Sapiens
gatccccgcagcgatggaagcgggatgcgcacagatgcgaaaggactcaatggtgtaacgcagcagggagcctctgctttcagtcacttgagaaagagacgctgaagcagacagagagcccctccgaggttccgaggttctgcagacccctgcagcccagaaaggtggacagctcgcgtgtctttgcggacacgctcggcctccccgtgtccccagccagagggacggccagcccacagagccagtcccaggcgccctgctaggctgtgctgatacttcctcccagagatttccgggcgaatgaccagctggcatgcacccacccaccctctgcacccaggtgagtggtgccagatgcagaggaaacgggaagtgctgtggtgtttctgttttcaattttaatcaaagttttgaaacataaatgatttctttattttcattttttttatttaaaaaaaaaaaagtgtggcagagagcttctctgcagcaagagccccggcaggaaagggaagagaagggcggcctgcagaagttctcagggaggcttcgcccccttgccgagagcccccaagcaccgtggtggtctctgggctgttgaaataccagagtggggtatgtggataagggacagggtggctaggatatgggcacagggtattagcacccgcagtgggagaaggcccacccttccaagcagactcagcccctctgggcctcaccgcacccttcaaccccaccccacggagtgaaactcctgggaccagcggaggcgtcaggacccaagtacagagaagggggaattttatgtagtaaatgaggacccaaagcctctcagccgctatagtggtgacgttccccagtgtggggctccctgagatggaagacgcagccacttaacataaccctcccgtcgccaaccctcctggggaatcaggctcaggatccatgggtgtgagagctgccgagatgaggctcagtctgtcacaagcccgcctttgcc

SEQ ID NO: 308692 - DNA, 1000 bp, Homo Sapiens
gatcttgcattcttcatcttagtgcttctccatcactccccaaagcccttataataaagcacagatgctctgacatgcctcacctctgcctgtccctggagcaggcccctctgacactgggcacttgctgctccttggatgtaccaggcttcttcctgccttgagctttcacatctgctccttcttctgcccagatcatctcccatttggcttttcatgacgctggcttcttatttgttttttctggtttaaatgtctcctcttctagtgtttattttctgcctgtcctacctgcatatgtactctcctgttactttttcacccttttttggttttcagcagagctcttaccacattgtgcacttacttttttttttttttttgagacagagtcttgctctgttgccaggctggagtgcagtggcaccatctcggctcactgcaaccttcacctccctggttcaagcaattttcctgcctcggcctccctagtagctgggattacaggcacatgccaccatacccagctaatttttgtatttttagtagagacagggtttcaccacgttggccaggctggtctcgatctcctgacctcaagtgatccgcctgcccctgcctcccaaagtgctgggattgcaggcatgagcctctgcaccagcccgaaagttacttttttattatgggtctattgtcttcccagcctgaagcgagtcccacgtgggcagagacctgtgttctcttgcatagcacgtagtaagtacagggtatggtatgcagcaggcactctgtaagtgtttgctgaataaatgaactaatagacatataaattaatctgaacatcagttgctctctggcctgtcacagcttcttggggtgtttgtggagtaagggtgatttccgacgtactccttttccctccccaggaaaggctaaccggtggtttggggttgctccccctaaatctggaaaaatgaacatgaacatccttcaccaggaa

SEQ ID NO: 308693 - DNA, 1000 bp, Homo Sapiens
gatcttggcttactgcaacctctgcctcccaggcttaggtgattctcatgcctcagcctcctgagtagctgggattacagatgcgggccaccatgcccggctaatttttgtatttttagcagagatgaggtttcaccatgttggttaggctggtcttgaactcctggcctgaaacgatctgcctgcctcggcctctcaaagtgctgggattacaggtgtgagccaacagggacttttttttttttattatactttaagttctaggatacatgtgcacaacgtgcaggtttgttacatatgtatatatgtaccatgttggtgtgctgcacccattaactcgtcatttacattaggtatatctcctaatgctatccctcccccctccccccaccccatgacaagccccggtgtgtgatgttctccttccccaacagggacagttttaatcaatcccctttctgggtggtgtcaggacacccacagaggtgtgggtctaagcgctttgtgagtgtccacgtcctgtgcctaaggaaagcactagtcattcattcacccaacagttcctgacggcccacctcaacaggaaggaatattatacagccactaaaatgtaaaatcaccagtgctgttcagaaggacggagatgtttatgtcattggctgtgtgaccaaaagaaaaagttctgctggggatgtgggatgggcatatacgtgttttgaatataagatctttctttaatgctgttatatttggtctccataaaataattattctttgggtgacaacctcttagaaaaagaaagacaaaagcagctatttgcataaacctcagcccaggtgtggtctccagccccaggaaacttctctaacacccctcccatcctcccaccagtggttcctccctcggtggcatgaggtggttcagtttttttcctctgtgcccaccctggggtgccctgggcccatggccactgactgcagtgaacaattatgtgtgagt

SEQ ID NO: 308694 - DNA, 1000 bp, Homo Sapiens
ggctttacgtaccggtcatagtgtgtttagggcacctcaggcggggctccccgccgccttacacatggtgaggagcgaaggcggcggcggcgggagaggatgcgggaagcggcggcggacacggccggagcggtccggggatttttttttcctattttgattgactgtgcgggaaacacaaaaggtggagcctccagcccaaaaggggggaagagggtgacagcccgcccggaactcccgcccctcttcttggctctcattcgccgccgtgctctttgtcggctgtgctcattggtccaggcgcctgtccgtcggtctgccaggcggcgcgcttcctgtttgcccccgggtggaaggggagagacaatgagcggccgtggcagcgtaggttttcgagagcggctacggctcgccggttaccccgctgtgcccgcctccctcgccggctgccgctgccaggcccgaggcgcaggcctcctccaccttgcaggcgctcggagcaggcctagccaagctgtaggggagctgagctggggaggaaattcgtccccggtgactcctgctccactggacgcttcctccatcccggcagcagtcttggccggatctccccagggcctcgcgctcttggagccgccgcttccctgcgctgccaggaggccaccgctgctcagccccggggctgctgctgcggccgctgccgctactgagcaaaccagacccgccccacgagcccggggggagggagctggtattaggggagacaccccctccgaggctggaggaggatttttctctctcacatccagcttcctgattcagtcacagccatctcgctcccagcccccttagccccagttttccaaccggtctcccactttcacgtaccctgaaggcaggcatttaaagcaaaaaagaaatctcaagtcacctcacatacggaaggagagttttaattttggccagtggcaccaaaacgggcacttaaaagtatatttca

SEQ ID NO: 308695 - DNA, 1000 bp, Homo Sapiens
cctgtctgtgtgagtgggtgtctctgtgtctgtgtgtctatgaatgtgcaccatctctgtgtgggagcagtgtgcctgtctctggatgtgtgtatctctgcatgtatgtctatatatctgcgcatgtttgtgtgtgagtgtgtgtgaggctgtgtgtctgcacctggacagtcactgcagagggggatcaaggccatttcctgtcgtgggtccagccttcagcctctcaagctgcctcattctggctcccccatccgttacctagcaacagggtccttgtaggaggaggaggctgtgaggagttgtggggttcaggaaggccacccccaccctgtttcctgaccctgaaagccctcagtctaccccactcaccccttaggcccctactcctgggtcagtggggctgcggcatgatccttgggaggggtcagagacctgagggtgagacagaaggacaaggaagatgaagtctctgccaatgtttctgtcagcagccccctgcccagctcctgccctcttcaggaagccagaaggcctgggctctgcccagcatgacttctgccttcacttttccttcctatcacccctggcacacttacacaacccccgtcacatagggcaaaccacccacacccagctctctttcacactccatactcacctgacccaccagcacagtcacacaataacactcacagcatatatttgcatgagtgtgcgtgccaaccccatcacacgccaatacaggctctaacaagcccaagctcacaatagcacacacacatacacatgcacatatacatggggtgcctgccaggttaacagacgaacacactcagacacacatgattttgaacattataatcatctctctaacaggatttctatcaagccatgctcagctccctcacagtccccagtcaccatctcctaaaaaccagttcttccggccaggcgcagtggctcacgcctataatcccagcactttgggaagaccgag

SEQ ID NO: 308696 - DNA, 1000 bp, Homo Sapiens
gaattccctccaaataaagagttttttaaaacattgttagacaaaaagtttgaattacaaaatgtggtagtagctcaggtctaactcaaatgcagggaaaaaaactattaactgtaaaaaaaattaaatacacatttgatggcaatgagaaacagaaaacaggcagaaatagtagaatatccaaccactgatagaagtatttgaccattgaataaagaaattagcaattcgatttaaatttgcatcaagtgcaacttcacacctcatgaagcttcccagtctgtgcaaaattagatgtctacgagtaaagtggtgagttttactagcttgaggaataagagcacagagttccaggctgacagaaaagaagaactgggaaatttgaatgacatgggaggaaatctcacacaactgaaagctcacagaggagaatgtcacagagtaaaaatctaaaatcacacttcaacttcattcagatataagatggctgctacatttcacattcataaaaagagactccatgaatctagcagaaaacaacagctaaattgctagtacagagcagagatttcttccattgcatatagctcaggagtgaaagtttggtgtttgactacagaaaaaagactaatgttagaaaagagtcactcttcaaacgaaaatagaagatcctatctctataaaatatcatacacataatctaacatataatttaacctgcctagacataaaaccaggaaaatatgatgcataacaaaaaaagtaaacaatggattaagacagtgaaatggcccacatgctgggattagaagataagaaatttaaaataagctattgcaagcatattcaaggatttaaggaatagatggtcataagagggaatatatggagaatctcaacagagaagtaaaaacgataaagagataacaggacaaattttagaactgagagactgaatatcttatataaaaatgtcattgtatgcacataccagtaaaat

SEQ ID NO: 308697 - DNA, 1000 bp, Homo Sapiens
actgttttctttcccatgactattcattccaagtgtcagtagccttccctctcttaatgttctcaaaatagaaagaaagggatccaggcagggatattaacaactctttactgaatgtccaggaatgttcattcttgagaacctcaggccctgagtagaacctcagggtctatgccaagttcctgacaagctcacatggcatgggatgatctcatcccctactagggagaaacctctggagccagggccctaaacccctctgctccttgtaaacagaaatgtaaaggtgtaatgagcaaacacatgcaaagacctttgcacacctggtacatagtgcttaataagagataactgctacaataaagattaggagctagaaaaaggcaaaatttgcctttggttgtcattgcttcttctttctttgattcccttccttccttcatctctctgcaccacaatatatctaatttttagcccctcagtgcctaaagtcccctaggtactgccccagtagctttcaacttctgctcagttaaaaacatcaatcccatgtctcttttttgtcaggtctttaatataatgtgacagtagttgacaccagttcctcaaaggaatggttcagaaccacataagaaccttgaaaatagggaatttctgtctttttgcaaacagaatggtatcaatgtaagtttcaattattaaggtgttcgggaaaggtcggaagtctctcttggcctttctgattgtgccacttaagcaggtgattgcctgttttattgtttccaaataacttgccacaggatatccatttagctggtccaaggaagaagattcatatttccctgacttgtagaaatatgtgttgaagtttggaggaagaaaagggcttgccctggagagttaaccactgatctgtggaataaactttaattttcttcaaataaaggaagcagcttttatcttccacagaaaactccatctcttagtctggcatcgcagc

SEQ ID NO: 308698 - DNA, 1000 bp, Homo Sapiens
gatcaccccaggaagccctgttccactcccagcaacccagccctcctgcctgaagagcagcagcagcagcagagtcctgagggtagggcacaggaggggcgttacctgcgggggccagggcaaggcttctgctcccagcaccgtgggcattagcaccaatctgcttttcaagtgtggacgaggggtcacggggctgcagcacgggactgggggtgctcctctgcagagagaaaaccctgtgtgtcaggggcagcaggtgccccaggagacccagaacccagctggaaacagtgagtgttgaggcctgcagctggctgggggaggccgccggggtcaccgtccagtaccgcgtgggaagagggcagcgggggaacttgagcggggccccaggcgagtggcgcagcgagagtgcgcggtgcctgcgtgtgaatgggcagcgggcctgaggcagggaggtcaggaggcgggggtcccggggtccagctgtggggagggggtactgggcacaacccaagcaacccacagcccgccctcaccgggaagcggctgtgttctccaagcagcacaaatgccagcagtcgggtggggtgaggagggcgcttgcgagaacacacctgccggccaccacccactgcacttccccacaccacactccaagtccaacaaaggtcagtagagtgaccgcagaacccagtagctccactcccacatgggccaaagagcaaacctacatccacacagaaacctggaccccagcgctcacagcagaacgattcacaatcgccaaaacagggaatcaagccggggtccatcaactgggcacggatgaagatggcacactccatccacacagggaatgccctcacgtgccaagagaagggacaggcccagacatgagcgtgttcgggggcccgggggctgggggacgactagggagtgactgctgaggcgggcaacgctttttcccgggtgaagaaaatgtcctgaattagacagaggt

SEQ ID NO: 308699 - DNA, 1000 bp, Homo Sapiens
gatcctcccatcttggcctcccaaagtgctgggattatgggtgtgaaccactgtgcctggagcttttataacttgttttttttttttttttttaatttagaggctgggtggggtggctcacgcgtaatcctggcactttgggaggctgaggcaggtggatcacctgaggtcaggagttcgagaccagcctggccaacatggtgagactccgtttctactaaaaatacaaaaaactagccaggcgtggttgtgtgcgcctgtaaccccagctactcgagaggctgaggcaggaaaatcacttgaactcggtaggtggaggttgcagtgagccgagatcacgccattgcactccagccttggcaacaagagcgaaactctagctcaaaaaaaaaaaaaaaaaaaaaaagacaagctctcagtccattcccagcctggagtgcggtggcgcaatcacagctcactgcagccttgactttccaggctcaagtgatcttcctgcctcagcctcctaagcagctgggaccacaggcagatatttcaccttccctgttagctgtattcctcagtattttatttttttgtgtggctattgtgaatgagatggtgtttttgatttggcactcagcttggacattgttggtttatagaaatcctattgagtttttgcacattggtttttattctgaaactttaccagttgtttatcagattgaggagcttttgggcagagactatggagttttctaagtataaaatcgtatcatctgcaaacagagatagtttgacttcctctcttcctatttggatgtcttttatttctttctcttgcctgattgctctggctaggacttttagtactatgtcgaataggagtgataagagtgggtatccttgtcttattctggttctcaaagggaatacttccagcttttgctcattcagtatgatgttggctgtgggttgaccatagacggctcttattattttcaggtatgttcct

SEQ ID NO: 308700 - DNA, 1000 bp, Homo Sapiens
gaattcctctctaccaacaatgttgtaaggccaataatccccacttgcagtcttaacttgtctagggatagggggcaataagaagaggcctgagaccagtctagcttgcagttacctaggacgttttattaattcatgatgcccactatccttgtgggagcaagaatatgcggcgtttcaagctccattcaaagaactacatttgacaaagttttatatcagtccaagagccccaccccatctccccacacagccttggaagtcaagagccttaatcagaaaacacatgagaaggccaggcatggtagctcatgcctgtaatcccagcactttgggaggctgaggtgcgcggatcacctgaggtcaggagttcgggaccagcctggccaacatggaaaaaccccatctctactaaaaatacaaaaattagccaggcctagtggtgcatgcctataatcccagctactcaggaggctgaagcaagagaatcacttgaacccaggaggcagaggttgcggtgagctgagatcgtgccactgcactccagcctgggtaacagagcaagactctgtctcaaaaaaaaaaaaaagaaagaaagaaagaaaaagaaaaagagaaaagaaaacacatgagaaggtggctaacagtaaaacctttgttcagcagtttatcttactacatggttatttttgtagactcttggtatcttttatcctaagacacccacttcttgatttcatgcagcgccacatgaactatatattatacataaagaagaacaaaaaagggaatgcaggttataaccattggccctttaattgaagagtctaaaaactagaggtctgtaacagaatactaatcctgcagaacaagggacagaaaagtcaggcgaggcaagcttgtcttcgtaacctgggctctcaattggggtgctctcttacatttcaattgaatatctgtttttaaacctcccttcaacagtcagggtgtctgtctattt

SEQ ID NO: 308701 - DNA, 1000 bp, Homo Sapiens
cattaatcatttggctgcagtttttgcatcaaaagctttaattgatgaaaaatttcttaaaagtcgggtggaatctaacattgaggttacatctaaaaagaagttaatgtatttgatgaaatgatattcagcatatttgatatgttgcactcgtctctgcttgcctgtttttttccccactgcctactccctttctaccttttattgctttcctctctttttttcctgccaccccaaacaatctgccatgcccttttcctcctcagtgtcttcttgaaatttgccacaagcctaaattacctaactgcctttagaaatgaccacataaggccaggcacagtggctcacatctgtaatcccagcactttgggaggccgaggcaggcggatcacctgaggtcaggagttcgagactagcctggccaacattatgaaaccccgtctctaccaaaaatacaaaaattagccaggcgtggtggtgggcgcttgtagtcccagcgactcaggaggctaaggcagtagaatcgcttgaagctgggaagtagaggttgcagggagtcgatatcacgccattgcactccagtctggggaacaagagcgagactctgtctcaaaaagaaaaaatataaagaaaaagaaatgaccacacaaaatgtaattcatttcagaggctgtgaattaaaacatagctaatagtcaaatataaatattgtgatattttttctaaaacatgacaataaggaatataagtaatctaacaagacatttaatatatattgaattgaatgtaaaacaaaaaataatttatatttacttttccaaaataatatgtgtgccatttaaattataactttttcaatatacttggctactaatatttacttagaatgctgagtgtttaataaagtcaacaaacattaatattaaatgttatagaataaaatatggccctaagtggtctgtgaataatattggtgggtcaaattattatgaatactgta

SEQ ID NO: 308702 - DNA, 1000 bp, Homo Sapiens
aaatgtctttatcgccatgcttaccccgatgggcggctagcagagcctgagaaacctcggaaacagctcagttctcaaggcactgtgagggtaaggactttagccatctctagttggggacacttagcagctgtgggcatttccaggtaccgttcctggcagagaaatggggtaggcaaaagaacgatcaaggaacgcagccttcctgttgctcttagcagtaaccaggcatgtccactggctgtttttgcagttctttaattcagtgcggctctgggatttcatcgagaaccgagaaagccggcatgtccccaacaatgaagatgtcgacatgacagagctcggggacctcttcatgcacctttctggagtggaatcatcagaaccctaaagagtagatggttgccctgcatcttgggctccatcggccgaaactttcccaagccagggtgtgcggagcttccctgtactgcagccaaggtgacgtgtgacttggatttgagtggagttgggcttagccttagtctcattcaatctccattattacagccatggggaagagtgaaagatataaagtaacctaattaaatgtatggaattgctatttttatagctgatatagttacacctcaagcccctcaggggtaacaactaacaaacacccaaactgtttggattgattgctttaaaaaacaaacctggctcttacctttgatcttttcttccccagaaatagtaaacttgcagctgcccctaatgcagcatatttttcttaccaaaggagtcttcagccctataaaaggattcctctatagtgtatttctctagtgtatttagtgtgtcgtcaaaattttgatttatacagagctttcaagaacacacaatgcaaagtgagcgcagcatagctgttaacaaacatacaacttttttctagggctttaagggtggtcatttttttcaagttctctcaagtgtcccaaatcagggtagcaatcttgtt

SEQ ID NO: 308703 - DNA, 1000 bp, Homo Sapiens
ccagttaaattcagttttattgttttccgttacatgttcactccctgttccttctcgccgcctggtctggtgggggcataggagagggagggaggactgaaggtcatacatttctgataatgtcgctttctaaagggctgtgacatttttgtacatcttttccatcttttagtagcaagtggttgctgcagaccagaagtgaaccaaataaagactcctgctctgtgcagctctcagactcctgctctgtgcagctctcacaaagatcacagctgcttttgtacattccagtaactgcatgacacaaaacggtacctgtgagcaggaaacacattcacaccatgagacatgcacacaggcaggtgtccctgagcgaagttgtgcagagatctaggcctaggggcagtcagctcctgccgcaacacaacctagaaaaccaaggcgagaacggccccttgccttccagcagcgagggcagagggcaaagccacttccctgtgaattccaggaggattcaaccaaggctaaaatgccccgggtctgagagaatcgaatctttaattggtttccacatggggtgattaaggagaaggctgcttcccgcctgtccggagcctcggccttccctgacaggcacgcagtccctccgcccaggcccaggggacctgcttccctgcacacagtcgggcagggcaggacagcatgtgcccggctggctgctgctgcatggagaatttgacgagttttcattaacccgagagcagcctggtgagagccattttccgccccaatagcttcttcatgtttcacctgtgcacccgaggccaggaggaagtggtggcatcccctgcagacagcagcgcggtctgcggggggtgggtgtggacagcccatgggccaggctggcgtctccccacccttacaagcctgcagacaggtccacctctggcccaggaacagatgagccccgccctggaagagctggagaagaccctctgcc

SEQ ID NO: 308704 - DNA, 1000 bp, Homo Sapiens
gatcctcctgcctcagcctccccagtagctgggaccacaggtgcaccaccatgcctggctaattttttaattttttgcggagatggggtcttgctatgttgcccaggctggtctccaacccctgggcccacgtgatcctcccacgtcggcctctcaaactgctggaattacaggaaggagatcccgcgacctgacccttactcccattctgcagatgagcagagtgacactcagagccagtaacagcccccagaaggccctgccccagaccccaactcacatgtcctcgtcggaggccatgtcctcaaagtgctcctctcctggcccttctctgcctcgcccgggtgagcccggtgtcccctcccgggccgcgtcctcctcctccgagcctgggggcccatcctcagagccgccggggctggctgggtgtcccaggcccgcagctgcagcccgcatggctgccagtgcggccatctgagcccgctgcatccgggcactctcgggctctctgtcctcgtcgggggcagcccgggcccggccggggggtgcagcagggggatcggggggcagctgctgccgggcctccagctcctggcgcgcccgctgctgccgctgcaacagcgtctccatcacggcctgtagtttcatggccctgcggcccgggccaccaccaccaccaccaccaccaccaccacgggcgctaggggtgggcggcgggggcggcccctgcggggagggggcccggccgcactgcagcgtgggggccgcgggggagccggggcagtgcagggtggcagggggcgggggcgggggccgccgggctcaagctgaaggctgatggggcatgcctcttcctcacgctgggctccaggggacagaggctggcatccggctcattcacgcatttgcagaaacctgagggggaaaaaaggcacagtcagagcaggcctgagctcctcaagccccctccttccttccccatgaaggccctggggatcag

SEQ ID NO: 308705 - DNA, 822 bp, Homo Sapiens
tttttttttttttttttttagtttgctaaatgccctgtttattctgcaaacaaggcttagaaatgtatagacacaatttgtaggctgagaaatctctgtgtagttgtgacttccatacttccgcaaaagtagtaaggacagcgacttctgaacacattaacctaccactgttttgtttagagcgaacacagtgagaatggattcctaacggcctgtttctctaagtgatcgtcgcagttcgctgctctagtctttaagaacaagtggagccttcacttgagccgccacctccttgccattcagggcttcaacaattgcaagcgcaaactcgaagctggtcccaggcccccggcttgtaagaatcaggccgtctttttccacacgattctcagagtaggtgtaatgacctccattcatcattttgtctttagcaagagggtgtgttgtaactttacttccaaaacctatttcatgagccaacagagcagtaggacctgcacagatggcggctatcaggcccttccggttttcctgctccttcagtatctccttcacagcagcagactcagataaattctgtgcgcccagattacctcctggtagaaccaccacatcatatggtccctctttttttgcatcttcaaggctggcatcaggacaaatgaccacatcacggctacactgtactgggtcttttccagccaggcctgcaacggtgaccttaatcccagctcgcctcatgacatctacagggatgaccgtctccatttcctctgctcctttagccaggatgaccagagctcttttggaagccatttttat

SEQ ID NO: 308706 - DNA, 1000 bp, Homo Sapiens
aacaatctacagattcaatgcaatccctatcaaaatttcattgacatttttcactgaaataaataaaataatcctaaaattcgtatgagggagtaacacctgctccacagtggcacaaagcactgtcaggtgccacacacagcctgttgggacatgtgggccacagtacttccccacctaaagtactgtagaggcccaggagacatgagccagggccattttaactgtcagtaatggccacaaagacccctaaatagccaaagcaatcttaagcaaaaagaacaaagctggagacaatacactacctaacttcaagatatactataaagctataataatcaaaacatcatggtattggcataaaaacaaacagaccaatgaaacagaatagagagcccggaagtgaatccatgcatttacggtcaactgatttttgacagaaatgccaagaaacacaatgtggaaacgacagtctgttcaataaatgatgttggggccaggtgcagtggctcatgcttataatcctagcactttgggatgccgaggtggaaggaccacttgaggcctccctccaggctccggaagagacctcctccatgatcccttgtctaaggggaaggttcctcaggaccttaccgtgggggctgaaggtggccacccctccaggaacttatgccccaggcgctgaatttgggctgcctaagtctgtgtgcgtgagtctgtgtttgtgtgcatgtctgcatgtctgtgtgtttgcatgcatgtctgtgtgtctgtgtggtctatgtgtctgtgtgtacacttctgtatgtctttctctgtgcatttttgcatgtgtctccatgtgtctctgtgcatgtctgtgtgtctatatgtctgtgtctttgtatctgtgtatctgtgtctgtgtgtctttgcgtgtctggtgtgtgtctgtgtgtgtgtgtatgtctgtgtatgtaacggtgtgtctctgtggcggggggtgtgtgtgtgattg

SEQ ID NO: 308707 - DNA, 1000 bp, Homo Sapiens
cattgctgaatatttggttcatttctaacttttggatattgcagtgctgctatgaacattaaaaaatttttttcttggccaccttcctgactgggaagaactttcttgtacatgcttcctaggatacatgttcattagttttcccaaggcattgtattagttagggtcctgacagggaaaaaaataactgtaatgaaagataacctgcaaagatgtatacttcagagtgcaattgctaggttttgagcatgtttatctttaaatttactgagggacaaatttttccacagtgattgttttcaatgtaagagctgacatcatcaccaaaacttagtatcattagatcatttcatttttgcaaataaggtaaagatgtaatacctccttgtagttttattttttacttctcaaatattaatatggctgggaatattttcatgtttcttggtcatctggatttcctttcacttgaaatgccatataaagtcttttgtccaaatttctattgactgtctttttcttactgattcatagggatcatttatatattctggacactagtttttcaccagttatatatattgcaaatacggtggttctttatattaggtttatattaggttcactaagtaggtgagattatgcatgcttattaccagttcttgtagttttgctgtattttcttcaaatgccccaaatcaaaattataataaaaagaaaatgggttggatataatagacaaaacaggtagtaaagaatgtgaagaaaattctgggcacagaaaacaaaagtgaaggcataagagggaggaagagtggaaaagtagaaaaccatctctattagatcaattaaagctttaaattttatttcaaatgattaaatattactaaatgataatattcaactacataaatccttaaatgaaaataatttagcatttattctaatattgaagataataaaaataaacctaaggcaagacagaaaataattcactatg

SEQ ID NO: 308708 - DNA, 1000 bp, Homo Sapiens
ccattattgcagacttaaatgagatgttaaatgttcaacccaattttctttcctggataagtttttctttcatatccctgtcagttttgaaaacataataccagaagaaggggggcccaattccacagagagctcccaagaatgagtttctgggagtgagtctgaagttgagataaacctttgctgatcttgcttacgttcaatgcatctgggcagcgtctttgatgagccctggcggttaggctggtggcactgaagcaggcctccagggtctcctgtttaagcaggattttaaggccaaccctgcggcttgcgcctgctgggtttctggagatgtgtcatattcggctgggttgagggtccagggcagagtggccaggcatgagagaaaatactttgggtcaacacctgtgaaaagaaggaaaaaataaaaataaaaaaaacaccagaagaatactttgggaacaacatcgtggtgacacagggcacaactgcgagtgcggagggacctctccccctgaacttgaccaagcgcttcctcagccctttctcccctcccaggccctccctgtccctggaagcagcctggttccctcccggtctcttagaaacccctgggctgctctttccctcagcccaccgagagctcgctccatctcactgcacgagggggccctcgctgccgccctcatctctcccctggggaccccagcgcccccgaagggcagaggggtctttccaagccataaatcccatgagttgaaactcgcgtctccagccccttccagccccgctccccagctggaaggagcccacttaccggccccctccttcctcctgcggagtctcctgtccaggatcccttttccccagtcctgccgtctttctttgcctgaaacctggaattcctccccgttcccgcccgccggcctccgcaacctcctccctcccccgcagcgcccagcccgggtctgctccaggcacctcctcaagaccgggc

SEQ ID NO: 308709 - DNA, 1000 bp, Homo Sapiens
cttcactgtttccagcaaatacagcaggactgaactatgtgatgacttcattctctttgcttaaaaaggattccaatctctgagcagtgtgaggaccaggaaataatggtagagagtgtcatctgtggattaagcatgttaaatacaagtggtaggcagaattctaaagatgtcctcccttgattgctgtcttctggttattcattccaacagtaatctaggtactgctgcgaagggactttgcagctataattaaggctatgggccttaagatatgaagatcactttggattaccaagtgggtgcaatctaatcacttgagcccttagaaacagagaaatgtctctggcaggagttagaaagatacagtagtcagcaagattcagtgtgagaaaaacttgaccacccattgctggttttgaagatggaggcagacaggccaggagcctaggaatgtggggagcctcaagaagctgagaatgatgcccagccaacagccagtgggaaacagggatcttagtcctagaactgcaaggacccagagcctctagaagggaacacgccctgcgaacacctttattttggcctcatgaaacctgaaacaaagaaacagttgagccacctcagacttctgaccttgcaacaatttgttttggcagcaacaggaaatacaaaaggtatttaagctgcctcaataaatcctaggaggtagatactatcattacccccattttacagagtgggagactgaagcacagtgaaaaggctctgagaaagtcggctggcctaagtctcaagaacagtcattcatggtggaagtgtttgctaccaagtttatttgcagtgttaacagcacaacatttacaaaacgtattttgtacaatcaagtcttcactgcccttgcacactgggggggctagggaagacctagtccttccaacagctataaacagtcctggataatgggtttatgaaaaacactttttcttccttcagcaag

SEQ ID NO: 308710 - DNA, 1000 bp, Homo Sapiens
tctgaccctaaagcctgagtttggaggtctcagcacaactccagagtcctcatcccagcgctgtgttcaggtggcgagaacatgtcttccatgggccccatttcccttgactgtggcctcccagcctcgggcatcggcctcaggtcaccccacggcctgcacatgctgtgtggctcacaaatatccagctcatttttggagaaactggctcttctggttgagccgctgcttgggaaccagggccagagcttcccgtttctgacccctccaccactactcaaatgcccgcagctagcctcacagtgaacccaggctgactggcgcccacggctgcaccgggcgacccctggtcctgctaggtggccttcctgggggacgagcggctgtcccccggccccatcactcctcattcctgagggttctccagattcgcttccaggaatgaagcctagtcagccagcctccctcctcccctgcttgccctaatttgatttgatctccactctggaggcctcagcactcctccatctgagcaggcatcaggtttctccaggcaggcggccccagcagcatccaggggccaaacacgtgcccagtggtacccagtccccgatctgaggcgctctgcacaaatacacagtgacaacctagagaaacttcagtatgaaatacaaataaaaacaaagtgtagcagcgatggcctcagacagtagatggcagggacaaactaaggctggctctgggccaaagacacgagcctcctggggagcctgtggggccccctccctcctgtgaggctctcgtctggggtgtctgcatttctgatttacatttcatacttgtttggtgccctgtgaaattggcctttcttctttctgcttccagctggtcctgtgtggaggtgaaggacaagggctgcagtgagccaaaagtgaggtgcacagaggtcttgttttcctgaggctgatagagggttccctctagacccggctccaaataa

SEQ ID NO: 308711 - DNA, 1000 bp, Homo Sapiens
catgattcggcggcggctggaggaggaaggaagaggaggaaaaaaaagggagagggggaaggcgaagcctcgctgctttttttttctccctttgccaaatattctggtgttaccttaacgccgatcttgttggatgtacacgtaacggagtggaccgagtcctccttaattggcttgagtggaggctcgggggctgcctcgcgtttgttttagcccggcgccaggttttaggcagccaccagaggcggggcgtaagcgctaaagcaacaagacaatagaagcctacatcttgcccgagataattagcttacatgctgatgacaaggtaaacacctttaagtttcacttgtcaggatttttaggtctcaaagagagagagagagaggcagagacgagacccaaagcatttcccccctcccttggacacccccacccccattttttgtggggtaccagcggagcgcggggaggaggtggaggggaggggaaggaggagggaaccgagagcggggagggcaggaggtggggtgggggagtaacagaggaggagagatggttgagaggaaggaaggtgaatgctgctttgcaaccaacttgcggagttacaaagtggaaccactttccaattcggtcggggttccccgggcacggacaggtctttaggaggagggggctgagggacagggtgggggtttcacctgagcctgccggggctgctcctccctcccgccgcggcctcccagccccgcgccttcccactgcctccggaccacatcgggcttcgctgcgctgagccccagtcgccaacaaatgagcgagcgagtctggggacgaaccctggggccgcactgttggtactacgtgtctgtcagtctgtctgcctctcttctgccgccgtcagagggacacctctgctccccgccccctttccccctaccggagagaatccgagcgggcggagggggcgctgagtaggggatcgactgcctcccggaggctg

SEQ ID NO: 308712 - DNA, 1000 bp, Homo Sapiens; identical to SEQ ID NO: 119986

SEQ ID NO: 308713 - DNA, 1000 bp, Homo Sapiens
gaattcacctaccaaacctcttcattttagccatggttacataaagctcagtaaaagtggctcctactctttaaacaaaacgtataaaatggacaaagcctcgcagtgcagtcgccagctgcacccacggtatcggcagggctgtgcacggccggcgtggaggggcaggctcggcgaacaggatcccagtgtggcgcccggagcagctcttccagggccggaacaggacttgggagaaaacgcggtttttctgccattgttccctcgcaatgcttcaattcaaacaatactaaggttgtctcgttcgcctcctcgccccgcccctttacccagagactcccatttaaaaacacaaaaaaccctcagtccgtgacagagactccccaccagctcccgagttccaggaaaacttttttcgccctaagcctggcgtctcactgcctagtgactgacacactttcctggcctctacggctgcagctttgcccaaagcaacgaaaacggtgcctcaggctacattttaagttcccagttcccgtgaaaggccgacgcttgcaaaacacaggattgacgctgggaacccaaggggaaggaaaggtggaaagcatgatgagggaagagcaagctttctcagaaccttggtgggcagcctggcgaacatccacacgcacacacacactcgggagcgcacggacgagctgccttctccaaggccactcaaacgtcccaaccactctcgggcgcgcaagtccaagcgcgggagccaggacttaccgccaagacgctctgggcgaggaaccccacggtcactgtccccagcagcagccacctgcatgggaaagggaggaagagagacgtgaacgtgcgggcccggcttgtcagtccccgagagttacaccgaagggtccatgcgcgcgtgacccacggggaccaggcagaaagtcgcttaccgccgtagggcagggccggccaccgcgcgctggtctctccccatgctggc

SEQ ID NO: 308714 - DNA, 1000 bp, Homo Sapiens
aattttcacaagtaacaatattattcttcttgtaacttttatcaaccatttataaacataaaaatcgttccaagtatacaggccttacaagaacaggtggtgggccagatttggcccatttgcttacctctgtcctaaatcataaccacgattcttagaaaattcttttttccaaaagcataagagcagatttttttaagtgtttacctacttttcttgctttttttcttgcaaaaggaagttacataggagcttgacacttcttagtaataaaatttacttttcagagcaccttatatcagtgatgcaaggtgaaaaacttaaccctttcgattcgacatgtagcttggcaccagactcactaactgcctaagttagttaactggattaactaaattagacagcttccccagtacagtgttttttgtcttctagctttgtgataactcattcgactttgaaatatcttagtagctggattggctaaatgttctgactcacaaaatattttagtttttagtaagtatctgttcaaagattcttcccaactgcagtcttctcctcaaggttgctgcctgcatatttactcttcattagtgctattttcctgtatgtcattgtgagcaagcttgtgattaataaagaattggaagttctgtaaactaaaaaaaaaaaaaaaaaggaattccctgcgagagcgccagctatcctgagggaaacttcggagggaaccagctactagatggttcgattagtctttcgcccctatacccaggtcggacgaccgatttgcacgtcaggaccgctacggacctccaccagagtttcctctggcttcgccctgcccaggcatagttcaccatctttcgggtcctaacacgtgcgctcgtgctccacctccccggcgcggcgggcgagacgggccggtggtgcgccctcggcggactggagaggcctcgggatcccacctcggccggcgagcgcgccggccttcaccttc

SEQ ID NO: 308715 - DNA, 1000 bp, Homo Sapiens; identical to SEQ ID NO: 119988

SEQ ID NO: 308716 - DNA, 1000 bp, Homo Sapiens
tctaagagcaggaggagaaaggagagggatgggagccagaggggaggtgaggaggagaaataaaaagaaaaagcaacataaaaggcagcttcatctccactgcttaacccatcagtattccttcactagggggaccttttttagggggcgcctttgtctcaggagccctaggccttgctcttcaaaaagagatgctgctgggctcttggcttggctctctaagtcagcaaagcacgtaagaaaccatacttcatctcttaaatgacctaaagtcacagaaattctgaatgcttctcagaacattcgaccaaatatcatgctgtgcactcctgagctgggttctgatagaggtggctatgaagaaactgggctgaggtttgaaaaggggatggcctctagtcatatatatatatatgtgtatatatatgtgtgtgtatatatatatatgtgtgtgtgtatgtatatgtatatgtatatgtatatgtatatgtatatgtatgtacgtgtgtatgtatttagaggtgggggcctcactatgttgcccagtctgctttgaactcctgggctcaagccatcctcctgcctccacctcccgagtagccaggactacaggtgtgtgccacagcaactggctctactcacattttactccttgctgcctctctagtcaactctttgcacctggtaaggattcaccacaactgctttccctttagaaaactttattcttaagaagaaggcacaacatactttttcttttataaaaacacacaggtcaatgttttttaaaaacacagcataattgtacaaggggaaacattttgttagtataatcttaccaataatgtaagagaggaaagactgccatactgaaatacattttgctgctgccaaagacggtcctattgtgaagaaatgagaaaaaaatagcaagcgccagggccaattaagcatccctctccccgtttttctgaatacaacacagtgatcctcaccgtaa

SEQ ID NO: 308717 - DNA, 1000 bp, Homo Sapiens
gatcctcatttgtgacatgggaactggggatcttggatcactcccatcactccagaagctacaaggccagtgacttactcactacaatgctgacgaacatgaccgtcagaaacaggatcagagtcactctcaggcaaaaaataaataaataaatttttaaaactccgaggattaaatgttttttcccattgtgctggggacaaattaatccaagggaggtcacagggcaaagaattccccaccaccaccaccaccaccatgagcataccatcacccatggagttttctgatttactctttggcctattaagcatgaaatttcttacgctaggttcctttctgataagggagaagagattaatatctccacatttcctctcctcctgctacatagtctctgtattctaggttaaattataatttatgttgaggatttacaatgtctgacacacctagcttagccttctgcacagagatacattgggagtggaggttaattgggtcaaaggagaaatgccataagcccacactccagcctatcagggtgaattaaaggtctgccttgcccaactcttgtcacacctgcttccatggtctgaataaaagtttgggtcccaggactatgaggttgtatgaagccttccagccccatacctgcacaacagtttgcagctcactctgctctgaactgccccaactttgaatagatattctctattcctcgaaatgaaactgcaccttcaaagctcacatatttctcttcttggctcagcactgggctcagcaagttctccagatagcttattatcaaataaaacggtggagaagggaacccaggcagctggacacaaaagggaatgagcaacaagcctcccctccgaacatgattttctgtgtcagatcttggacactccctggactgctcccagccatctgcctcatgctgggtttctagttaactttgaataaaaaatctcacatcttccttctatatgcagat

SEQ ID NO: 308718 - DNA, 1000 bp, Homo Sapiens
acctgcgtgggataatcaacaggggtctggaggacggggagagctgggaatatcagatctgactgcgtgttctcacttcgcttcctggaacttgctctcattttcctgggtgcatcaaacaaaacaaaaaccaaacacccagaggtctcatctcccaggccccaggggagaaagaggagtagcatgaacgccaaggaatgtacgttgagaatcactgctccaggcctgcattactccttcagctctggggcagaggaagcccagcccaagcacggggctggcagggcgtgaggaactctcctgtggcctgctcatcacccttccgacaggagcactgcatgtcagagcactttaaaaacaggccagcctgcttgggcgctcggtctccaccccagggtcataagtggggagagagcccttcccagggcacccaggcaggtgcagggaagtgcagagcttgtggaaagcgtgtgagtgagggagacaggaacggctctgggggtgggaagtggggctaggtcttgccaactccatcttcaataaagtcgttttcggatccctgcccagctgcccttctgcatctctgcagtgccatctgccggccccacccctctgctcctacgttgaggcctccctcaccctttgttgcagactgaggcctcaccacaccaaacttgcaaattcccttctttccctttaatgaggagggggctggtggagaggcggaggaccagggaatgcagccatcgggagggttgggtttggtgtggggcatctctcacagaggctgttggagcccggctcacgtcccacatgtcccttctcggaccagtgtccagggctgagtcacgggtatcgtcattctcagacctccactgagccctgctgcctcaggtgttgctgaaggagctggatgtggtgcagcagcttcttctggtggccagccagggtgatgcccagggcaggcaggtctctggtggggagggaagggatcaaatct

SEQ ID NO: 308719 - DNA, 1000 bp, Homo Sapiens
gtgtctgcttaccttgtttccttttaattgataagctccaagtagttgctaattttttgacaactttaaatgagtttcattcacttcttttacttaatgttttaagtatagtaccaataatttcattaacctgttctcaagtggtttagctaccattctgccatttttaatttttatttaattttatttgcttgagcacactgatcaaccactgaactgccttcttccattgtcctgcaatgatataagggttacatttttgtgtatatggctttcatagttgggatttcagagcactgataccagatattttcagtttgttctctgggggaatttcatttgcatctatgtttttagctatctgtgataacttgttaaatattaaaaagatattttgcttctattggaacatttgtatactcgcaactatatttctgtaaacagctgcagtcaaaaataaaacactgaaagttttcattttgcagtggatagctgtcttttttttcctcaaactttgtgaatggaattgtgtgcatgaacgacagttttgagcagcatgagtatatggctgaaattataaaatcattagggaggaggtgtgaaatatagacatatttctgagtagttattttgtgcctaccattttgccaggtagagtataagtgactcagtgtgacagaatttttgttttacgtataatttaaatgtttcatgtttagtaaagcaatacatatacacggaggtgcttttgatgaaaaccaagtctccccatcccttagtcccatgcccagagacaatctctgtttattcttttggtgttatttctacatctctaaattagcgcatatcagagtgtggtacacaactacccgtggtacgtggataaacactatttttaaacttacatgtataagtgttttgatgcgtaatagaaaaaaatataggctgggctcagcggctcacgcctgtaatcccagcactttgggaggctgaggcaggc

SEQ ID NO: 308720 - DNA, 1000 bp, Homo Sapiens
gatcccgaggaatgagaacggtggctgctgggtacacagccctgccttgcccagctgcgccgcgtctctgccggctcaggggcccaggtcccctggccccacccccagccgctgccgtcctcccccacccccgcccccccgctgcccggccgccggccttccagcacattcctgttcaccacaaactgccaggaatgcgcgctgcctccccggctaaatctgaaccagctgttcccagcgggtccggacccccaagccgggatgcaaggccgcagacactgtggatccgagctgcctccgtgccgtccagccgggagtcaactgagccacggggaagcggggcggggggcgggtctctggctgtttcaagcagccggtaaagcgggtgtgagcgggaagccagggggaagctggtttctaattgggaggcgacccttccgtgaccctggcaagctggccgacgcctcgcccaccctccaaacggacagactgagggttgcgcggggagcctgctaagcggctcttccagcctctgtcctcacccccgccagggcaggtatcaacctgcccccaccccaccccaccccgtctccggaagccgccccaccctcctgtgcccgctcccacttccgcaggcccagcaggtactgggttccggtcttggccctgtcacttgtgggctgtgtggccctgggcagctggaacgacgtctctgggtccctgtggacaccggtgcccttagccggctgtatgcagggtgcggcagggtgcccaccccactgcacggggggctctatgaatgcagggtgcagatggccccttgaaggaggagtcgtgagccccgggctggggaccctggctcaggccttgaccaccccaagcctcagcctccctttttggccaagagctggtctgaaggcttgcaggggctcacagcggggaagcaggaattctccctccagtctgccggccctggagtgccgccgggcaggtggctgtt

SEQ ID NO: 308721 - DNA, 258 bp, Homo Sapiens
ctattcattcaatcatacacccatatctatctatctatctatctatctatctatctatctatctatctgcctacctacctgtctatggcagttgtttacaaccaaggagattttattccaaggagatatttggctatgtctggcaacatttttttggttgtcacaaatgggatgaatgttactggcatctggtgggtggagcccggagatgctgctcaacaccctacagtgcacaggacagacccaccacaaagaatc

SEQ ID NO: 308722 - DNA, 1000 bp, Homo Sapiens
tttttttttttttttgagatggaagcctgggcaacaagagtgaaactccatttcaaaaaaaagaaaaatgtttcacagaaaagctgatgtggaaagaaccactggctccctctggtgtctaaaaaaaacacattgtattagccaggtgtgatggcatgcacctgtactcccaggtacttgggaggctgaggcaggaggatcacttgaacccgggagttggaggttgcagtgagctgagatcatgtcactgcactccatcctgggcaacagagtaagactctgtctcagaaaacaacaaaaacaatataaaacaaacaaaaaacacattgtatgagataatccatttaaaatatgctgcattgaaaccatgcttcatttctctatggaaaagttcacatataggctaacttggggatctattaataataaccatatgacttatactttaagcataatctaatttacacttagatttaatgtatcatctcccttagttcttacaccaagagagttactactctctagactcatcagtgaagctggacctgccaagcactggagaccacaggactttgtagtcagtcctagatatgatcctggctttagctctgagatcttgggcaagttaattaacctctccaaacctttatttcttcgttcgaaatatgacaaatatgacattgattcctaccttaaaggatacagtggtttcaatgtgtcccctaaagtcatgtgttagaaacataatccccaaggcaacagtgttgcaaagtggaacctttaagatcatgagtgaagactctgccctcataaatggattaatacctttatcaggggagtggattcctgatagaaggatgagtttagtttgcaccttgtgagcattctcttgcccttctgccttctgccatggtagaacacacaagcaggcccttgccagatgctagtgccatgcttttggacttcccagcctccagaattgtgagaaataaacttactt

SEQ ID NO: 308723 - DNA, 1000 bp, Homo Sapiens
cttagaaaagaagttgtttttattttaattcaagagggttggaaacataaaaacagtacattttccttgcagaaaattaccccatttaaattactatttggtacagagattatttattacactgcattttaggcaattttctaacattaagtgacaagttatacttttgattttttttttcacattggagctattatgatttgcactcataataccaaagctactgaactcaccaatttttttcttagtaattaaaaaaaagcacacagaaaatataactacaattagattaactttatcaaaagtaactctttcagaccaaacatccagcaaaaccacccacctcccttcagatataagcaaataatcttgccctttctacaaagtgcagatatctctgtatcccttttatttctcaaactgcagtccccgaagtgaagcaaacctttctctccacttctttccccttcagagattttggtgaaggcaggtttctcttaccacccatggtggaaaggtctcaccacttgaatttccttgactgagcaaatcttctgcagacagacaccacagagccagcagcagcccattatctgcactggggaatgtgacattattccatctggggtcatatgtttccaggatgttgttttgtacttctatttttaaagctcccctctacccacccactttgcctctgaaaagacagagtattaagtcaaagtctgttattacttttttaatcctaaaagtaataagcacttctagttgatggggcttgactgtaaggaaatgttacgcccctcgttgagacaaaggctgagttcatgaccgttcctggggtggaatctgctggcctgcagtggtggcctgatgccgtgcgatgcggccccttggcaattgaggaagggggtgttctgtaggaaactgctgtattgtaacttggaaaaactagacatctttgaggtgagcctaaacttctgcagttaactggacgctg

SEQ ID NO: 308724 - DNA, 1000 bp, Homo Sapiens
tgtaaggaagggatccagtttcagctttctacatatggctagccagttttcccagcaccatttatttaatagggaatcctttccccatttcttgtttttatcaggtttgtctaagatcagatggttgtagatgtgtggtgttatttctgaggcctctgttgtgttccattggtgtatatatctgttttggtacccataccatgctgtttttgttactgtaggcttgtagtatagttcgaagtcaggtagcgtgatgcctccagctttgttctttttgcttaggattaataccgtttctttaaaaaaaaatttttaaagagcaagaatttgagagcacaaataggaccacgtgacaacagtcctttggactgttgtgtaatgatccttactaagggaaattctaaagccattcttatccacaagcatgtatggacccatttattactctgggttggcatagtgtgaatacagacacccctaaacacatattagcaattcttctgccagtgtagacacattgagagtgaaaggatcttgtttcctcacatctactcacaagagtaaccaaactacacacagttcccagaatcatgtcacctcttgcttccattcactctttcactaaatatttattgggcatctactatgtggctggcattgttccaggtactggagaggacagctccactctatatgagaaaaatcatcactgtatatgatgaaaagcaggacaagtcactgattaataacaggcttggaaaagtttccttgtggttgtcccatcagatgggtatgaaggtaccatggaacccataaggcatctgcacaggtacctctgctcggcccagctcttcaaagttcttggcatccaaaactaggataaaattgctttcattctggttgggagtgatcaccacagaaagaataaccccaccatcttcttcattggttcctggtgctggaacaaaaacaggttctgagggataaaagccatcttctc

SEQ ID NO: 308725 - DNA, 1000 bp, Homo Sapiens
gatcctgccactgcactccagcctaggtgacagagcaagactccctctcaaaacaattttttttaaatgttgcaaccaatttttcttcctcatatttatagatgtttatcatggtttttcttaaaagttttttaaaccaccttttccaaacctcaaaacaagcatctataattatagacaattattctcctggctccataaacaattctatttttccttctccaactttctaatcctctcatgaagctggccaaatgtattctactcctgacaccaaacaacaaaaaaagaaacacgtaactgcaggctacttcttttgttttaataaacgaataaactagcttaagtgacagccccccccccccccccccccccccccccccctcacctgaggtcaggagttcaagaccagcctgaccaacatggagaaaccccatctctactaaaaatacaaaattagccgggcatggtggcgcatgcaagtaatcccagctactcgggaggctgaggcaggagtatcgtttgaacctgggaggtgaagggtgccatgagccgagattgtgccatcacactccagcctgtgcaacaagcacgaaactccatctcaaaaaaagaaagaaacacaaacagttgccaatgtgaaaactactcaataagatttaataaaaataccatatttggaaaaattttttgtctttttttagctgggattacaggcacccggcatcatgcctggctcatttttgtatttttagtagagaagaggtttcgccatgttggtcaggctgatctcaaactctagacctcagtgatccacccacctcagcatcccaaagtgctgggattgcaggcatgagccactgcacccggccttaactatttttcattaaggtaatgaaataagttaaacttctcaatactttctttcgttttttttttttttttttttttgagacagggtcttgctctgccaccaggctagagtgcagtggcatgatca

SEQ ID NO: 308726 - DNA, 1000 bp, Homo Sapiens; identical to SEQ ID NO: 119989

SEQ ID NO: 308727 - DNA, 1000 bp, Homo Sapiens
acctcctcttcttcctccctacagtaaacccaacacagaatggggttcagggtgagtatttagacgagtgatgaactatttatgattccaaaaaatctccaccatatggattttctgaacaatatctttatttagctcaggtagttgttcttacacatttttggatacctgggttagaattttccctattacattaaatcaatggttcttaagctcttatgcaagcatgcaagctcaatgcaggctagaatagaaggattgttgtgtacaaacattaaaaatagacattttattacaagagtgtagagaagggagaccaatagaaggtaattgaaatacccccccctcactccagccctagtcctggtgcctggatatgtgcactccctgtgcgctctggatccccgcagacacaagtccccagcccctccaggacagcaataagggtcttacaaggccagaaggcagccctgtttgttcctgcctgcaggaagggcagaggaatgtgatgttcccaggaactgtgtcctagacccatagggtcagattgctcagcctagttcaagcagtgagactacctctgtgccagtatcctgggctgtctcttcccttcactcttggcagctcccaattgtcaaagattggacagggtcctggtttggctagttctaacttgctgaagccagtcagcaccctcacagagccagctaggtactgggcccaggggcttccagagagttcttcagagcttctcagaggcctaaggacctcctaaccctagcaggcctcctggctcaagcacaacttgggaaggctccatcagcatctatgtggccctgttttacctgttgtctctggagggtgtgcagaggcaagtccagggtaggggcaggcaggatcccttaggcttgcccacagcccagatagcaaaactgcagccagatcagtgtctatgagtttcaggctgaatcttagaccacataggccagcctgctggtct

SEQ ID NO: 308728 - DNA, 1000 bp, Homo Sapiens
attggacaagaaaactgatcaaatctaaatctggacaaactggaaacagaaagtttgggtgctagcaatacaaactatagacacattcattctatcatcacttctacgtcagaagtatcagagaattgcgatgcctgcaaatgcatgctcatacacaccaagacatccattaaaaaaataaagccaagctttccagagcatttagcactaatttaatgtacttgttcttccaaatattgcaaggtaggatgggatttctaaagataagggaataaagaaccgaggcaaagacagccagcacatacacactgaatcactctctataatcatattgctagaacaccgtcagggagtagccctgaaatcacagacctgctgccatgacgtgcaattacaggacagaggtgccaggaggagaagagcccattgtgaccaaggaaagcctttgtgagaagactacttcagggtgctccccatcagaggagcacacccctgatcttgtattcctcattggtccaaggttcgtgtgaattggtcaggtggggaattttttcttccacagacatcagcctcttctgagttttttttttttttttcatcaaaggcagatttgtgcagccttaaatcttccgatgtagggaagatggttaagtttcctttcagctacagtgacaccaagcatccacagtgcacagtccgggtggctcaaagcctcacacagcaccaccaccacatcagcatccaaggtaaccaacccagtcgaagttcaggctcctccatgttttgcaggcagtgagtgccacagcaaggtcttcacagcaggcacgggtgatcggctatgtttgcagtgcaagacactctcatctacagtgagggtgcttcaaagcatcacataactgtttgacaccagcgcctcgtatttcatcatgcccaagtttcagggtcttcagtgtttcattgcaaataagaacagcagcaatgtccctataggaaacggaag

SEQ ID NO: 308729 - DNA, 1000 bp, Homo Sapiens
tttttttttttttttgaattcataatcatttattgtaaatcactcacagtttacacattaccagtggcaaaataacactgttaaacacctactggatgaagaacttcattgtgactatttccaattgccatcatatctttttctaaaatttaaaatttaacttttaaatcctacatcttttctgaaaatatctatcttcaaagtgctccaatactaacactataagccctttcttttgctctaacatctaacacaaagggcacactgtcccattaattccacatgcactttacaaagcaacttcacacacaaatttttttaatccagaagctacataatgatcactttatattttgctacaaaattaatgaaggctgcatgcaggtgaaacattagtagacacggaattctagataactgttggttctcaagatctgatggtctgatgtggaaaattaatatgcttatttagcagaagtagctaaagtacatgcatcagtggctgggatcaattagaatataaattaggtgcttaaacatttaaacgagagcttaatttgagcttaatttgatgtctggcatgtcagagttatacacctttaagataacaatagcaaacagaacaaaatcaaacatctaaacaggcatgatttataaggtgggctggccatagggctcaggacacaaaacgagctgggcagtgaacaaatctctcttgaaacaaagacagtagagcattaacaagctgtaaacacagcaaaaaaataaacaagagccatttcctgtattctcatttttttcagtttttgattctcttaagcaaacaataaaaccacacacacacaataattaacaaaacagaaacattctttagttaccacatagatcccccttctgtcttctaccctgcctctctgctccttcagatggttgtttaaaagcaatgatgggttaattggtagaaaagaaaacaaatgctctcctgaactacactgaaaga

SEQ ID NO: 308730 - DNA, 1000 bp, Homo Sapiens
ttttctatgtagcaaaacaaaaagttttataaatttcagataagctttctgtttttcttcagtgcaaacatcctgaaacagcacaaaatcattcagctaatctgaggataaagtcagtttatgtagtgcttaaagtagaatcccagatattctggaatggaaatagctcatgtgaaacttcagttcatttttgtccttaaggacaaatgatcatcttcagagagtgaagactttttaaaatctgaattcacagataaaataattttagctttactttataggtactgctgaagttgtagcaggaactactagtccttcactgatgcatgtagctgccttgccgtacagtctgtggtaacttttaggcattccttcatcaatcacagcctccatcccaactgtttcagatctttctactagtccctcagtacctggaccaaaagtatctatctgctgcagaaactttctgaaacattttcatttgcccagatccacaggattgtgaaatatgatctgaaatctgttgtttaagtctaacaaaatcttcctcattgactgatgaaacttgctttgacctttcaaaatgtgaaatatctggactggattcatgctgactgcagttctgtttgaagtagtgttgcctgggcaaaatgccatcaccgccatctgcatgatctactaattgtagatcttttggcctctcctctgaatctaacaagggctgggtggacttggatcttgagaagacctggactgatggaacttggtgtctgtagccactgtgtaccacagcagaatactggacagtgttcgaagtgttgtgtgaagattcattttcatcactgctagaaatgcttggcctagaagatgacatgcataaagacccccccaataccactgccgtgtccttcagtattaattttttcctttttgaacaggtctaatgatttcagatcttctgcaaaaggctttttgtcatttgcttctatttccacaacac

SEQ ID NO: 308731 - DNA, 1000 bp, Homo Sapiens
ggaaagacatggatatacgcactgattaagtgttaaggctggtggcacgaatgttgaggctcactcttcctcctcaaatccaagtaggtgctgacacttcagagacactgacaggtgactgtgactgctttttacacagaaggacataaccagaatgtccatttttgtataggtaggttgaagcagtataattgactgtaaatcatcaattatcctttttgcatattcttcttcctgaatctcatacaaacagtgaaacaggtccaccggctcaatctgtaacctagaagacttatcctttatttctctctcagtccacttcagtaactcctcttgaagtcctggggaaacttttcttccaaaagtagtttccacagcctttccttttcctttatgtaagaggccaaataagaattatatcattagtgatgaaaaaccttttccatattgttggaacatttcttgccacattttctctgcttgataaaaaaacatccagctattgtcattcttcagggcatggaagacagcagtcaagaactcttggaaactgaagtgaaggaaagtgtagacactgacagctccttcagcctttttcaaaaagcgactgagaaaagtgcagttggtatcacacactcctatcccatgtcttctgaggtcactgactgcaaacaaaacctgatgattttgcagaccctctgcagccaaacggcaaagaccccacaggcaactttgtccctcccatactgagatacctgtaagggttttgaggcacttggaaaagtagaataaatacacatcagtcatggtctgaagtgacctcaagagagtcctgtcaccatctccctgtgactgcaggacattgcatatcatccaggagacgatgggaagtgaagacataatgtcaaggtcttcattctctcaaagatcataaaagactttcattgttgtattagcacctgaaaactggctcaataaatatgctctcttttcggtatct

SEQ ID NO: 308732 - DNA, 1000 bp, Homo Sapiens; identical to SEQ ID NO: 119990

SEQ ID NO: 308733 - DNA, 1000 bp, Homo Sapiens
ccaaatcatgttgctttatttaaaatgatgaacaagtttcacccaagtgaaagtttaaaataccaacccaatagcagatccacaggctttcatggcagaccccatggctagacggacgcagaactaggagactgctcagtgttctgacaactccaggaggcacgagtgtgcagaagacagtcccagttcttctgtagcatccagtcactttggagacagctggccagggctagctctcctcccaggaggttcactggggcttagatgacatttctttttttttaaagacagagtctcggtctgtcacccaggctggagtggcttgatctcagctcactgcaacctctgcctcctgggttcaagtgattctcctgcctgagttgaccaagtagctgggactacaggcatgtgccaccacacctggctaatttttgtatttttagtagagacggggtttcaccgtgttggccaggctggtcttgaactcctgacctcaagtgatccacctgccatggcctcccaaagtgctgggattacaggggtgagctacggcgcctggccgaaatttctgaacaatgagacaaagttgagagccaccgcctgggggtgcaagctcacctagttttgctgcataggatgtcacatcttgacacaagctagtgggaggggagtgtggaagaagccgccagactccacttcaaatctaccagcaataccagtacacacatcaaaaacaacttactcgtggaaatactacagacaatctaaagaacctacagctggggcatccttatacgccttcctcctacacagcattttttacatttactgcaaaaattttgttccatcctatactcgtctaaagtcctaaatccaaggctcagtctctagtaagcttataaagcatttgcaccagcaaccttcccacagatccttagttttgctactttatgaagaagctgttactaccttaagtatacattggtgttaattatgctct

SEQ ID NO: 308734 - DNA, 1000 bp, Homo Sapiens
ctctccttattctactctacagtcttttgacagtattcccaaacgaggttgacacagctccagtccacaccagcataccaggcttccttcccagggcagtttagaggaagctccttctgggcaaggtcaggcggtcctccttccctctctccttcccctttgtcccagcctcaactgactctggctgtgggaggtgtggagggtccttaggcttccctccccaacctggcctccaccaacacccctaacaggaggcccgtggaaggctcagcctctcctccgcatccctcctccttcctgcctatcggagggagccagggtcccctaggctgaccctgaatcctcttcctcccttcatgggaggggggcaggaatccagaggaggatgaagccagcgggaccacatggcttggtggcttggacaaacaagctcagggaggaaatgaggaggcggcggctgcagaggaatgcaaccctgttgggcacagaccatgcaatctggggctggccctggggccagctgggtcctgtcctccacctgctcaaccgtgcttccaccaaccagaggaaacccatttactagtttttctaataaatcaataatgctccatgtttctctcagtttcttatttaactagcctcctctccctttgaactgagcctaagagggctggcaccatggagacagagggacagccagattctctagcttgtccctgggagccttatgggacgactgcaagcacccggttcctgggcttcatcacaaactccaagaaaagcttgctcattcatgcatttgatcaacttgaaggcctactgtagggcaaaatcatttccaagcagtgatcagtccaggcccctccccacagagctcaggacagatctcagcactcactggaccgcagaatcatcagaatctctaagcctgggattcacctccagagggcagtttctgttggtctagggagatggaatgtaagcactgcgtttccagaag

SEQ ID NO: 308735 - DNA, 1000 bp, Homo Sapiens
ctgctgctataaaacctccgccgcaggcaggagtttattgggaaccacgagtgtgcggtgctgggggcatctcttaggcgggcaggacggcccccccaggctcaactcaggacaaccccaacgggactgagcggccccatggccctcggcctgtggccactgagctccgccttccccgggctccctgaggaagcagagtcctgacttccaggaaggacaggacacagaggcaagaactcagcctgtgaggctctgggtggctcctgaggccagaggacgccttccgcgatccatggctcagcatcgtccttctggcttcccagccccgggccgaacgttcgggttaataagcagagcagttattcggctcctggcaggagctcccccgttagtttccacgttgtgagcacattcatacttaagactgtttctctttgtgttttaagcgtctgtctctgtagtaaactgaaatgttaacagaaatgcagctgggcccctcacagcatggggcaggaggtgggccccctggtgggtggggctagaaggtggccttggagtgtccgaagatgcagatggggaagtgcttcacgtgcgaggaccactgcgcggccagctggaagaacttgacgtcgctgcactccacgccgtcgatgaggacccgcagcatgttctgctgctgcctggcagtgcagatgagccggctgatgccctcaatgcactggctcttagactccacgtccttgtccttcgctttcttgggcagaaacatcaccttcttgttcttctccttggtgaccacggtcatggacatggtgggcgtggctgcagcctcgccgctgctgggcagcctgctgacctggagggaccggaaagtgcacttgagcgtgtttttggtgacaggcaggtccttcttctcggcgtccctcttcctgtccgcaggctgtgctgccgtccagtagtccacctgcagccccatcagctcggcgccgacaccctggct

SEQ ID NO: 308736 - DNA, 1000 bp, Homo Sapiens
gatcttttcctcagctgtgttaagcctaccagtatacacactttcaaaagcttatcaagggcatttttcatttctcttacagtgttttttatctctagcacttctcttggttctttcttagaatatccatctctctacttatgtcacccatctgtttctgcatagtgtctaatgttgcctcttagtctgccttgtatggtttttttgcaaatcagacatgatgtactgggtaaaagaaacttgggtgagcaggcattcagtgatgctgtggtgagtgaggcattcagtgatgccatggagggaagggttctgtggtattgcattagagctgtgtcctgggctgtgaatgctgtaagtgcctctcagttttttctttcccttaggtgggacatgatggctacagggggctagagttggctatttccccttccccagggcatttaaggctcctatcaaaccccagctgattagactctggtaaaatagtttctcttaaaggcaggtcttgcccagaatagaattcactggcatctttcaaagtggtttcttttccccttcccctgcaggaaggatgagctgatttttactgggtattactataggaacctggtagtgctccagaagctaagagtcacaaacatgtccccctacccccagaagtaatccattcccctgagtgtttaactctggatcttgttcacactgaccctccagcaattcattagtgacagttcaggtttttctgaccccagtactggttcccactgaggtttctgtgccaggggtttctgctcaggtaaagtgtgttgtctgtctttgcctgttggtctcttcaatatatgggtcagttagcattgagacctcacttctctgtgggatctaaaagagttgttgatttttgagtttgttcagctttttacttgttgttagaactgagtgacaaatttcaagcttgctataggcctgacaggaaaccagaagtctctaggaaatgactgga

SEQ ID NO: 308737 - DNA, 1000 bp, Homo Sapiens
tttttgaatgaggaagctctcttcatttatttcatatgaggatgaagaagaggattatgtgatcacaggaatgttgcatgcgggataatccaaagctggttatctccaggccctcactctgccaagagatctctctggaagaagcagccagttcacagatgccctggatccctccgtgcccaatcataaaaaagtcatgaccgtccctatcttgccaatctgccaggactccaaggggaaaaagcggataagtatccttcaggagacagagaaaaagatatcatcagctccttggtaataccacatcttgcaagacccctgccaggtactcccactgtgggtactcaggacagcctgcctcagtccaccaggcatttgcaaacctgctcatcccaataatgattttccccaacccccagcagggcagtgggacactcaggtgtgggaggtagccgcacatcatgacccagtaggacagacacacaatacagtagcctcggtgtgtgtgccgtacactctatcatctccatcagtttgtgtactgaggggtaccctgcctcctaattgcaggctccctaagggcacagtacctcagccacctgttttctcaaaggctgagcacagggtgaccccccaccccaccaaccccgccactaatgtctgggccataagtgaacatgcccctctcagaggtaacagcaagtttccagtgaggaaaaccaaacttgggacagcctggttggggcgggcgggagttatgaacagcctgtcttctcatcataaaattggcataatggagattatctacctcatggggatagcatgttcttgtctgagcaaagggagatggatagggattgttaggatcaaatgggatcatgattgttaattacctgtaaaagacctaccatggtatttttacaccacttgttgtaatagtaacagtcccccctgagtatccgtggatatttgttcacaccccccgaggaaaacacaatct

SEQ ID NO: 308738 - DNA, 899 bp, Homo Sapiens
tttttttttttttttttttttttttttttttttttaagtcagccaacaaacatttattgagaagattttgtgtacaaaacactgtgcaggggttggggacacaatggtgaacgagacctggcccctaccctctagaaacttgtagtgtagtatggaagtttcttacaccaatgtgccttcttacagggcctcggggagtctgggatgttcctggggtcatctgtgttctttgccattgctgacgctgtggccgcagtgcgaagagaaagagacatagctgaggacttcacggtgaagagcccagcaacgccagaatgggttcgaatggccttcttttcacagttgtcaattgaagggaatgacacagtcccatgccccaggagccaggaacatccagcctcctctcatccaaaaaatgttttaaacccaaagacttgatgtaatgctcctgttgtttttatttgactgctgtctcttcctttgggaaattatccatcctccactccatgtgttccaaacaagctgcctaatccgcgcgcaatagaaaaggcggaagcgcctgtccacgatcagggcggggcaagggggtggcacctctccctcctcctggcgttagttccggtcgcagaggagacacgccgcagttgccggtacatcggggatttctggctctttcctcttcgccttaaattcggtgagacgcggcgccccgctcaccccgggcggacgctgcgggtcgtggacgccgggcagagggagagggaggcggcgggctggatgcggcccggcttggatgggcccgaacggaggtcgcctcttgaggccgggccggatctagggcctgaaaggccgccgcttcggcagggaggccgagcctcgtgccgaattcttggcctcgt

SEQ ID NO: 308739 - DNA, 1000 bp, Homo Sapiens
ccagacctcagtgtgaaaggaatctttatggtagtagttaaaattcatttcctcagttacactagccactttgcaagtgcttgatatccacttgtggctatcgtatgagcacagatggagaacattttcattatcaaaggaagttctactagacaatgctgtattagcttactcatttattataaagccctgttcaattgtttttcagaaatcttaaaatttctcccacgcaaggtgcggtggctcacgcctgtaatcccagcactttgggaggccaaggcgggtggatcacttgaggtcaggagtttgagactagcctggctaacatggcgaaaccccatctctattaaaaatacaaaaattagctgagtgtggcagcaggcacctataattccagctactcgggaggctgaggcaggagaatggcttgaacctggaggcggaggttgtaatgagccaagattgcaccactgtgctccagcctgagtgacagagcgagactctgtctcaaaaaaaaaaaaaaaaaaaaacctcccaaatcttttcttttttagtctaaagaaggattggatacttcccagttccatttcagggattataacagactaaactgaaaacaagtcagctacaaaatacccgaacattctggatgtaaaatttaaaacattcttttagttacgttgctgagctctcaaaaaagtaaaatttgcaggaaccaaaaatgatgtgggagtttgaatctatagagtggtaaggggatttttaaggtggaagctattttaagggccattgctgatctctagacgtctaggacccgattcaagggacaagagacaagacctgagcttatgtaaagaggaattaagatacagaactttctatagagctaagaaccctgaaggtccactagctcaatgaaggggccaacaattttttttttttttttttttttttggatacggagtctcactctgtcgcccaggctggagtacagtggcgc

SEQ ID NO: 308740 - DNA, 1000 bp, Homo Sapiens
gatccctgtgtcattagggaaagtggccagcaccctctcctttcccaaaagatgaacagacactcatctattcatttgacagtgtgagggtttacagaccagtcttgggaccagagagaccaggtcccattcagcctctgaaacttcttgactatgttgtgtgatcttgggtgaatgtttttaacctctctgggcctcaattttctcatctgcaaaatgggggtaataatattaatagtatcctatgtcgtggggttgctgtgaggcctaaagcagatctaaattccttagaaagttctcagtgtagggccaggtatacagtaggagttcaatcaattagctatcatgagagttttttgtttgtttttgacacgtagttttgctcttgtcgcccaggctggagtgcagtggcatgatctcggctcactgcaacctccacctcctgggttcaagcaattctcctgcctcagcctcctgagtggctgggattacaggcatgtgccaccacgcccagctaatttttgtatttttagtagagacagggttttgccatgttgtccaggctggtcttgaattcctgacctcaggtgatccactgccttggcctcccaaagtgctgggattacaggcgtgagccaccatgcccagccaggttggggtttaagcatcgggccctgagctcaggaaaggtcacctcctgtgctcagatcttatttcttattttttcatccttgcattttatatatggaggctcaaagccatgaaagggcttagtgagggactcatacaccaggatgtggccaaaggaattccgagatgcctcagtgatcttgagacctcttctgtttgccagtgaggaaactgaggcccagagaggggcagagttgactctcaggcctctacttcccggctcagtcctgggtctcttgaactccagatattcccagtcacatccctgcctgtccttggtactgcagccgcagaagctgcctgcctgcaa

SEQ ID NO: 308741 - DNA, 459 bp, Homo Sapiens
caactgctggggtgccatgtccatcaagggcttctggaccccgaaggccgtgatgaagatgttgactaccacgatgatgaacaccaggcccgtggccaggttgttgaggaagtccagcttggcgtgcttggccgggttgttaaggtcgtacttgacaaggaagatgagcagcacccccacgccgatctgcagcacaagggagatggagatgaggaccaccaggggcacatagaaggcgaagctggggccctgttccacgacggccttcagctgggacgcgttggccatcagcagcgcgatgtccagcatgctctcggctgcgctcttcttgctggcgtaatggttcacgttgatgggcccgtgcctccagccccagcgggccggcgaggcgtccggggagccgggtgtgcccggaggcaggccgccgttgagctcgtactcctcggttcccgagtccat

SEQ ID NO: 308742 - DNA, 1000 bp, Homo Sapiens
tacattctataactttgagattatttattggatttcactgttcatgggcatttaggtcactgaaggttttgctatgaaaaatagtgatatcatgaacattctcatacatatgccctgatacacaaatgcagccatttctctaacaataaacttcagttaattatgttttcctctaacaatctacacataagaatataatcattctgctggcattttctgcattccaaacaaatttaagcagaaattcatgaagtttccagaatgattagttcaatgtattcatttcttaccaactggctaaactctaaggagccagaattatttctggtcctttggacatttgtatggtcttgtttcctcatagtacctgttgtcaatataactaagacagaataacatagatataatacaatgatgtgtagaaataagtagctgtaatatgcatatggctagatgaagttgacaggcccaattccatgagacacttcagataaaggtaggcctcattctcactctagtccttcctgtagtgcagcctcactgttttcttgggatatgttttcttggactgccatcattcataatcatgtgggtgagtggatggaaataccagcaaatcctttattatccatgaaagcagctctctctccaaccaatatgataaacctaaggatattgctgagagtctactacctaaactcaacttattcattgaatatgtattaaatgtatactaaatctagcattataaaccactcactgttcttgtaccgtagaaacactttcaggctttttcttattttcaagcagaaaggttgctagttttagaggtgtcaaaaatgcagcctggcccagcgtaagttctcttgtttatttatcttagatctttgggactgagaaatctaaaaaataaaaccactcagattccataggtgacagatcaaagagcccgaagcaaccagttcacgtgaacgtcagagtgacaatgagttaaaatcaa

SEQ ID NO: 308743 - DNA, 1000 bp, Homo Sapiens
agctttgaatgaagttgatttaggagattaatgtttcctccaattccccctaaagattttgtcaaactgccaaagagaagaaaaggagagaatgaggatatgtgtgtttgtggacccgggtttagaactatgggatctcctttaaggggcttatgaagggcagtatgggtggaggctggtgtgcagggatgtcattaaactgtggccaactcttttaaaatttgatgttagggctgggcgcggtggctcatgcctgtaatcccagcactttgggaggccgaggtgggcagatcacgaggtcaggagatctagaccatcctggccaacatggtgaaaccccgtctgtactaaaatacaaaaaattagctgggcgtggtggcgcacacctgtagtcccagctactcaggaggctgaggcagggaaattgcttgaacctgggaggcggaggttgcagtgagtcaagatcgcgccactgcactccagcctggtgacagagcaagactttatctcaaaaaaaaaaaaaaaaaaaaaaaaagaaccatgttagatggttctttgcctcctaattagtatactgtatttacattatgcttttcaggagcaagtggagcagcatgaatgggcctctatttacacctgctaagcacctgccagccaactgacctttatgtttagctgtgtctgattttctttcctgttaccatcaagagcatgtctgtggcattacacatcaacacagggattatgaaaacaatcaggtacagaactatattccataagtagatttgcaaaataaagtattttattcctttctcattacaatggtagagacagaaaatttcattaaagcatcataaacttcatagtacacacttaagtgtgccaaaaaagcaaacaaaacaaagaatgttaggactagcaatagcttcatagggcaattggtgtccagcccctgcttttcagatgaaaatgtaaggtcacaggttagcagaattgctta

SEQ ID NO: 308744 - DNA, 1000 bp, Homo Sapiens
gatcacctaaggtcaggcgttcaagaacagcctggccaacatggtgaaaccccgtctttattaaaaatacaaaaattagccaggcgtggtggcacacgcctttagtcccagctacttgggagactgaagctggagaatcacttgaacctggggggcagaggttgcagtgagccaagattgtgccattgcactccagccttggcgacagagcaagactccgtttcagaaaacaaaaaagaaaaagatttccatatcatttcagtgtattatggacatgacctgaagcagccatcaggggctgaatccgcgcccttttcccacaccttcctgtgttgaagtcctaaccctcagtacctctgaatatgcccggatttggagacagggtcttgacttatttttagtttttttctttcctcttctttttttgagacaggatctcactgtttcccaggctggagtgcagtggtgtgatcatggctcactgcagccttgacctcctgggctccagtgaccctccttcctcagcctcctgagtagctggaactacaggtgcacaccaccacgcctggctaatttttttttttttttttgtaaagatggggttttgtcatgttgcccaggctggcctcaaactcctgggctcaagcagtcctcctgcctcagcctcccaaagtgctgggattacaaaagtgtgaccttgtagggaccatgttgcagttttaccttttttttttttctttttttgaaattttcttctttaatagagatagggtagcactatgttgcccaggctggcctcaaactcctgggttcaagccatcttcctgcctcggcctcccaaagtgctgggattacaggtgtgaggcaccatgactggcccccctttatacttctgtaataaaaaaaaaattttgtagagacagggtctgactatgctgcccagtctagggtgcagttggagagccagggtctttgaagagagaattaagttgaaatgaat

SEQ ID NO: 308745 - DNA, 1000 bp, Homo Sapiens
cttcattgcacgtttaatgcttcatgcagtattcagagcagagataagggggggatggctcacaggtccacagggacgtcacaggcacaggcgggacacggcgacggtgccggggctgggtggggagggggaccccacgcatcgtaaccgccagcaggggaggggctgcaacgagccatgcggaccaaggacagcctccccgggacgcacgggacaggagcaacatcgggtgaactgcaatgacctcgcttgtctttcgggggaaccaggaatcccctgggaagcttctctgcactggcctcaccctttcgggcctggctggctcacgtcatcactgcgggatccaagacacatttaagggacaagtcggttgagcgggtcggggcgtgtggggccgcggctggcttgacttctgctttcccccaacatcaacttgccctgggtggactttctaagaaaggtgaggacggcctgctggagtcccgccagcccctcccaaaggaacttcgagcccggccccccctactggggtctacctgcggccgcggccctggctcccaaggcaggagccccgtgtgtcttggcgcccggcttcctctccaattaggggcaagatcaatctcatagctcagagactctcccactccgcgatccgcagcagggcccccggggaggtgggggtgcggcggggtgcagtggcgcgggcaggggtacacatttgcgggaggggccttgacttcttcggcctcaactccctgctctcagcctcatctcctggggggcagccccttttgacacacttgcccacactcagacctcaatctgggggacctgacctcacagggtcaccagccgccaggggcaacgtcctggcctggttctggggaggaccgatcctcaagcatctccaggagactggcaggggtggggtgggccccccaggagaagcccacagaggcagccggggaggcgtgtggggaggaagctggcctgtcccttc

SEQ ID NO: 308746 - DNA, 1000 bp, Homo Sapiens
gatccgccgacctcggcctcccaaagtgctgggattacaggcgtgagccaccacgcccagccatctagagggaatttatctgacatggccttgctttctggcctttcctaggggaccaggtaaacagtgccattccttcctgcttcttccttgttcgtctttgtgtctgtggagtcggcttctgaaagctttgtccctttccctgggccgccttggcaccgaggacacaccagacagtctgacaagacccatgttttttggacagggcaattcttaataaatgtgacaaccatgattttcactgtttcattccttaggcaaagaacaagcttcccacccctgcattcccattccagatgggatgtgcccctctgtcttgtatttagtgacagggactcatgcgcctcacagaattgagttacttcccacaagctccctatggctgccggtggggagcttgttgcgccaccagcccccaccccgccggcagggacgtggggcacatgatcagcactcacagtgctcgctcccgaccagcctgcagcccaagccgcgggagggctgcttcatcttttctgagcctgctctgttcactcctgctgtcccagtgccagagagacaagtcaaagggccctctggtcttctttctcttctgcttccttattattactctgggatgttgtcatcatggtgttgaaatggatgctgacccagcattccccggtgtcatcctgaagccctgcgcctcgcagcagtagagtctagtttgggaaaagtggaggaggaggaggaaatggggctcttatgtcctgcttctgtcctcgctcctccccactaagctcgagtcttcggagcttgctctttttgtttttgtttctttcttttttcttttcttttctttctttttttttttttttgagacagagtctccctctgttgcccaggctgaagagcagtggcgccatctgggctcactgcaagctccacctcctgggttcaa

SEQ ID NO: 308747 - DNA, 1000 bp, Homo Sapiens
gatcctgctggaattcatggcacacctaaaccttatgttggcctcaagagaaatactactaccagcaattgatctcagatgtttggaccatcagtaaaaattcccacttatgaaaacatttcaatgtttcctccaaatttttttttgttactagagtcagaacataacatgaggtctaaagtcctgaaaactttttatgggaaaattacagtattacaaattgagcatctgaaatccagaaatccacaatctgaaatgctcaaaactcaacacttctgaccactgatgtgatgctaaaaagaagtgctcactggcgcattgtggattttaaatttttcagatttgggatgctaaaccagtacatgtactgcaaatattccaaaataaaaaaataattagacatccaaaacactttgttttaagctttctgcataaggagcactgtatctgcatgaagtataggcacgaggctgcacaggagatctctagaacctcctcatcctgcataactgaaaccgcacacccacggaacaacgccctattcccctgatcccagctcctgcaaactactattctactctctgattcactctggaatccactgatatcaggtacatagagtagtcaaactcagaatcagagagtagaatgtctaatgagagaaagtatctgcaagacttcttcccaaatattggtctaatatccaccaaacacatatggtccatgagggccagacttccatcatcagttcatgtttgccctttccaccagtcagttctgcatttgcaaacatccacatgtatttccagaaagatccacatggtcctcacctgccctctacagggggaagggagcatcatggacccagaacagggaacgtggtcttcgtccaaagctatcagctcttgcctgtccccttcactctttgtaggtcattccttggactctgctctatctttagaggtcactggctcaagtcagtcactatgagacatctggg

SEQ ID NO: 308748 - DNA, 1000 bp, Homo Sapiens
gatctcaacctcctggggtcaagtaatccttccggttcagcctcccaagcagctgggaccacagatgcatgccaccacaccgggcctttaaaagtttttttgtagagctgggttttgctatgttgcccaggctggtcttgaactcccaggctcatgtgatcctcctaccacagccccgagtcgcctggaattacaggcacacgccactgtgactgactcccaaaagactccttatttaaggaccgctgacaatctacagaggaaaatgaataaaggacaaatactccttccatcctccattggaattcccagataccaagaaaacaaaacacagtagagagatcttgaaagaaaatgcaaagcttcgctgaaggctcccagttcagagtggttcacaagtccaacacacagacaagtaaacgaggcacattagcaatgtattcgttttgaagaaagcacttaacatgaaacttgcttatgaaatcctccatacctttgctagacctctttgatgttttcttgtttccctcggaggtaatttcaatttcgtcaggattaccaccttcatcttcaattgcctaaaaagaagggaaaagtaaagttgatccaaaaagtcagctcacacactgctttcagagagctctcaggtgacaaggaaactgtatttttaagatcaaaaagctgctgccgccctcaccacccaggacctgtggcccatccactcatctgttatctcgctctacactggagaccgactgacgccaccagttcttagctgggtggtcccaggcaggtttacttaggtgctcagtttttgcttcttcctctggaacatgcggctaataataatacagtacttaccctggaaggctgttgtgaggactctactagccatgaaaaggaagcactcaacaaacagtaggcttatctggttcatctccttcctaagcccagaagaactcaaaaagggaaaggcacactctccatttcccctgacttt

SEQ ID NO: 308749 - DNA, 1000 bp, Homo Sapiens
gatctgatgcaatccatctttctgacacacaatccaacctggccagactgtaggcagcttcttctcacgctgtttaacactgaggagcacagaagagtaacacagggagctctccactgactagaagcccctgcaccagcagatgcagtgaacgctcaggcatatgctcagggccagctcccagaccaagatcccaactgggacccagaggatgcaactcagcttcagcgtttgcagaggtaccaagaggcacttctgcaagggctaagggagggtggaaagaaagcaattaatacagggaagatttcagaagtgcttcagggagctgatgagagcccaagtcagttttatgagagactctgtgaggcataccaacttttcaccctgtttgaccctgaggccactgaaaatcagcgtatggtgaatacatcatttgtaggacaggcccatggtaacatcaaatgaaagcttcatcagttagaaggttttgcaggcgtgaacgccacccagcttatagaagtagccaccaaagtgtatgttaactatgaccaggaggaaaacaaggaagcagattgaaggcttaaaaaaaaggcagatctgttggcagcaggccttatagaaaaagagattagcaatgtgagaggacacggacgtggacgtggacatggaagaggttaagttagacaaagatttgaaagccgaccaaatttgaaagctagagagggatcaatatgagagatgcaaaaagaaaggacactaaaaggatgaatgtccagaaggcaatgaaagaaatggccaaggccgtgagacaaagaggccatcggccaagggctgcggtgccttagaggaaccagatactgacctgattgggctgacaggagctgaaggatgtgaggattaggacagaccaggctccttctcattaggcctccaggggcctgtggtcacattaaaagttggaggccaattgatgaactttattgtagatgctgaggctgaa

SEQ ID NO: 308750 - DNA, 516 bp, Homo Sapiens
agagattcacaagtggaataacatataaaacatatttctcttacatcagttatacagtcaattatcaaggaataaatgatatttaaaaggacatttaaaatcagcacacacttaactaccattctctcccgtctgtgcacacatgttttagggaaacttcaaaagaatgggagaaagaagggaccaaagtcaacaaaacacagacgtcataactctaaaaatattcaatattattgcagcaaactgctcaataagtgctccctgactgaaaaccactaataagaacagcaaaacaactgagttggcttaatcttgtttgttattatacaaaatccaatcagtcactgtttgcagaaaatatcttgtaaggttcaaagtataaaattcttcaaccaggtttcaatctgttttgaacattccatttgaaacgggaagtcagctgagtcatcatcacataatatactactgctaaaaattcaaaatgcttttccctagttacaagagtggaaatgctag

SEQ ID NO: 308751 - DNA, 485 bp, Homo Sapiens
tgcatgtgtatataacatgcaggccagacctgagtaaagtcaataaaatttagcttgcgggatcacatcaattgtttgactgtaggctctttaagcaatactaaaaatccccctgatctgatatgacatctggcgtgtccctcagaggaaacatagtagtctcccaggctgtgcttttaaaggcaattagtaggtttacaaattctatttttacattttgtattaaaagtatagtttggattttgcattccagaaattgtttgaatactgcaatgcagcagatttcattggttttaaagttttagggaagaaacaataatgttcactttcaatatgattttgaagtgtgtttcagcagaaattataaatgttcagggtactctcctaaaggtatcacagtaagcatttaaactgaatagatgctattggtacccctgtaacataatgaaaaatgggcagccaccatctgaccgcaacagagaatc

SEQ ID NO: 308752 - DNA, 528 bp, Homo Sapiens
cattgcatacataaatggaagatattaacacggctgaagattcagaatgtaagtgtaaagtaagaattcttggaaggatcgtactgccttggaacatctaggaaatagcgtggaactaaaaattctagaccatctcagcaaaatcctgaactaggattgcaggcattcagatataaaattcctctaaaaatttcatctttgttggtgtgggactggggggcatggttatttagtttggatgaaggtttaattaagagtgttagaaatggcaggtaactactaaccaagtagtaaaacatagtattcccaaaataacagggatcaaggatgatagtgagcacagaggtaagcaggccaggaaggaataaagagaagtaatatcaaattagcaaaagcgaggagaggaaaaagatgaaatgagttaacaaatagtaaacaaaatcaagtggaaacagtaaagccaaatgagcagccccacagtaaatactcatcagctaaactcacctattaaaaaacaaaggtccagaa

SEQ ID NO: 308753 - DNA, 1000 bp, Homo Sapiens
ggatcatgtttttaatttccaaggtcctgatagattctttttcacacacatctgctcttctttaggatatggcatgctcttaactctcttttgtttttttctactaactctttcttcaggaattagttcttctactcttttggtttgttccctctcttttatgctattcattttcttcagatgattggtgattgtttgttgtatactcacgtttatcaatggtatgtattgacctggattggtagctagggtccatttcctcagcccaagtgaaacatctctgtttctctggcagtgacggttttccaatatagcaagctttcttttggcagttgataaaggaagcggagagaaagatgtagaaccaatagttatctgagtcacctgttttttcattgcgaatctcgtagtgatcatatattacctagggagtgccctgcttttctggtcccaacaaccatcctgggaatactctgtatcagggtttaaaaattatttcacaaatggaaaattgtatcctgcaggcaaacaacagaaccagcaattctgagagcaggggactcgtgcagctgttccacaggtctttaattattcacccagcctgtcaccccatttccagctccttttaattccaactattgttggttttaggatttcaaagttcgtctggaaaactaactttcttccttccttcttttcttccttttaatcttttattttctctctctctcttttttttttctttttttctgttcaactacatgggttgcagattcttcagcttcggggaaatatgtcatttgctttatatattccagaaattttttacttgcttgaagatgccctcttggttttcagtaatgcaataggtttgttcttattttgatattacttatgatattttgacgggatttggaaaagaaagtgagagaaatatatatgtgtgtgtgtgtatatatatatgtgtgtgtgtgtgtgtgtgtatatatacacacacacc

SEQ ID NO: 308754 - DNA, 98 bp, Homo Sapiens
aaaaggactggagagcgcccgcgggtctcgaacaacccagacaggttgcttgtttcaattaaagaactgtcgaagtaaccgctgagctaaagccagcc

SEQ ID NO: 308755 - DNA, 88 bp, Homo Sapiens
aagagggctggagagcgcccgcgggtctcgaacaacccagagaggtggtttgatgacacgcgaagtaaccgctgagctaaagccagcc

SEQ ID NO: 308756 - DNA, 1000 bp, Homo Sapiens
ggatctgcccgccacagcctcccaaagtgctgggactataggcgtgagcagctgcacctggccataatttctaacaaatggcttgccatctatggctgaattaaagagagtccataacatatatgaaataaaggccccgggaacagactttggagacatttttgggttttaacagacatttcagtcttatattcatattccaggcagatacacagttaagtagtttgagggccaaattacaaagcatggcactaatttcatcagtttgagaatggataattgtttttgctccaaaggcccaaattcatctgaacacattaactcaatacttttacactgcaatggccttgtggttctagggtacttgtcaacagggagtgtagaggagaactaagctggaagatctagcaacccttttaatcaacaaggaagaaaatgctgtgacaacttctatgcatggagtaacttgtgaaagggagtgaacaggggtctgatgtcctacaagtgaaaggagggtcattctgaatagaaggagtgagctgacaggcctggtaaggtggctccacctcaacaaaagcccccagggcaaatgtttttctgggattacagttagtacttggacctgtgaggactgcaagttcattttcttttctaggaagcgattatgactgaataccataccttcaccaagtctttcggccaaccagttcctaagacactacggctgccatatcccagtgtgttgcctccatattcagcaaccttcctactgtttgtgttaggccccgcatatatcaccaacttcaaaacagaaaatatactgttagactgtaaaagaaaaacaaaaacaacatctacaaataaaaaggctgcaaaaacatttgtttaaaatacaattataaccaggcattggtgtcattatagtataactaatatttcccgatttttttaggtataactgatactagtttggatgcaatcagtcattggtatttacagg

SEQ ID NO: 308757 - DNA, 1000 bp, Homo Sapiens
gtcatctctcctctcccgaaggatcctagcgctgtttccgagggctgcagggactgtgagcccaggaccggccagcagagcgggtgcgactcagcgagcccaccccggccggtcgccgctccggggtcccgacctccagcgcggcgaccgtgcccttcctcccactcccgcctcgcccccggggcccctcctcactcaggcgcggcgcggagctgctcgcgggaactggggtccctgggcgcgttccaccgcgcaccaacgcgacccaagcgctccaaacccgactgcttctcgccgacagcactgcgagcctccgaccagccgctgtccccctggctgcgggccgagcagctctggcaggcggcgggcgggtgggctgcgcgcgggctgtgtcctgggtccgcctagcgcggccttgtggccccgaccctctcctcccctggtgatgctggaggaggtaccggggaggagcgtgtgtggccccggcctctcactagcagcggcggctcccgacgctagcctgctcgagcgcacccagcaccctccccaagaccatggcccgcacctggacccgcggttaacttagcccgccgcggagagagccaggcaatgcctggtggtgtcgtgctcaccagctcctttccgcagacctgatgccgatcagatttactccctgctgaattcaccccccagtcaggccggttttccttgtttcaccgtgttctctgaatacactgaattactccgagcatctatagttggcaatgccctgcgcattttccgcactccgatacactttacactgaacaccaattcggaagttgtgtggaccgtgctccagattggaaggcctgccactgtgctggtgtcatttctccctggaaatgacaatgaaggacaatcaggaatagcacttaggtctgaggagaaatggagctagaaggagccgtttcatagctcagtgtaacacagagttatttggggtttaactgaaacgcct

SEQ ID NO: 308758 - DNA, 1000 bp, Homo Sapiens
ctgaggaatcatctcgtgttacgtattattttagggttggtgaagtacaggcttcagatgctcttaaaatgttcataagaaccagatttccacttcactgtggatttccttggtgtggggtttgcctattccatctttagcaccccagttcttattctatgtctctgtcattcatggacagtctcaagaaaggggcacaaaaaattttgttgaaaggaagctaaatacccaggttgtactccatcaataaaatcatttctctgaaaaagagtccaattctgatttgctgtcacgggatgttttcctaaaaatatcatctgtaacaacagctggcaagtagttactcttttttcagaggcttgggtttctaagagtcaaagcaaatgcactcaaacgtgttgtcacttctccttccccactgacagcgacattagcaggcagccagtggtgcagacaacatgcctttttgccatccagcttaccaaggggatgggcaggtccctgcatatgcccctccttacagagagggctccccatggtcttagcaggaggtgggaatggcctggagaacagccccctgggtagaatgcctgaggaccagcatctttctttggtcataatgtaaacttttagaagacctgacatgtcttcctcaggagaggtattggaaagtccttaagaataacttttttaaaaaggtaactccaattggataatttaaaaatgagacggttgaggtttttggactctacaggaaaaaaaaagggatggagaataggatgttgagtctaagaagtttgtttataacactggagtaacttcctgcttccatgcaggtagctctcagtcactgctgagtaatttaagatggaaaactcagtgagtttactcaagagaaaacatctccatgttagatcaggttgcacaaaaaaaagctttattgactcactggactctaaactccatgttcattgttttgatgaacaggaccacaccccga

SEQ ID NO: 308759 - DNA, 1000 bp, Homo Sapiens
gaattctggagtctttcagtcctaagtcacagaccccagcattgattatggagtctacagcagcacagaattccagagtcacagaaatcaaagctccaggacagtcctggaaagaaacaggagagcgtggccacccatctgcccagccaccaaggcctaacccaccagcggggctatattggcttcttcttggggacgcccagtacagcaggccccctggtcctccctccccaggcctgtgtctcacgtccccacagtgggattgcaagcaagctgtccccatgcagcagataaataaataaataaataaagagcatgactttgtgtttgaaggacgaatgccaagtttcctctctggggccctctcgcaaacctccatatatcaccttcacatgaccaggctggcaggcctgccacccccagctctgcttggctgtgataaacatagaagacaatgcattgcctacaccctcaggccctgaaatgagggaaggggtggaaaaatccatcgaagccattctagatttatgtttgaaacattccagatttatgttttcctttgtcaggggagaaaacaagcagatattcctaaaggtgtaccttataagccagcgcacgtgtgaaggggcatcgtgctgtttttggcaaccacgctgagttcagtttttgcaccaggacctggacgtgcacactgacaggccctcatcccatcacctttggcttcgctgcatccttccttgctttgaatcacttcctcgactccttctccaggaatacttcccagattagactcatctatttcccagcccttcacctcaagctctgggactcttctcagcccccaatgagtataggtcattccataattgtttgtttcttttcattccatgagttcctagagaatgttggctgcctttcccgccctcagaccaggaactcccccagggaagggacatgcctcccatcaatccaggtactcctacggacagaatgactgccc

SEQ ID NO: 308760 - DNA, 1000 bp, Homo Sapiens
ggatcatttcagtagatatagaaaaggcatcctataaaattcaacaccctttcatgttaaaaatcctcgacaaactaggcactgaaggaacatatttcaaagtaattagaaccatctttaaaaagtccacagccaacattatactgaatgtgcaaaagccagaagcattgtgcttgaaaactggcataagacaagggggccctctcttacaaatctcattgaacatagtactagaaatcctagccaaagcaatcaggaaagagaaataaaggcaatccaaataggaagagaggaagtcaaattatccctgtttgcagacgatgaggttctatactttggcaatagtctctgcccaaaagctcattgatctgatacacaacctcagcaaagtttcagcatccaaaatcaatgtataaatatcactagtgttcctacacaccaacaacatttaagctaaggccaaatgaagaacacagtcccattcataattgtcaaaaagaaataagatacctaggaatacagctaagcaaggaggtgaaacactgctaaactgagaattacaaaatattgctcaagtaactcagagataacacacaaaaaatggaaaaatattctatgctcatggaagaatcaatattgacagaatggccataatgcctaaagcactttttaattcaatgctattcccaaaaaactaccaataacattcttcactgaataagaaaaagactatttaaaaattcagttggagccactaaaagagccagaatagccaaggtaatcctaagcaaaaagaaaaaagctggaaccatcccattgcctgactgcaaactatactacaaggatatagtaaccaaaacagcatggtacaaaaaacagacacataaaccaatggaaaagaatagagagtcgagaaataaggctgcacacctacaaccatctgttcttcaatgaaatcaacaaaaacaagcaatgggaaaaggactgcctattcattgga

SEQ ID NO: 308761 - DNA, 1000 bp, Homo Sapiens
ggatcctcctgcctcagcctcccaaagtgttgggattacaggcatgagccaccacactcagactttgttgacttcttaataagaaaaatacttgttaagagtttcttcagatcactttcctttatcaacaagtaaaacatgactgaggaagttgtggtcccctttgcttccctgcccaggcccgtttccctccctctttccccagaggaaaccaccaagaggttggcatatattcttcctgaacgtgtttttatagttgtactgcacttgtactgtgtatgaacaatataaagttggtttgtgtgtttaaaaaattcacatacatggatttataatgtatgtatcattttgcaacttaaaaatttttttttgagctccatgctgattgataacgatctattttttttttttgagatggagtttcagtcttattgcccaggctgaagtgcaatggcgtgatctcagctcactgcaacctcagcctcctgggttcaagctattctcctgtctcagcctccggagtggctgggattacaggtgcatgccaccatgcccagctaatttttgtatttttagtagagatggggtttcaccatgtcgaccaggctggtctcaaactcctgacctcaggtgatctgcctgccttggcctcccaaagtgctggaattacaggcatgagctaccatgcctggcctttttttttttttttttttgagacaaagtcttgctctttttcccaggctggagtgcagtggccacaatcttggctcactgcaacctctgcctcctgagttcaagcagttctcctgcctcagcctcctgagtagctgggattacagacatgtaccaccatgccaagttaatttttgtattttttgtagagactaggttttaccatgttggccaggctggtcctgaactcctgacttaaagtgatccatctgccttggcttcccaaagtgctggggttacaggcatgagctatcgcgcctggcctgag

SEQ ID NO: 308762 - DNA, 1000 bp, Homo Sapiens
catctctactaaaaatacaaaaattagccaggcatgttggtgggcacctgtaatccccagctacttggtaggctgagtcaggagaatcgcttgaacctgggaggcagaggttgaagtgagccgagattacgccactgcaccctagcctgggtgacagcatgagactcagtctcaaaaaaaaaaaaaaagaaagaaagaaagtcaaatatacagagatagagaataaaacagtggttaccagggcagagggggtgagggggaaagggagcagggagatggaggtcagaggatagcaagtagcagatatggagaatgagcaagtctagagccctaaggtacaacatcaggactccagggactctaattgtactgtatttggggctaggcgcagtggctcatgcctgtaatcacaacacttcgggaggccaagatgggtggatcacctgagtgaggtcaggcgtttgagaccagcctgaccaacatggtgaaaccctgtctctactaaaaatacaaaaaattagctgggtgtggtggcgcacacctgtagtcccagctactcgggaggctgaggcaggaggattgcttgaacctgggaggtgaaggttgtagtgagccaagatcgtgccattgcactccagcctgggggacagagccagactccgtctcaaaaaaaaaaaaaaaaattgtactgtatttgggattcctgctaatgtgcagattttagaggttcttgtcacaaaaacaaaaatgggtaactatgtgagataacagatatgttaacttgcttcactattgtaaccactttaatatctacatgtatcaaataatatattatataccttaaatatacacagtagaatttattttttatttttatgaaacagggtctcgctctgtcaaccaggctggaataaaatggtgcaatcacaggctcaagtgatcctcccacctcagcctaccgagcagctaggactacaggtgcaggccacaacactcagct

SEQ ID NO: 308763 - DNA, 1000 bp, Homo Sapiens
gatctgaaattgtggcaataatcaattgcttaccaaacaaaaagagtccaggaccagatggattcacagccgaattttaccacacgtacaagcaggaactggtaccattctttctgaaactattccaatcaatagaaaaagagggaatcctccctaactcatttcatgaggccagcatcatcctgataccaaagccaggcagagacacaaccaaaaaagagaatttcagaccaatatccttgatcaactttggtgcaaaaatcctcaataaaatactggcaaaccaaatccagcagcacatcaaaaagcttatccaccatgatcaagtgggcttcatccctgggatgcaaggctggttcaatacacgcaaatcaataaatgcaatccagcatataaacagaaccaaagacaagaaccacatgattatctcaatagatgcagaaaaggcctttgacaaaattcaacaatgcttcatgctaaaaactctccataaattaggtattgatgggacatatctcaaaataataagagctatctatgacaaacccacagccaatatcatactgaatgggcaaaaactggaagcattccctttgaaaactggcacaagacagggatgccctctctcaccactcctattcaacatagtgttggaagttctggccagggcaattaggcaggagaaggaaataaagggtatccaattaggaaaagaggaagtcaaattgtccctgtttgcagacgatgggattgtatatctagaaaaccccattgtctcagcccaaaatctccttaagctgataagcaacttcagcagtctcaggatacaaaatcaatctacaaaaaccacaagcattcttatacaccaacaacagacaaacagagagccaaatcatcagtgaactcccattcacaattgcttcaaacagaataaaatacctaggaatccatcttacaagggatgtgaaggacctcttcaaggagaactgcaaaccactgc

SEQ ID NO: 308764 - DNA, 1000 bp, Homo Sapiens
caattcttttatttttgtttaaattttcacttcaattttaattcttgaagaacagcctcgacaacatatatcgcactcattataagaagcaaagggttatatcaaaaattattagtatagaatcacaggaaatctggtttggaaccagaaaaaaatacaaaacagatatagatacatagacacaggacaattttttataattatttggaaaatgttattttcccctaattcttgtttcctttttctttatgcgcatacgatgtttaaattttacaaaaaatgaaaataaagactagtattttacaaaatgaataacaatgttcagtgtgtgtgtgtttctacataggcttcagtccacttccatatgtgttgttcctgtacagaatatatccacatccgtccacaataaatcctggaaggtccattagtttccttctgttttattaaaattctcatggtcctctcttccaatttgtttttctttttttcaccagacagacacaaggttcttttttttgtttgttttgtttttcctcgccaacgtgctcacagatctgatcctaaaagagtctctttttcccatgctttgtagctcggattgtatttctgctgggtgggctgctcctgtctcggccctcctccctcccacccagcctgcctggcccgctgcacttcccggtgtccccgcggctttggagtccttggcccaggtgggtcctctgagtctctagggggacggggcaggtgggaagcgcccaaggtctaggagcactggatggacatgtaaggccagttgaagctgctcccagacagtaacatatcgcggatgagagtttcgatgggggttttacctaccaaacggacgaagaagagctgctcgatgacggaggaggacacggtgcgcagcgagggcagtcgcagcagcagtttgccaaaacggctgggctggttggggtactggctcctcacgtactcctccagtgcgcactgcgacttctcc

SEQ ID NO: 308765 - DNA, 1000 bp, Homo Sapiens
gatcacgaggtcaggagttcaagaccagcctggccgagatggtgaaaccccatctctactaaaaatacaaaattagctggacatggtagcaggcgcctgcaatcccagctgcctggggaggctgaggcaggagaatggcgtgaacctgggaggcggagggtgcagtgagccgggattgcatcactgcactccagcctgggagacaggctggagtctaaaagaaaaaaatctgatagccagaattgtagggcaatacatttgtgttgtttgaagtcactaagtttgtggtaattagctacagcaacaataggaaactgatacatccgttaagctaaaggccagtcttagcattatagaacaaaacagactatgggtaaataccaattatcctaaagaacaaagtacaggttatttaggaaacttaggtttacttggagacttaggtttacttgttgcatatcagttgaattccagtgatcattcaaaactatgggtggaactaacccaacgtaattaaacaaaacaaccatgtaataacaagatagctgagggtgaggccctcatataagtttagtagaataggaactatatattatatgagtatatatgtaagaatagcacgaatccatgacatatttttggacacctttattgagatataattcacattccataccattcaccaatttaaagtaagtaattcaatggttttgagtacattcacagagttgtgcaaccattaccacagccaatttgatttcattttattattatcttttttctaaagttaggatcttgctctgtcacccaggctggagtgtagtggctcagtcacagctcatggcagccccaaactcctgggctcaagcaatcctcccacctcagcctcctgagtagctgagactacaggcacgtgatgccatgcctggctaattcttcaaaattttttgtagacatagggtctgactatgttgcccaggctggtcttgaactcctgggg

SEQ ID NO: 308766 - DNA, 1000 bp, Homo Sapiens
gtaagagtctccaagaagggaagcccttatgcagtaattctgtaactatattaaatttggtaatctaacattaaactttttcgtgagcagtgaatatacacatggtcatatgaaaactgccctggagaccgggttaattattaaataaactaaaaggggagaaatgctgatagataaaattatgtcaattccagggtgttcaatggaataaagaaacagcagcagctgcttcaaaagtagactatgatcagaaacctcagatggtaacctttaaaaattgtggaatccagagtctcaacctaaacctacataggagctacagccagggagttctttctaagttcctcaagtgattctgatgattggccaagctggaaacttctgaactgggggagaaagccaacctaggtaaatgtagagacttttagaattcaacatttgattatcatttactccacattttcccccagctgtctcaccttctctatttttctaacagtgaacaataaaagggcttggcaagtgaaggaaaaagtcagtagagtacctaaaatggatttgactatattcaagccactttcatatattaactagataaaaggataccatactgctatttgaaattcaatcacaaagcaaaaatgtcataattttaatgtattttaagggaagacggggttcttaacatgaatatgtaatacaaaaacaattctaaataataatatttaatagaagaaaaaatctgtataattatttagaagtaactctgtttttaaaatttcaatgttaggaagaaaatcccttaaatttgaaatagcggaatattctctcatatgaaaaaactgtgtcccagtgttattcttcaacttagaaattaggcaaagtattttagtactatttctgcttacatattgttttgtatgaatgttttaagtatgaataatattttggtttttagtgtgcatgctaatataaaaatatggatttttttctcctacac

SEQ ID NO: 308767 - DNA, 1000 bp, Homo Sapiens
catggccatggctgcaggacaggaggtgtgagtgagtgtagacagttgatctcttaaggaaccagaaatcccttgccctttaagattcttccccactccaagaaggcaggtgctggagctaaaaataccctacaaaaaggtcacagaccaaagaggcaggcgcagccccctcccccactcagaacagctcttattccaccctcccatcctaagaatccaggggcctcttatctatagctcctgggatgccaccgctcaccaagcccccaccttccccaagccttccacttaggccttctccttccacccctctggtcaagcagtctgttctccatggctggtggccttcaaatcctttctggttctcattttcctgctccgaaatctccttgggcccccaattccctatcaggttccagctctagctgcccttttctatccatccctgctgccctcctcacagcctcctttccctagatcttcgtgtcccagagggtgtcccatctgcttgctccagccgccccttcccccagctttttcaagcatctcctagtcccaggaggaaaaaaagcagaaatgtcccccacttcctccaagccaataccatgctcaccctttactacctccacccccagggctggaagattcacccgaccttgggatgtcttcgctggaggtttggatggagctccgagtctaggtggcagctgggacagtgtcagctcaccccctctcaggtgcgcatttatccctgagccactcggtccccagccagccccgcctctctttctctccatcctccccccttcacactgggctggcagccaagtgcccactacagcctgaagcagaacctctggccctgcacctgcccccttaccaaaggtcaactactatcccccacttactgtctcccaataacagtccctgttctaattccaccctttgggaggagcaagggaggggctacagatgaggggtctccccccaccccaggatt

SEQ ID NO: 308768 - DNA, 1000 bp, Homo Sapiens
ttttttttcccagagacaagatttcactctgttacccaggctggagtgcagtggtgtaatcatagctcaatgcagccttgaaatcctgggcttaagctatcctcccacctcagcttccctaataactgggactacaagtatgtggcaacatgcctagctaagttttttttatttttattttttatttttgtagagatgaggtctaactatgtttccaggctggacttaaactctggacctcaagcgatcttcctgcctcagcctcccaaatgttcagattacaagcatgagccatcatgcccaggctttttttttttttaaatttcttaacattgtcagttagcaacctctaaatgtacagggcatgattacctaaataacacgtatcagaaaataagcataaaattatttaatcataaaaacatttgtatgtatctaaatatttctcttatgtttctaaaaaaaattgagtttaaaaaagaacttttaaacagtatctaatgtgggaactgtacaaaaaataagttattgatgaactcctataaccaaactcttagctaggaacatagcaaaataaacagctaagcaactttgagactgctacttaaaaattttaaaacatggaacaaagcattttttgagtccagacgttttaaaaaaagtagtgtttgcttatataatttagccctttaactggataaatataccgaaatttcaaaatttctaggcatatgtatctttaattgattgcaaattagttgacattcaaaagttcaacttaatagcattaagtgtagtcatctaactccatggagcttaaccattttgaagaatataatattcttggatcatcaagtccataaatacctacatcaagtatatgttagtaccaagctaatgggagttcataatttatagtctgggacttgataagccaggatttggggtggcatgattcacatgagtgtcttgagacatatccaagcccagggcaataaac

SEQ ID NO: 308769 - DNA, 1000 bp, Homo Sapiens
  misc_feature (17)..(17): n is a, c, g, or t
  misc_feature (50)..(50): n is a, c, g, or t
  misc_feature (113)..(113): n is a, c, g, or t
  misc_feature (122)..(122): n is a, c, g, or t
  misc_feature (139)..(139): n is a, c, g, or t
tttattaagaagtaaangtgctcagtattacacattaataacattcttgnttgtcagtgaaaaacttgcgtatgtaaatgtctttttaataataccagtacacatgggaaagntaatagggntgagatgatgggggggngttctccatgactaaagaagaaaaattatatgtaatttatgggtagaaaggaggaattctgcaaaattttgcaagtgaaatgaaaaacagtacaataaaaagtatcataaagagactttctagtgaccataattgatatatggcacatggtcgatacacatggataccacataatagctgcacttcaaattgaagtttgtttacatgtaacaacatggtacatatacataaatatgtacagtcaatatccctggaatgcaaactttagtatgtagtaataaagaactttgtgtagcatattcaagagaaagtaaagatagagatgaagccatgaggaaaaacttacagaaacccagtatgtttcactttcaacctggaaaggtctatttgctcatgttctcattggagattggactgacattctaccagttaaatgaacaacttgtgaaattaaaatatagcattaaacgacaggattctcttggttctccaagtgagggttattcaacagcactgcatgctcttttgcttattagcgctcaaaatgtcaccttactcaacatttctgtaaaagaagattttttttttttgagaaatagatttctccccataaatttgggtgagaccctctcgtaaagaaaacagtgttgctaactcaaattttggctgatactgtctaatgtatgaacttttaataccaaaacctcttttttattagactgagctccatttgcattacaaattctagttttgaaacacaggatcaagaatacttgagtactatattttttatttttgcattttttgtagagatggagtttcgccacattgcccatgttggtcttgaactcctgggctcaa

SEQ ID NO: 308770 - DNA, 1000 bp, Homo Sapiens
gatcaaggttcatggcctggttttggaagcctacatcatgtttcaatcatggcataggatagaaggaagagtcaataagataaaagctacctggccgtctttgcccaaagctgcctggtgaagataagtcaaggtaaaataatcacattaaaatgttctgtaaaatgcacagcctccttgtgagcctggaagatatcctgctatgctagaacagataacccacaggccaagtccagctgagaaacatcctagagataacagactgaaacccaatcttcccacttgtttggcacattcttcttcccctttccccagaactttgcccaaaattctagtccaaaaagatgaggaacaatgctacttaaaaagggtggagccagccgggggccttataatgatgctgaaatgaaaaaagaagaacagaacatgatttatgaagatgagaaacggaaagattatataccacaacgcagccaaaaaccatgaacaaggttatttctaaggaatcaattaaagacaatattgtttctctgaaatgagaatttaaagaagcaatataaggctttaaggaagaactgataatacattaggttatatgggaatgaaaagtgagtggataaagcctcagaaataaattagtaataaatgagaatgaaaaaggagtatacagagtcttagaaacaattagaaacaaatgagaataaaaacggaataggcagagcctcagaatctcagagagagagagacacacaaaaagagaccaaaatcaaaggtcatgatagaagcagcaaaagggagatgagacaccactgaaggaattcgaaggatggttttgagaagaaaaaatgagcatgtgagatggaaaagaacgaaaagtaaaagatggaagacagagatagagaaaaagagggggatgggagggagtggtagggaagagatcaaatatcattaacactaaatgccttgcatgggttaaaaaatgaatggaacatgaaaacaa

SEQ ID NO: 308771 - DNA, 1000 bp, Homo Sapiens
gatcacaaggtcaggagatcgagaccatcctggctaacacggtaaaaccccgtctctactaaaaatacaaaaaattagctgggcatggtggtgggcacctgtagtcccagctactcgggaggctgaggcaggagaatggcataaacccgggaggaggagcttgcagtgagccgagatcgcaccactgcactccagcctgggagacagcaagactccgtctccaaaaaaaaaaagaaaattgtgccgaggtgcaactgccttgagccccactgtggcgaggagcaagcctgagctgggaggagataaaccaagagaccaagaaatagtcaacagacccgttcacagtgccatcgtttttatttttttattttttgagacggagtctcgctctgtcgcccgggctggagttcagtggcgagatctcggctcactgcaacctctgcctcctgggttcaagcgattctcatgcctcagccccctgggtagctgagattataggcatgcgccaccacactcagctaatttttgtatttttagtggaaacagggttttgccatggtgcccaggctggtcttgaactcctgacctcaagtgctctacccactttggcctcccaaagtgttgggattacaggcgtgagccaccgcacttggtcttttttttttttttttttttggtgacagagtctcgctctgtcaccaggctggagttcagtagtgcaatcttggcgcactgcaacctccgcctcccaggttcaagcgattctcctgcctcagcctcccaagtagctgggattacaggtgcccgccaccatgcctggctaatttttgtatttttaatagagacaggatttcaccatggtggccaggctgatctcaaactcctgacctcaggttatccacccgcctcagcctcccaaagttctgggattgcaggtgtgagccaccatgcccggatggataataataataacaattttatttaggctggatgcaatggc

SEQ ID NO: 308772 - DNA, 1000 bp, Homo Sapiens
caaggtgctgggattacaggcatgagccactgcacctggctgtgatttttgtttttaattctgtttatgtagtgcatcacatgtattgacttgcagatgttagaccatccctgcatccctggtatgaaacccacttgatcatggtggattatctttttgatatgctgttggattcggttagctagtattttattaaggattttagcatctatgttcatgagggatattggtgtgtagttttcttttttggttatgtcctttcctggcttcggtattagggtgatgctggcttcgtagaatgaattagggagggttccttctttctctatcttgtggaatagtgtcaaaaggattggtaccaattctttgactgtctggtaaaattatcctgtgaatccgtctgatcctggacctttttttgttggtagatttttttattaccatttcaatcttgctgcttgttattggtctgttcagggtatctaattcttcctgattgaagcttggagggttgtgtttttccaggaatttatccatctcttctaggttttctagtttatgtgcataaaggtgttcatagtagccttgaatgatcttttgtatttccatggtgtcagttgtaatatctcctgtttcatttcttaatgaagttatttggattttttctctttccttggttaatcttgctaatggtcatcaattttatttaccttttcaaggaacgagctttttgtttcatttatcttttgtatgtgtttgtttgtttgtttgtttcaatttcatttaaagttctgctctgatcttggttatttcctttcttttgctaggtttgagtttggttgttcttatctctctagtccttgaggcgtgaccttggattgtccagtttgagctctttcagtctttttgatgtaggtgtttagggctatgaactttcctcttagcactgcctttgctgtatcccagaggttttgataggttgtgtcattattgttgtttg

SEQ ID NO: 308773 - DNA, 1000 bp, Homo Sapiens
tgaatgttttccttgtatttttgtacaaccaatctttcccagtcctggtatgctccacaagtagtattaacatcattagcaattgtaacacacaaggcaatttctgatgtccacaaatgggcaaaaagacaacccaaattccaacaggtttttgaatgttagaaaaatattacatcaattttaaacaataaatgttagggtaatattacatgagtttttctcattaggagtgtattatatacaaacctttatttgataatgtatattctgggtgactataataaaatgtgataaaaataaaatgacttataaatcatatatatgatatcttcagttataactattatatgcacattaatattgtacgtgtgtgtgtgtgtgtgtgtgtgtgtgtcactagggtaaaaggccggggggtatcaatcctaacccactcacctgataccaaccagctccaagttttaagacgatatatacatgactccttcctacatgaaatattattaccaagtatcactatatggcaagattttcaaatccagggcaatcgctcacttagaatcgtgcgactgatcctatatcacccacctaaaccccttagcatgcaaatgaaggcattgtgacccaaagaaggagtgatttacttgagacacatagtgttgcaattgcaagaccccaaccccctgaccctacaacaaagctccttccacatgaactgttctgcccttgtgtttgaaaaaacaataaatccaaatacaggggttctcatttatctcttgttagatgtcttcttttagatttgagtttcctgactattcagatttttaaaaaaatattaaatgtgtcatctaactaactggccatttatcaaattttgtgctacttacaaatctgatagtgtcttctatgtcctcttctgtgactttaataaaaatgtcgaatggtcaactttgaggacagagcttattgatcatttaccaatttcatttaggatcctact

SEQ ID NO: 308774 - DNA, 1000 bp, Homo Sapiens
ggctcttcatgtacaaaatggcacatcacaagtgataccatatccctcggagaatttcagagattaatagacatgaaagatccagaggtgatgattgctatcacattcccttttaactctctagtttgactagtgaagaaaaccagatggggcttggggaatgacagtgcattatcataaacttaatcagttacatgtgctgttccaggtggcttcatttgaccaaaacagatatacagagactctggcacttggtatgcatccgtggatttgccaaatatttctctattatgacacacactagaagcagaagcaggttagttgttcattcatttgttcgttcatttgtttgttgtacctggcaaggacaatagtacatcttttccttacttacctcagtattgttacctctctggtgctgggcttaagtttggtctgtgggaacctgaaccatctcaagggacatcaagttgatagaatctagggagctgaagtagcagacaccaaggatgcctgggtaaaaaaattcacaacaatgggtagaagagaaatctcccaaagctacagaagatttgggacagtggatttggagcagaggtgggggaaggtgttcaatgatctgggggactagggctctttctccaaaatgaaaagcaagttgctgtgcctggtatgccctatcactaggactcaggtgcaatgtttgtgggcctacacaggattttagacttgtgcaatacatttgagtatgccatctgactcagtgggtgactcaattgactcttagctttgacaatgagaagttccagagccggtccaggctgcactgcgagcaacttggcacttgtgacccagctgattcaatgaggtctgaagggtctctggccaactcggatccaataaggagtctgtggcaggctctgacgggagaaacaaagtcagcaaccctgggattctaggggaagtcaagacctctcagccaataacaaaccttttgaga

SEQ ID NO: 308775 - DNA, 1000 bp, Homo Sapiens
tgtgttcaaagcattaaactatgcttggtttaatgctctgctattatcatcctggaattcttaataatccttgaacgaggggccccacattttcgttttgcactgggcaagtaaatgacgtagttagcctagttagtacctatctcaaagggttgttgtgagtattaatattttggaaacactttattatttggcacaccagtcatcattcactttaattccagctcccataactgtgttgaaataccaagtggctatgactgtttttattattcaaattccatcatagtagaaagcatttaaggaaaactgcctcggtggaaaagattatttctctccagaccccagattgattttacactgttcatccctctttgaaacatatattccttttcccacttttccgtcctatgagttgttatagtgcctcagagttaaggtatttgacctacaaagctcttagaaaagtgtggggtccagagagaaagataactgagcaattcagttttctcgcaagattccaaaattcttaaagagatcagattaggaccaaaatcttctgatttaacagtgaggggctaagggacaaaacagagggaagccagggagacgtccttcagaccctctcatagcccacgactgcccggtcgcattgtgctgtccatctgccttctaaacatccttccattgtggccgcttctcctcttctttctgggtgtacagcgagcacatcagcccaagcacagccataaacccctgactgcactctctccctcaccacggccatctccccagacccacttttcttttttgagacggagtctcgctctgtcttgcccaggctggagtgcagtggtgcaaccttggctcactgcagcctctgcctcccgggttcaagcaatactcctgcctcagcctcccgagtaggtgggactacaagcgtgtgccgccatacctggctaatattgtatttttagtagagatggggtttcaccgtgtg

SEQ ID NO: 308776 - DNA, 1000 bp, Homo Sapiens
aagtctaggaagcatggcaccgacatctgcttagcttctggtgagggcctcattttgtaaaaagatctaattcagtctagagaaaaaaaaaactcattacctcttaaaggtcccagctcccagtgttgccacactggggaccaggtctccacgagttttggtggggacaaaccataccacagcccaacattaccttgaaggggcctctgattctcctccccgcccctgcctgccctgcccgtggtgtctcacccaccagggctacactcgccaggccatttccgctcacctttggtcacatatggaaggtagctttagagcaatgaagaaattcatttttttttttttgtttttgagacaagaatctcgctgtgtcacccaggctggagtgcagtggcgtgatctcggctcactgcaacctccacctcccaagttcaagctattctcttgcctcagcctcccgagtagctgggattacaggcacccgccacgacgcacagctaatttttgtatttttagtagagacagggttttgccaagttggccaggccagtctcaaactccagacctgtaatcctagcactttgagaggccgaggtgggtggatcacctggggtcaggagttcgagactggcctggccagcttggcgaaaccctgtctctattaaaaatacaaaaattagctgggcatcgtggccggtgcctgtaatcccagctactcgggaggctgaggcaagagaatcgcttgaacctgggaggcagaggttgcagttagccgagatggcatcactgaggtcaggagccactgtgcacagcctgaaatctgttcttttctttcagtttttagaactcacattcaatttaagcacatttttatacccaagacacatctgagggataaacgagtgatgtcacctttctttactactcttctgagatgacctgcagccgccctatgccagggaaggtgcaaagatccctggtctggtccggcaagccc

SEQ ID NO: 308777 - DNA, 1000 bp, Homo Sapiens
tacttacttttaatggaatcccccagataataataaattctgaaaaaaaaaaatcagaatcatggcatgttaaaactggatacattcctagaaatagatggaaactgctcttgcaaaaagcttagcacatgttaaagcattttagaaacaatttgccaaagtttatttagtctagtgatttcgacaggttaaatggaccctttgagatcttttttcctcaagtacaaaggctcacttgcttaatgaacacagtcccagaaaagcagggggctgaaccttggctctaccatcttacctaagattctagagttagcaaagggtttccacaagcccaaattattatgtttaatcttttcaattatctgtgaagcattaggttggtgcaaaagtaactgcaggttttgacattaaaactggcaaaaactgcaataacttttgcaccaacataagaacactatccccattgttcaggtaaagaaattgatatggttttgctgtgttcccacccaaatctcaccttgaattgtagtccccataatcctcatgtgtgatgggaggggcccactgggaggtaattgaatcatgggggcggttaccctagtgctgctgttctcatcatagtgagtgagttctcatgagatccgatggttttttaaggggctttccccacttttgctcattcttctacttcctgccactacatgcagaaggacgtgtctgcttccccttccaccatgatggtaagtttcctgaggcctccgcaaccctgtggaactgtgagtcaattaaacctctttcctttacaaattacctagtcttgggtatgtctttatagcagcaggagaatggactaatacagaaatcaaaactcagagaagttgtataacatgctcaaggccaagaatgcagcaggatgaacagagttgttggactctgaatcaagtgctcctttcactaccagtgacagtgatgctttccccaaatagcttctctgcaaagt

SEQ ID NO: 308778 - DNA, 1000 bp, Homo Sapiens; identical to SEQ ID NO: 119992

SEQ ID NO: 308779 - DNA, 1000 bp, Homo Sapiens
gatcagattatcaaataattttttagcttgggaagtgatgaggagggagcttcaagtggggaggggtctctatttgcatctatcaggctacactaatgtgaaaagtctgatgacagacctgcagccctttcacttggtacagtgttcaggtgctcacacaagccagtccagactttggaaagctgatggttcatgaaagaaagtggggtttgcgatggaggaaggtgttctgtgtgttacgttgagcagggtggtactatttttccaggcttcagtggagaacctaagtgttatctcagaggggtggagggtggcgtgtggcctgtggccatgcctggcatggctttccaggatggtgaggaatattttaatctcttttgcccataaggcaggggttttcaggaccctaaaacaaacttcaaagagctctaaggacttctcaaagtcctttttggatagtaatgcaatgtctgtgacgtccaaaggaagaaaattcgtcagcggagatttgaactaaaattacttgtgctcatcagcagtttttgaagatgcagagcgctcggttatgaaaatagaacaaaaatgcacatctagtttgtccttagcacttctggttcatcatactttgaaaaagcctggcctgttgcccaagtcttttgaggcaaccctgggttgttgcccaagtcctttgagggtaagcaacagcaatgtctcagaaaacattaactcaacagcccacccgctccaattcattaagccctcatcttttttatctgaccaatagatgcccccagttaagatctaaatgactcttccaatgcagggttgttaaaggaagggagatagacattctgaaaagcagagatctgtttgattttcgggttattatagaacatggatggagctggaggccatcatccttagcaaactaacacgggaacagaaaaccaaataccgcatgttctcacttagaagtgggagctaagtaatgagaactcat

SEQ ID NO: 308780 - DNA, 1000 bp, Homo Sapiens; identical to SEQ ID NO: 119993

SEQ ID NO: 308781 - DNA, 1000 bp, Homo Sapiens; identical to SEQ ID NO: 119994

SEQ ID NO: 308782 - DNA, 1000 bp, Homo Sapiens; identical to SEQ ID NO: 119995

SEQ ID NO: 308783 - DNA, 1000 bp, Homo Sapiens
ctggcccatttatcccttttcaatatgctgaagtaccttaaagtaagtccccaaaatcatgtcattaaatctctacacatttcagtacatattaatagctctaaaaatggttactattttcttatgtaaccataatacagttattatgcctctcaaagtgcacactatttctttggtaatatactagatgtaatattcagtccataataaaatttacttacttgactccaaagtgtctctttattgttggttggcacaaatcaggatttgagcaggttctccccatggcattttgttgttatatcttgtaagtgttattaaatctaccgcagtctccattattttctcttttaatcccccttcccttggtttgttgcagagaccaggtcgattgtcttggagaatgtcccacattcagcatttgtctgcatgcttccttatggtgccatgctcttgtccctctattccaagtgagtggaagttagctggagaagtttgactaaattcaggatcaagtttttgtgacaagaatatttcctagctggtgctatgtgcatttgcatggcatcaggaggcagatgatatctagttggaaacaagactttggattttacaagctatgcttttgtaaggaaaggaacacatttaaaggtaagaaggtgataagtgttatggggtaaaatgctgcagggtagggggctgggagtgctgggcagaagatgttacaattttgaatagggaagttgaggcagatctcactgagaaggtgtaataggccactcttgtactgctatgaagaaacacctgagactgggtaatttataaagaaaagaggtttaattggctcactgttccgcaggctgtgcaagaagcatagcgatttctgtttctggggaggcctcaggaaacttacaatcatggtgggaagagaaggggaagcaggcacatcttacagctggagcaggaggaagagagagggaaggagggactatacaccttt

SEQ ID NO: 308784 - DNA, 1000 bp, Homo Sapiens
acccaggctgctggagtgcagtggtgtgataatggctcactgcagccttgacttcccaggctcagatgactctcccacctcagcctcccaagtagctgggactacaagcacactccaccatgcctggctaatttttttttttttttttttttggtattttttttgttttttgtagagacagggtttcaccatgttgcccaggctggtcttaaattcctgggctcaaggacaagtgtggtggttcatgtctgtaatcccagcactttgggaggctgaggcaggtggatcacttaaggtcaggagttcaagaccagcctggccaacatggtgagaccccgtctctactaaaaatacaaaaaaatttagctgggcatagtgacaggcacttgaagtcccagctactcaggaggctgaggcacgagaatcatttgaaccctggaggcagtttgcagtgatctgagatcgcgccactgcacttcagcctgggtgtcagagtgagactttgtctcaaaaaaaaaaaaaaaaaaaaagaaagaaagaaagaaaaaaagaaaattcctgggctcaagtgatccaccacctcagcctcccaaagtgttgggatcatagacgtgagccaccatgcctagccagagacaattcttttagtgcttttctctatgtgagttttgaagggctgtatgtgaattttgtgaattaggttcttttaacctctaatcttctttactctctcaattgctaatatatggtttaattagttttcaattcctgatattctaaatatgctcatctcatatttaggggactctggtggtcaccatgaccctccaaatctaacctgggaacaatattttttttttttttgagaccaagtctcactctattgcccaggctggagtgcagtggcgtgatctcggctcactgcaatctccacctaacctgggaacaatttttgatgctgaccaaccagtctgacccaacccacctgccatcagcccta

SEQ ID NO: 308785 - DNA, 1000 bp, Homo Sapiens
acctgtaattacagctactcaggaggctgaggctctaaatcgcttgaatctgggaggcacaggttgcagtgagccaggatggtgctactgcactccagcctgggcaacagagcacgactttgtctcaaaacaaacaaataaacaagacagctttgccagtatccatgagcttgggaaagtgactggatacatgtcaaatgtatgcaaataaattgctttgccatataccaacatctctggaatgtcccaggctccacacagcgtgtgtgtatactgtatcgcctttatagagaatctcaaatctcaacaatccagttgtcccttagctatgttgctggaagtccaggctttggcttttgaaaggctccttctcttccgccatttcttcaaagggctcctgggtggggagagaagagcagatgggaagcctaggcagcaaagcagggctcacacatatcctcagaaatgcacctgctgcaagcagccctactgttggctgtgccctgccttctctgctatgttgctgttggctatgccttctctgtgctgctgacactgctgctgactgctccggctcttttgccaggtctttcagacagagtccccacagttctttcagcactgcctgcttagtcccatcgctcctgggcactggagaagcaagtgaatgatagaggttgggccaaggggtaattaggtggagaatgttcttacagtctacaaattctgccaccctttctatcgccagccagcatctgcattcatgagacattcgtcaaaaggggctgagttttctcttcctccagttaagatcccttgcaagaagggagctgtacagatgggtttctggacctcatgtgagtcaagaggtgactggtcatctgtgtctgtcaattctcacagtccagggactttcagggcaccatattcagagcaggtgagcacacagtggctaactatgagtctcatttcatacctgtcaaaatgctgcggtgactgt

SEQ ID NO: 308786 - DNA, 1000 bp, Homo Sapiens
gcgcctggccttttaaagtgtattattattatttttaaatttatttatttatttattttttgagacagagtcttgctctgtctcccaggctggagtgcagtggcaagatctcggctcactgcaagctccacgtcctgggttcacgccattctcctgcctcagcctccctagtagttgggactacaggcgcccaccaccacgcccggctaattttttgtatttttagtaaagacgggttttcaccgtgttagccaggatggtctcgatctcctgacctcgtgatccacctgcctcagcctcccaaagtgctgggattacaggcgtgagccactgtgcccggcctaaagtttatttttaacttatgtatatatatatataatttttgaggccgagttttgctcttgttgcccaggctggagtgcaatggcgctatcgtggctcactgcaacctccgcctcccaggtttaaacgattctcctgtctcagcctcccaagtaaactgggattacaggcgcccgccgccacgcccagctaatttttgtatttttagtagagactcgaactcctgacctcaggtaacccccccccgcctcggcctcccaaagtgctgggattacagacgtgagccaccgtacctagcccgttttactttttaaatgattaaagtaacattcaggttgtttaaaacatttaaacatgacagaagaatatcaagtaaaattcagacagcgcagaggtatgtcaagttagaattccttgtttgttcactctttacatcctcaattccattccctaggagggtattatattataatattgctcggcaactgatgataatataaggacacatttccttcataagcacgtggagacctacctcatttcctcccaaccccacccctcactttggagaccgggtctcactgtgttgcccaggctggagtgcagtggttccctcacggcttgctgcagccttgggctcaaacgatcctcccacctc

SEQ ID NO: 308787 - DNA, 1000 bp, Homo Sapiens; identical to SEQ ID NO: 119996

SEQ ID NO: 308788 - DNA, 1000 bp, Homo Sapiens; identical to SEQ ID NO: 119997

SEQ ID NO: 308789 - DNA, 1000 bp, Homo Sapiens; identical to SEQ ID NO: 119998

SEQ ID NO: 308790 - DNA, 1000 bp, Homo Sapiens
atcaagaatagggctctgcagttagaccgtctcaatttaggagctagttctacaatctattaactggttgactttgggcaagtttaatctcgtggcacctgtttcttcatctgtaaaatggggataataaaaatacctgtcttattataatgctcactgtgaggactgacaaatatttacaccaatgcctggcatactaaaagtgttagcttttttttttttttgagatggagtctcactcttgtcacccaggctagagtacactggcacaatctcagctcactgcaacctctgcctcctgggttcaagcaattctcctgcctcagcctcctgagtagctgggattacaggtgcccaccaccacgcctggctaatttctgtatttttagtagacatggggtttcaccatattggccaggctggtctcgaactcctgacctcaggtgatctgcccgcctaggcctcccaaagttctgggattacaggcgtgagccaccgtgccaggccagatattttttttaaattctctcttctgctgtccagctctgatgttgcgctgtagttctcctacttgggcttctgtcctattctaaaagcctggtctttttttttttttgagacggagtctcgctctgtcgcccaggtgggactgcggactgcagtggcgcaatctcggctcactgcaagctccgcttcccgggttcatgccattctcctgcctcagcctcccgagtagctgggactacaggcgcccgccaccgcgcccggctaattttttttgtatttttagtagagacggggtttcaccttgttagccaggatggtctcgatctcctgacctcatgatccacccgcctcggcctcccaaagtgctgggattacaggcgtgagccaccgcgcccggccaaaagcctggtcttgactttaccttcactctaggtaacaatctgcttctctgttcaggagttccctgctctaactgcctggtcctctgctccct

SEQ ID NO: 308791 - DNA, 1000 bp, Homo Sapiens; identical to SEQ ID NO: 119999

SEQ ID NO: 308792 - DNA, 1000 bp, Homo Sapiens
ccatctgagcatgtcacgaaagcgtggggatggcagaaatccaagggcatcccacctctgctgtggtcttccattcacgttctaacaggaccccaggccgcagcaggattaggcagaataaagtcaccagggctcctggcaaaggctggagcggcctccttcagagagaatgaggtctgggcttacgtgaaagtccactttgactatggtgagcactgcagcttgtaggagcagggtctgtctgtcctcagaactttgtaaattctttcctgcttcctaaattgtcctgaagagcatccagcaagcacagtgcaatttaagatggaactcccctgactccccacatggaaaacgcatgttcgacacaaactgggccaggacggggagacgtttactaacacacactcctgcaagtttcccatgcagccatcagcaaccagaccaaacactccgcactgcttccagtgccagctgctgccacctcactccccatccactctggggtcttgcgaagaagtgggagagcatgagctcttgtcacagggatctgcgtgtgttaggtgctgagtaaaacatcttcccatcctccctgcccttggttccagtggctactagggtgccctacccttcatttctcatcagcaaatcccaaggagcaaacaggtgaggagaggacaaaacacaccctagggctcccaacgattcctccctgcgaggaccctcatggttaacacaggagtcacctttcctggacacacacagcctccctccaccctaacaatgaaaacactccaaaacactctcacaggggtgtagcacctgtaggaggaaaagacgagaaaggagggtatgggagggcagcctatgagggggcctggggtcgggggtagctggccgaagcacccagtgctggggaccccactcccacagcagatgtttctgcaccaccttgtcctctatggaagcctctcacctgggaccccccagcttgagatggtgg

SEQ ID NO: 308793 - DNA, 1000 bp, Homo Sapiens
cctgacaggtgcctgatgactctcttgtatttagaagtggcccttcctatctctggcatatttcctccccaagggtggggtgttcctgggatgatgttgaggtatgctaggacttgctgctgttgcggaaatttaaaataaaatctgccaatctagaaaacctgtccaaaaatatacgaaatgaaaaaaagtgttattattacatatgcattaaaccagattgcaacacacatcaaaagcaatccactaaagaaattgcaaagacagaaaaaatgtatcaccctcttacatagccaggcagatagaatctattacatatgtgttaattgcactcatccaaaggaagaagaaaactctcatatgctacaacttgtagccagactcctaggcaaagctcccagagagacaggagacagggcaccatccatcttaatgttcacatttcaaagagatggctccgaggcccccgagaagcacattcctgggaagccaaagtggcaaagggcttgtttagctttcagaaaggtttatatacctcccaaagagacagagaaaggattataaaggaaatactctaagaaaagggagggagggacttctctttgccttttggcaccagggaaaattcaatttctttttacttgtacttacccttatactgcctaggaaattaaggagaagttgagggtccactgagtggcagggctgccagagaatggtttcccagcccagtgctggaagagctcctatctcccaggcgagctggacctccctttccctgccactgactcttcctcctcctgagctactggccagccctggagcggctgtctcataagctcttacaaatgagatggagcagggacccctcttaggggcctggtctccccagcaccaaacagaggaattaaaaaatcttgagtttcttaaagggaaattccaggcacctagctagcctgagaagtaaatgaacaacttgataagcaagagagtaatagta

SEQ ID NO: 308794 - DNA, 1000 bp, Homo Sapiens; identical to SEQ ID NO: 120000

SEQ ID NO: 308795 - DNA, 1000 bp, Homo Sapiens
tgacagcactggcctcgaggctgatcctgcaccgctggatatccaggcagcgctgtgccctcaccctctctgagctgtgagccggaccagagaaagatccccactcaccccaccctcacccatcaagaggtctgtcctttgtcagggaatatacaagggtctggacattcctgccggaagctccaaacaagttcctgtgatccaactatgggaaacagactcagaaaataatgaaagtcttttccaagaataaaggagaagaaacttgtctagcctcaagactagagagctagagtcagaatggctcctaaaaggaaaagagaagaatctgtttggataagacagtgtggagcaagaagcataatttcacgctgtgttggggtgaatcaaaaatgataaagcgttcaaggaaacatcagagagccaacaaagacatggagttgtccgaaagcttctgccaaacctaagaaagtggattgaaaagaaaaatcttcagcagccgcagtccccagagaaggccccagcctgacattgcacagcgtctcagggcgcatttgtattccagcctgcactggggagtttagtgcccctggagctgtgtcaagcagtatcagtggacaccaagtccatccagccccagaagattctcaggaaaaaaaaaaaaagcttcagatcccttaactcaccaaacgagacacttgttagagcaccttctatataagaaagtggacttgcaatgagaatgagcaagacataataataaacaataatactccgaatggtagtgagatacaaggcacgtggtttgaaacacagaccgtggaagccatctctggtgttgttctgcacgcacctcccaatccccaaaggaaaaacatcattcttcatccaagtaccttcgaacaccagttcacctgggcttctccaatgtcaacacgcacctgtggggttgtgctgagcactgacaacgtcttcctaagagtgggtctcaccacgactg

SEQ ID NO: 308796 - DNA, 1000 bp, Homo Sapiens
aatacctgtttctttgggacattccgtcctgatgatttttatttttgttggtttttatttttggggggaatgacatgtttgggtcttttatacatgaaaatttgtttgacaataatctcacaaaacatattttacatctgaacaaaatgcctttttgtttaccgtagcgtatacatttgttttgggatttttgtgtgtttgttgggaattttgtttttagccaggtcagtattgatgaggctgatcatttggctctttttttccttccagaagagttgcatcaacaaagttaattgtatttatgtatgtaaatagattttaagcttcattataaaatattgttaatgcctataactttttttcaatttttttgtgtgtgtttctaaggactttttcttaggtttgctaaatactgtagggaaaaaaatgcttctttctactttgtttattttagactttaaaatgagctacttcttattcacttttgtaaacagctaatagcatggttccaattttttttaagttcactttttttgttctaggggaaatgaatgtgcaaaaaaagaaaaagaactgttggttatttgtgttattctggatgtataaaaatcaatggaaaaaaataaactttcaaattgaaatgacggtataacacatctactgaaaaagcaacgggaaatgtggtcctatttaagccagcccccacctagggtctatttgtgtggcagttattgggtttggtcacaaaacatcctgaaaattcgtgcgtgggcttctttctccctggtacaaacgtatggaatgcttcttaaaggggaactgtcaagctggtgtcttcagccagatgacatgagagaatatcccagaaccctctctccaaggtgtttctagatagcacaggagagcaggcactgcactgtccacagtccacggtacacagtcgggtgggccgcctcccctctcctgggagcattcgtcgtgcccagcctgagcagggcag

SEQ ID NO: 308797 - DNA, 1000 bp, Homo Sapiens
aatccaaggtaagcagggccccatgacaggaactggaaaccagaaaggttgcagctaaggtgctctccagggtgtcctctctcctttgctttttctgtccctttctctctggaaacacaaggccctcatatgcattttctcttgtgcattctttctctctctccctatctcattctcattctctttctctgtaggcctatagttcaaaatgtccgccagatcacttgaggtcaggagtttaagaccagcctggccaacatggtgaaaccctgtttctattaaaaatacaaaaattggcggggtgtggtggtgtgtgcatgtaatcccagctgctcgggaggctgaggcaggagaatcacttgaacccggaaggcggaggttgcagtgagccgagaacccagaaagcagaggatgcactgcactccagcctgggcaacagagcaagaatccgtctaaaaaaaaaagtccgccagccacatttcatcattgcctttctgaacatttttcttcatttcttggagtttcaattccaaatccctgatacccaaagaaatttaggcctgagactcacatttctgggaaacctataggtaggccccttccctgggtctcatgaatgatccgctgggatctagggctccttacttacctacaacggggagggggtggggggtaagataagattctctgaagaaagatgggttgattatttaaaatatatgtatactctctaaggatatttgtttgtttatcacatcctagtaatacttttcaataaagctcaacatttactgtggagggagaagttgcttcctcacaattcggcctgagtcagatggcgacccattactcccccatgcagccaagtctgtgggagctgctatgtaactgcgaggattacagtatttggggagttaaggtactggaaagaggaatgggttgatggttgagaattcgatccttacatctgagtgctgataagatcctaacccactgtatg

SEQ ID NO: 308798 - DNA, 1000 bp, Homo Sapiens
tacatggcactctctgtagacaaatccagtggaatattttcatattttcagtccttgttttcatggcccctttgtggcctttgggccatggttttcctccaaagctggcattttcctttattcttttcttttctttttatgagacagagtctcatcctgtctcctaggctggagtgcaatggcacaatcttggctcactgcaacctccgcctcctgggttctagtgattctcctgcctcagcctcctgaatagctgggattacaggtgcccaccaccatgtctggctaatttttgtatttttagtagagacagggttttaccatgttggtcaggctggtctcgaactcctgaccttaggtgatccacctgccttggcctcccaaagtgctgggattacaggcgttagccaccatgcccggctgcattttcctttactcttattacttattctctcctctttcttttcctagctccatctccttggttgctccctcttctgctcaccctggaatgttgataatcccagaacctgagaatggtctcttctcactggaaacagtctctgaaactagcatagagtttgattgtaccctagatacaatctgaaactacaatagatattctaaggatgttcagctcattatttctacatgaaacctctccccagaattcctgttttccccaccagcacctcctattctgttctgggcatccaaagctcagagagacatcacgatgtctctctgtaaacccgctgtttctggtcttctctactactattaaaggacagatgctggggagactcctccccctccctcacctcaatcccctcttccatctccattgcttaatccagatcctcatgaccccttgtctgacaactgctatagctccccactcctcatctctactccctccaactcaccgagctgttgttgacagacttatttttctaatatatatattaattttgttatttccctgtttggctttgacaga

SEQ ID NO: 308799 - DNA, 1000 bp, Homo Sapiens; identical to SEQ ID NO: 120001

SEQ ID NO: 308800 - DNA, 1000 bp, Homo Sapiens; identical to SEQ ID NO: 120002

SEQ ID NO: 308801 - DNA, 1000 bp, Homo Sapiens
gcatgagtatgctcttctacccttctaaatacaaataaatccattattcaatattttcccatcgtctattctggaattgaggttttattcattttttcttaaatccaggccttcatgaagggaaagtgaggtttttataagctattgtatgttttttcaagagtgggaggagatgacctttgagaagttgaggattttctcccaaattcctttgtagcctgtaacagactgaattgtgttcccttaaaattcacatataaagccctaatgcccagtgtgatctagcagaggaactgagtcagccagcccttgatcttggacttcccaggctccagaactataagaaataagtctgctgtttgagtcacctcccctagggcacatttcggcagccagagctgactccggtgtggctctggcccttgttaactgtgtgagcttaggcgaggtcctcagcctctctagactcttccgttttctcatctataacttaaggacaacaaggttgaggacctgtcttcatgtgttgttttgtagatcatgtgcaagaagtaagcgaagtggtgagaactgggtgggggagacacagccctcgacacagggagagcaccccgtgcgggaggagccttcagtacaagagacttggtctgccatcaagtggctctctgcactgttgacaattgtcagtcatttaagacagaggaggccgggcatggtgactcatgcctgttatcccagcattttgggaggccaaagcaagtggatcacttcaggcctgcagttcgagaccacctgggacaacatggtgagtctccctctatacaaaaatacaaaaattagccaggcatagtggtgcacacctgtagtcccagctactagggcggctgaggtggaaggatcacctgagcccgggaggtcaaggctgcagtgagccatggtcacaccactgtactccagcctgggcaacagagtgagaccctgtctcaaaaaaaaaaaaaaa

SEQ ID NO: 308802 - DNA, 1000 bp, Homo Sapiens
ttctccaaatggaatttgttaactagaactcaattcatattgactatgtgagtatctcatgaaaattatcaaaagctgtatacctttaaccaagagcaggtccaagttttgttgggcctgatctagggtgatatgaaattaggcacaggcagctaagctatgaatacgcaaaggcatacagagtgaaataatgggggagggtggggctgagcacagtggctcacacctgtaatcccagcactttgggaggccaaggtgggcagatcatttgaggtcaggagttccagaccagcctggccaacatggcgaaaccccgtctctactaaaagtacaaaaattagctgggcatggtggtgcatgcctgtaatcccagctactgggattatcgaggctgaggcatgataattgcttgaacctgggagacggaggttgcagtgagccaagatcatgccaccgcactctagcctgggtgacagagtgagactccttctcaaaaaaaataaaataaagggggggaggtgtgtggggtgaaaaactacacattgagtgtaacatacactactcaggtgatgggtccattgaagttttataattcaccactacataactcattcatgtaaccaaaaaccccttctactccaaaagtcactgaaataaaaaatacattaaaaaaaatcaggcacagggctatggaggggcccatgcaagtgaggagccctgaggctgaagcttcattagcttcatggtcagtctgcctctgcccttaccagaggggcagaaaaggaaattgtttcctctgcagtgttgatctctcacttacaagcagcaacgtacgagggagaacatgtgtactggagccagaaaggactgggtttaaataccagctgtttcttcacttgctttgcggtcttgaggataacgttacttaccctcactatgcctcaatttccttctctgagaaaaaagaggtagcaatgcatatttcatgtgtgtttacatg

SEQ ID NO: 308803 - DNA, 1000 bp, Homo Sapiens
cttctccacagaccttaccatgcactcaagagaaaacagagtgcagggaaggagatccgaaaaagcctctctcttaatatggtcctgaaagcagcaccagctacagggaagccacaaagccccatctagatccttctcggtctcctctacacaacacaagttttcaagccaggagaaaggcagcaaaccttgtcattaggacacatatgaagactcattgcaactacagattaggaagaacaaacaaaaaaagctatctatcatgcagaaggagcaagaaaacatattgagtcctgatcactagacatctcccctactgatgagagtcagggaagaggaacagtgaaaattccacactcctgagacccagggatacaacacctgcctaagactgaatttgtacgacaacaacatagaatgcttccccaacctccgcatcttctctgccatgttagcaaatgtcaggtaacaagagcactctgctaggggtgggcaagacacttgagagacacaagtgggagagacattttcttgaggcgtattatggagggaatacataaaactgagctgctatgatgaaaaactctctaggccaggcacggtggctcaagcctgtaatcccagcacttagagaggctaaggcaagcagatcacctgaagtcaggagtttgaaaccagcctggccaacatggcaaaacctcgtcaaaaatacaaaaattagcagggcatggtggcgcacccttgtaattccagctactcaggaggctgaggcatgagaatcacttgaacctgcaaggtggaggttgcggtgagccgagattgtggcactgagctccagcctgggtgacagagtgagactcagtctcaaaaaaaaagaaaaaaagaaagaaaagaaaaagaaaaactagctaccaaaccattcccttattctaagcagaaggtagtattttgaaaatctgaggctgggtgcggtggctcacacctgtaatcccagcacttt

SEQ ID NO: 308804 - DNA, 1000 bp, Homo Sapiens
tagactggagtgcaatggtgcgatctcggctcaccacaacttctgcctcccaggttcaagcaattctcccgcctcagcctcccgagtagctgggattacaggcatgcaccactacgcccggctaatttttattttaagtagagatggagtttctccatgttgtcaagctggtctcgaactcctgacctcaggtgatccgcccgacttggcctcccaaagtgctgagattacaggtgtgagccaccacgccctgcctattattattatttttattattttccagacagagtcttgctctgtcactaggctggagtgctctggtgcgaccttggctcactgcaacctctgcctcccaggatcaagcacttctcatgcttcagcctcctgagtagctgggactacaggtgtgtgccaccaaaccaggctaatttttgtatttttagaagagatggggtttcgccatgttggccaggctggtcttgaactcctgacctcaggtgatccacccacctcagcctcccaaaatgctgggattataggcatgaaccactgcgcctggccataatactttattattatttggttctcatggatttcctaggtgtataatcacttacaaataaaagtaattttggcatttctttaaatattataacttatttttcttgtataattggattggccacctgttctaaaacactgtaaaataagatagatagtaatcaatttttttcatgttcctaactttagtaggaatgcttctgtttcttcatcattaggtatgtattagcttttgtttacatgtatataaaattatggccaaataacatctgtctatcctattttagtaactaatttaataattaagaatggatgttgaatatttttgttttagcccagttgtctaagacttccaggaatatacctgtagtgtaataaaattaggtttattgatccattgcaatgagacagactgcgtcccaggggagccatggggtat

SEQ ID NO: 308805 - DNA, 1000 bp, Homo Sapiens
ctgctatgcacagcttcgctgtttttttttttctttagatatgttgtagatagtggggttcttcaaggacaaatcgtaaaggtagtgttttagacttctgcacacaaatggaaattcaggtagaatatctttctttcttttctagaaccatctatcttactcaaaaaggaacctcaaatgtgtgagaataagagaaatagtttcattttctctatggaaataaaaggctagtgactctctggtatgtcctccaaagtagagccatattgggatttaaaaaaaaaaaaaagcagggcttaaatgtgccatcttctaagaggttctaaaaggtggagccactttttttttttttttttcaagagacgaggtttcaccatgttggccaggctggtcttgaactcctaacctcaaatgatccacctgcctcggcctcccaaagtgctgggattacaggcgtgagccatcacacccggccatgaagccactttttattcgagggctggtcacttcagttacctaacttattcctttctgtgctgccccatgagaagtgaagagaacaattaattacctgtaagggttcttcatcagtgccaacaggatgacatgaaatgatgtactcagaagtgtcctggaatggggcccatgagatggttgtctgagagagagcttcttgtcctgtagaggcatttggattgagtcccggaccgtgtgggtacaggtgatagtctacatcttccctgggaatgtgaccaatttggatttcctcacctacattcggcgggtatggtcttggcctatgccttatgggggtggccgttgtgggcggtgtggtccgcctaaaaccatgttcctcaaagatcatttgttgcccaacactgggttgctgaccagaagtgccaggaagctgaataccatttccagtgtcatacccagggtgggtgacgaaaggggtcttttgaactgtggaaggaacatccaagatctctggtccatgaag

SEQ ID NO: 308806 - DNA, 1000 bp, Homo Sapiens
catcaaacccctttaccaacacccattagaactggcccttgtctccctcaccttgcatgatttttctctttgtttttagacttcagccacactgtccttttcattttaatacaaatcctttagggccttttatgcccaaatttctcttggcccagaaggttcttgaccaaacatttttcctttatctgtatctcagataggtcttccctggtcattcagtctaaaatgaactcctttcctgcagtccccaattgttttagagatgggtatattgccaacactggccttgaactcctgggctcaagcaatcctcatgcctcagcctccaaagtagctgggatgacaggcatgggccactgcacctgacctgcatctccttttttcattacatcactgtttattttatattttttctattgtacttattgcaaccccaaattatcttatgtctttttgttgtactttcctataacctgtttccataagagccaaaagtcttgactaatttttcactgctttagcttaggatgatacctggcacacaatagatgctcactataatggcttgaatgaagaattaataaatggacatgagaatatactcatgacgggccgtgacaggtgtttgagaaaatagtttgagaccatgtgctgcagagcctgtgttggttaagggatggtgagaaacaggtgggtgcctaagtactcaacgaaagagtcaggtaggaaggaacatggacactgtcattacctttgacttctccagcctttgagctaagattccttgtcaggctgaaggcttgcagtgcagttgcctcttgtttgaaatttagtcaccagtactgtgagactcaaataagcagtggggaatattgtaataagtgactattctaaactctagggaaatccaaaaacagaattcaagtcttccttaaaagaaaagaggacatcttaggaaatgaggtctttaagataaatatcactaagcatcaatttgggc

SEQ ID NO: 308807 - DNA, 1000 bp, Homo Sapiens
tgaggagcagactagatttgttaagctcagacgagacaacagtcttgaaagctaagcttgtggagagagaaaagaatttgataaatactcaaagcttccctttaatcataaatgagaaaacttgtgggagtgacgagtaagttgtcaaacttttttttatttcaggacacctttgcaatattaagaattattaaggccccagataacttttgttggtttacaggggttatatatttatcagtagttactatatttataaattaaaattgagacatgtaaaaatatttattaattcattcttataagatcaatgttaaatccattacatgttaacttaagggatacatttctgggaaataattacattgtccaaaacaatatgtaaggagtgactttttaaaaaaaatattttttggaaatctcttcaatgtctagtttgatagaaagttaaatttttatatctgcatctgcattcagtctgtttcaatctgctgttttggttgaagtacatgaagaaaatccagcttcacacacatatttattaatagttcaaaaatgcaaggtatattaatcgccatttcagattattgtggaattattctttgaaaaaaatcctacttcttaatgtttagttgccatatggaatttcaaactatagcaatgaattttcatactttgatatattaaacttaatttatccatctcatgctttgaatagatcttttactcatgtatgtttttgtaacattatgtattggccacttggaaactatcagttcactaagttatgtagatctttcaaatgttgacacatttcattactcaatattttaaaaaatcacatttgttaatatcactatccatgtcatcagaaatgtctgtaagcacttggaagtaagttcacaggggtggaaacaaatttctaaaattcttatttttgttgaaaattcaaattttatcattagcaacaaatgttctcagctgtttttcttgaagtgac

SEQ ID NO: 308808 - DNA, 1000 bp, Homo Sapiens
tgtggaagagtcagtgtgtgagagaggtggtccagagtcacttgctgcttaagaacactttcccattagttccgggtgatgactgcatacagctcctttgggaagaaaatgcctcccccagtgagaatctgattataatggctgacgtatggatggatgtgtaggcgcagtgtggttcaacctgtttccattgtggttggaaaacttttttaaaagtccactccaaaacatgaaaagtcgtagtgttaggaagatttatttccaaacagtggcctccacactgcgcggcagcacttctttttagtatttgtaagcttttgcccactttcaattgagccagccctagcgtggtatgtattgcatgctgaacaatatagagtttgtttttcctttctgatgattttaaactcttaaagaacaggaaagcatctggtaagaagaaatcatgagtccgtcagtgcccttactcatatgcgtctccagtggcctcatgttgtggtcacaggagtttcctgttcacagcaatgtgtgtgatatggacccagcatccactgtcgtgcttttaaactgattcctgggacatagcttaccactggaacagcagaccagtgttgcactgtttctaaagctaagcttttccttatttattttggtactacctaagtgacttggttttgactgtccctaagagagggaaccactttgctgaatttttaaaaagtccaactgctctttcatcttttatgcttagaaacctgttctctccagatgcacttctgaggcatggatgagctgagcgtatggctagaaattggaagtttacagctattaccagggggctaactcccggggcatcgcagtagcttctggcacccgtggcttcatgtctttagcaaagtcttgatgtcatggaaagagaaaaagtgtatgcagttagttacctgattttgtaaacaaacagtggctgacctgggcccttaaatcaccttcacacctttta

SEQ ID NO: 308809 - DNA, 1000 bp, Homo Sapiens
aatgatggatattctggctctggggccctctccaccaccactcacagtagccttgctgaagccatcacagatgggagaaggccatgccagccacgtccgccgaggggcgccagcctgaagctgccaggccctgaggttcagaccctggaccccatagctggaggcctgtggtgccagaagcccagattagggtggctgtccatccctggatagctatttgcacgaatcatggacataaatccaagttgaagaagatcaacattctgactcatgttcatttatgcgctaatgttcccctgtcaaccccctgctttcctgggtccctccttctgttccccttttcttcctttccctgagatggtcaccattactcttgagtaatggtgacgtatcagggcctccctgagggtagggcagccggggcagtggaaggagcctaggccaggactcaggggacttgggtttaaattccagtcctgcccctcactcatcaggagacctggggcaaggcgtggcccttctgtgagcctcagtttcctcatccgtcaaacagaacacctcatcttaacctcagctgacttggagaactgtgggagggaatgagagtagatcagaactggttttataaactccaaatgctgagtgagagaagcagagtgggccaaggtaggagccaaaaagcagggactcaaagcattgtctaatttctctctttttttttttttttttttaagagacagtctgactgtgttgcccaggctggagtgcagtggctcttcacagactcagtcacggcacactatagcctcaaactcccgggctcaagggagcctcccacatcagtctcccaagtagctgaaggagtgcgccactgcagctaactatcaggttgttgaaaaagtaattgcaatttttgccccttttttgtggcaggggggcctccctcatgaagatgccacccctaatagggctacatggcccttgcagtctgccttggctg

SEQ ID NO: 308810 - DNA, 1000 bp, Homo Sapiens
  misc_feature (29)..(29): n is a, c, g, or t
  misc_feature (712)..(712): n is a, c, g, or t
  misc_feature (717)..(717): n is a, c, g, or t
cactacggactgtcaacttaaaatgggtngagatatatgatatggttaaggatgtaatggctcagatgtaacatactgtatggagttcaactatatgacattctgggaaaagtaaacaactatggagacagtacaaaaatcgatgcttgccatgtgtttgaaggaggaaaggatgaatgagcagagcacagaagattttcagggcaatgcaattattctgtatgatctatgatgataaagacatgtcattatcattatatatttggccagacccataaagtgtaaaacactgagtgaaacttaacataagctatggtctttcaataataatgatgtttcaattgtaacaaatataccatgctgatgggggatattgatcatgggagaagtagtgcatgagtgaggaccatgggaagtctctgtagctttctctcaattttcacaagatgtggaaccagtatataaatagatacctagattaatcaaatagactacaaagtgcaaaaatgtatccacaaatatatggaatgtagaatagttcaagaaagatgtaaaggcattcagtggagaaagtataatctttttaacaaatgtttaaacacttggctatcaatatgcacacacaaaatattttgatctatacctcataccacatacaaaataagctcaacttgtgcacagcaaaagaaactttaagctcctataaacaganaacanacagaatgggaaaaatatttgcaaactatgcacttgacaaaggtccaatatccagaatctatgaggaacaattaaataatcaaataataaataatcccattaaaataggcaaaagacataacagacaattctcaaaagaagacatacaagcggccaaaaaacacatgaaaaaaatatgaaacataattatcagagaaatgcaaatcaaagctgaaatgagattccatctaacaccagtcagaaggactattactaaaatgtcaaagacaactgatgttggcaa

SEQ ID NO: 308811 - DNA, 1000 bp, Homo Sapiens
gatcccttctgggagttgaggattggcagcagagacttgggtggtcccagagttttcaaggtagaagcagcttatactccaggcccctggcattagacagagctccttgagggcaggacagggcaaggcctgcctacctgggcccaccagtgcctggcccagaggagaggaacagagctgggcttcaggcctgcagccaggctggggcagagcagagcaattggcctggggctctttctttctgtccagatggccatctgggggaggggacccacagcccatccttctgtccagggtccagaacatgggaaggctggcacggtgagaggctccctgccaaccacagccccagctcccgagtcggaggagctcacctgtcccgcatcagcacctactccccctgccatccctgtggggcttctctctccccagctttggcctggcccccgccgcccccctccaggtccacgcaccactcagccccaaccagacagtggagatctccctgcctctcagcacggtgggctcggtcatgaagatggagcctctgaacaacctccaggtgggttccgggcagggcaggcaccccagtccttactcacctaccagccgggccccactggggtcagtagaaggtcgtgtctgcggagtcatgctcttagctgcagatgtgttggggaggcccaggttggggaacgaaggggtgtgtttaccagggaaggccctgggagagaatctgctcagtgacactcttcctggggcctcagaggtggcgtcaagccccagagactgactggggacccccttgtgcctaggtggccgtgaagaacaacatcgatgtcttctacttcagcaccttgtacccactgcacatcctctttgtggaggacgggaagatgggtgagtcatgagggagcccgctggggtgcctgaaatggggctgtggcttgggaacctggccaaggtggtgcctttaccaaggtccagatggactgccttg

SEQ ID NO: 308812 - DNA, 1000 bp, Homo Sapiens
tttaggtgacactatagaatactcaagctatgcatcaagcttggtaccgagctcggatccactagtaacggccgccagtgtgctggaattcggcttagcttgcatctgtcccctgaacagggcaacctggacgccaggctggatggaggggagaaggcgatgcagccgcaatggtagtctccatggtgtgtgaggagccggcacctgctctcacacgatgccatcaaagccctgcaggccacacttcttgccggccacctggcacccgaatctcagtgcttcctgcacgctcctccctggaggaggggcaagtagctaggtcagccaggtgtttgggcagggacaggtcccagtccttttcccctcctgctgccatactcaccctgggagaggctgaagatgacggaggcattgaaggtgtctccagctcccagtgtatccaccacgcggggtggcgggaaagcatccgagtggagcaatttgccatcagggcccagggcgtcggcgccctcctcagcccaggcacagacaagcacagccctgcaagacggctccactcagctgggtgttagcccaccccgtccccccagccatcctcccagctccagggcggactcctggagtccaggctcatcctgtaccttctaaagccccttcctggcttccccggctcaccctttcctcacacgaccatacaagcccctcaaggcttcctctgctgactggaaccccaagtgcttggccacatctttgctgacaaacacctgtgggcagtggaagagaagctggtggtcacttctaactcgtcattcaccaacagcagcctagcgttgcccccattacaacacgactcccccaacatgtccacatagatccccaacgtagcatctcactgtcccacgggaacgtggttttcttttttctttattttttgtgaagacggtctccctgaggctggtcttgaactcctggccccatatgatcttcctgcctcagcctc

SEQ ID NO: 308813 - DNA, 1000 bp, Homo Sapiens
gcttcccgtcagccacagcatcaagagggtaaaaactgattcttgctctttgtgaagaacactattcctgctaaaccatcaagtattgatgcccttagtgccttcaaccaatgcttctactcaagcctaatcagtagggaaattgataatcctgttgctgtagtattccccatcatgccgcaattttagttcaatgcttcaaacattcttcaggcccagtgcgctttcagctgtgtatgtttatagtgagtagctacacaatcattctgttttttgctttcagtttactattcaataaattagatgaaatattcagtactttacaataaaatagcttttgtgttagatgattttgcccaactataggctactgtgtcatgagtacatttaaggtaggctaggctaagctatgacgtaggttaaggtgtattaaatgcacttttgacttaaatacagtattttcaacttacattgcgtttattacaatgtaatcccaacttaaggagcatctatgcagctacagtaattcaaggcagtatggtatgagtgagtgcaaggatggacaaacatttcagtgtaaccaaacagaaagtccagaaacagatccaccattatggttaattgattttttactaattggcaaggtaatttaatgaggaaaggataattctttcaataaacagtgttacaatgactggatacttgtatgggggaaaaaaagaaccctgatccataattcacaacatacatatcaattcaaggtagatcacaaatataaaaatataaagtttatataatagagcagaatatctgaaatcttggggttaaattggagagaaaaaatatcaaacaaaagaaaaaaataaatttgaccttgtcaaaatttaaaacttctattcatcaaaagacataaagaaaacagtcaagccacagactaggtgtaatatctcaatacatatatccgacaagagacttgcatctagaatgtataaagaatttc

SEQ ID NO: 308814 - DNA, 1000 bp, Homo Sapiens
ctgaaagagctactccctttattaatattataaaaataagaaacactattattctggaaaaaagttttttggtagaggagaggaaagaatcacttctggtgggctacaaataacataggaaatgtactgatgctgggcattagatgtattttttattttatttttattttttatttattttttgtttttgagacagagtctcactctgtcgcccaggctggagtgcagtggtgtgatcttggctcactgcaccctcaacctccttggctcaaagcgatcctcccacctcagcctcccaagtagctgggactggaggtacataccaccttgcctggctaatttgtctatttgttgtagagatggggtctcattttgttgcccatgcttgtcttgacttcctgggctcaagcaatcctcccacctcggcctcccaaagttccaaattcttaatgaatcaggattgagtagggaaagtgaggaagagaagtgagggggaatttgaatttactagagatagctttatgtgttgcctcatttaatccccatgataccacaataaaataggaatgattctagttggacagacagaggattactgattagaaacggttaggaactgagagcaagatccagctccggatgcaagcaagcaagcactgcctcctctgcctagtggtaaccttccctccaaactggaaccactacagccagagttggggggcagagatgatcaccctcgcccagctgagcaaagcagagatcccctcaactggcagacttcccattacttttcaacctgtactacaccagaagtttattaagtagaaaaaaagtatctgacaaaaacatggccgcctccctgcccctccagaaaaaaaaaaaagagaaagatacagccttagaggaatacccagggaaacagcttcacctgatcactcacccccatgcacggagtgtccaaacagcattttggggaacgcaaccttcaataccagcagac

SEQ ID NO: 308815 - DNA, 1000 bp, Homo Sapiens
ggatctgtggagcacagaggcagcggggaggctctcaggttcgccctgcagggcacccaaggcccggcctgggtatggtggggacgggcagctacctgggtgagctgatcctccagcaccttttttggcggccggacattggtgaagaagaggtggaggaggttgcctggggtctgggagttgatctgctctttgctaagataaatgtcagagactctgatgggcttcgctggtgtcaggctcagcgtctgctctgaatgggcacaactcttaaatatctccgtcagaacctctctggctccgggcaccagcttctcccctgttggatggagagggggcaaaacaattctgccgtgaacatgcatcgggacaagccctgcgagcattctgtttccaaacactgtttgaaaggggcagtggatggacattagtggaaggaagagctgcccaccaaagcctggctccctccctgggcacagcccagcacatgcccagccttccttgccgtaaggtgcggccctgcaaccgtggtcactgtgggatgtgagccacatggggaccaggctgctgtcctctgcacttggcccctacctggttgctcggggacgacaggcccctccccgagggtgggcacacctcagtgctcaccctcactcttatatctgcagggaattaacttccactggacttgagccattgtcctcctggggctatttatcatagcagtttagtctagaataatcccagaggatagatagccagcaagtatttttagtgggaagtacaacttgttaaacaggtgatctcattcataggaaatattcttcaaaactggcgcaatgagcaggtgaaaaagagttttctgagatacaaaaaaactgtctataagcaccagaaaaaatatttttttgtccccaaacaagcactccagaaggtgctctcacctttcctaagggccagtcatgaacccatctgcatgctcttaggaatcactccgttc

SEQ ID NO: 308816 - DNA, 1000 bp, Homo Sapiens
cctgtaatccctgctactcgggaggctgaggcaggagaattgcttgaaccaggaggtggaggttgcagtcagcagagattgcaccactgtactccagcctgggtgatagagtgaaactctgtctcaataataataataataataataataataaataatttcaagatgactacagcagagaattaaacccagcatggagccctgtgtgactgcacaaaccacatgctgaggaagccagccctgctgcagactggatttataagttacaagtatagtcatatgcctcttgcattcgagtcaggcctcctttcctctcagcacttcccagttacctctgctatgagctctgcaagtcctgggttgcagagtaggagccagcgccttggagtgatcccattggttttattctgaaacttgtcaggttctagctcactgaagtccttgaatctggagatggaggagacacatcactgaatttggctgaaacggcaaagggtcctgcacactggacaaagttcggagttatattcaagaagccaagtgcaggcttagaaaggttaaataaaggtggagggacaggctgacagtagctatggctgtcatttaaatagaaattcatttgcaactcaaaagaattaccagaaaaattccaaatctagtcacttccatctgacttcttcacactgacatatatactacactttcagtagaatagtttttggtattttgtttgtttgtttgttttggctcctatgtctagaattaagatggctctgagaggaaagcattcttttctttccttttcttttctttttttttaggcaagagttttttgtatagaagaaaatacttttaaacatatgaacaaggcctttcctcatccctaagtgcaaccctgcatttagtagcatcattccattaatggatcagtgtcagacccactgccagagtaatggaggctcacactttagtcttcacgatgtctgagtggattttagcc

SEQ ID NO: 308817 - DNA, 1000 bp, Homo Sapiens
tttttttttttttttttttttttttgactgaaattaaagtgtatttatttgcagcaatcctttaacaatgatcaaattttgacaacaagcaacagcaattactgcttaagtgttgcctctagataggagcggcagatagcaggaaactgtattatctccaaaacaaactgcaagccccccacccccccgaacgtctgtaatcaaatcgccatctccccaaagtctgattggcagggcagatcaccctaagataatgaatttattacatttcctgggttatttacaaaagggggagggccaatccggattgtcccctaggtttaactgtaaattaacaagaaaaaatggtttaaaaagaaaccaccctagaccaaaatgttctgctcctctcgccttccttcttgttattgctttaaatctttttcaaaaataattgttctacaaacatattttctaaaatagtttctcaaagattaaatatccctttccaacccgcagtatatttttaaaaaagcaatccttctatgtaatacatgaaggattgtaaatgggggagaattatatacatacatttaaaaactggtttatttttccttttataaaggactgaaataataggaaaaaatctattcagcatctggctcacagggatgtataatatgcactgcaattttatatggaatacacaagccaaatatttatctgtgcatatctggccgcacagtcccatctctcggcacacaggcatcaccgtggtaagaccgcggctgattcatgggcttaaaatttccgaatcatggactgtcattagtgagaaaacgtatttgtttatatgccaactccaatctgtttagaaaaatatctttttactagcctcaaagcaagctgactatatagtacattttgcagaagatgctgcaggaaaataaatctaaacaaaaagacttttagtaaaatttgacatggactagtcagagggtttctccatttttcagagatt

SEQ ID NO: 308818 - DNA, 1000 bp, Homo Sapiens
acacaggccttgtgatgcacggccaggtagctgtgggtgtggccacctgcttccctgcagaaccaaataaacgttatgggagagaagccaagcagtggcctggcctcagggacccctcagtgagtgccagcccatctctgagccagtgttcccagggcctgtcctgactggtccgaggagtttggctggggcctctggaggcaaaaccccttgccctgccctgtcttggacacatgttcagacacagacatcagtggcttttttactccctgaagtcctcttttcttcacagaatatttacaaacagggaaggggtggaggccacttccgccaccaaataagggggctagggaggggggcagtgctaagacacgcctctgcgcagggagagttcctgaggagggcccagtgtgaccacagtgccctccaggggcccaggtggttccagacggctcaggccaggtcggcggtgggtgagcccagctgcttggaggccaggaggaggcgtgtggctgcactctcagactccgcctgcagccgccggttgttgtgtctcaggctccgcacctcctcctccagggccgccctgtccgccttctcctggggtgccggggagacaggagtcagagccgccagcccctttcctggggcagccctgtgactccccccaagctgagcccacccctcaccttctgcaggtcctcctgcagcttcctgagcatggactccaagtgagagaccttctctgagaggttcccaggctctggcctgaagacatgggggtcaagactcagcaggaccaaggcagggggcagtgcaccagctgactcccagccccagctaatgagaggggccccgctggtcttctaggcatatgtggcagcagagcccaggacagagctccaccccagcagacaggcacgaagggggggtcatgtgggcaggtaaagcggctgtggggagttggggagcttactcagcatcagattttggagttccc

SEQ ID NO: 308819 - DNA, 1000 bp, Homo Sapiens
gatctgttttaatttttgaatatggtgagaaatagagttccaaaatttcatttctttgcaggtggttatccagttgtcccagcatcattatttgaaaagattattcttcctccattcaattaacttggcacctgtactagtcggggtcctcagagagacagagaaaacgggataaagatatagttgtagatatagaaatagatctaaatatatgaggggatttgttagaggaattggcttgtgtgaatacggaggctgagaagtcccatgattagccagttacatgctggaaaaccagggaagctggcagcatggctcagttctgaccaaagaagccatggtgtaccctcagtccatggccaaaggccaaacaacctggagttctaatgtccaaagacaaaaggaaaagggtgtcccagctccaggagagagaaagagagaattcaccatccctctgcctttgtgctctatccaggccctcagccaagtggatggtgcccacccacagtgagtgagggcaggtcttccttactgagttcactgactccaatgccagtctcttcgggaaacaccctgacagtcatacccagatacaaggctttaccagctatgagggtgtctcttaatccaggcaaattgacacctaaaaaaccacagcacccttgtcaaagatcaactgactgtaaatgtgagggtttacttccagactgtcaaatctaatccactggtgtaagtgtatctttatgccagttccacactcttcagattacagtaactttgtagtaaattttcttttttaaaaaatgtgcataatcatagggtacaagtccaattttgctattctgatatattgcattgtggtaaagtcaaggccttcagtgcattcgtcactggagcaaggcacactgtacccaccatatagtaagttttcggataaggaaatgtgagtcctggccaggcgcggtggctcacgcctgtaatcccagaactttgggaggct

SEQ ID NO: 308820 - DNA, 1000 bp, Homo Sapiens
gatcccgcaatatagtcccagctacttgggatgctgaagcatctgtagagggagagctgccccaaatcataaatcaaaaataaaagccaattacatcaataactaaattagttgtaattttgtcttatcacacatgttcacaggaagtaatggccagtggagtctctcaggctgcatcattctcaccctgaccctcctgcctttctctttcacttacaaggacccttatgatgacactgggagccacccagataagtcagaataagctttccttctcaagatactcaacttcatcacctttgaacagtgtttttgccaagaaaagtaaatgcatgtgttccaagagttaggatgtggatttttttttttttttttgagacagtttcactcatgttgccccagctggagtgcagtggcacaatctgggctcactgcaatctccgcctcccaggttcaaatgattctcctgcctcagcctcccaagtagctggcattacagttgcccaccgccacgcccagctaatttttgcatttttagtagaaatgtggtttcaccatgttggccaggatggtctcgaactcctgaccttgtgatccacccgtatcagcctcccaaagtgctaggattacaggcatgtgcccctgcacccggcctggatgtggacatttttaagaggccattattctgcctcatatgggtcactttcataaacatcacccacaacaaaaatgttttgccttccttccacgtctcacttttctgtctgcacaaaccacagtgaagcacactagctctgctatgaagtggctggatgaccctgggccactcatttgacctccctcagcctctttcctcatctgcagtataaggctgactcttactgcatcagaaaatgacagtggaagagtaaattaacatgtgtaagacattagtcacagagcctggtacctgatgagcccttggtaaacattcctttcagtcctttcctttcaccttccc

SEQ ID NO: 308821 - DNA, 1000 bp, Homo Sapiens
gtgcacatccagcagcgagactgcagccactctcagcaagcttcagagggggtggggctgggtcaagtcgggacccagagtctgactcttggctctggagccaccttcctgagtgactcccctctctggttatgtgaaccttgattccctctgcagagcaggtttgcccctctgaggttcggactacactcctatatgtagcccccagaaggcaccaggagcttcaggctggctccagggctgtggctgcatccatctcaggtacagggacaatggcttccccagcaaggcctccaggcttaatttcctacataaccccagcatcccccaactccagaggcctttctgtggaagtgtggaagtaggaaatctaaaggctcttgaggggctgacaagtgtttaattttcacaatggagttcagagaagactgcacgagtttgtgtttgcacaaggtatctggctcaagctgccccatgcctgggtttcatagctaaaggggtgtgggcccacacgtgcccatttctgggtgtatgtgtgctgctgtgattggttgtacatacaggtgcctggtagaggggaggatgttttccatgcagatgcatctattgagtcctcttacctgctttatgaaaggctccaggcctctgaaggtgactctgatactggagaagctccctactccaggtgcagtgcctctgggccctagaggctgattcaacctaaaccagtggggttggcacaagcgagaacattctgctggactcaggttggcgagccttcagagagcaggtggagttcatggctttagcactgtggcctgagtctgcagccctggccagtttccctgtactgtgggagtttttctgaccttgcatagagaaaccaaatcttagtcctccagaccccactgtgaggccagccccatccatctgagcctgcgtagaacactcctagtggccaggctggggtgggaacatgaaatgtccaggccctggccct

SEQ ID NO: 308822 - DNA, 1000 bp, Homo Sapiens; identical to SEQ ID NO: 120003

SEQ ID NO: 308823 - DNA, 1000 bp, Homo Sapiens
gatccctactacactgtggatgaaccttgaatgcatgatactgaatgaaagacgtcagatgcaaaaggtcacatagtgtactgtccttttatacgaaatttccagaacaggccaatctgaagagatgcatagcggattggtggctttcagcagctgtggggaggtgggactgaggagcgactgctaatcagtatggggtttcctcccgggatggtgaaaatgttccggacctagatactgacgaaggtagcacgacactgtgagtgcactaaatgctattgaattggacactttgaaatggtgaatttcgtggtatgtgaattctacctcaatcaaaaaaatttgctattttatctcacatacattttttttctgtccaggttgttcatataataatatgctgtgagcatctttccatgacattaaatcatcttaggaaacattattttgtggtcctcaaaatgtgtgtgttaagtgttcaaatcagtcttaatttaaaaaaagacatcatattagaaaataaaagtgttttgtctcactttgtaagaattagcttcatatacattgactattagtaacaaattgagttattcttcatcaagtaacttttggggtagagatctcattttcacagcaatagatgcacaaatattcatgtaagatacaggtgtggttagacacctttcatagaacagttatgatctggaaattccacagacactgaatattttggtcgtattaacagaagtagatcactgagaagggagaaggtgacttttcagctcccccaggtaaatgctgatttcatcctcacatcgatcttacagattgtagatgaactcacttgttcaaggtcactcagtgaagggtggagtcaggggtgaatctgagcagttggcatcagaggtcatgccttatcgtatcaaggacatgattttcaaagcgagtctcagccctaggcacatcagattacctgggaacccctacagactctagactg

SEQ ID NO: 308824 - DNA, 502 bp, Homo Sapiens
  misc_feature (3)..(3): n is a, c, g, or t
  misc_feature (46)..(46): n is a, c, g, or t
  misc_feature (268)..(268): n is a, c, g, or t
  misc_feature (496)..(496): n is a, c, g, or t
ccntaagacagttttgactagtgaccttgaagtctcttctgactgngaaattattgacttctatataaatcaggaactctttattctattcttactagctgaccttcagaaaagacatggcctgccttcattgatcaatcccttaaagaaggaagagtaaaatgagaggctactgtttctgcatgtcattgtccaaagaaatgttaacttaaaagaggtggaacatctactaggagcagaaataaggtaaaccaggacttctgaattntgaaagtgtggtatgtactcctaagggagttaaactgtccgtctatctacctagtgagtagaatgggttacaatcacaaaacatcaaccccagtccctatcattctgcttacaggggcttagccaggcatttacattttaaaaatttgaatgcacttaggcagggcttttctagagactcagctcccccatcaattgtccaaaatgcctaacttcagctcccaactcntgtggg

SEQ ID NO: 308825 - DNA, 311 bp, Homo Sapiens
agagttgattcagaaattaacaatgtgaatattatataaaatcagataataatgtagtatgtaaaatatgcatggtggaaggagtaaactgtgtagattattctggccctgcaaaacacagaagtgtctcaatttctctttttccaccgtgatttttatctattgtgttattttgatatttgtacatttactgggatctggcaggatgagttgcacatgggtagcatttatattaactaaatttggttttcattttagaaacaaattcctcctttcttctttttttctgctgccaaagcccaataggctta

SEQ ID NO: 308826 - DNA, 376 bp, Homo Sapiens
  misc_feature (181)..(181): n is a, c, g, or t
  misc_feature (289)..(289): n is a, c, g, or t
acaaccccagcttcatctgaaactttaaaaaagaatgccttgattttagattgtgggttcgtaatctgcatgattatattataacattcaaaatgaaacttaaggaccagaatattcctaatggaaatttccccagtaaacctgccagaagttcagaggagaaaaattaaccaagtacaanacatagtgggagcatagtacttccgtaattttctctaataataattttagtacctcaacctaagcattatactacctgcttacgcacgcactgcttatgcagctaatntgttataaagtgttttgactaatttaacagttcttccttttataatctaccctcttgagtttattcaaggatccatttaatattcca

SEQ ID NO: 308827 - DNA, 1000 bp, Homo Sapiens
agaggacccctctgcctaagatgcatcacataccaggccgattccaacctccaggcctctcccctggcaggattcttctctgggtttccttgtcctttccttctcatccgtctacccttcctagtttgacctggctgagccctggtgaaatctctgcctctcttcctctctgggtccaagcacccctcacacccgctctctcccctttcctccatctctgtccagtgccctccccctcccccctcctccactctgcctccagctttttttggctgctgtctcttcctcctcctcctcctcctccctccttccctgacgctgaataatcaggcctggctgtcctggtttctggaaatacccgtgtgtgggcagtggctcagggctagaacaggggatggatggatgggggcccctgggcagccccagacccccagtgcaaagacaacaaaatccagggatgtggtccatgcctgcctcctgctggggaggggagggcaggaggtttattgagcagttggggaggggtgggaattcagagggcgtggacgcaggccatctcgtctcccaagtcctcctcatcgaagcgggagaggatggactcctcgtcgctatagagagagctggttccctgtgccagcaggtcactggcagcattgtccatctcatccagcgtcaggcgacacgcatctgcaatctcctgcttggccagggccacgaaacgtgggtctcgagcaaagaggcccagaccctctgagataagcacctgggggcacaggtgggatcagtgttgacggacggcacagtgtgcacagaaggttcagtgtggataaatgacgtgcccatgagggcatgtagggaagtcagtgggggacaggggtgagcagaggtcgtagggcaaagggatatctacatgcacaacacaggacctggggactcctttccgtcctcctccagtacccacctcctccccttctcccccatccgtcttgtctatatgccc

SEQ ID NO: 308828 - DNA, 1000 bp, Homo Sapiens
gatcatagctcaccacagccttgaactcctggcctcgagcaatcctcctgcctcagcctcccttgccttttctttacttgcggggcttcccacggttccatcctgggctgcttctgtgctgtcttggcctgtccttaacggtgaaagcagaggcttctgactctgagctccgactgtttcctgccaatgcccatgtgtctgtctttcgctggatagagcgccccctgaggggagggctgggcaggatctatctttgtgtctccagggccctgcacaggtccttcaggaaagttggggccctggggcccagtgagcaaggagaccgagaagaccctgtttgaagcaggagaggacagtgttcagaactcccatgcaaagcgcctcatgtcctaagtggacagatccttgaacctggggagggaggttcatatttacattgacagaggtggaagctcagaagggtgaagtcacttgccctaagttgcacagctaggaagtgacagagccaggacttgagctcacatctgttggacccacaggcttaatcctggcatgctgagcctgcgttccttgcttctggggggctacgtggagttggggtggaccccagaggctaccgagggcaaacaggcagttgaagacctggccactagggttcgtctgtccctgaggtgtcactcatccaccctgtccccatgccactttgctcctggcttttctcccggcccctttccttgctcagatcctggaatccttgtagttagttaattctggcaacttggtttcttccccctcccttttgcaggtatttagagaattacctggccaacctctttgcaggagcctgggagcctcagcccgagggaccgctgcccctggacatcccccaggcttccccgcagcaggtgaattgcctctcttttgtgtctgaggaccctaccctctccctgaggggagagggccccctgaccctctccctgagtcagtactggggccttaa

SEQ ID NO: 308829 - DNA, 1000 bp, Homo Sapiens; identical to SEQ ID NO: 120004

SEQ ID NO: 308830 - DNA, 1000 bp, Homo Sapiens
gaagcttgaatatagggagatggaaagatattagacaaatattaaagaaaatctgggccaggtgtggtggctcacacctgcaatcccagcactttgggaggcccaaggtgggaagattacttgaggcaaggggtttgagaccagcccgggcaacatagtgaaactctgtctctttaaaaaagaaagaaaagaaaagaaagaaagaaaagaaaatctcagtgagtgatggtcagaatagaattcaacataacaagctcattattaaaatatttgatctcactgtgtacaattctgaagacactcattcatgtacttcattaaatatttctagtttgctaaaaatagaattacccttcaacccagcaatcccattactgggtatctaccaaaaggaaaaaaaaaatcattctatgaaaagatgcctgcacttgtatgttcatcacagaactatttacagtagcaaagacatggaatcaacccaggtgcccatcaacagtggactggataaagaaagtgtggtacacggacgccatggaatactatgcagccataaaaaaacatgaaatcctgtcctttgcagtaacgtggatgcagctggaggtcattatcctaagtgaatcaacacagaaacaaaaccaaattccccatgttctaacttataagtgggaactaaacattgggtacacaggggtgaaaagacgggatcaatagatgctgggaatccaaaagcgggaaggaagggaggaaaggaagtgttgaaaaactatctattgggaactatgctcactgtttgggtgatgggatcaatagaagcccaaaccccagcgccacccaatattcccctgaaacagtactggccatgtgctccttaaagctaaaattaaaaacaaacaaaaaacagaaagaaaaaagtatccccaggtagctatgttgtaattttatttcatgacagcaccatcttctctttgcctgcgcctgggcctcctagtgtgctgcttac

SEQ ID NO: 308831 - DNA, 1000 bp, Homo Sapiens
  misc_feature (910)..(910): n is a, c, g, or t
aagcttctaaaaattagaaataaagccaagttccttttgccaccaagtctatactttccttctctctaataagtctcacgtctcagatataaagtgactattaaaggacttaatactgaaattatttggaatataattgtagggcaaggctataataaagaccaaaagcagtatagtttaatgtattttaatagcaaacttacaggaacagcacagaagacagacaacattaaaaacatgtacttgcatgtaggacaactcagttagaaaagtatagtgaatggatggaatctactgtatgataaaaatgctacaaacaccatttagttgccatcaataagaaatttacttgttttaaaaaaatccaaatgctggcattgtccagaaaaatttaacaggtttatttataattattataaagttgaaccgctgaaacttgttcactgaaacattttaacttgcattaatgctttacgtctccgcatttatattaaaaattcacacacaaatgaaaatggaaaaactgccaatacctgatttctgtcccctatttttccactcgcaatcatatacttaggtacctttgaccccatggaaaaaaaatatctaacgttcagaactaccaataacaggaagaagagaaattttttttttttttttgagaatgaaatgtttcccatcatagtggattcttaagcacgttctccacgtatgcggcgtgctagctggatgtcttttggcataattgttacacgtttggcatggatagcacacaggttggtgtcttcaaaaaggccaaccagataggcctcacttgcctcctgcaaaaggaatgaaggaaaaaattactgatgatgttatttccaatagttaagacccaactatacgaattaaaacaaaaaggtttttnaaccctttaaaaaatgactgggcaagatgctgacaattttaccaaatgcttacattttacaacctgtgggacaaagctcaaaagcagctt

SEQ ID NO: 308832 - DNA, 1000 bp, Homo Sapiens
ggatctaggcaaagaatatatgactaagcaatcaaagcagaggcaacaaaaacaaaaatggccaatgagacttaattaaactaaaaagtttctgcacagcaaaagaaataatcaacatagtgaattggtaacctattgaatgggagaaaatatttgtaaactattcatctgactggggactaacatctagaatatccaaggaactcaaacagtaaacaggaaaacccaaataatcccattaaaaagtggataaaggacatgaatagacatttctcaggagaagacatacaaatggccaacaggtatatgaaaaaatgctgtacatcactaattatcagggaaatgcaaatcaaaaccacaatatcattttaacctagtcagattggctattatcaaaaagacaaaaaataacagatattgggttggcgaggcatgatggccaaataggaagagctccggtctgctgttcccagtgagaccaaggcagaaggtgggtgatttctgcattcccaactgaggtacccagttcatctcactgggacttgttaggcagtgggttcagcccatggagggtgagcagaagcagggtggggcgtcatctcacccgggaagtgcaaaaagctgggagacatccttctcctagccaagggaagccatgagggactgtgctacttggcctggatactatgcttttcccacggtttttgcaatctgcagatgaggagataccctcatgtgcctacaccaccagagcactgggtttcaagcacaaaacagggcggctgtttgggcagacactgagttagcagcagcagttttttttcataccccagtgacgcctgggaaccccagcaagacagaaccgttcactcacctggaaagggggctgaagacagggagccaagtggtctcgctcagtgggtcccaattccacggagcccagcaagctaagaactactggcttgaaattctaactgccagcacagcagtctgaagtcga

SEQ ID NO: 308833 - DNA, 1000 bp, Homo Sapiens
  misc_feature (336)..(336): n is a, c, g, or t
  misc_feature (603)..(603): n is a, c, g, or t
agagattctggtatgttgtgtctttgttctcattgggtttcaaagaagttatttatttctgccttaattttgttatatttattcagtagtcattcaggagtaggttgttcagtttacgtgtagttttgtagttttgaatgagtttgtttttttaatagtttaatatattttaatagcatacttacaggaacagcacagcagacagacaacattaaaaacatgtacttgcctgggtgcagtggctcactcctgtaatcccagcactttgggaggctgaggtggcaggatcacgttggtaggagatggagccatcctggccaacacggggaaacccanctgtaataaaatacaaaaattagccaggtgtggtggcacatgccttagtcacagctactctggaggctgaggcaggagaatcgcttgaacctaggaggtggaggtagcagtgagccaagatcttgccactgcactccagcctgggcgacagagcaagactccatctccaaaaaaaaaaaaaaaaaaaaaaagaaacaaacaaacacgtacttgcatgtaggacaactcagttagaaaaacatagtgaatggatgaatctactgtgtnataaaaatgctacaaacaccatttagttgctgtcaataagaaatttacttgtttttaaaaaaatgctaatgctggcattgtctagaaaaatttaacaggtttatttataattattataaagttgaactgctgaaacctgttcactgaaacattttaacttgcattaatgctttacatgtccacatttataaaaaaattcacacacaaatgaaaatggaaaaagtgccactacctgatttgtctaccctattttgccaggcaatcatacacttaggtacmtttgaccccatggaaaaaaaatatctaaccttcataaccaccaataacaggaagaagaggcatttttttttttttttttttttttttctgagatggagtctcacctatcacccaggct

SEQ ID NO: 308834 - DNA, 1000 bp, Homo Sapiens
gatctcattctttttatggctgaatagtattccactgtgtacaattactacctttttttatgcattcatctgttgatggacacttatggtgcttccacattttggctattgtgaacagtgctgcaaaaaacatgggagtgcatatatttctttgacatgctggtttcctttgagtttatagccagcagtgggattgctagatcatatggtccctctatttttagttttttttgtggaacctctaaaccgttcttcatagtggttgtactaatttacattcccaccaacagtttaggagggttctgttttctccacaaccttgtcagcatttatagttgcctgtcttttggatatatgcccttttaactggaatgagatggtatttcatagtagttttgatttgcatttatctgataatcagtgatattgagaaccattttatatgcctgtttaccatttgtatgtcttttgagaaatgcctattcatatcgtttgcttatttctgatcagattattagatttttccctatagagttgtttgagctccttatatattctggttattaaacacttgtcatatgtgttatttgcaaatattttctcccattctgtgggttgtctcttcatattgttgtttgtttcctttgctgtgcagaagctttttaactcgatatgatcccatttgtccatttttgctttggttgcttgttcttgtggggtactactcaagaaatttttgcccaggccattgccctggagagtttctccagtgtattcttgcagtagtttcacaatttgaggtcttatatttaagaatttactccacttttatttgatttttgtatatggttagagacagtggtctagttttgtttttctgcttatggatatctgtttttcccagcatcatttattgaagagactgtcgtttcccagtgtatgttcttgccccttttgtagaaaatgagtgcagtgtaggtgtgtggatttgtttattggt

SEQ ID NO: 308835 - DNA, 1000 bp, Homo Sapiens
ctcctggaactgaaatgcttagtactatccctaacaacaaccatgggatttttgaagttatcccaaattcaatgcaaagcacttttatgtatcttccagttgtagattggaatagcaaaagtgaatgctatgaccaaaatttttgccctcctaaataaagacgtttccttctagagagcaaatctatcataaaatgtcaaaactagaagagaataaaatgaaaggaaaaaacctagaaaaatatcctaaaatatcaaatgcagtcatttctaaatataagccataattatagctttacctattgttcttattgttcctatgctgcttctacaatgttacatcaactatacttagctttactctcccaaaatcttggtgatgaagccttctgagtgtgctttccaatgtgccagaaccagaagggcattccaaggcttccccacatttcctccatttacggagacagctgtttcactaacttgcagcacttgtaaatgctttgaaagctgatcacatattatattcttgacttaatactttggtaagcctggatatctatctttctataaacctcacctaatctttgatgttactataaccttatctttgatttaacccatacacatttactcatcataatcttgatttaaactcatgctacgaaactgtagcacaaaagacatttctctttagtgtttcaggaaaatcagctcatggaatgctgccaaccaaagtatagtagattctttaaacaatgtaatgctttctatctgcagactcccacagacctcacatccagggctcccatccttcccaggttctgccaaggatgttggggtctgttgcctggtccatcaggcacttcacttgagtctcttctgaaagcccactctctggttcttgggcacgaatgttgtgatctttgcttcctcgtgccacagccacatagtctctgaaggcaggggccttctcatgacccaggagtagctcatcactggaa

SEQ ID NO: 308836 - DNA, 1000 bp, Homo Sapiens
agaactcagccagtcactagatgctttcctgcttctatctgttatctccctggatcttgtctgattctttcaggcaggcttttgggtatatttctcatcattgcccttaggtcccatgggccaggcctgccacagggtaggcaagtggctgactgacttcctctactggtccaggcacaggggattccagctagggacagtgttcatcttctggaacctagctcagtcttagacaaacaaggtagaggcctgggcttcagtttaattcacgccaaatttcagcgcgggcattctttggagtcacacacaacaaaagcggatgagaaaaggcacacagccttccccgtggtgttacggtgagcacgccaggcattttaatccgcattctcatctcagcctcacgactgccccgtcacatagataacagtattcctgcccaccctgctccccgcatctccctactccaccccacatgcgtgtgacagatgaggggactgaggtggaacaagtttcagcaggaaggcagatccagggctagagttcgagtctcccatctcctcaattaagactctcgtttccaggcctcttcagcccacccagcttctgctcctgtggccctgtgccaacggggcaggatttgggagctaggccctcagctcagtgggtgtatctggctgccggcaggggtgagacacctggaaggcctccaagaccagcagcctcttgttgatggagctgatggtagggtagggggtgagatccaccttgaatctgtagtagagaaacacctgctaagctaaggttttcagggacacagggagactgccctgatgcagcagggggagcagagaggcagggctggatgaggtcgagggagctgtccagggaaggacgatggggcagcccttattcacaggggatgggtaggtcttgtgcagtatcatttggcatctgttacctactgttcctatttctttgtgaacctgctatgtgtaaggcc

SEQ ID NO: 308837 - DNA, 1000 bp, Homo Sapiens; identical to SEQ ID NO: 120005

SEQ ID NO: 308838 - DNA, 1000 bp, Homo Sapiens
ccagctgttagtgtgaggctcttcttttggccttagggagcagctgttagaaaactcacatcctgatgcaagagtgcccatacctccctctgcagctctcaaacttgctcaggatggaaaacaagcggcagggataggggtaggagggctgtgttccaagcacaccaaaatgaaaaaagcaatccgttaagctttaaatatataattgtaaactaaatcatctgccatcttctctcggcttccagtgtagaggttacccattatttttgctaactggcaaagtaattaataaattcaagacttacctagcgtaggagcatacttcgagaaacactggtcatgaaaaaatctccacaatgaacataatgctcaggagattggtattgatgtgttttgctcttcagtgtgagatgtgccccttagatttaatcctgtatcgtctcctgaaatcaaacatcctgtcctgccacatgcatctcattgctcagcagatcacccaggcagagagcaggcttaaagatccttcactctcttctgtccagcctgttccaccctggagagggctgagcatacaggtgaccacaggtcatttcagagaaaaactcaaactgattctctagtatctgggccttggttctttcttagtgctcacacatacctttttacctctaattacagcaaaagtgtagtcaataattttctgtaaattactgactcacagtaatttctaaagaggccatcctcagctataccaagctgtacaaattcccctctccaattcagctcacacagcttaaatgcttgcaatggctgtttggttgtggctgcccctcttctccttaactagccctcccactctcactatccaaaagatgtctagttgagatgataaatctgaactaatcaaaccctctaagagagctcattttaatgtaatagaatactgctatcaatcaatgttgtagaatttgagaataaatggtcatgtgagtcctagcat

SEQ ID NO: 308839 - DNA, 1000 bp, Homo Sapiens
aatgcagattgtggagaagtgatgggtagtacctagtgcagatggcagaggaaataactccaggacttttgtaaaaacagggactaaagagttggagcagtagctggaagaaagatgtgaagtaacagggcttctttttttaatgggtgatattactgtatatctgtatgctgattgaagtgttccaatagaaaggaaaaaataaacatggataagcattaattagaggagtaaaatccttaagtaggagagagaaaatgggacctagcacataaagagaggggtttgtccttagatgttcatccattgtaacctgacagaaggcagattctgtggttgccgatgctggtagaatgatggattcgggagtggaaagattaaaaaaaaatgatcttttgatcttttccattttctcagtgaaataaggagccaagttatcagctaagggtgaggagaaggaaggtggcttgagaaaggttgagaagtgaaatagccactttagagagtaagggagtgaacaaactagagaaatataataggattgtcgggcagagctggaggcccatgtaaagtttgtgtttatgaatttaaaatgggacctattggcatggttgtgagtttctcttttttttccagccacgttcagttccttaggtgcaggcataaggaaggcagatggtgccagggatgagtttggccagcaaacactaccaaaggagagaagagcaagggagttgaatatatgcaaaggaacgacgtcaatgatgggtcatggaattgtagtggatacagaaaaaattttttggcactatgtaaacccagcatcaaggatgcaaattcagtcctattgacctggaagtccatgcttacttctgtatggcaatgcttctcaaacttgaggatgcgcaagaactatctggaaactttgtcataaatgcagaactctgggccattcttaacaattctggggcacaacacttgttctttgaaataagcagat

SEQ ID NO: 308840 - DNA, 1000 bp, Homo Sapiens; identical to SEQ ID NO: 120006

SEQ ID NO: 308841 - DNA, 295 bp, Homo Sapiens
aaaacgcagtcttgctctgtcacccaggctggacagcaatggtgtgatcctggctcactgcaacctccgcctcccagattcaagcgattctcttgcctcagcctcccaggaagctgggatcacaggtgcccaccaccacacccggctattttttgtatttttagtaaaggcggggtttcaccgtgttggccaggctggtctcgaactcctgacctcaggtgatccaccagccttggcctcccaaagtgctgggattacaggcatgtgccaccccacccggccgtaatggccgaat

SEQ ID NO: 308842 - DNA, 1000 bp, Homo Sapiens
aattcacccgaaacaaacataatctcaatgcagtttttagaaccatcgagtgaacagagtatccaatttctccagtcacagaggtgaggagtggaaaacagtcttgggatttggtgacacaggccaagttgccgtcctgactgattgtgcccccaccccactattgtcttctcagggcaccttgctccactctagacccgctcaccacttagtgttaagtgtccgcagaggcacagcctgcgtcctgctgagcgctcctgccctctgctacataaagcaccatcacaggaaaaaaaaaatcagaggctgagcctacaacctcctccgtggcatctttatttttctacatgggatgtgaacaacgtgaacatgggtcagaaaagtcagctgcacaaaaacacttcagccaattctaacacagagggagcatagacatggaggggctgggggttaggctgggggagaccagccttccctgctaagggctcgtggtccaagcccacaaccagagggtgctctgggtggtgtccaggaacatgcagtgccggctccggggaggagggacgagaagagaaaggggagtcacagaggaggctgcagatgagcacgagtttattggactctggcctcgcgctgctgcttgatgaagttgatgagcccattggtagaagcgtcgtgagaggtcacttgagcactgccatcaagctcaggctctattttcttagccagctgctttcccagctccactctgccaagaagggaagggaagggaagagtggtatgaggaaggctctaacgttgctactgaaatccctgagccgacacaaaggtattcccggccctcccctaagtgagcaactcacccccactggtcaaagctgttgatgtcccagatgatgccctgaacgaagatcttgtgctcatacatggctgcagaagtgacagacagggcacatcagggctccacaagcccattccaacctaccccaagccaggacct

SEQ ID NO: 308843 - DNA, 1000 bp, Homo Sapiens
cactgaagttctcctgaagaggaactgggcctgttgccctttctgtaccatttatttgctcccaatgtttatgataataaaggcaccgctgatggggacctccactctgtctgtgtctgaggaggaactggcgcttttgcagaggcttactctgggctctgagcttgaaccagtgtggtctgtgctcagggccctgtgtttctgaaccgagggtgaggatgttggggagttttcctttgagatccgtacgtggagggcagccatctcttggaagcctgggggccggggcatgcggtgcagaccctcctccctcaccttccacccctgccaccctgcagggaactgtggtcaccaagccctcatgtttgttcattgctctagcaaacgtttgctatgtgttcactctgtgtcaggcctgtgccaggggctaggaagtggaggggacaaaatgctgtgtggtaggagagaaagtacagagacctggtgaggaggcaggcccttccccaacaagaggggcctctgcatcctgcatcccagcagcctggcacaggggttcagaggccctcaagacagtggactccttctcattcatgttgcacatggctcctggagaagggagagcagatggctgggcccagaggacagggccagcactgagggaggggaaggagtgtatttccctagtagtcttgcctggagcttgaaccctgcgtctgactggtggactccctccctctcctcttccttctcaaatatggggagggggctggaagtggtgtaggacggtggggtctaatgtactcatggggcccctggtaacgttaggacctcaccatggtaagaagcagcaaaaatactgcttgtcctcatttctgtgatgaggagagggctgctcagaggggtgaagcgactcgtctgaggccttaaagaagtgggtggcagtgccaggctgcagccgaggtcatctggctcctgggctcttcccacaggatgactgggt

SEQ ID NO: 308844 - DNA, 1000 bp, Homo Sapiens
tatgatacacaataaagactccatttatttgttcctcctcccccaagtttagcaaaataactcagatcctgattttctttaacttgcaaaaaatgccatccttctgagttcagagaccttccgagccctggtgccagctttggtgcaggtccagttcatatgtgcttctgcttatagtctactgcctactgcaaggctggctcactgtatggttttatcaatataggcagtttgaattttttctgtgctatgtgaaagttcaattggaaaagaagaataaatgaagatttcttttaaaaaattagaggatgatagtaagttctcctggagcaagcttcatgtaggggttcatgactgtggttgattgcagctttttcagtaactccgtgatgtatatcagaaatgtgtggtagttttgaatggacaggtcaatcaatcttttggattcagcaataaatttttcatagtaatcagagagttggtctgaaaaatcttgcagtttatatctaaactgctggtggtaatcagaaattattttcttcgtcgcaatggcctggcttttaattatttcctgagcagtggcagaaagctctgcaatcttctctttcccttttccatctggatcggtaaggatgctaagatattcctgaatatttctgtgcagaaattgctcaacttgacttgagagttgggaagtaaagttagaggcactgacaatatattcagaatggaagtccttaagagcaactaacaggttcttgatcagactgactatcttttcttcaagttcataatatttcactgtccagccaactatacttggatcaaaatattcttcacgaagggccataatgtattgatggatctgctgtaactcttgagaagcttcctgaagctcgttttgaataaattcattgaacttatgaagattaaggcataggttttctttcaacaatttaaaaacatatgggatataatcattgaagattgtgttgatctc

SEQ ID NO: 308845 - DNA, 1000 bp, Homo Sapiens
ttgtttcttccaggcatgttcttaacattggcaaaatacacttttaaactgattgggagctgtctcagatacttttttggtttacgcacccaacctgccaggtgccacctggcctgctatatggggaagaagtaatctctattgctgatgtcataaggcctccacgggtccctggcatctggtcagccgtggctgggggtggtgtccattccaaggctgctgggggacactgaagggagatgagaggaacaagcactggggtggttctaggtctctctaggaccagccaccccaaagaacacaaccagtgcatcctgatcttatcttctttcagaccctgcaacttccacgtcttctttaacccagaaagcttgttgcatttgcagaatctctggggagaatattatcatcatctttattagtagtaggtgtttgcatggaggtggtctcagctggaggactcctggagtctgcccaaaggttcccatgacctctgggctccacttacttcacaagccttgccccagctcctcctgggcctgaagctgtgtctggtgcctcatgcctttccaggtgttgtgaatgacacactgatgttggagatccttggccatccatgttatgaacatttttgactatttagccaggtatcaaagctcaaaccatagtctgtagaaatataagttccaggagtgggggtcttgctaggtgacgttgagccagcaggctttctggccacagcaatgactgtgatgttgacaggtgggtcggactgcaggattccataaccctctaatatttgggttttgctgaacttgctcccaatactgttggtgacacacagggacactgtatagaaagagtaatctccctctggcactgccaactggcagaacttctgggactcctgagaatactgacacggctcctggaagagttctgcctgacagttctgaaactttctcaccaatagcacagctttgactcagaaccttgactc

SEQ ID NO: 308846 - DNA, 1000 bp, Homo Sapiens
tgaatcaatttctgtaccctcatccaagacaatataaaggtcttagagtagttgaattctaatctctctctactgacatacacatctagcactgtctttctatatccctcaaagtagtcatccctggattcccaggacctaacacagtgcctggcacatggtacatgcacagcaaattcttggtggatgaatggatccttagcatttgcttattattacacttaaacatatgttatgttccctttttttggtattcatatttgttttattcaatagcctgtggttttttccaaacttttttttgattttttgtttttgtttttagttctggggtacatgtgcaggatgtacagctttgttacataggtaaacatgggccataatggtttactgcacctatcaacccatcacctaggtattaagcccagcatgcattaaccatccttcctaatactctgcctccccttaaccccacccctcaacaggccccagtgtgtgttgttcccatatgccatgttcttatagacaattttatattctttgaaggattttctttttttcatttttattttaagttctggggtacatgtgtaggctgggcaggtttgttacataggtaaacatgtgccatgctggtttgctgcacagatcatcccatcacctagatattaagcccagcatgcaatttttcctatttttcctactatttttcctactgctatttttcctactgctctccgccccctacctcaccccccgacctgctccagtgtgtgttgttcccctccctgtgtccatgtgttctcgttgttcagctcccacttgttaagtgagaacatgtggtgtttggttttctgttcctgcattagtttgctgaggataatggcttccagcttcatccatgtgcaaaggacatgatctcgttcctttttaaggctgccaacaaaggattttcattctcaccaacccaaacctttcaaagtaagaagtggacctatta

SEQ ID NO: 308847 - DNA, 1000 bp, Homo Sapiens
gatcacttctcgaaaggaagcctccttggtccccaggagtagatcaggttcctactttgtccctggcatcatgcatggcacataataggtattccatgaacatttcttgcattgaatgagtgggtgggtaggtggattgaatggatggactgatggatgatggattggggatcagagcctaaggaagtattcagacctggatccttgcaggtcctcagctcaggaggtaggaatggtcattgagggctttgacacactagataaaccaaatagtgccagagggtttaaaggaagaagctgacagtcttcctaactcttaaccccagccctgcttcctagaggcaaacacttttaacttcctgttttccatccttttgaaaagcagttccaggaattgctttgagtaagcaaactttcagatttgccattgacggaccaatgcaagacaaatgcaagctcgtgcagagggaaaaacaagcatggtcttttaaatcagtaaggatgaaaatcagaatcccagctctgccaattccggactgtgtgaccttgagcagtagtcctcttgggacaaccaaattttcttatttgcaaaatgcagcagttagtctaagtcccttccagttctaggtatctagttctgtctctctctcttccaaccccctttcctcctcacctaggaatgctttgaagaggacccagggcgcaagtggatggacagcttgctcagtaacttggggtgccagtctgcctctcatgtagggcccttcatcgatagctaccgctgcttccaaccaaagcaggagggggccttcacctgctggtcagcagtcactggcgcccgccatctcaactatggctcccggcttgactatgtgctgggggacaggaccctggtcatagacacctttcaggcctctttcctgctgcctgaggtgatgggctctgaccactgccctgtgggtgcagtcttgagtgtgtcctctgtgcctgcaaaacagtg

SEQ ID NO: 308848 - DNA, 1000 bp, Homo Sapiens
gtatataaacttttttttttttttttaagaaaagcttgtccaagggcattcaaatttaatggcttttatataatacttggtgtagtgcctcgtggctgcctctgtgagccagaaataaaggaagctcatggattccccaaaaatgaaatgccactttttccctcatcatggatgactttgttaagatgaaccccttttacaggaaaggggttacacaggctgctgataccagtctagagagggcacccaccagccaaggctgtgttctaacttaggtgtcataccatcggccagaagaaccatgtagccatagaggctgtgaagctaactagtttatctgtaatttggtcctagttgcttcgcttattttatgtcgtttttttttttttcttagataaatctgttcagataagctccttatgaatccttcagatcgatgttcttgaggaaaacagtcaagctaaacagcaatgatgacttttatggtaaaggatgagctgatcactagctaagctacttagtcaccatcctgggagatgagctcacaggcaccaaggctttgcttcctgtggcctgctagttacagtgaaccagctccatggattgacaagggtacacaggatgacagcagagcaaaggagtttgccaagtatttgttctgtcattaagtattcaaaagaacatatatttttcttcatggaacataactttctaagaatgaaatttggggacttgaatgattcaaggtcaaatattaaacattagctccttcaccaatacctgtcattgtcattagaaaggaaggcctcttgtttacgctactgtgattcacagtgtcctttgtcggtcaagaggccccctctgtggcttggctttagctgtcagatggaagcctcaaacttttgcactttaggtcatctagtgtcttccagtgtttgtagttgtcagccaaatgttgcatcagggctggcagatgtgcaaaggctgcaaagacagaaaa

SEQ ID NO: 308849 - DNA, 1000 bp, Homo Sapiens
gagttattgtgaggtgtggttgtttaaaagtgtgtagtacctccccgccactctctcttcctcctgctctggccatgtgaagatgtgcccgcttccccttcaccttctgccataattgtaagtttcctgaggcctccctatccatgcttcctgtacagcctgtggaactgtgaggcaatgaaacctcttttctttataagttacccggtctcaggtatttctttatagcagtgaacaaatggactaatatagtccttaacaatgataatagtgtacgaatcctcaaagcctgtgaatccgttatcttatgtggcaaaaaggacttcgcagttgtgattaaattgaggatcttgacattgggagattccactggactatctggggaagcccaatgtaatgaggagggccttatgagcgggaggcaggagagtctatcagaaaagatgtgacaatggaagaggagattggagtggtgctgccataagcaaaggaatgcaggcctttgaatgctgcaaaaggcaacagatggagtcttccctggagtctccagaatgaacacaggtctgctgaccacttgattttagcattgcaagactcatttcagaattctgacctccagaactgaaaggtcatgcctttatgctgctttaaactactacatacatggtaatttgttacagcagccataggtatgtaatacagaattggggtggctcctgagaatctgtgtttctaatagagtctcaggcgatgctaatgcttcaggtccagggatcactctttgaggactgttggcttttagggaagcacaccatcctcaatgctcttccaaactttggactataagctaaataaatcgcttgttgtctcaacaacactggaatcatgcaaatagaagtgttggcttcaacaacacttatccccagaaagtgcctactagggaaatcaacacttagactgatttttttttctttccattctgctctgaagcaatggtgga

SEQ ID NO: 308850 - DNA, 1000 bp, Homo Sapiens
atcagagaagggcttctgggcaggctgagcactgggggtgtgcaacatggtaactctgaataagagaaaccctgagttttactgggcaaagaaagaacaagtggtaggtatgatttctgaacctggaaatagcgaaaatgaaggaaattccaaaagcgcgtatttccaaataatgacaggccagcaagaggacaccaaacctctagaaagaggtattctttcttccagctactgatggctttggcatcccacaggcgcattcctttggccttcaggatcttagatgcggatgtggagagtcaagaggtaggctgactctgagtcttcagctaaattctttggaaattagtttaaaaaaataaatttataacatttaatttctatgtggatttgctcctctttgaacaaagcagagcccaggagtttctggatgaatacatgttctggtcttgttacaggttctggtaaatcagatggagaaatgttgttgcagaaatgtcagcaaactttacagcagtagttcacacatgcagctactatacattcattcattgctattttcctaagaaatggagcaacctaggagcttatgctacagtagattccaatgaaccataatgactacttcaagaacaaagaagcacatacaaaggtgtgatatcttcctgttggtttgagttttcaaacctgaaattctttaaaatacatttctgggattttatttaaatattgatgcaacacacctaaaaagcagtgacttcttggtaaaatgtaatactgaaatggaaaattgtcttttcaaaaaaataagaagtgtggttggaaattaaataccttttaaaaaattaaaaataaacacactctcacagcttgggggtttgaatgaaccctgtaccaaggagttgagacaactctttctttgggtcacatactggaacccttagcattcaaaagctgctcagcaaagataatttcagcatttcagtggcatctttctctg

SEQ ID NO: 308851 - DNA, 1000 bp, Homo Sapiens
tagtttctattccctagcagagctttgaacttgaattgtgatagaagcattcaacattattatcagggggagtgggtagggaaagtccaaatctctgccagtcccaaatccatacagttgtcatttcattcaagagaattaaatcgtttattgattacacatgataatggatacacaagcttcattcccatctataattttatctggtaccattattcaatttagatatattgcataggatgtgccaacaatcacttttataaccattccatgattttgcttgggtaatcccttttaatggtgaacttcaggtcacaacagtaactatcagttcaactacaccaaggtttccgaagacaatggcttctccacccaagcaggttgtatataaattccaaatagaacctggcatcaccctgaaggaattctaacttcacactgttggggaaatttaccaagatggcttaagagtagactaactttacacagcacattaaaaaaaagacatttattcagcgtcacgatcagactgttacatttagcaatcaacagcatggggtgcaaaaaaaaaaatctacattaaaaccctttgttggaatgctttacactttccacagaacagaaactaaaataacctgttatacaattagtcacaaatacagtcctcgagttttttgcccatacacatgagtatttgtctaaaacatgtcttctttgtagcagctaggccctgccaccactgtgcttggctgagttcacaaatctgttgtaacctgtagcttccctgtcacttctctggctctcctctcctgctaagctttgtttcctgttgaacaatatggaatagagttgttaatctaaacatattaagactcaaggctacaatccaatatcaagtttgtttcccacaaattttgctgatctgaatattaactttatatccacaattactgcaattataatgttaactatgttgcactgctcagctacattagggtta

SEQ ID NO: 308852 - DNA, 1000 bp, Homo Sapiens
aatcaggacagtgggacatcagacccttcactcattatgactgcataactgacctcctgcttctttttaaccaaattatctcccttaaccctccataattcctgttttcccacatttcttccctgctatataaacccctaatttttgttggtcagggagatacatttgagaatggtgtcccatctcctcagctacagcacctgattaaagccttttccttggcaatacttgccttagtgattggctttctgtgtggtgagctgcaggatctacgctgaatccctggtatttcagtaacaaaacactctgcaaccttcactgctttggcttcttgtaacctgaaatcaaatttgtccacaacttctgagataacttgatataattctaggattcactttgtccaccactgcttcccagtttgagcttgcccagctcccaacccttcctagtgccaatgaactttctcaaagagccataggtaatattttccctttttcatgaaacactaactttttctttgttcttgccacatattgaagaccactgagttttcctgtatgccccatttgggaaatatttctgtgtaaataaaacattacatttagagattcatctctacattttatttagacgctcagtagtttactttaattctctgtattaaagacaattcctgcctagaatatctatagtggcttcttctctgttatataaagtccaactgaagccataaactagactcctcaggtgtcatgatctctgtctgtattaaattaggagaggcattgctatgtctgtgtagttggggctgaggaaagagaaaagaattagggtgcagaggtgacttcatgtccccttctaccaacaccatcagagtgtggctgcagtctggggaacaatctcagctgatggaggcatcaggaggagcagctggggcagcccagcctcacacatctgcttccctggggttttatgttcgggtgtgtaacactgtgggagg

SEQ ID NO: 308853 - DNA, 1000 bp, Homo Sapiens
  misc_feature (106)..(106): n is a, c, g, or t
  misc_feature (985)..(985): n is a, c, g, or t
actccatgtcattgaggtcttaggctctaatgtcgtgttttgagagaggccttccctaattacccaaagtaaccccttactcatctattgaattaccctgatattnttgtttatttatttgtttaatgtctgtccctcaactggagtatatgtttccatgatagtaagcaccttgtctgccttgttccatctagaaatctataagtgagcatggcacatggtaggttttcagtaaagttgactaaataacgacaaaaaaaatgaataaatcttagtttatttttaaaactacaataaaatatagggaaatagaattattaacatgaaaaataagtgattatgaaaaccagtagtaaatgtctacaatggtacagtggtttaacactggaggcaagcagagaattcttaaatatttaaaccaagatatgatcactttacttttttagtttacctgaagtatccacgttatcatgtccttctggccttctaactggggaattcctttgagtttttccaaaagcatttgtatattcatggctgaacttcccaatccttttttaaaacacaaaatcacacatcataaatacataaagtcatctcttggtatcctcagggaattggtttcaggacccctgtggacatcaaagtccactaatgctcaattcccttatgtaaaatggtgtagtatttgcataaaatctatacacatgcttctgtatgctttaaatcatctctagattacttataatgcctaatacaatgtaaatgctatgtaaatagttattaaataatattgtttatggaataatgacaagaaaaaaaagtctgtacatgttcagtacagtgacaaccatcctttttcctttttccccccgaaatattttccaactgcgaagggatgaacccctacatatggaaccccccatattgaaggtccattaagtcttccctaattatttccaattacaattcccaattaatgttntttacatttgaaaac

SEQ ID NO: 308854 - DNA, 1000 bp, Homo Sapiens; identical to SEQ ID NO: 120007

SEQ ID NO: 308855 - DNA, 1000 bp, Homo Sapiens
tgatcttacaattcactcactccactcacttatttgttcagacatttattgagcacttcttaagggccaggcatggtgtgaggcactgggatgtaacagtgattatgacaaagtccctcaaggagctcacagtctaatggtaaactacagagtaaactgaggcacagagtggtaaatgacttacccaatgaggtagaaacagctaggtatgtgaaaatgtgggagcagagctggagagagggcaaggtacaacttgtcctaagtaaaaccccttggactgactcaacagcaaggctgcatacacaaacattacaaaatctacttgcaaaaacctgaaaggagtttccaattatcaccatgactgaattcatgtttcacaatgaattcagctatttcctgatggcatttctatccttgcccccaaagccactgggcatgccaccagtctgctgggagacagcaattaggtagacagcttaaaaccaagaagtatctgactccaattttagcactgaaaaccatattaaaatactttaattaaatccacaaacataaatgtgtagcacatttatgatacttctacatgtagaagtttggaaaaagtctcttctaaccctcatccagaggattctaataagttatagataccaaagagattagagaatttgtctgtcactttccatatatacattattttggctgtacaagggtgaaaagtgtcactcagacatatttcgtaagtaatctcaacattatacagatatatacaaagacatcacatttaaattcgtgtgtacatctatgcaatgtacaacagtaactgcaaacgtgaaccagtgtaaggcaatttcttttgtgatatatgacatactccttgaagggaagggtagagtccacaaagaactgtccatttcagcctgactgtctgtcttcatgacactctgtgatgaagctacttcaggaggcaagatgtctatttcactgacaaaaagcagtgaat

SEQ ID NO: 308856 - DNA, 1000 bp, Homo Sapiens
aaaactagcatggcccctgcgcaagaatgacacgcaaattcgtgaagtgttccatatttaaaaaaaaaaatctactttcctggtaaatttcaagtatagagtacagtattgtcaaccatagtggcaaagctgtacaagagatcttcagacccattcctcctgaatacctgatagtttgtatcctttgatcaacatctcccaattccctcccccacactgtccctgtagttctagtgagttccccagactctgatgtctcaatttcattcagtcactttcctccagatacatctacccattcctactgcatcttagtatcctgagccttgggggcagtttctgtgccaagtggaaatgtggaaatgagatattacgaagaaaaatctttgcccacctagacagggatctgatgttttccaagatgacacatgattacatgttgaaatgataatattttgagtctacttgtataataaaataatattttggatctattaggttaatattttgggtctgttgggttaataatattttgggtccattgggttaacttaaattaattttatctgtttcttgttagctttttaatttggatactagcaagtttgaaagaatgcatgtggtttgcattatgtttctataggacagaacttacctgtagatgtaagggagtcacaacaaaattacaagcattgtttttggtggaaatgagaaaaatgattacaaatttacatggaaaagcaaatagccaataataataataatggcaatcttaaagaggaaggagaaattagaggattcaggctgccaaattttaaggggttctataaggccacataaagtgcagcatcctcatgagagtggacacagagagccactgagcagaaaagagtgtgtaaaatacatctgtgtacacacagtccttttatagttgacagaggctgccatgcggattaaggtggaatagaatgtcttctcagtaaataacattggaccagag

SEQ ID NO: 308857 - DNA, 1000 bp, Homo Sapiens
gagactctgtctcaaaaaaaaaaaaaaaaaaaaaaaaaaaagaagccctagatttcggttgtgttggttgtaaaaggagagacccagtaagtgggggttgtgccgcagattgctacccacaatggacgggtcactgagcaggtccggccaactgggcgttccctcgctggagggccagcacaccagactgcaggtggcgcgggtcagcaaggtaccaggggatgtgtcacacacacagcccacccccgtccagtcacgcacggacaccctgggcttccgagcaaacctgctcccacgtggtgtgaccacatggagccacagacacccagcaaggacacgcagcccgcacacccccggtactccagacacagtgacctgcaccagggctcgaggtttctctaggggaacccacctcttagaatcatccagaaacaagtcactcttcacctgtccagcaaaggcctgctgagaggtgcacagtgtctggagtccaagctgcgccaaggcggcaggacccccagcccagcccaggacccccagtagagccctcacctcagcgtggaggcctgagaacgtgaggaaggagctgtccagcacggacgagtccaggcagctgtcgatgtccagcacctgctgcccggcaggtgtggggctcgggctcccagccacctgcaggacgacagcagtggtcagcgggcggcagctcagacctgctcaggacctggatgagaagccacctcctcagcagacaggacagagcccggtgccatctgacagaatgtcctagaatgctggatatatgggacatctgcaccgtccgtgatggcagcccctcgcgacgtgtgccactgaacacttgacagcagactggtgcagctaaggaacagagttttcaatttcatttttttttttcttagatggagtctcgctctgtcacccaggctggagtgcactggcgcaatctcagctcactgcaacctccacctcccgcgttcaggcg

SEQ ID NO: 308858 - DNA, 227 bp, Homo Sapiens
tctgtgattatagttcttaacgaacggggaagtctgattaagttttctttcacttctaaatttcttattgttacgctactgtggcaaggttgaatcagcataaacataccaatgtgatccccaaactccagacatcagagcggacatcatatccttgtcgtgatgcgcttgggtctattctttcaggctggaacataaagacaagtgtaagttattaattgccttac

SEQ ID NO: 308859 - DNA, 1000 bp, Homo Sapiens
ttttttttttttttttttttttttttttgtgaaaaagctgcatgttttaatttaggaaatgagtagaagttcacaagcaacccagaataggtgccagcagtttgctccagtgggccacaccacagcagcagctcaggctctgcagaatcactgtgtccagtgcttcctgagatgttctttcagctgaggaatggaaggcagcagctgctggcactcatgacaacgaaggggcagcttcaagagctcaggcatcccatctcggacagttactctaccagcctcttgtaccatctcgatcacagcttgtgattctaggaagtattctgtattgaaagaattccaatgttttttgtttttaaggcaaggagaatcaaaatcctggctgatcacatgaagatgtacatggctcatactcggaatggcgtggtagcccaatcggaagcggagtttgctggacccagcaaaatctacaatcaccttttcccccacagtgtgcatatgcttaaggagttcaaggtgttccctggccacagccttcagactggaaatggaggtccacggtaagaccagccaatggtaacgggcctttgggtatttatcctttatcaccaccacctgctcatctttgtaaacctgcattttggggtcctgcatagaaatcttcaagccttgactccagtggcccagggattcctttttgataggtgcatcttttcccttctttaggggcacagagcattggccagagttgctcccaggttccagccctgtcccagcctcagcttcctgagcagcatccctttctatagaatcactgttgcctgatctctttctcttcctgtgtgtttccaggccagggttctttgcctcttcctcaaactctgctttaccttgacatatcccttgttacactctgctttcaactgtacttgctgtcgagaacatttcttatcagtgatcttggtctctgggccacgcccaatcacaactgcttccaaat

SEQ ID NO: 308860 - DNA, 1000 bp, Homo Sapiens
gatcagatggttatagatgtgtggtgttatttctgagggctccattctgttccattggtctatatatctgttttggtaccagtatcatgctgttttggttactgtagccttgtggtgtactttgaagtcaggtagcatccaattctgtgaagaaggtcattggtagcttgttgggaatggcgttgaatctataaattaccttgggaagtatggccattttcacgatattgattcttcctatccgtgatcatggaatgttcttccatttgtttgtatcctcttttatttcattgagcaatggtttgtagttctccttgaaagggtccctcacatcccttgtaagtttgattcctaggttttttattctctttgaagcaattgtgaatgggagttcgctcatgatttggctctctgtttgtctgttattggtgtatgggaatgcttgtgacttttgcacattgattttgtatcctgagactttgctgaagtcacatcagcttacggagattttgggctgagatgatggggttttctaagtatacaatcatgtcatctgcaaacagggacaatttgacttcctcttttcctaattgaataccctttattgctttctcttgcctgattgccctggccagaacttccaacaccatgttgaataggagtggtgagagagggcatccctgtcttgtgtcagttttcaaagggaatactttcagcttttgccaattcagtatgatattggctgtcggtttgtcataaatagctctcattattttgagatacattccatcaatacctagtttattgagagttttcagcatgaagggctgttgaattttgtcaaaggccttttctgcatctattgagataatcatgtagtttttgtcactggttctgtttatgtgatggattttgtttattgatttgagtatgttgaacaagacttgcaccccatgtatgaagctgacttcatcgtggtggataagatttttgatgtgct

SEQ ID NO: 308861 - DNA, 1000 bp, Homo Sapiens
gatcccaaaaggtaaaagacccctatgcttccagccagcagcggctttgcatgaggactgccaggctctcagaccccacatcccttggccttcttagtggggagagctcccagaatgccgctggctaaaagcctattttgcccctggtcagtcatggaatagcccagtttagcctcattgttaatgaaggacatcaatcccaggccggtctccatgaggagggggcgctccacgaccagcacgcgtgcgcttgtcctggaaaaggactttcctttttggcgtttttgaccttggattcacagagccttgaagcttttcatctggcagagttgctgtgttctcatccgcagcagccatagcgtgttgtatgaaattggcacagggtacgtttgtggaccagggattccatctgtttaagaaggaaaggcgacttcgcttgccccactgaattcgaatcccaaaaccttctcgcttgttgagcgatttagggggaaattggaattctccgcaggagacggcatgccatccgggccgcctgccagccctggagtcagatgaagccgtctttaccgctgagcgctccctgccccgtgactagctcccgccgctgcttctcactgtcccaggggcccctcggcctgcagccgcagccccgggtctcgctgtcctccacggccgcacgaccgcgccgactcctcccccgccccgggtgctgcggggcgggaacaccaaggattccctgacctgggcggcgctgggtcccagacgctgagcggccacagcgcctagagccgccccgcgccgcgccccagctcctcgcccgccgccagcagcgtcctggggctcttgctcgccgagtccaccgagccccgcagctgcggcatcgccgcgcccgaccccgacccccgacccctcactttcatctgcccaggaatttcttttccctccctcccttcctcccttcctctcgtcctcccttcctcccttcctcccttccttc

SEQ ID NO: 308862 - DNA, 1000 bp, Homo Sapiens
atatgctgtggacatgttaaatatatgaagacaaaaaataagcaaaaagggaatatttacatcagatcaccaatccacaagatccagttttgcttactttcaaactgaaaggaaaagacatttttcaacatgataccactctatttgcataagctctcccaactctcctaaactaacattaaagtttgggaatgtggcacttctaactgaagtgctaagcagaaagaattcaatggatctggttaagcaaattgaacataagattaattacaagacccagtcaagtaaaggcaaacttcatttaatatagacttcattcagaaaggtaattctaaggaaattctacagactcaaatttctctattgacttatatcaacaaattgaatacatgtaataacttggggcataattattttaaattgttttacttttaagtttgaggcaatgtaaactaaagcataaggtccccttagtttactagtttagaatatatggatagaccaaatattactatttttcactaatcacttttggttttcatcttacaaactcaactatgtaatttaaaacttggtttgttataaatgaattcatgttgttcagatttgccagttactccaggcttataacaaccaaaacagaaagcaaaaagaaagtctggtgggctgccactatttaagattacagacaaataaaaatttggataaacacaaagtctatataaccacatgcctcaaactgcagttatacatgtcctgaagtggtttatcatcagcaaggagcatggattgaacaggtgaccaataaagtggatttacatcccgtgaatcaaagctcaatcatcttccattggcatgagaagaggaggtggccaatcagaggtgtacaaatggtagcataataccagatatctaaaagtatactaggtaatgataaatttgggagaaggagaagtacaaatgaaattaaccacgtggatcattatactagaaagaatac

SEQ ID NO: 308863 - DNA, 632 bp, Homo Sapiens
tcttccctgccacctcttcctcctcctctttattatctttctcctcctaggctttttcttcagaggggtactagtctttgccttcctcaatcttagcactctcaatggattcctccaccatgatctactcctcttgcacatggctactgtagtaggacaggaaggagtgggtggacatcatgtaggagttggtatgtgaaccccagtaggtgataaaccaaagaccagggggtctggaagcagtgtgcttcccatgctgctgaaactcagctgggtctccttgcctttgaagggtttcctctgagctgcagcctcaatacaaagagccatcttcacctggaggacttggtattcatttaggtatccagatgtttaactttgccatcttcaattcattttctaatttgtggatgatggcctgcacactactgatgtaggtgttcaacttgtcctttggctcctgcagctatatctccattacttccttcatgccctagcatgctttgatctccaagttcttggtcttgagcaggtagtggctctgagacaccttgtttctggtgccttgcatggcatagaccctcttgacagtgctctggctcagcagtctaaagggctcttaaagcactcct

SEQ ID NO: 308864 - DNA, 1000 bp, Homo Sapiens
catgtaaaccaacagcaactgaaccactatataagaaagttaagaaagtccactggaaacatctacttctttttttttttttttttttttttttttttttgagacggagtctcactctgtcacccatgcttcagtacagtggtgcgatctcggctcactgcaagctccgcctcccgggttcatgccattctcctgcctcagcctcctgagtagctgggactgcaggcacccgccaccacgcccggctaattttttgtattttttgtagagatggggtttcaccgtgttagccaggatggtctcgatctcctgacctcgtgatccgcccgcctcggcctcccaaagtgctgggattacaggcgtcagccaccgcgcctgaccggaaacatctacttctaactttttttgtgtttctgctccagcctttggttcctctcttcccccggctgcccgctctcacagtcctgcttccttgccttttgcctcatattgtcagatagctagttttggttttgctgctcctcccagacagtttgatgcatctcaattcagccaaggccctgtgcctggcagttgtgctgactgtatcccacagttggcgtcttgtcccacaggacctccccagaacccctcttctgcaccctactgtggcattgctctttcagggagctcattgagctccacacagtctgctccactgcaacctgttggaggccgtacgaccaggccttctactggcacctaccctgagctggattctccccagcttcatttctctcttcctacagaccctgatcccatcagaggttttgggtcttatcatccctctgcttcctctccttttcattttcagctttccgcagcccctttgactgccaataacctctgccttacctgagcctctttacagtcagtcctggactaccccagtagatctctgtcttctggacgaatcagtaggcagtcttgaaggaagtcaatgtcctgactatggttttca

SEQ ID NO: 308865 - DNA, 1000 bp, Homo Sapiens
aagttgatccctttatcattaaataatgactttctttgtcttttcttactgtctttaactttttcttactgtctttaacaaaaaacatctgcttttttggtgtttaacaatctttaattcaaatataaaagttcaatacaagccattagaagggattgggatttcttgctgttttaaatggggaaatgcaaaaaaaaaaaaaaaatttttttttacacttttcaaaagcttccaaggaaagtgtagatcatagggccataaaagatccatttaactttcactcatgtctgtgtgaagagaccaccaaacagtctttgtgtgagcaacaaggctgtttatttcacctgggtacaggcgggctgagtcggaaaagagagtcagtggaaggagataggggtggggccattttataagatttgggtaggtaaaggaaaagcaggggttgttctctggctggcaggggtgggggtcacacggtgctcagctgggaagcttttgagccaggatgagcccagagaaggaatttcagaaggtaatatcatcagttaaggcaggaacaggccattttcacttcttttgtggtggaatgtcatcagttaaggcaggaaccagccatctggatgtgtacatgcaggtcacaggggatatgatggcttagcttgggctcagagacctcacattaaccaaacccattttcaccccctaccaattgtcctacacccattacacaatcttaatatattttcttgaatcaagatttacatttcagcttcacttacatgaccatttaaatatacatagcactggtttgtttcctataatgccaaataaataaggaaatctacttcaattgcatttcttcttccctttttttttttttttttttttttgagacagagtctcatactatctcctgggctagtgtggcccaggctggagagcagtggcgtgatctcggctcactgcaacatccgcctcccaggtttaaacgattctcctg

SEQ ID NO: 308866 - DNA, 1000 bp, Homo Sapiens
cttcaagaccagtgttactttttttttttttaatgaggttgctttctaacattaccatttcattttggatttcacttcatactttacaatacagcctggaggaacgcctcaacttctagtttctctctccattaagtatctaattatgtgtaaatagaacaactaacgggacgctgggaagcccaggaggcaaacattttgcaaccggaactgttgagtgtgctcggagaggcgagggaggtctatttgctcgtttcctcggattgcttaaatgcgggattttgctatcccaaagcacagagtgtaaagtagcagctccccctgcctgccttcccggcttcttctgttttacaagcaacgataatttcccggtgaaagcgaggcctgggaatcaaatccaaaaagtggttgttccctttaggagaggttagtagctggaaaggagcatgagaaaactggaaggtcccatagactaatgtgttttttttccaaggtttgtacagattcaccgagttgctgcgccttatcatctaagtaatgtctcggttttagaagttgacattgttttgttaattacttctctggtcacatgcatttcaggccgcgcaaaaagaatcggagtgctgctttatataaatgaataaaactaagttccgtggtttggcccttctacaccctcctcccctaccacaggctttgcaaaccacttaagtgtcctctgtaaccgtccgggggcactttcgggtcagagacagcgggcggaaaccgcagaaaaagttgaaaatgtcagcgacaccctgcatctgcgagttctattccgtccctgaagcggtgaagcgggctgagcgcgccgagggtgggctgcagcccggcgaggggctgggctcagggcaccttgcccagaaggcgggcatcggtgccaagtgttcaccggctacgcagcagagccaccgagcagcgcccccccccgcctcccgcgggcacgctcggtgccaaggcc

SEQ ID NO: 308867 - DNA, 1000 bp, Homo Sapiens
ctgtacttctccaaaagccaactcttcaggagatctgggctgtaagtcccaagggttaggaggattcagttctaaaagcaaaagtccgttgttttcatccatttcaacaactagaatcaaatgagaacaaatctggattaatgacaaaaatggctttttaaaagcatcactgaaatagaaatgcatggtcttccaaagatcaaaggaaaatcaaaacaaagggtgccactcccttagatcaagcaatatctgcagagactatgacttaagatgaacaccaattcatttctttattcatatggcacttagagaacttatgaggtctcagtcatgtcagggatacacatatacaaacaagacttccttacgactaaatgaatgattgatagagatgacttcgaggcgctatgggaatgcacagggaggggcatctgatctgcaaaaatgacacacattcagtagaaaccatactctgaatttttatcttttctgggctagtgatacacagtaagatgctgggcagcggtagcgggtgcagctcccagtcagccatgtgcaatcacaagggtaaacaccagatactctacagtggaccatgttgccaggtgattgtgcccaactgcaggctaatgtacatgttctgagtatgcatacagcatgttaggctaagctacgatgcttggtaggctaggtgtattaactacattttgacttacagtactttcaacttatgatgagtttatcaggacttcacaccatgtgtaagttgaggagcatttgtatacaattctgctaattaattatacctcaataaagctgagggaatagagaatagctatcctgaagccccattcaaaaaagtgattacctccagagcatgggtgggaggatatgtgatataatcaaggaaagatatatattctgttgttaatattttatgtcttaagctgggtgctgggtacatgggtgttcacttaatttttaataccttttaaacatt

SEQ ID NO: 308868 - DNA, 1000 bp, Homo Sapiens
gatcaaagagacagaaaattaacaaagatattcaggaattgaactcagctctggaccaagcggccctaatagacatctacagaactctccaccccaaatcaacagaatatacattcttctcagcacctcatcgcccttattctaaaactgaccacataattggaagtaaaacactcctcagcatatgcaaaagaatggaaatcataacaaacatctctcagtccacagtgctatcatattagaactcaggattaagaaactcactcaaaatcacacaactacatggaaactgaacaacctgctcctgaatgactactgggtaaataataaaattaaggcagaaataaagatattctttgaaccaaatgagaacaaagacacaacatagcagaatctctgggacacatttaaagcagtgtggagagggaaatttatagcactaaatgcccacaagggaaagcaggaaagatctaaaatcgacaatctaacatcaaaattaaaagaactagagaagcaagagcaaacaaattcaaaagctagcagaagacaagaaataactaagatcagagcagaactgaaggaaatagagacacgaaaaacctttctaaccatcaatgaacccaagagctgattttttgaaaagatcaacaaaatagaccgctagccagactaataaaaatgaaaagagagaagaatcaaataaatgcaataaaaatgataaagaggacagcaccactgatctcacagaaatacaacctaccatcagagaatactataaacacctctatgcaaataaactagcaaatatacaagaaatggataaatttctggacacatacaccctcccaagtctaaaccttgaagaagtgaaatccctgaatacaccgataacaagttctgaaattgaggcagtaattaatagactaccagccaaaaaaagtccagaagcagatgaattcacagccaaattctaccagaggtacaaagcagagctggcacc

SEQ ID NO: 308869 - DNA, 1000 bp, Homo Sapiens
tgaagaacttgggaggctgaggcaggagaatggcgtgaacccgggaggcggagcttgcagtgagccgagatcccgccactgcactccagcctggacgacagagcgagactccgtctcaaaaaaaaaaaaaaaaaaaaaaaaaaaaaaaaaagagatctgaagaacctggcatcctatagaatggtaaaccagcttatttcatcaacaacatcatgttgactaggatggatgagtaggaggtggaaagtatgctgaaggccttggcaaaacacgtgctctccagaagatggaagataaaccatacagagattcaggagtggccactgtggtgaagttttattcatccagtggttgaggacatccaggagtttctcctccacagtaaaagacaaagtgttgcatcttgcatcctcactacaaggaaggaagcacactgcctggtgagcctctttgagttctgacaataccacatcccacatctattgttttgacctacactctaggagaaataggaggggacttgcttcaattaggcctgctgaggaaaggacactggcagattcaggccatgaggcagcgccatccctcagacccacctagaggtgtcagtcctggggaaagatgcaggatggagctgaaacaagcaccagtgggggagtcacatggacggcctgggattctggagtaaggccatgtcatccacagcagagacatatgcccctgttagaagcaacttttggtatgttactggccttgataagatagaatccttgccatgggacagcaaacaaccatgtgatttcaaatgcccatatgaattggcttctgtaactcagaaagtcatagatcggacagaccccaaagcatccatcatgagatagaaatggtccatctggattgagcatgaatcctatgttgacacctccagaaaacatccaaacctgaagtggcactaaacaaccaagcagacaaattgaagttagccagccctcaccatcgg

SEQ ID NO: 308870 - DNA, 1000 bp, Homo Sapiens
gcttattacatcaacctggaccctcagttgcaaaaatgagactgttcatgcacccgagaggacagaaaagctatgggattggcctaaattcaaatgggggcatggaaaaaatcagcccccaggggcgttttatagaaacagtgagagaaagaataagtggctttatgatcactccctatagagtcgtttaatacaatggttacatgcaatcagtgtgctaattacaaaggactcttctgtattccctacctgtgctaaatagggagcttcttgtattccaaatgagtgagattgtattaatatagctgaataaaatattgtagaaaatgggctgggcgcagtggctcacgcctgtaatcccagcactttgggaggccgaggtgggcagatctcgaggtcaagagattgagaccatcctggccaacatggggaaaccgtggctctactaaaatacaaaaactagctgggtgtggtggtgcacgcctgtaatcccagctactcagaagactgaggcaggagaatcgcttgaaccggggagacagaggttgcagtgagctgagatggcgccactgcactccagcctggtgacagagttgagactctctttctctctctctctctctctctcacacacacacacacacatacacacacacacacacacacacaaagaatattgtagaaaatcagtcccatatcctaatgatccagcaccaacatatatttccctaggaagtgaatggggaccactctacaagcataaagcagcaggaagttatgcttctgtgatcttagaggcactcagttagcagagataccaagtgatgtaagatgcccactagaaggaatacttatcttttgttgaatgactgaatgaatgtaactccaagatgcaagtaggaaaaggagaaacagggatggcttttctttctcaaggcttgaactgcacatttaattaattataatcataatgattttattgattgattgagacagggtc

SEQ ID NO: 308871 - DNA, 1000 bp, Homo Sapiens
agaattatggcagcaatcacaagaagaaacagaaaacagggggactagggattcggtggtagacttttactttaaaatagagctatgcagcagattctccatgacttggcttacatgcagtatgtcctatggaagtaaaattttcaaatacctccatcaccttcagtaactcatattaataaagtaaaagccaggtatataaaacaagaacccagtatataaacatatacatcaattggatccccaggtaaaccaaaaggagtttttaaaaatatccccaccataccttttaagacaacttttccgctaccctacagtaggaagtaaccacattcaaattagttaagctataaaaaagtaaaaggggccacaagctttattaaaagtaaatgcaacagtaatatgtacagatggcacatggtgccaattttatttgtaaatatagtactccaactcaagtttacaagttacacctttgccacagccttggctaaatcttgaactagtgcagaattcagctgtggtagagtgctgatcttagcatgcttcgatgtggcatacttgttcttgacagtctggaagacaaaaagatagcaattaaagaggcaaaagaaaaaaaaatcacaagatgcaatgatacaggtattcatttaaaacattaactcattaaaaataaaccaggcatttgcaggcattaagtttgaattattacacttttcagcatcttacaatgccactatattgactcaccatgtgctttgtaagtccttgatttaccatgactacattcttagccaggtgctgcataactggaagaagagattcttcagtatatgacaggtaatgttgtagagttggtgtctaaggcaacaagttaatgttaaaaatgctcaaatcaataatgattttcataaagtttctagatgttagatgttattcaggagtggaaaagagatgggtactgtataattaatataactgaaatttaagacaaagctaa

SEQ ID NO: 308872 - DNA, 1000 bp, Homo Sapiens
agcttggtgtagtttcatgtggaggacatttttttcagctgctctcttttgattcccagatctctccttagaactctaagggttccctcattgcataggacagcaagggtttttatttttatttttatttttgaaacagggtcccactctgtcacccaggctagagtgcagtagtatgatcatggctcactgcagcctcgacctcccaggttcaagccatcctcctgcctcagcctctcatgtagatgggaccacaggtttgtgcccctatgcctggctaatttttttttttaaataaaggtgggattttgcccattgcccaggctggtctcaaactcctgggctcaacagatccacctgctgtggcctcccaaagtgctaggattacaggagtgagccactgtattcagcccagcatgggtttcttaatgttaattggtggtaactgaggaggtgagggagaggagacaaagtctctgctaatttggaaaaaaaaagggggggctctattaaaactaagaaggttgcaggacttctcgaaacctataatatgctgccgatgtgcaatctgaaattccaagagaggaaaatatattgtatagaatttttccgaatgttttttcaatggaacatgtcctgataaattttgtagaacctctttcccctttattcattgcaaatttgcccattattaaggtttatattcagtcaaatttcctacctgaggccattcctgattccctcagttagccttcatcatgaccacttctgcaagtcactacaagtttctaaaatcctcattttttttatgacccctcctttctgtggtgcagggattgtgtctttattaaccactaaattaaagatcttcagataatggaccattcattattcacctcttttctacaacacttaacacatacccaaaactttgtaggaactcaataattgcttactgaaggactgaggccatctatttcagataaaatccactgatttt

SEQ ID NO: 308873 - DNA, 1000 bp, Homo Sapiens
gatctttcagtctaggtcggaagcccagtaatatacagtcatgaggccccatatttattctttttgtgttttttttgagatggactttttttttttgcactccagactggagtacaatggcacaatcttggctcactgcagctccacctccagggttcatgctatccttgtgcctcagcctcccaaatagctgggattacaggcatgagccaccatacccactaattttttaatttttggtagagacagcgtattagcatgttgcccaagctgctctcgaaatcctgacttcatcggcttcccaaagtgctgagattacaggcatgagccaccatgcctggctcaaggttgacttttttttttttttttttttttgagctgatgtctcactcttgttccccaagctagagtgcaatggcacaatctcagctcactgcaacttctgcctcccgggttcaagcgattctcctgcctcagcctcccaagtagctgggattacaggcacatgccaccacgcccagctaatttttgtatttttagtagagacgaggtttcaccatgttggccaggctggtctcgaactcctgacctcaggtgatccaccggccttggcctcccaaaatgctgggattacaggcttgagccaccatgcctagccaagtttgactcttaagactagaaccttgctactccagagttggtctgaggactgaaatatatcacctcttacccatcaggaaatagcatcacttctctgagcttcagtgtcctcatttaaaaatggtaaaaattcctgccctgcaggtaggcaagaaagttcagaagtggtgtgactaaagtacttcttacctagccaggtagtcttgagtttgaaggcctgtcttgtcattcaggggctgtggaatggtctcactgttggaacagggagtggcatttgatgcttggtgtcatcctaacccccacagtcactatagtagtttgctagggctgccatgacaaa

SEQ ID NO: 308874 - DNA, 1000 bp, Homo Sapiens
gatcatgggaacacttgatgggagatacaaaggagtggaggcgaagagaaggaggttattgtgcccacagaacctatgattgggatagctgatagagcgaattgtcggagaatggcggcggctgcttttaaggctgcttgagccctgtcagggaaattggacctatcactaggatgaaaaaatcctggacccttagaagtgttagctatgtatgaggcctcagagctttccacccatatgttgaggggggccggaactgctgtatataagggggaaattagggttcatgcaaacccaacaggatgagttactctgattgggaagtgcttcaaataaaaacctggaggacatgtttataattccctcaaggtaggccgggcacggtggctcacgcctgtaatcccagcactttgggaggctgaggagggcagatcacgaggtcagcagatcgagaccacggtgaaaccccgtctctactaaaaatacaaaaaattagccaggtgtggtggtgggcgcctgtagtcccagctacttgggaggctgagggaggagaatggtgtgaacccggaaggcagagcttgcagtgagccgagatcacgtcactgcactccagcctgggcgacagagcgagactctgtctcaaaaaaaaaaaaaaaaaataataataataataataattccctcaagattaggggaagacattgagcggggaaaggttaagacttgggcaaaggcaaggaatgttaggatgttagagtacattctgtttttaaaacaagaactgaggtagaacttatgagcactgattaattttccttctgaaagaggatacataagtcttccaatggctcgtgggtgtaagaaggtttgtctggctgactcttagattcccaagctaatgattctgcgggtttttcaggctgtatccaaggtttgattcaggtgtgatggatccaagactccactccaatcaccttgactgcagttggagtggagagga

SEQ ID NO: 308875 - DNA, 1000 bp, Homo Sapiens
actctgaatttccttgacagccatgctaaaatacttaccttggacataagctaagctttaagtttgttgtttataacttcaaagagagacaagggacagtgacttaagaatattctaagctataaatttacatgtggactttgctacacacctgggatgcagccagatgagttttgttccattgcagtacatctgatgaccagaattctatcagagaatgttaatgaacgaaaagcctgagctttaagactgagattggtaccacgggtagtcatggccacctgctggcagcgtagggtactgcagcccagctatggttcagactaaaagccgagaaacgcctgtggtccagggaaaggtatgaagatcatataaaccggcggtggacaggaaatgccacagtcaagaagatgcccctgggatgctgagctcttacaactcgaaatcaacagcttttacaaataaaaccgctgcaaaagcaatagctcttacaaataaaactgataatttggacttctgggcaccaaatgttttcataacgaaaacatcaattatgcattataataccaagtacaccttacacttactgattcttctccttaactttcagtgtattcctttaggagattgtcgcaccttggtcagaatacatcgacagttttataatagaacagaaaagcttccatttgcagcaatatattttagttggcttgttgaaacacatctctcttcctgaaagcaagcaattcttgaagtggatcaaccttgtcatcatatcccttttattcttcacccttttattcttcactggtatgacagtccctataccatcttagccactgcttttttgtttctacttattttccatcccccctgcctgccccccatagcaaaatgaaggcatgccgggaagcagcaactcaacataaaaagaggaccctccaagcgatcagctcacaagacagttttattgaattagttgcatgcaggagcaattctg

SEQ ID NO: 308876 - DNA, 1000 bp, Homo Sapiens
agaacttggacttctaaaggcggagggtctccctgggcaccctgcaggcaggcagaccacagtgtggggggtgccccacaaggctcagccctgggcaaggaagctttggaagcagcaaggtgggggtcaggctacaggtgccccacctccccagagccctgcagtcacgtgaggcccctgtgcagtagagagcctttctccagcccatgctggctgtggccggggctgccgcatctgcctggagcctgggcagcacctccgggactgaccttcggcagtggctgggggactgctttcagtgcctgctgttcgtgactcagaaacagaagaaaaacactgagaaaaagcattaaaaataagccaaaataagactattggtaaacacctaaatttttgtaagaaaatttaaaaattaaagcagcaaaggaactttttgctttctgccactcaggtctggcacaagtggctggcttctcccttgtgtcgggcctctgcgcgtctggggcagggccctgggtggaggtggtcccaggtgcccatctgctgtgtcctgcagaggctctgtttctggtccctgggtggccccaaacttgtccacttgggctcactggtctgtctatccataggagtgggctggctgggggctagccaggccttgagcccaggagtagaatcttggctaggggctggtctcggtgcaggtgaactcagctagcacagggttgattcctgtcctgggcctgggaactgggcccttggagcctctgaggtggctagcagtctgaccccttggaggagatggggacagctctaggtgtaggtggacagaaaccagcactgcatcctcactcatgggccagggaggcaactacagggatgcgggagctggtctgagccattgcctcttctgtaagcaaggcccagtggggagtagggaaggagatgcttccactctgtgccacatggggcccagaggggctggtgctgctgcggggtccac

SEQ ID NO: 308877 - DNA, 1000 bp, Homo Sapiens
atggcctcctggaactctattttctttaatttctgacctacattatgcataaaagaaggaaggtctaataaactgactcagcaaataataatgctttttatttagaacatgcagaaaagaaatgcctttgaattataatacacaaatcatatttctctatttaataataacatattaataactcaacattagataagtatgagcattatgtgacagtcaatgcaactgttacagagtatggagaatagcagatatatttgcacagtgaaacataggaaactctccgtaatggaggtcgaatgttcactagatcttcagggaagggaaaatgtgagatgacaggtgagaaaaggcattacagatagtgaaagatggataatgccccagaggaaagagagctgcagggactgcacagcagcagccaggccatctgctcttcttcagacaggaatgaagcacagctggtagaagggcggcacagaggcaaatccattgacaactggagtggtgtcaaggttctttgggtcaaccagagatttcaggttaaagttctgtaaaatggaggtcaggaataaaaacagctccatgccggccagggcttctcccacacaaatccgttttcctgaaaatagcaaacacagagagcagttactcctcatgcgtaactgtgacagtgacaaacactgtctctgtaactggcacaaacagaatatgcaataactgttcagtgaatcgtagaagagatgaagagatagatgggtggatgggtgcatgcatgaatgaatggatggatgagtggatggataaatggatgaatggatggatgtataggcaactgaaaaatgaatggacatacttactcttcacctaatatcagatcttaacaggcaccctgtattcaacaaatatttgttgagtaccagctacatgccaagcactttattaaaatctttcaagagactttaaatgtcttcatcaatctttctttagaaacatacat

SEQ ID NO: 308878 - DNA, 1000 bp, Homo Sapiens
catctgcagtggtgactctctctcactctctttatggggccactcccccacctaaattcctttgaggtgatttcaactggggtcagaatagagaggggagaaggaaaggtgtatgttcagctcatcagatttaactggaagctctcaaggctactttaaaaatcataaaagccattcccaataagcttgtttgttttaaaggaaatctcctttccaaatcactgtagatagtaaacagaagaagttgaaaaaaccaaataaaaacaggaaatatgatgaaagaatgtttcgatgtaacaattagtaaaagaatttgagctaccttgttaaatggcaaagtctatttattatgttgttaaagacaactgaaacaaatggcatttaaaaactccagatgagatgataaggcaaagcaatgccagatgaattcatcaagataaaaagcagtatggcaatgtttttatcaaagtagaattcaagtcatgaagcattcaacaggaagattattttatattgataacaggtacaggctatgaggggaaagctttgcaaagcaacaacagcaaaacagaaagcaaaaactattagaaggaagattagctatggaagaaaaagaaggctgtagagaattttaacaattattatgtttcaatcaacaaagaacaaacaggataaatcttaaaaagtggtcttgttattgttacagaaagtgatcattctttacactacaagggaaaactcaaaatctacaaaagagaaatttcacagacaacaatctctactatatccatacgtggggaacagaacaaaaaaactaggtctagactagaagacagagagaaaccatgtcagaccagagcacattgatggctcacggtgagtgacccatggcctaaaggtgcctgtttagggcccaggagccactcacacaggcagagcagcttactccgtatgaaccaccaccagcacccctccctgcccggtgatgtcacccggtggg

SEQ ID NO: 308879 - DNA, 1000 bp, Homo Sapiens
ccttgcctcatcacctctgtaatttaccaccatgcagatggcatcctctgactttcctgagcctcgaggctcatctgaccctgacaggaggcagcagcctcgcggtgcattggggtgactggggttgcgtggtttcagctggtttgcctctgggggttgggaatttttcttcctgtgtatacttctctgcactttccaaattttctaccacaaagatacatcagaaataaatgctggagccgggcgcagtggctcacgcctgtaatcccagcactttgggaggccgaggcgggcggatcacgaggtcaggagatcgagaccatcccggctaaaacggtgaaaccccgtctctactaaaaatacaaaaaattagccgggcgtagtggcgggcgcctgtagtcccagctacttgggaggctgaggcaggagaatggcgtgaacccgggaggcggagcttgcagtgagccgagatcccgccactgcactccagcctgggcgacagagcgagactccgtctcaaaaaaaaaaaaaaaaaaatacaaaaactagctgggtgtggtggtgggcacttttagtcccagctactcgggaggctgaggcaggagaatcgcttgaacccgagaggtggaggttgtagtgagctgagatcatgccactccagcctgggtgacaaagggagactccgtctcaaaaaaaaaaaaaaaagaaaaaaaaaatgctaggtcttccccagccctttcctgaccccaccccttgtgttgcaggtcacagaccctcgaggagctagagaagggttaatattagcaaagttttactttttttttttctgctcataaatgactctgaaaaagccaatacgcaagaggctaacacaactgtagtctaaaggcaacgtcgaggtcactgatatgtccctcagacaagaggcactgctcagaatccccctgtgctgggggtgagggaaggaggggacggtttaggacagaggaataaatacatg

SEQ ID NO: 308880 - DNA, 1000 bp, Homo Sapiens
tctctgcctcagtttcctcatctgtaaaatgaaggcaatactaatagtacctacttcttcagttgttatgaggctttacatagtccctgactacaattagtgttcaatgaatgatagctattatctactactaatgatgatgaggataaagatcttaaaatatggagtttttctgccctcatttcgtaagaagtcagttcaacgtcttggggcctttactgttaggaaattctctcttactttaagaaccctcaagaagcttgttggacaaccgtgcaaatcaacctaggattattacactagaaaacccgtatcacacatctaaaacttacctctaaatatctgccccaggccatttaagctgaagtgtgtctctgttcttacctaaggtgctggttgtagaagttgttcctgaaaggccaattcaccagggtttgattggaaggttctagaaacacagtgtctacacttttataagtcgctctagtgccagtggaaaggccaagtaattcatcctacttacactaaacttaggacaaacacttacactaagatggatgaatggagaacacattttctagagatgagcatgacaatatccaccattccatcggatgctcttcccatggcaggttttgcatcttctcccattgaatctgggagggcttgggcacaataccacgtgacttccaggggtaagtcatacaggacagtacagcttcctcccaattttctttgggatgctcattcttggaaggcagccaccatgcttcgaggaagaccaagcagccactcagagaggccatgtataggggcttcatgtgacagcccctgctggggtcccagccaacaactccctcaatctccagacaagtaaggatgcagtccttcagataattctagacctagggctggacacatcactccatgtgtccccagcaccccaagagttggagaccctcagaaacctcatttctagttaccaactcctgcattagag

SEQ ID NO: 308881 - DNA, 1000 bp, Homo Sapiens
gatcattttccttccttccttccttccttccttccttccttccttccttccttccttccttccttccttcctgccttcctgccttcctgccttcctgcctttcctcccttcctccctccctcctgcctgccttcctgcctgccttcctccctgccttcctttccttcttttttgagacaggatcttgctcctttgcctaggctggagtgcagtggctcaatcataggtcactgcagcctccacctcctgggctcaagccatcctcccaagtagctaggactacaggtgcacaccaccatgcctggctaatttttaattctttttgtagagacaggacctcactttgtttcccagactggcctggaacccctgggctcaagcaatcttcctgccttggcctcccaaagtgctgggattacaggtgggagcactgtgcccagctccctcattgccttttctaatgaaacttatttggctttcatttaacaatatgatgcattgctgttggctatggaggttctctgagaagactaagctttgggttgtgaggtatccaatagctaatctgaaatgaaaaccatgcaatgtgcattgttattgtcagagtctctctaaggtccactgccaagtacagagtcaatgaaacatgccctgtgaacattttctttgggtacccccttctaatttaaatgatacctccttttctgttgaaattttctgagatggccatgtacacaccacatcctttggatggttatgctttggaaagttctcctgcaatttgagatttgtttcatccgtgccttcctgaaggccctgtgaacattttttatgtgtttacccctgctagcctcagtggatgactttgcatgcctctgatgtgcggttctgatgtgcacccatctgtagcgtgagctcatgggggaagctcaggaatgacaattgagcaggttctgctctcaggcctgaggacagctgaacttgtccttctccaaggtct

SEQ ID NO: 308882 - DNA, 1000 bp, Homo Sapiens
gatctttttatcatctacaacgcagggcacaggactgggttcctcgtggggagggagtggcagagaaatccccctcctgcaacccagaaatcttgggagctgctgtccctccttggggttccaaggatcatgtcttctccccagctctcctccttacttccaaaccaagatgtcttctgccaagccccgtcgcttctcctgtgcattgtaggattggaaagaaagcccataagccacttctgcaggtgatcccacctcccagggagaattggcatcttaataaagcagtcttaatgacaaagctgtttttagcccaagggaggggcaggtcatggtgatggtttgggcagcaggtgtgactttagaatgatattttagacacatggacatagagtgtggaagagtagtcattgaagactctgaagggtgaaagaggagtgaaggatgagaaattacttaacgggtattatgtacactcttggggtgatggctatactaaaaggccagacttcaccactgtgaaatatatccacggagcaaaactgcacttgtaccccttataaaaaagaattacacttttttttttaaaaaaggatattttgtgaatccaccctattccaagattataaaaatgttcatccaattttcacctggggttttatggtttttgttttgccacatttacatcttcacactacctgggattttctatccttcctctctcccttcctctttctcttcctcttcctcctctttttcctcttcctctctgtcttctccttcctcttctccttcttctgcttttcttctttgagacagggtcttgttttgtcacccaggctggactgcagtggtgcgatcatagctcactgcagccttgacctcccgggctcaggcaatcctcctgcctcagcttcctgaatagctggaactacaaggatgagccaccatgcccagctaacatttttgtattttttgtagagttgggggtctcactgtg

SEQ ID NO: 308883 - DNA, 1000 bp, Homo Sapiens
gatcacgaggtcaggagttcagcaccagcctggccaacatggcgaaaccccatctctactaaaaatacaaaaattagccgggcgtggtggcgggcatctgtaatcccagctactcgggaggctgaggcaggagaatcgcttgaacccgggaggcagaggttgcagtgagccgagattgcgccactgtactccagtctgggtgacagtgggagactctgtctcaaaaaaaaaaaaaaagaaaaaagttagccaggcgtggtggtgggtgcctgtaatcccagctacttaggaggctgaggcagagaattgcttgaccctgggacgcggaggttgccgtaagccgagattgtgccattgcactccagtctgggtgacagagtgaggctctgtctcaaaaaaaaaaaaaaaaaaaaaaaaaagaagaagaagagagacaaaaataattgcaaagaaactttgacctttatttagcggatttgtcattggggaacgtatgggtggagcaattttgaaactatcatgtgttttacaggactgagcaaagtagcaaatacaaagatattattaggaactagggtctttgctgggagagaaagatgtaaatatgacctgggagaaagcaagaaagaacccttgcagggttaaataggacttcaagtttcccagcctgtgcaacacggcaagaccccatttctacaaaaaataaaaatgaaataacatgggtgtgatggcatgcacctgtggtcctagctacttaggaggctgacatgggaggattgcttgagcctgaaaggttgaggccgtggtaagccatcattgctcctctgcactccagcctgggtgatggagagagatcccgtctcttaaaaaaaaaaaaaaaaaggcctggcatggtggctcatgcctgtaaccccagcactttgggaggccaaggcgggtggatcatgaggtcaggatttcgagactagcctggccaagatggtgaaaccctgtctctact

SEQ ID NO: 308884 - DNA, 1000 bp, Homo Sapiens
gatcataagtcactgcagccttgacctcccaggctcaagtgatcctcctgcctcagcctcccaagtagctggggccacaggtgcaggccaccatgcctcgctaatttttttttttttttttttttagagatggggtctcactatgttgcccaggctggtctcaaactcctgggctcaggtgatcctcccacctcagtctccccaaaatgctggattccaggtgtgaaccactgtgctggcctccacctactttcttatctataagatggggttagtcacccgcacgtcacccagcagggccaggggagagggtgggattggcctgggggtccccacaaccttgactctgcctgtgttcccacagcgacacccaggctggccgactccggcagcgtgccccacgtgagtagctgggaccctcagcctttaacccaggacgcctggggagttggggacaagccgaccaagggaggcaggtgtctaaagcccacgggaagggtttggcactggaaggaaacatgtggaatgtctcgtgataaccacaggactctcaggtggctgaaggccccagtgtggacaccaggcccaagaagatggaaaaagagcctgccgccagggggaccccaggaacggggaaggagaggctgaaagccggagcgagtgggtttgcaggaggcatgggtgaggtgtggggtgggaacggactggtgtgaggctcaggtgccggagctgggtccttggatcttggagggtggtgtcctggttgagtggcgtcgaagtgtggcaggcagcgagtcaacgggcagggagcctctactaatgcgtaataataccagctatgccactcagctccgggaagttaccttccagaaactctaggcatccccgtgcagctgcggggcacccggggctgggttcacctgcgcccggggccgcacaggcaggcagagagagccgggttcagggcacaggcctgtctcttgtcccctgcgcccgggga

SEQ ID NO: 308885 - DNA, 1000 bp, Homo Sapiens
gatccacccacctcggcctcccaaagtgctgggattacaggcatgagccaccatgcctggcaaatttttggtattttagtagagacggggcttcaccatgttggcctggctgtgtcttgaactcctgacctcaagtgatcccacccgcctgggcctcccaaagtgctgaaatcacaggcttgagccactgcacccagccagagttcagaatcttgaaccgttactgacgtcgactcccccatctgaagcctccgcatggaagccatcaccctgttttgttttctcctagataattcttgttgccagaattattttatctgcttatgagtttacagactaaatgtcttggctccttcacaggaaatgagatccaggaagacagaaatatcttcccctgtttggctgcctcgttcctgggagctacccaataaatcttaaatgaatgaataatgaatgaatgaaccaatgaaccaatcaatccatcctttctagcccccaaaggagccctagacaagccctctccagccatggcagggaggtaaaggcgagagggagcgtcctggtgaaggagaggctggagccggcccctcccttacgggtgggctggccagaacgggttgcacacctgagctcatcattccctcgccatgacacagacaggtagggcgtgctgggcctgcccggcaggggcccggtagagccacgtctgctattgtatatgccccacacagtggacaggcctgggcacctggccgctggtcgcacgttggacaaggaacttggcttctctgaacctcagtctttctcatctggaaaatgggttccaggctccccattccctgggaggaggcgacggctccacgatgccaatgtctgacctagcctgatccgcctccttgccccgacacccctgccggctggccaccgcccactgcccaccacccaccgcccaccgaccctggactcacccaaaagcagcagcttcagctccccgcggtcc

SEQ ID NO: 308886 - DNA, 1000 bp, Homo Sapiens
gatcagtctcagccaagcacctcatgccctcttcataaatttgaccctgagaaagaccctggaaaactgagtagggcttggcctgaggggccccctgagaccctcagagaagctcagccctagaagcctcaaccccagacccctgtccctaaatccttgctccagataaagctgaggagcctgtgccaggactgggttatggtttcttgggcagggcttactgggactaagaattttccagctgtctgaggactgtgtctcctgcagctgttcaccagccagggctcagccctcagagcctcatctgggcaaggacagagctttcttcacctgacactcagagtggagaggacagaaagacaagctttgtaggccatcagccaactgccttaggaggcctaggacactccatagaaagtctaatatccccagaagcagaaacagaagagagaagatgtaccaggtagcagcttgtccacagggatctgacgtaaaggtgctttctcatggaagcaaattaataataaatgctgtttggtgaacatttccacagtgctacgcattaggtcaggtgactgtgaataatttaacatttattcacagatagcatgaaaagccacagtccatttgccatttagcttatttgattgagagaaaactgagtcacaggaaagcacagtcactgagccagagtcacacaaacacaaaggggagatcagggtcacatgaggtctgtctgcagccacaggcccatcctctcctccaccagaagtgagggcttactgggttccaagcaccccatactcatttattggctcaaatcctctcttcttaggcatccaaacctcagaggagtgagagcaagtggtcacctgattagtctgcactccagaactaaatcagctgcctcaaccatcagagtcagtgcaaaaaaaatgtccaggtctccccctcagatcttaacacccatcattgaacctgaaatcctgtgtttcccaaa

SEQ ID NO: 308887 - DNA, 1000 bp, Homo Sapiens
aatggtattgtggctgtccttctgcacagacttggaaatcccccactttttctgtgaacttaatcaggtcatccaccttgcctgttctgacacctttcttaatgacatggggatgtattttgcagcagggctgctggctggtggtccccttgtggggatcctttgctcttactctaagatagtttcctccatacgtgcaatctcatcagctcaggggaagtacaaggcattttccacctgtgcatcacacctctcagttgtctctttattttgttgtacgggcctaggtgtgtaccttacttctgctgcaacccacaactcacacacaagtgcaacagcctcagtgatgtacactgtggccacccccatgctgaacccctttatctacagtctgaggaataaagacataaagagggctctgaaaatgtccttcagaggaaagcaataaaagggccatttttcaagaaataactgtgatttcagagctttaagtctcatactcagaaattgtgattcacgaatcaggttgtgaaagtggaatttgctccttctattttttctcagagtttcaatttctttgatctcaactgacatagaatttaatgtattcctttataaagctttccgctctctgatatccaatcttttttttttttttttttttgtcattttcctactttcccaatgtttttcccaaactagggtcagaaacaaggtggagattcctatttttctcctacacttgtgggttgcattagtcctgcagaatcaattgcacctggcagccataaggtcattaatataattttattttagataaatatctgagaagacagtttttcactttgagcttattcctttctccaccaccaccttaagtgttcttcctggtcatgtaaactttaccccacacgagtgtgcattttagctcatcatggcatttatttttttagatggagtctcgctctgtcacccaggctgaagtgcagtggcatcatct

SEQ ID NO: 308888 - DNA, 1000 bp, Homo Sapiens
tatctgtctttttatatgaaaaggtaggaacctggaaacctagatacccttggatactcttttactctatttctcaaccgagctctctgcccactgaatggcaccaggagtcccacctgcctggaatgcctgtttctagacacacttcataatttcctgagacctgctcactcacgttaagacgcttgctggcatcatctgggactcgggtgctgcctctatcaaggactgccaggtatttgtggagttagggatcacaaagccaaactcgaagaaccattctgaaggaagaaggaaaagccggggtgagcaggtgccccagtataaagtttaagggctctttgtctccctctctagagtgagcctcttcctaccctgagaaccaccaaaggaagctatcagcaacctctcagaccaggggcgtaaaaaagacagggaagcctgctcaggtagtcctctgaaccacaccaaaggcttgcttctcatgctttgaggtctaaaggactaggaccagcgagcaggacacaatataagcagcattttcttagaggtaggctagatgtgaactatatatagatacatagttaaattcacttggaattagcttgaaggggcttatgtgccctttacactgcatggtgagaattcaatgcagagtggccttgccagtcaaatctgtatgatactgtatgtagagcactgtactaggccctgctcatagcagcttcctccatgatcatatcacaatacaacgtcagtgcctaaaccaggcaccaccatccacgctcccagtgtcagagacctcaaagccccttgtagtggctagctttgttttggtttgtttcactggggattcacagtcttgcagagtgtaggaatcctaccacaaactgagttgtaaaaggaatgttatcaaagcactgctttagttcactgggtattgttgccttttgtcctggtcgccctaagccctgatttcaggcatgtaggcagcagaata

SEQ ID NO: 308889 - DNA, 1000 bp, Homo Sapiens
tcttgggtggagctcaccttccgcctgggtaacgtccaggaagatccacatgtgcacgggcagggtcctgagaaagctgatgaattcctccatgaccttgtcgtctgcctctagggtcctggctgtgggggacgctggctcagtcctgggccctgggagctccaaggaccctgcctggggagggagggcagggaaggaggacccagtgctccgaggtcaggcagagtttggtctggagcaggtccccagggcggtctctagggctcctggcctgtagattccctgtccccaactcccgctcctcggcctggccccctttgctccgctctgggcagcactggggcccgctctgggcagcactggggctcaggatggtgtctacagtgtcacggaaggagagcatagtgcctgcctcccccggtgcctggctctcaccaagcacagctgaggctgatcaagaagacacctgtgtgaccccagaggaaatggtgcgctcagaaacatggggaagggctgtgcctatgtggctatattttttccgaaaagttcctgcctcccctgaagtcccactgatgtctcccgcaatccaggagggcggatttatagaacaggggatgtatctatagccccaacaccaatggtccatttaggaaccctggggacccttaagaacagaggcaacagcaccatgagctttaccggggttagactatcaccttttaaagctgcattcacatttgagatccaacttaaatctccattaatgaaggttgatggactaatattggccagttctatctgcttgtaagatgtggcccctccacttgctgccagacccgtttaccacatcggccccctttggcctgacccaaatttgacactagtccctgccccccgcccccattaaaatcccccctaccgcaacatcttccctggtggcttctggtttccgacaccaacaccaggcaacctccggcgaatggggcctggggaggtgggc

SEQ ID NO: 308890 - DNA, 1000 bp, Homo Sapiens
gtgtattctgtgcatttgcctatttaatcttccctacgaacctgggcatagttgcttttataactctcattttacagattgagagatgaggctccaagaggttgagggacttgtccaagctcatccagtcagttcaaggaggggctggtggtcaatcacacagctgtagcagatcagaggccaggactgcatggaagatcagctgtcccccttcgtgccctgtgcactcccatggatcatgggtctgcggtctcaggagaaaggagaggagtccacccatcttgtcagccacaggctggttctgctctgaaaatgccctgtctatgcacccttctgccttccctcatcctggtccttccctggaacactggctactgctccttccatcggccttaaatgtccccaacccaccaagcatagatgagtcctcccagcctcatgtctgtccctgttattaacttatcccggctgtttattacaaacctgtctccatactctatactcttcacacactcactcatctctatatttgacaatggtttattgagcatgtacaaagtgcctcaaactgttctagatgctggggatatcatggaaaaaaaaagatagacatgccagctattctcctggagctaacactccagtgaagagaggcagttaacataccaacgaattcatttcgagtggagacagagcaccataaaagaaataaaatacattgagtgactatgatggtagctactttagagagtgatcaaggagggcttctctgaggaggtgacatttaagctgagatatggataacgagaaggtgccaaccatgtaaggatctagagggagagcattccaggcagagggaacagcaaatgctgagactcatttattccttcagcaactaagtgagcacctatgattatgtgccatgtgttgtgactggggacacagcagtcaacaagataatcccagctattgccctcatggggttctcaatctatcagga

SEQ ID NO: 308891 - DNA, 1000 bp, Homo Sapiens
ggatccattcatccaccaagaatttgctgtgcatgtaccatgtgccaggcactgtgttaggtcctgggaatccagggatgactactttgagggatatagaaagacagtgctagatgtgtatgtcagtagagagagattagaattcaactactctaagacctttatattgtcttggatgagggtacagaaattgattcattttagattaagtcacataagcatattaaaaatagaaggtaagttctgaaagaataggaaaagaatataacttctaaactagcagtgggagaaatagaagacaggaaaggcaggggagggaaccatggacaaggcagagtaaacagaaaatacaaaatcagatgacagaatgaacttcaaatatagcagtaatcatagatgcaaatggtctaaactcaccagctaaaagataaagataaaaaatggggcagtggtggtagggggaaatccagctatagctaacacataaaatacagagaaaggttgcaaagaaacatggtccttttccaggggtagattataattgtgtcaaacacatcttttatctctacttacatttccccctttctctggggactttatactaaagcagggattatgttaaattgactgagtagaagtcaggggtgagggagaaatgaaaggaaagaggatttattgagtcaggtactgtgctgggtggtttttaaaagggaagaaactggcataggttagaaatgtacattctggtatagcttattggtcaaatgcccagaccgtggtgtcagacagacctggacttggtttccaaatcatttaatcattcatttactcatttaactaatatttattgaatatctactatgagtgaagaagtctgctaagaagtcactttaatttctctatgacttagtttcctcattgtatcagttatctattgctacaatagtgctgtgtaagaaaccactacaaaaaacccccccatagcttataacaataaaca

SEQ ID NO: 308892 - DNA, 1000 bp, Homo Sapiens
tatccaaagttcaaattaaactggggcatcctgtttttgttgtttcttatgtatttgttttgttaaatctggccaccctagacccaaattttgccaggtgtggtagacaaaaaatgcactggtgccccccccaaacacctgcccacaggccaccagaaatggaggtaagcctctggtgctgggctttctggagtccactggaaacccagcccaagcggacaggtgaggtgagggaaaacggaggtgctctggctctgacatggcacctgcagacacactgagagctgagagccatattcacgttcaaccatcctttattcgctggcttgtcttcccaagcctaggtcaggaaccaaaccacatttcccagcctgctgtgcatggttccgtccatcctagaagtcacagccatccacccattcagtgaggtcttttccctggcagtgatgcctccaggcctccctgaggatggagaacagggaagaggagagataatatcagctgcagttgccagtcaccgcccagagaagaacaagaaggagagtgtggtctctaaaccagaagtgaggaaggaaaggggtttgttccctgctgctgcccaccagtcctaaccataccaccgctgcggggctccagcccaagttacttaccagtaacccagaccctgaggctcttgggttatcttcatggcacagataacggtatccttgagattaggattcaacaaatctggggtgataggcagagaaacacaatgagagaacaggagacatccaggtgtgtgtgtgtgtgtgtgagtgtgtatctgtctgtctctctctctctctctacacacacacacacacacacacacacacacactccactcgcctaaatccaatcctgtctcaaccactccggaagcacaggtacaaccctatccctctccccctccatcagaaacaatcctccctccattcctatagccctaaggcagtctcctatctgggaccccaattca

SEQ ID NO: 308893 - DNA, 1000 bp, Homo Sapiens
ttttttttttttttttttttttttttttttttttccgagagtaaataattcttgctttattatgaaccaagtcacattttgtctcttccaacagatgcttgagccaaaaaagcaaacataggcagaaatacaattgagaatatcttcatgtttcaacctttaatctgacttgccttttactatcctttccccatttcttctaatctcttttgccttacaatatattaccttctaggtatcacctcatcctatagaatcccttctagtttaatgtcctgccccaaacaatactaacccattgaagataactatgaaacctttaaatggacagtggttccttttaaaagcagccttactgaaaattttatatacacttaaatcaagtaacagttaccgtgagttttctaaacttttgtgttaacagaaatgccagttcagcagtgtgactgttacttttaaatgtctgtcttgccgccctagagtgacagacatcccagttaaacatattaggaataagaaatacataaatccaatgaagactgtagaaaaagaattttagcacttgaaggaacttcagtcatttaacccaactcattcatgttatagattgagaccatagaaataaaagtagcctataggatacaaaagttagcggcagatctgagataaaaatccagctctttggatccccgcgtttttcaccacacttagctgtcgttcccatgtattacgaacaaagaatcaaatataatcaagtgcagcctcacttcacaggcaagaaaacagactagagtttaatatattgcccatgtttatcttaaggtgaaacatttactcttacaaccacagttgatgttaacctagttaataaaatatgaaaggtaattactaggggaattttaaacggcactacataagcaaacatgactcaaattactttttccatttctgcttcccaaattattggagttactgaagcaagctatgctgctttcaattc

SEQ ID NO: 308894 - DNA, 1000 bp, Homo Sapiens
aaaaataccgacttagtttattggataaaaacagtggtaaaatggacataaagccaaaagtgagaacagaacattttcatatcctccccacacttgaaaacatacttcccatcatctgggattcaggtgttagggagccagagccccttccaaatctctctctcttcatcttccctggaagcaaggggaggaagaagtcagaacccaggggaggaggaagtcagaggcaatctcagtccttgtctacccgttcatccctcaaaaatctctgggttcgagggaagcagggaagaaataaggggcaaggggggctagggactggcctccagggcccactgccaataatgtcccagatagctatccttgtctgtatctcatccctaataggtaccattgtcaggccttgggagagagaggaaaagcaggtagatggttcgagaaccaaatgtggtctccagactctttcccagagtcagcaaaagccctggggtgacccccaggactctaggagccactccttttccctccagcccaaccaagaggtgaaaagaaattccttgggacacagcatcccaagccactcttaaatctccacatcgctttccttgtcattgtcatggtctccatcatagaactcattgggtgcctctggcctgcaaagcaaggggagagaggtcaggatctcactctaagttctaatcttctcccagcacccttttccaaagccatttctcaggccccgttgagaaccactcctcctcttgttggtagagactgctattcattcacccattcacgtatcaaataaacattaaggaactactctatacagacactgtcataaaccttagcaatacagtagagtaacaagctggacaaggttgtctatcctcaaaaagcttacctaataaatgagactagtaactaacaaagtaaataaatataataatttcagatgatggagagtacaattaataaaatgaagtgataggactgaagg

SEQ ID NO: 308895 - DNA, 1000 bp, Homo Sapiens
gcttgtaaacgttttattaacaaggcatgtcctgcacagccctagatcctttaaaccttgattccatacaacacatgtttttgtgagctcaaatttggggcaaagtcacaaattaacagcatctcagccaaccaattgttcaaggtacaggtcaaaatggaatttcttatgtcttccctttctacacagacacagtaacagtctgatctctctttcttttccctacaggattgcaggcatgcagcaccatgcctggctaattttgtatttttagtagagacgggatttctccatgttggccaggctggtctcaaactcctgacctcaggtgatctgcccaccttggcctcccaaaatgctgggattacaggcatgaaccaccgcgcccggccatgctaagtcctttcttggctccattgtgctgtccctcctgcttcctctccaggtccatctgccacagtgctacgtgcaccagcgtgccagcaacagtggctggtctctgccccgtgcctcctccactgggctcacacctgtcttattttgtcctttggtggctctgagaagcagcctctgcccctctccctttcccttactctttgtaagatcctcttccttctgccctaccatgttgcttggacaccagggtggaatagcagagaacggctgcttgtgtttgaattccagctctgccacttcgatagatttctgaactgagacatgtgactctctaggcctatttctgcatgggtcggagagtgggcgggactgctttactgagttatagtgaatgtagttttaacctaagcgcctcacatgactaactcctcatccatcaagaatgagctcagctctcacttccccactcctcacccccctgtaaagtaacctttctccaaggttatgcttcaacaggaatagctaacatttattaaattgtggcacgtaagtatcttggatatattggctcattgaatcctcacacctactattttacagagat

SEQ ID NO: 308896 - DNA, 1000 bp, Homo Sapiens; identical to SEQ ID NO: 120011

SEQ ID NO: 308897 - DNA, 1000 bp, Homo Sapiens
gatctcagtagtggtaggtaacatgagattatggaagaaaagggtttgtgagcctgtggtctgagtggacctctgcacgcccatctgtctccaacagccttcgccgcctgtgccattacatcctgaacctgcgctactttgagatgtgcatcctcatggtcattgccatgagcagcatcgccctggccgccgaggaccctgtgcagcccaacgcacctcggaacaacgtgagtcccacagagcacaccccttcctagcctggctgctctgcctcaggccactttctcctgcatccaaaatgctcataggtagggtgggatgttggggtcacccctaggcatagcccttatggctgctggttgagaggggaagctctgattccttggggatgctcttgggagcaagacattccttgaggcagtttctctgtgagcctggtggggtggaggtggcccagagtgactggggctgaaaattgctggattctctaatggaggcgtgagactagcaggatatggatgttgcacattctctacatggaataggggggttactggggcaggggcggtgctcagaggtggtcccctccgcagtagacatttccctttgtacacgaagctttgaaagaaacaactatttggctcagaaacacagcctaagcttttggtttttatgaaagcaagcccctttgcggatggtgggtctgttgacaacccctgttaattgagcacttgctgtgtcccaggaagaaactcagcatgcagtatctcatttaatcctcacaatgcgcccccccaaccccccgcccaggcatccccatttgacagatgggaaaactgaggctcaggggaatgagagagtggtaagtggcctgtccagggtcacacagcagaattccaactctgcatcccccaaagctcccactgcttcccccaactgtctgcatttactaatcacctactgtatgctacggatgggtgtgcatagcccctttgagtcc

SEQ ID NO: 308898 - DNA, 1000 bp, Homo Sapiens
caatacatacacaaggcactgtctaggcactggagtggagtgttgaacaagacagttcaaaatcccgattccaatggagcttgtagtctcaacaacaggtgtattttcctggagctcagctgtgtgcgaagccagtaaaccaattacgtgagcaaccttggcccgtatatcccagtttggagctatccgcaaatgctggattagcaattggaacaggggggaatggaggagcctggtggccacctcctggtgaccagccaccacgcacaaatagcaaaggagattcagcttggctcgggaggcccccatgctcttctcagtggagtcgatctgcgagcacacttgttgcaaaaagtcattccaatcttgatctttcagaaataataacttatccactgaatatgttggtagatgcaatatttttgcatcaaatttaactggtggctgtttcattatctttggattgtcgataatgggggtgacaacaagatctgagtccgtgtagataagctctctcatctgggattccaggtcctgctgactcaggtgtccacttgtaatcttggtcagaggagaagtcttctgtggtgaacagtgagtcatatcctcaccaggacttacttccactgcagtgctagttctgggagtaggacgagaactgagaagaaacatggattcattcaattgaccctcaagagtactcttaggccgaaactcagttggattttctagtctgaaagagtgacctagtggttgaccactcttgtgcccttttgcttgtctactctgagagttctgcaaaagctccttggaatcttgtggcccagaacactccatagtgtttctgctgagactgagatcttcgacgcttgattcctgatctgctccagcaaaagctttcttccaaaatgaatgctgcagtagccttgtccaagtcaatcttttctgaggatctctttgaagtaacccatcaagcaaattaataaaatctgaagaagct

SEQ ID NO: 308899 - DNA, 809 bp, Homo Sapiens
ttttttttttttttttttcatttttcaagcaaattcattcattgtttttcattttcacagagtaaatattctaaaatttcagcatcttttatagaattaaatttcggagaaacaccagaagttgtatgttctaaatatcaagctttaatttgcactatatcatcttcaacttcttctttatttacattaaaagcatatgtttgtatttttcttttttcaataggaaagtttttaggatctatataatcttgttcttttaaaaatgttgctacaatagcaaatctatctaccttttttaagtaagcgtacaactgagcttgttttaagtattttggaggtaaattttcaccgtttttacctcatttttcaaagtttttttcacctgtggtcttaatttcgattataagtggtttttcttgaataaatccatcgggaatacccccaattatcggatcttctttaaaataatcatagttatacttttgcggaggaaacacttcgacttttacttttaattttttctcaatcgcagctactactaaaggctcaatagctaccccagcatcaatgtatttagtatctaaaataggcatatctaattttgctagcctaataaaagctttaaaggctgaagaataatcatcaacttctaaaacttctccgatagatgaaccacctatttttttaaatcctgtattaaaagcaaattctttgtttagtaattttctatgaaattctttttcaagaataacttcttttttttctaaatccacaaagtattcttttttattgtaaaacttccttgtcat

SEQ ID NO: 308900 - DNA, 1000 bp, Homo Sapiens
ttttttttttttttttttaatctgtatgaaatattagttttaataaaacagaaccagtccatgtatggaggcatgggcataaggtcaacttgcactaaatgtaactcgtacgttttttctaaaataatttcttgagcattgtggtggccttatgtactaacccgaagctgaacttcctgggaagctgatccaatggagcacttggaattcaggggtggagtcttcttcctgggtcagagctggttcagggtcacatgctcttgaggtccctaaaggccacatgtgctgcatttcgcccagcagctcccatcacacctcctcctggaagggaatctcctatgaaccaaagctccgctcaaaaacctgccagggtgggggtggggacagggcttacagagatccagcaacaaagcagagtggggctggttagaggggtccgggggcatgggcactggaatcacctaagacagccgctcaatagattctggctccctccaggcttcctgcaccaaaggtctggggaggggccaggtccacagcccacagtctcaacggctgagggtggacgtgctggatgggcacacgcttagtaagtgaagttaaaatttcagaataaggggctggggggagggggaagatgtgtaagcccagactctttccagggtaccaagtctacacagctgagagaaagtgtgcatagcaaatgacagcctcagccagctccgttaggcttggaatgcgcacaagaaagaattgtaaagttgaagaagttaactttatccatccttcctggtctaaaaatatggatggaggcctctaatcccagcactttgggaagctgagtggagaggatcacttcagcgcgggagttcgagaccagcccgggcaacctaacaaaacccatctccacaaaagaataaaaaattagccaggcatggtggcacacacctgtagtcccacctactccagaggccgaggcaggaggatcacttgagcccag

SEQ ID NO: 308901 - DNA, 1000 bp, Homo Sapiens
ttttttttttttttttttaagatgacttgagtttcttgcactcaaagagagagacacagtcagatgtgtctatggtattgcctagaacgtcttaactactgagaaaggatgcgggggtgcacgcacgtggttactgagtggggggtggggaggagggcaccaaggctttctcaagatttacctgatgtgaacgaatcactggcgtgaagttgtggggaaaagaaaaaggcaggatcagaaaacaactgaaaataatttacgcttcttaaaaaatatctctgcttcgggtggttgtacaaaatgatttcctgatgcttgggatctgaatggccctggacgagctgcctggccagccctgccgtgcggccctcgctctctcctggctggcgaggccagcccgggtcagtccatgagctcgtttcaccgcgtaggatgccgcccaccctggctgggcggagggaaggtcctaggcggagaccggctggcacctgggttatggcaggagcccctccttccggctggtctcagacctcatcatctgtgccaacctggaattcaggaagcgccacaggaatcccaggcccctgaggttgcggacaaggctgggctgtgcccctttaaggaattttggtttgaagagtcaaggtgccccatgggacgcacggttgggcagggccctcgtgggtcgtgatgctaacacccaaatgcaaacctagcaaatccttctctgtacaagaattgactctttaaagcgacacccgtggtgggtgggcgggggggtggggggggaagggacggggcatgaatatgtcaaacagtgacctgacaatcttcaccctcattaaagtgggagtgggcgcctcttccacagaaaccactgggctcctttggtgaaagccagggctcccccgaccacaatcctcaaacccaaatgagagaggaagaaaagcaactactacaacaaaatcccccagaaaaccctgaaaaggcaaaaccagga

SEQ ID NO: 308902 - DNA, 1000 bp, Homo Sapiens
ttttttttttttttttttttttttttcgaagatcagtactttattttctctagctccagtgttttgcaactgtagcagcatatcagaaacatcccacacaaaaacacacaattctccccttcttcaaagagctggcaacaattgagaggcagaaacaatagttactacaggcatttgagaaatttaagaaataacacttgctcacccttgaaacatacattgtgcgtcttgcaggtaggaagcagcagtacatttgtcattcaaagacacaatcatccttaaataaagttaaataaaaccttattggcataacaatgtgttggagatgcagctttatggggactttggaggaaggtgcttggaataagacatgagcattttaaaagaaaaaaaaatgaagaaagcaaactacacatagaatgtaacccagtaaatagattcaatgcaaagttaagaaaacatagtcatggggagaagatttcacccatttggaaaaaatcagtttatcgttctaaaataaagctttgatctacaggtagttgaacctcaaatcatggtttggacagaagagctactcacacacacatcatgtaaaagtacgagtgctgtactcaggtggcactaactggctgcagatgtcactccaaagacaccaatgactgagtacgtgcaatggttacactgaattggtcaccagggtgggatagtggggtggggaggcctcttcctattttgcactttgcattgtcaaagtcacaataagaaaccggactgcagtctgcgtggagcaacaataccaactttggagataaaggccagatgggaaagttaatttctacaaaattaacaaacacttgtatctgctcagtgcttcacaactttcaaggcttttctcaacctcctgatgaccaggcatgcaggctggccaagtggctccccaagctgactcatcccttcatcacacagggaggggcctgcaatcagggcccacagagctcca

SEQ ID NO: 308903 - DNA, 1000 bp, Homo Sapiens
catgctccaaccctggagataaagcattgaaaacgatggacatgggacccttcaatacaaaatcaataatcttagcaaagaaaacatactggatgctacgaagtatgataaagtctatgaagtactggttactatggcaacgcataatacagattctatagtgtagattctgactagtcaagaaaggaatccctgaggaagtaacatgtaagccaacatgaaagaatgaagtatgaattagctaggtgaaatatagctgggaaacatataaaaacatataaaaagacttgtactaaatgaagattctaggaaaaggatatttataaatgcctaggaaggaaattgccggatcaaaagacaattacaatttgattaaaaataagttttttgtttcgttctttggaatagaaaaagacaaagtgacatttactgcttatgtagcaaaggaaattttggtacaacttaataacattatttaagacaagagaataagcctcattgcatcaagttcttgacaccagagaccacatcatctttacatcttaaatgcagtgtttcaggtagccaaggtgcccatcaaaggtttgtggaactaaagtgaactccttcagttagaataaaagaaatcaaattaccagaagcgcctcaattatgcttcactatctctagaaatgatagtttttaaacaaaataatctttttcatcatcctcaagtaattcctaatgaaaaactcatcatgtgaactattgcaaaagcctcctatctgctgtgtgcagtcatctcatcttccaaactcaacctccacagagtctgaggtaagcttttcaactcccgtatctgttcacgtcccttgtacttaaaatgtggtacacatacgccatggaatactatgcagccataaaaaggaacacaatcatatccttcaaagggacatggaaggagctggaagccactgtcctcaacaaaccaacgaaggaacagaacacaaaacaccacatg

SEQ ID NO: 308904 - DNA, 1000 bp, Homo Sapiens
ttttttttttttttttttgacattgaccagaaaaagtgtttattcatcaagtctttaaagatacaaaaacacgtgtcttctgtggagctctgagaacaggactccagcaaagcacttttcagccttgtggtcttcaagcatttccaagatctttgctgcaaggagcattgtactcagcaattgcaaactcatccgtctcgtagtaatcatagactttcactatggctggtttcagatctcttactgggacatcttgcagaaccgtgaagaacaagctcagtgtctgatttgacaccttatcaaggtaaatcaagacatggttgctgctgacttctgtccggctcacatggttagatctttcaagcattttcactgttggcttcaggggaatgaagccagagaccatcttcacatcaacgatcgccatgttggaggcagagcggctccctgtgtaactgacacttagggagatttggaagctggtgtgggctttgggttcatcacaagtttgaggcagagtctgcactcctaaagcaaaggggaactcttccttttctgggagaatattgtatttcaaggatgtctggaggtagacacatccttctcctgtcactttcatgctgtattccccaggcagctctggcaatgagacctgctgcagtaacaggcggttgttgttgtccacttggaatttgctggaaaatgtccctgaagactggatagtcacctgtgcagccttcccagtcctggtaaatgtggctgctccatatttggacagagcatggagagccaccactgtgtcctgggtggaggagaaaccgccctgggcattctgctgcttcgtgatccacttcacgatgttggttgcagaggtcaggtcctccgaggttggggctggctgggccgtgagataagcgaggagcacataggatgtcatctccacctcagcagagggagcctggggttcgtaaaaatgccccactggtgccttgggtttctg

SEQ ID NO: 308905 - DNA, 1000 bp, Homo Sapiens
tttttttttttttttttttgcatttttagtagagacggggtttcaccgtgttagccaggatggtctcaatctcctgacctcatgatccacccgcctcggcctcccaaagtgctgggattacaggcgtgagccaccgtgcctggccgataacagccttttctaaagtacaatcactataacatagagtgttctaggagtgatcatttatttgcttcccttaaagaagcctcagtgcttgctctatgcactaaaaggcagattgcaagaagtggggaatcaaaacagaaaactattcacaattagtggtgtgcaagtattctgaaactctgcgagaaaaaaaaaacaagggaaaagccctgatttatagctatgctgataaaaacaaaacaaaacaaaacaaaacaaaacaaaacaaacctaagtacaccactgatttttacctttaagcagtctaacaactgagtcacgtcatttcggagaatttaacaatcagctctcacaagtggtcctagccagctctaggatcccaccaaatcccatcaggatgtgaccttaggtgaaatgcgatgcaactgcccagcatcctaaatgatacacacagatgaatggaattacaagaatgaatagtaaagaagcaactaggaatatcttgggggaaaagaagaagatttattgatggccctggctcagctgctaggaccggaaggcaccatgagggaatatgtgggcggaatgcacaggctgatttagtaagtttccatgatataatagaggaaaagtacaggaaacatgaaaatttctcaaagaaaggtggaactcaaagagaacgtccttattcaccagccaacagagaactccccgcaattaaagtatctttactaacatcatttcttgctttacaaatgctcagggtctactgtaagctctcagagggcagaccattaatgccataaaattgactacatcttaagcagaatgaaaacagagacaccaacggtaa

SEQ ID NO: 308906 - DNA, 889 bp, Homo Sapiens
tttttttttttttttttttagagattagcaaggttttaatggaaagcataaaacactggaaatatggacagaaatcagattattacccttttatttttttccctgcccctttcacaatgagactggagggaattcaagaaccacttgaaataaaggcgaaatgattagatttttttctcctaattgcctaacgctgatgtcatggtgtacgcaaaatcaacattgatctctaagtgaaagaggagaaacagaacaacatcaacagcctttcgaggtaaactatatccaagagaattctacgaactgtgggccagaatctatttaggcaacccgcagggaccaaaatctctgaaaagcccaacagtggagccagtttctgatgctcctctgttggtgatctgatctttgagtggggaaatctgttagaaacagcctcctcgagggagccctccccctggcactgcccctgggtttccaatcacatccacggagacgtgctggtttcatcacgctggccactgagaaggcgcgaggacaggtgtcagcgttccctggacacgtcctgtcctggtaccacggctggtcaggcctcttcactgtgtggacagacacgtggggagaggagggaatgctgggagtagtaggcatgaaagactggttactgggctgaaagctagatcgccacttcccagccacaatttgtcaatccagaagagggttgaagactgtaattttctcgtcgatgctttataagcaaggtcagacagaaaagaacttccgtaaaaatggctgaggcctcagtcagagactgaaatgcgacccagttaccatctcctgagactagagaagggtaggaaggaatgtgtctaaacaattaaagaggctgagc

SEQ ID NO: 308907 - DNA, 1000 bp, Homo Sapiens
ttttttttttttttttttgattgatctaagaaactttattgctcagaaccttccctccctgggcaatggaaagagctttggagaccagcccatggggacagagtcagaggcactgggtgtaaaaaagagcgagcgtgtggcacatttggtccattgtcatgtgcgggtatggcaggaggagggggtaatctagaagccccacatctagggccttctagggacccagatatgcccccttaggcaaggctcacatgccaaagcaaagcagatgaggtcagcctggcttgggttgagggctcagtgcctcttagccttgccctggggttcttggaccttccggaaactgagccacatcaggctcacgttgatagcataggtggtgatacaaacaatgcagaaatcatagagcacgaagaacaggatccaggccaggtagacagaaccagcgagagacaccagggagctcagcagcatcaggacagaggcccagcgtgtccgcaggcaacgcctgtaatccccccagcactttgggaggctgaggcagacagattgcttgagaccagcctgggcaacatggcgagacaccatctaacaatagctgtagtgtgtagaagatgcaaccgaatatgctgttggattgattgaggatgctgtcctgtcccagcacatgctccaccagcccgaaacccctgccccacctggaggagaagacgcgcgaacagctgatggcggtgcccacgtcgcagagcgcgcggtaatcccggtcccgggcgcgcgccgccttcacgtgcagcgcgtagagcgagagcactaagcccgtcaggcaaagagcgagccgcacccagccagggctcccccaggtgctgcccattatcttcaggttccgcccgaggcgcccgcggagaaaaccagccacggagcaggggccgggcggcgaatggccgcagcccctcctggccctctgactcggcgattggccggccgtgctcgcactccacga

SEQ ID NO: 308908 - DNA, 732 bp, Homo Sapiens
ttttttttttttttttttcttttttttgagatggagtctcactctgtcacccaggctggagtgcggtggcacggtctcggctcactgcaacctccacctcccatttcaagtgattctcctgcctcagccacctgatagctgggattacaggcatgcaccaccacgcccagctcatttttgtatttttagtagagacaggttttaccattttggccaggctggtcttgaactcctgacctcaggtgatccacccgcctcagcctcccaaagtgctgggattacaagcatgagccactgtacccagccagtttttctaattaagttttaatctgtctcctccactaggccatgagccctaggaggagattgtctctagagggtatcccctgtgcctggcacatgcatgcaagttatgatttatgttgatgaatgaatgaatgaatgaatgaatgaatgaatggtggatgggtcctctgaggctctagaaataggggtgagaggccagccaggtgtagcatgaagggctggacaagaagggagaggccttctgggataagatgggaaggaggctgtaccccacaccctgaaggtgtctatgagttcacatggctcaggaatggagttttggggccctagatgtagacagctgtggcgatggaggccaaggttttggcctgctgtgggggttgcattcaccttcccatcttcacatgcctgataccccagcattta

SEQ ID NO: 308909 - DNA, 1000 bp, Homo Sapiens
tttttttttttttttttttagattaacttttctttttaaagaaaggcaaaatctgatgtgtcttttggtaatcctgatgtctacatgtgacagaaaagccaaacagaggtttaaacacagtggaagtttttttctctctcaagtgactgcagtccattccatatgagtgagtccagactgattggcaggccccaggccccaggccccatgcttcttctgtctttctgcttcactctcctggcatgtggcttccatcctcaaggtcacctcttcatccatgatggttgccagaagcattagctagctcatcctcataacagatgaaaagaaagggaagaaagaacaataaagagtgtgcatcctctcctttcaaggagtgcccccaaagtcccataaaacacttctctttacctctcattggctacaacctaataacatgtccatattttgctgcaagatgtgcaaagaaacataatgttttgggctaagcacattacctagagttcgcttgctaaggaagaaggaaacacatccagctctatgtcactttgataaagagataagcctaaatttacaaggaatggttgaaaataaagaaatgcacacccagcactttgagaggccgaggcgggtggatcacctgaggtcaggagttcaagaccagccttgctaacgtggcaaagccccatctctactaaaaatacaaaaaattgccaggcgcggtgggataagggaggcaaagctgggagaaagaaagggagagagagaaaacgaatggccggcacaggtgcctgggccccagccttcaagtgcggtcagagcagatccggtggcggagtagggcctagatgaccacggactgcaggaggcggaagcacatcatgaggtccagcgggatgggcggcttcaagtagtttccatccaaccgcaggtagcgcaggtgtggcacgttctccaggtccgaggagaagtcatggaacgccactaggtcgttggggca

SEQ ID NO: 308910 - DNA, 1000 bp, Homo Sapiens
atccaggccatatcttatcttttcctgcacagtatccaatcggctttttatagccagaaactctctgaatgcaaagcacgaccttggctaccagcttcccctggcaatagttcgaaagttatttataactttaaaattagcgtgaaagcctacgtttctcataactagtcaaaacattcctatttcatacaataatgtgatcttcctcagttcagaagaaaaccccaaattttaaacctatgattataactaagacacaggaattcaatgcagaaatgagaattcgctgaagttcagctcttctctttacaaacttgattcttacctttctgtttcttcctataaagtaaatgggcttaaaattcagctcccgtagggaattttccaaaaagagctttgtgggggacggaaaaaggcttcttggtggtcacagagttacagagtaccaaattgagaggcagatgacagtggggcagtcaatttcgctgagcgttgttcacccaggataagaaagaaaggggaggttacaagccagggtgggtggtatctaatcctgaaccgctagtcactgacctcactgacaacttgttactgaaaatacttcgttgaaaaaggccagacacatactttgcctagagacctacaaacatagctctgaataagtttagatttgcatttctctagttcctttccaaaagaagaacctcttctatctaattaaagccaaaggctggaattattgaaagtgaaaaatgataaagcagggaaaacaagagtccaggaaatcctcacatcaaaagatcaattatgtaaaattcaatgtcttcagaaccctagagatgatggcatcaaggccatgtgtcacatctgagatcgtatttttcttcttctgaaatattacctgtctcatcccttgtaccaagcatcacactctctccttccagtatttatgaggaaccacatcattatcagtaaagaatctaaactgaagatttaccaa

SEQ ID NO: 308911 - DNA, 1000 bp, Homo Sapiens
ttttttttttttttttttcagtatttaatgccattttattcacatgctcccatgttctccctccctcccattgtagccttgctgcccaggggagggatatgtcttcctttatgcatctgggaaaccaggaacagacccactgtgaggcaagctgaggtgaacatttaaaaggctatttcaagacgaggtgcggtggctataatcctagcactttgggaggctgaagcaggaggatcacttgagcccaggagttcaagaccagcttgggcaacatagggagaccctgtctctgcaaaaaaataaaaacgaatacataaaaattagctgtgtgtggcgtctgtggtcccagccactcaggaggctgaatgagaggctcgcttgggccggggaaatcaaagttgtcatgagctgtggtcacgccacggcactggacagaacaagaccttgtctgaaaacaaacaaacaaacaaaagctatatgggtaaggcttggagggaattcgggagtcaatttctttggggaccagggcacctctattattggtcagaggtaaatattcatacttcccttcctcccccttccccataagactcttctctgttcttggaacatatccctacaaagctggtctgggttgaggcacagatcctgtccccaagtccaagaggtggggaagtttgtgtgcaggtcctgtgggctcaaaccctgcccacctagtgttcccaggccctcacaggggtaagggaaaaagtggaagtctaggctcaggtctggttagaaccagagattaaggtgaggggtacagtggaaccacagtcagaatccaggtccaggacggtgtggggggctgtggtctggggtcctggtcccagttggcactcttgaagactctggaagtaactcattagcgtggcctccatgttcctcaggcacgagcttccactgggccagggctccaagggcccccaaggctggccagatccccagtaagacccagcta

SEQ ID NO: 308912 - DNA, 1000 bp, Homo Sapiens
tttttttttttttttttttttttttttttttttttttttttttttttttggggatatcagggggaagcttttattgctgtggggggacctggagagggaggggggccttggaaatggggatacctgggaccacttgttccccccattcctcacagaaggcacaaatacattatttctttccatgtgaggagatgcgaggagaggatacagaatacaggaatcctcaaaaatacaaaaaacccctccaaactgaatacctaaggttatggaaaaggctagggtggggcacagaagtcaatgggggaacagaaagaggaaccaatgaaactgagaaccaaaagggacctgagaggccatgatgtccatgctgctgcctctgtgcagaccccagagaaaactcaggtaaaccaacggaaactccaaataagagagggtagggtgccccaggaattggctttggggcatcagacaagggagtgtgagtgtgagtgtgtgtgtgcagtggctgtgtatcagaagcaaccagggctaggagtggacgattctattcccacaggggaaggcctcctccatcccggttcctccaaaaccactttcaggggataaattcagccactgcttccgaacaggcaccccttccctgggacaaaagagccaggtaggagaggatgaagtgagaaatcttgggatgaaaacagggcacacagaagcagttcttagggaacagaatatcatggagcccagtgtgatagaaaatgggcatgaaacctaagtgtatgcatgtgtgtgagtgtgtgtgtgcatgagtgtgtatttgtgcatgtacgagggagtaagatcactcaaaggtgaaggggtcctgggtgctgaaaaagaagtgtccatccatgtggtcctccagggcatccttgtcactctcagcaggaaagcgctccttacagataggacactccttccatgtgggggtggcagggcccccagtgctggtttctgacagggt

SEQ ID NO: 308913 - DNA, 1000 bp, Homo Sapiens
gacatcgaggtaagcactgaagcctgaggccccgtgagcaaggtagagagcaagagttacagtgtccggagccgagtgcccactcctcgggctgggcgccgtcagggagacagcaatgtagggggaggggatgcttctcacctccgttgtcacagatcgctgtctgcccactccaccggccattcacttggcaggtgcgattggcagagccccggagagtgtaaccgtcatagcagtggaaagagatctcatcactcacattgtagtagggagaccggggccagtattccccgttctcgaagtcgtgtggtcttggacagtggattgctttgagaaggggggacaagtagaagtcatcaagagggaaaggctgccttaggtgtatccctcctggtctcggagaccatgtcactgagaaacagcgcattcccagtcccgcagaagcagcatcttacctactcctcaacccatatggatttccactgcttctccctccccatttctgagtgttctcttgacttccagggctgcctggaagcccagggtaaatgcttagtaagggttaactccgctttttcttgccccctttccgcctgccaccctaaaactgctcctactcccggtcagcccaccttgtcaccctgcctagtctcatcctagtcctgaccttgctgccgcctgccctgtttctgccttaggccactgcccacactcattgccctcaaacctctgcactctgccttcctgacagtcttttggtcttgagtcttcagggtgctccaggaccccgtagatctgcaggtacgtgtctgcacagggtacgggtagaagccagaaggacacacgtactccagtgcctggccctcttggagaagtcggaaggagccgcctttgatctctaccccctccagagagcaggatccctggggccgggccaaagaccatggagtggtggtcacacctgaagagaaaggctgatgaagcctggccccaaaaggcc

SEQ ID NO: 308914 - DNA, 1000 bp, Homo Sapiens
agagggcagggttcaaccacctccccctccccagcagaaaagagaggaaacaggtgcttcagctgttgtttattgacatacaggtaggctctatagcaacaggcctggaggtgctgcagtagtgggggaaaatggaaggtggagggtggagtgtttgctgcaggacagctgagtggagggtggggacaggtgcaaactggagaggcctagagagctagagaagcaagtaagggccagggccagagtcggcttcaatggaacaacagcccagtgccctaaggcccctaactcttgctggctgtttcttgaccccaagccagggttgggagtcctctgggcatccattttttctaaaggaactggacagagtacacacaggaaaggaagctgtcaccctcttgccatctggctccaggggcctccagtccagcattcctccttcttcccttgattgggtggggccacatgatgggcagccaggctctgggctgtcccactagagcaggctgcaaacacagccatgtttcagtgaggcgttgatcttcttccctggtgtcccaacctaccagtgccacgttacagcccagagtgagttctacaagcgttgctggcctaatggatgggctgggggaagggggtgggacaggggctggaggaggggctctggggtccatcacggcacaggaacaacacgcatggtgttggtgaagccggagccagggcgccatccggtcagcacaatgaccacatctcccttcttgaagaagcctcgggccttgcctggaggaagagaagggaggttggtgagtaaaagccaagccaggcaggtttgcacctgggcagctgccccatagcctgagtactgaactaggctggctgaccactacttcctcacaccacaaggtggcaccaaactcacagcccaggcaaacaggaggaaggccctgaaatgtccttatcactcagatggcagggttggcagggacctttggacatcatt

SEQ ID NO: 308915 - DNA, 300 bp, Homo Sapiens
tcactttattgatgagctaacaaatgtatatattatgagtgctacaaaatgcacatttactctaatcttaccaggttgacctattggcccaggaatccctggtggtcctggtggtccctgaacacctattcctggcagcccaggaggtcccattggtccaggttgtccatttggtccaacatcacctttaagaaataaatacagtttaaatattaaaagcaacacctgagtcactagtccttgggaaccatatcatattaagcaagaatcttgaaaaactgggcattcattcagcaagaa

SEQ ID NO: 308916 - DNA, 1000 bp, Homo Sapiens
tcatatctattactaggagaggcagagaagacagaaaaacagttctccaccacagagatttactttatgtctgacctccaaatgcttcaatatttaaaactaacaaaatacataagaaataacagaaaacagaaacctggttctgccccccttctccacagtcaaaccacaatcacttctccccatcggtatggctctgtgtccagttaacagtcccctggcttggcctcaagtatctaagattactttcaaataccctttctaacaagaccccagcaagaggccactaatttctatggcaaaaaaagccactagagagagatccgtttgtcaatatcaactggtccagcaatttcccatcctcagacacattggcctatcggagctggcagatgtttagacaagattttataaattgttcaatatcagcccataatgaaccccaactgaccattccaaagcagctaaaagcatcccagacctcccccgctgggatccaataatgctctcatgctgcaacattattaatcatggaataaaatagatgaacctcttgaaaaataagtgtatgattgattaaagggcaatctaagaagctattattcttgttttataaccgtaagttatattcactcaatttatctttcgagaggaaataaatgattgttcatttcttctctgaaattatattatatggatatccatataattttgctgaaaattaaagtgacaggcttgctacttttatgatactaatcaaaggggatatgttacttgactacaaattttagacttgtcctataattagaaagtgagtaacacaataaagaggcagtagtctaaggttgtttaaaggtttcttttcccccagggtaagagtaagagccactgaaaggaaagtaagtccctcccccagatcctcacccgaggtttaatgtgcattataggaaaaggacagttaagaaatccttccataaatttgaataattaggccaatttg

SEQ ID NO: 308917 - DNA, 1000 bp, Homo Sapiens
gatcctcccgcctcggcctcccaaagtgctgggattacaggcatgagccaccgagcccggcctcatttggctgtttgataatgtttgtaggcgcctgtctgtccacccgtgccaaaagtgctgggattccaggcctgaccctctgcgcctggccccgttcggctctttgataacgtttggaggcgcctgtctttccacctgcgcagggaggctgagggcgccgcggtcctcaatgcgccaacttttaggtggtttctttgttcttgactcggctgccctgtgcattttctctctctcgttgatttttcttctggagaatctgcttcattggcaaatcgatattgatcaattgatcaattttcctctttatcggcatttcttctctttctaaagtttttggtgactttcagatcacaggccccttttgctgacttctgccctcttctgttccatcagtgtggtgttgagggttccaccccgtgaaccccatcccattggtttccataatgcatgtttttctcatattactgacatttgttcctttttttttttttttttttttttcctaatttcctcttcaggtcaggttgcttcagaggtttctgagttccaagttggaggtcctttcttgatttctagatctccagtgccaaaactcagctttggcttaaacggtagctactgtttggaggacgcagagctcctctgccgaggctgaaacatggattatttttgtccttctttgtgagtacttgagggatagttggatgtggagctgcgaggcctttgaaccatatttagatttttaatctgtttaatgtcaggctgagagcagcgccatccccctctgttctgtttgtcggtttctctgttgacgtatttagatgccaggattgtgggcttgtgtgggctgagacagtgggatttcgttgtgggtcgagccattgtcaacaacaaaaaaatccgttccttggctggtggtggtggctcatgcctgtaa

SEQ ID NO: 308918 - DNA, 1000 bp, Homo Sapiens
cagaagaaagccacaactgagcaacaacccgaaggtcagattgaggagggggatacaacaattgtctaaacaaaagcagggctgccaaccccacacttagttccaggactgtccattgttcaaccaaatagcattgaagccctgtatgcttttgctatcttctgtggaaacagcttcaagatggcttacgagctgtcaagccatgtaagaaatctgtggaaaaagaaaaaggccagggtggggtttgtaaaccatctgtggcagaagtcttctaagcagcaaacatttccactgtattcattaataatgccaatcagaacatcttttctgcatgttaattaaagaaggcacacacagccatagaacctatctagccctatcagaatgaatgaggctaatttttctcacagttttgaataatatccttgagttcgtgagctcaaatttcattgttagccatcaccatttgatttcaagtgtttatcttccttttaatgctgcagtgtcgggatgcattggtgagaacttatccagggtaaaacacagtcatttagagacagtttttagaagaaactatttaggtgacaattttttttttaattaaagggaagagacacaacacaccagatctgagcttgtcagatgcattctagatgtgttaattcttggaagttctcatgatgagggcactgtccagacaacattttaggtagctcttttcaagaggtggaatctggggaagggtggattttcccaaatcttttaccactggaaatgcttccctgggcattgctctagtcaatggtcccaagctttgtacaatttgagaagtatacatgaaatgtatagcatgatcaagaactgtcttaggaaatgagggtaaaaagaaatatagaacaggccaggctcagtggctcatgcctgtaatcccagcagtttgggaggccgaggcaggtggattacttgagttcaggaatttgagaccagcctgggcaaaaca

SEQ ID NO: 308919 - DNA, 1000 bp, Homo Sapiens
gtgtgctagagggaaattaaattggatttaactgccagctgaacataaaactgtagaaattattaaaaaccttttatttatttatttatttatttatttatttatttatttattgagagttcatcttgacttttattacatactagacatatgaactaaccagaaatgtgaatgattctctctactattaaaatcgcaggaaatatatttccacctccccatttttttctgatattgcagtagcatttcagattttggggattagttcagggcaaagtagaattcatggaaggcagtgcataaataattatgaagctacttttctgaaactagtagtgacttacttcataataatcacaagggtgtgcagcattcacaatgctgccactaatcaactacatattttgaacatctactgttactggataccaaagaaagtgagatacttaagaatcttccagtcttgttataagcttcctatgatccactaacttctcaaaggctttacaaagtgcaaaagtccttgctttttggaatttttttttgtgcacccaggatgtataaatgcaaccctttttgcttcttgtgcaggtgtgtgctttaacaatcagtgctgcttttggcatcaatgtagtatgagctattaagagcttctaaaaatactgacctaaatagtcagttgccttcaccctgtatactattcaggcaagtcttcagaaagtatagtgttgtattgctagtccaaaataaggtaggcatgaatatactcaatcttgtttgcacatgcagcaaagaataatttaaatttttgcccttaaggagttttgtgttaggcaggaggaaaaacatattcaacttcaattttgaggttggtaatcaacaggaaagagaaaaatacaaggcagtctaggatctaacctctgtctacgtttctaggcctatgtcttaatactcttgaagtggcacaagataggttatttctagttcttaacaggtgact

SEQ ID NO: 308920 - DNA, 1000 bp, Homo Sapiens
gaattctagccttcagctaaaaataactcaagtaatatgaaaaatatgaagggaggaaaaccattaagttcctgacaatgtgttaagaaaactatttgtaaatcatctttgatctttttatgttcctctaagatcacagaggatgggagtgagtgttcatcgcaaatcttcatgaaaagttctgcagaaggctgatattttcatttgaaaagtattatttttaaatgtaaaatttacacattcagctttgtgttcaatactataaactaggacttcttttaggctggcaacaaataagaaagctacaactaattttcttcgctttttttttttttttttttttaagagacaggatctctctgtcacccaggctggagtgcagtggcacaatcacggctcactgcagcctcaaccttctgggctcaagggatcctcctgcctcagcctccacagtagctaggacagaggtgcaagccaccatgcccagctaatttttttttttttaagagacagggtcttactgtattgcccaggctggtcacaaactcctgggttcaagcaatcctcctgagaaagttatggctaattttcctttgcatcttccattctggtaaatattgcagcaaaggcaaagcagcatcataattctctctctcaggcaaggagtctgatctgcagcgaaagtaggtatttgcactgaaagcttctccaacgtgccaagtacatcagggagtgagactcaaatactcaccctgacccggcagggagtgatggcagagctgaaggaacattagcctgtggtttttctttctcattctgcttgaagaaggatttggcctctttagatgtagcatccacttccttagttaccctgtgccaaggaaaaagacatcaagcttacaagaagaataaagagaaagaaacaagctagaaaagggaataaagacaactagaaaaagatccactcggcttccaataaattctggacgctcagcattat

SEQ ID NO: 308921 - DNA, 1000 bp, Homo Sapiens
gatctaaccttcaatctacatgaaatatgagggacagaagaagttaagtgacatgatgaggaaacaaactggcaaatccagaacatgagacattcaacaagaaaattgacctagactcttctaaagtcattatcatgaaaaaagtggccagtagctactctagattaagacacaaaaccagaaaaacaatcaaattcaatatcagttttggtggaaactctagttcaaatatatagtataaaagatattttggagtcaagcgggataatttgactatgcattacatattaaaagttattgtgaaattatttattcctttgggtgtaataatagtatcatggttatataaagaacattcttattcttagaatttgttgaagaattatttaagacagaagtgctggccgggcacggtggctcacacctgtaatcccagcacttggggaggccgaggtgggtggatcacctgaggtcaggagtttgacaccagcctgacgaacatggagaaaccctgtctctactaaaaatacaaaattagccaggtgtggtggcacacgcctgtaatcccagctactcaggaggctgaggcaggagaatcgcttgaacccgggaggcggaggttgcagtgagctgagatcgggccattgcactccagcctgggcaacaagagcgaaactctgctgcaaaaaaaaaaaaaagatggaagtgccatgatatctgccactgactaccaatgttttgtatgtgtaaatctgtgtatatagagagagatgttttctagggtgccactataataatattgttccatctctatggatgatatatgagtgtttattgtatcaatcttctgaattttttctatgttttaaaattataaataaaagtgtcaggaaagcaaatgcattaattagttcttaattcattaagggtatactctcatgaattcctagacatccagatcaaatgcttttttctctgcacaaagttaattttgtcaata

SEQ ID NO: 308922 - DNA, 1000 bp, Homo Sapiens
aagcttgcctttcctttcctgtctgtttgctttcttccctctgattaatccaaagtaaaatttgactttttttttccattccaacaactccatcttctatcacatatctcctttcatgaagttggcccatgataatgtttctgttgacaacagtataatatagaaaagattgcatatagttaaagtacgtattttatttatttggtggcagcattctaataagaaattaaaactatttcttttaaaatcataatttaatcaccaggcagagcaagtaaagagaaataagttccaggatttcacatctgtcaaaagtaaatgctgatttttattgaggacttccttatttctgccaccagttgactctcatacagcttgttcccaatagaatctagtgtggaattggcaaatgtggtgtcatacatgcagcgctctactggagctgataattaagtacccagaaattttatgaagtgtttgtcaaaccatcagtagaaatatttacacaatgtaaatcagcaaatgctacaaatctgggcttccccccacccaaccaataggtttgctagcatacaacttttattcatcttgtaaacgttcagaatttctataaatattcatagactttcctatactgagtgtctcagaataactcgaagttcttacaatagccagtgaggctgagtgtgagttgacccaccccagtccctctctctgacttgtcttctgttagccttctgactcccagtgttctctacttcatgcacataggctaggcaccctgctgtttgcctgccttttcttcctcgagtgctcttccccagatatctgcatagctggtgccctcacctccttggaatctttgttcaaatgttatcttctcagtgagaccttatctatataagttttctatgattgctggaataaattagcacacctctagtagcctaaaagaacacacactctctctaggggagagagaacactttcttaccttctc

SEQ ID NO: 308923 - DNA, 1000 bp, Homo Sapiens
catggataaaatgtgcatatttatttcagggcaacaagcgtatacacagcaaagcagtgtggggtagagcccacctcgtggcctgcaagccagccagcccctgccggtcgagaaggaagcctgtgtgagagcacacaactggaggccgggcgggaagagaaacacgtgccaacaggccacgcaggccaggaccccagacccggaggcagcgcccctttgagttcctctctctggtctccgatgttcttctgttgggatcatttcaccttgaacaaggtgacggtggtactgtagaagaggctcaggaggaagaggacgatgaaggtggaggcggtggcccacaggttctcaaagccctcctcgtcggcgctcacctccccctcggtggacttgtccacggtcctctcggtgaccctgttgggcagggcctcatgggccaccacgcaggtgtaggtctcccccgtgttccattcctcttcggacacggtcaggatgctgtgggcgaagtaccggcctggggcctggggctcaggcattggggcgctggtcacatacttctccggggacaagggctgccccctctgcatccactgcacgaagacgtccgcgggagagaagcccgtcaccaggcacgtgatggtggccgactcccgcaggttcagctgctcccgggctggtggcagcaagtagacatcgggcctgtgcagggccacccccttgggccgggagatggtctgcttcagtggcgagggcaggtctgtgtgggtcacggtgcacgtgaacctctccccggaattccagtcatcctcgcagatgctggcctcacccacggcgctgaaagtggcattggggtggctctcggagatgttggtgtgggttttcacagcttcgccattctggcgggtccaggagatggtcacgctgtcataggtggtcaggtctgtgaccaggcaggtcaacttggtggacttggtgaggaagatgctggcaaaggatgggg

SEQ ID NO: 308924 - DNA, 1000 bp, Homo Sapiens
catcgtgatgtcttatttaaggggaacgtgtgggctatttaggctttatgaccctgaagtaggaaccagatgtcggatacagttcactttagctacccccaagtgttatgggcccggagcgaggagagtagcactcttgtgcgggatattgatttcacggaggatggtggtcaagggacccctatctgaggggggtcatccatggggacgagaagggatttgactgtaatgtgctatgtacggtaaatggctttatgtactatgtactgttaagggtgggtaggtttgttgatatcctagtgggtgaggggtggctttggagttgcagttaatgtgtgatagttgagggtcgattgctgtacttgcttgtaagcatggggggggggttttgatgtgggttgggtttttatgtactacaggtggtcaagtatttatggtaccgtacaatattcatggtggctggcagtaatgtacgaaatacatagcggttgttgatgggtgagtcaatacttgggtggtacccaaatctgcttccccatgaaagaacagagaatagtttaaattagaatcttagctttgggtgctaatggtggagttaaagactttttctctgatttgtccttggaaaaaggttttcatctccggtttacaagactggtgtattagtttatactacaaggacaggcccatttgagtattttgttttcaattagggagatagttggtattaggattaggattgttgtgaagtatagtacggatgctacttgtccaatgatggtaaaagggtagcttactggttgtcctccgattcaggttagaatgaggaggtctgcggctaggagtcaataaagtgattggcttagtgggcgaaatattatgctttgttgtttggatatatggaggatggggattattgctaggatgaggatggatagtaatagggcaaggacgcctcctagtttgttagggacggatcggagaattgtgtaggcgaata

SEQ ID NO: 308925 - DNA, 1000 bp, Homo Sapiens; identical to SEQ ID NO: 120013

SEQ ID NO: 308926 - DNA, 1000 bp, Homo Sapiens
gatccaccttatgatgggtgtccttataaaaaggggaaatctggacacagagacagacccacatataggggaaatgatgtgaagaagagatacaaggagaaggcggcccatctgcaagccaaggagtgaggtctcagaagtaaccaatcctgggcaggcgtggtggctcatgcctataatcccagcactttgagaggcccaggtgggtggatcacctgaggtcagaagttcaagaccagcctggccaacatggcaaaaacaatttttttttggagatggagtttcactgttgctgcccaggctggagtgcaataacatgatctccgctcactgcgacctccgcctcccaggatcaagcgattctcctgcctcagcctcctgagtagctgggattacaggtgcctgccactacccacacctggctaattttttgtatttttttttagtagagatggggtttctccatgttggccaagctggtttcaaactccttacctcaggtgatccacccgcctcggtctcccaaagggctgggattacaggcatgagccaccacacccagccaggatgtgttacttccgaggtctcgctccttggcttgcagacggccgccttctccctgtgtctcttcttcacatcatctcccctctatatgggtctgtctctgtgtccaaatttcccctttgtataagggacatcatcatcaccaatcatccacattttagaacatttttaaacatttttattttattttagaacatttttaacattttaattttagaatattttaatcacctggaaaggaacctcaaaagaatccattgcctaattcaagatcattaagatttattcctctgcattttttcctaagagttttatagtttaagctcttccatttaggtctatcatccatgttgagttgatttttgtatatggtgtgaggtggggattcaacttcattctttagcatgtgaatatggaattgtcctggccccacttg

SEQ ID NO: 308927 - DNA, 1000 bp, Homo Sapiens
caaagccaggtcctaaaaggcagatttgaatctcacttgaaaaaatgcagtttcacacattaaaggcaaggagaatttttggctattggtataaaacaaagatcactgcccaaagtgaaagaaatattaaagaaaagcttccatggcagtgacttcctgtggaaaacttgatccgaccttcaactgctggataaattactttcattttggagatatatgtagaaaccacgttgatatcttggtcacctagaaaaacatatacattattttaactacagaaaaggtaattatcaatcaacagtaaggtagtcctttgtaattataaaagggaagcaatttcataagcaggggtaaagtgtcacagaagacaagaacgctagtgatcataagtacaaagaatttgattgctttttcatgctccagatgtaaaatgtgtctgttgttcaatattgggtaattgggggaagtagagttgcctcagctctgtgatgactctagaaagaggtcattgacatcatagcctttgaaccactccagaacaagggcattagggaactgggtcaagagcaattagttgagagataaaactggcttccttttgtttgcctgcccaataattattttcatgtaattgatgatgggacttgggggatttcctttaccaaagagaggagaggataaatgctaattgcctatagctacaacaaacccatgtttgttgggaacccatgttctgttgggaacccaacagaattttattttaaaaatatcactccagtacttaagaacccttctctcttcagtggttttcacctctgggtgtacactagaatcactgaaaaagagtttagccccaatccagttaacttagaatctcttaagagctgcggccgagccattggtatttaatttaaaatgctcctgaagtgattctaatgtataaccagtgttgagaacgcttaggtccagggcttccttagccttctgcatgagctcctct

SEQ ID NO: 308928 - DNA, 1000 bp, Homo Sapiens
gatcctcattctacccagtgtcacgagaaatgaaacaggaccctatcaatgtgaaatacaggaccgatatggtggcatccgcagttacccagtcaccctgaatgtcctctgtgagtatcttttgttcctctgtgggccaggacaccagcttaaatcaaaacgaccagaggccaggcctctcactctctctctggtccaagtatagataccattacttctggacatccgagctggccataacttcctgccctgggaagatctgggtaggcacagccttaaccaagaatataaggggaggggacgctcttgtcatgggagacttggggcccacagcttgtgatgggagaaacaggggaatacctcaggcttcagctcagtgaacatagagggggtttggctggcacttgagggtgtgtcttggctcagagggtcactgtgtccctttaagagaccaggagcatccccttccctcggatgacatcacctgtggctttattctctttgctccagatggtccagacctccccagaatttacccttcattcacctattaccattcaggagaaaacctctacttgtcctgcttcgcggactctaacccaccagcagaatattcttggacaattaatgggaagtttcagctatcaggacaaaagctctttatcccccagattactacaaagcatagcgggctctatgcttgctctgttcgtaactcagccactggcatggaaagctccaaatccatgacagtcaaagtctctggtaagtggatcccagcatgcttggcaatagagttttaggtggagtctctctggctttcagagaagagtcaggaaaacatttttattcccagcctgtgtcccatgggcacaagcaaatcccaaattctcctcctgaaccctcccaatttgtctctacagactctcttctccttgtttttctgttttctcatggctgaccttgtgtctggcctgagaaaggtacggagcgggcttta

SEQ ID NO: 308929 - DNA, 1000 bp, Homo Sapiens
gatctataatatttaaataatgtggattcttgtataaaccataaatgatacaggaaataagctcttcagtatgtaagttaattttggagcttttcatttttctcatcactacttaatctaatctagtcacagatgttggctttggtggttgacagaaaaccccccttagtgactttatcgccttacttccaggttctgtgccctttctttgttgagaagataaactggaaaatgcaagctattgtcctttgccaaggatcgaagatcaaaatagtacttggcataaacacttccagaaacttcgacgttatagtcaattagctgcaaaaactgtctttcaagctcattcctgtgggaggagaaacacaagaaaaccaacatgggacaatgttagtccactgggctatcttcaaaaacattattctgatgtaagaaatgtgataaagcaattataagttctagttctttaagaacacatgaaaaagcacacactagagagaaaccctattatgtaataaatatgggaaagcctggaattttctcagttctctttgaaaacttagaaaaactcatactgggggaaaagcataaatgtaaaacatgtgataataaacttgattttcccacttgcttttaaagacattttaggatttaaaatggagaaaaaccacaaaattttaagaaacatggtaaagccttcggtttttgtcatttctctttgaaaacataaaagggttcaatgaagaaaagccttataaatacaaacatatggtagtgttttactcgttccagttccacctgaagacaagaaaaaactcatttctgaggtaaaacctatgaatgtacagaatgtcagaatgcctttagttgatattcactcaaagacccatgatattacatgctgtagagatggaccttataaatataaaaaaagcaccctgaattggaacctcagtagtttacaaaatacaagaaagttttcaattttaacatatttttc

SEQ ID NO: 308930 - DNA, 1000 bp, Homo Sapiens
gggtaagtgttatcctttgaaggcggcaggatgacaaagccgaggggcgcagcctaaggccgaagagttcggggcaggctgactgaagacagaaggccgagcgggctgacagggcggaaggcccggcgggaaatgcgggaaaggcgggaagcagcgaaggcggcgggcgggctggggcatcagctccggcggcggcacgcgcatcccctcaccttccttctcgccctcctcgtccccccctcacctcgcttgatcacatgcatcgcagctagtggctgaggctctgaaggatccaagactggactgcggctctaaagcgccggccgggatcgagaaggtgacagagtgggaagggttaggttccaggcgctgctcaggggaaagaactggagttggagccagacagcactttcttcagagcagaggcgcaacaatccaaatccccttcccgcgcccgccacccgtgacgcacaaaggggcgcgacggggttcgaatgacgttactcgacgctgcggcccacgcccggggtaggcttcacagactgacaggcgacgtgtagccgccatgttgagtctgggcaagacccagaagactacgcctctcccatgggccccattggatatggacatgcccggcggaaatgctgctctcctgctaccatgttttgtgtgggcaagccgagttcgggacctcggggccctggcgtagcacctagagcccgctgggtcaggcgccgccctctcacctgcgcgtctccgccggaggaaaggcggttaatttatttttgaaataacaaaacctaaccggcgggaacgtttttcttgctctgacatttattataataatcctaacactgccgtccgctgtgggctccagcccaggctccacagccgtgggcagcttggagccccagggcttttagatcggccagaggactgacactctggaactggaagaaaaccgcgcaaggccgatggcgtttggattttatcctgacgc

SEQ ID NO: 308931 - DNA, 1000 bp, Homo Sapiens
ttttttttttttttttttttttttttttttttttttttttttttttttttgaggaggatgtatttattatttaggtgcaccagcccagtcagattaacatccaaaggactgagccctgaacaaagagtcaggttaccttttaagcatttcatggggtgagaggggagatctgtgcagggggaagcttactacagaagtgagaaacaaagacagttattcagttgagacatgtattacatcatttcttacttttcaaggaaaaacatgttttacaacttgagtttatctgtctagtgaccatgcagctgcacagctggagaaacagggtcttcacaatgcctgggaaagggagagataaggctcactagctacagacggaaaaacaggcagtgaatttttaaaggactccacctctttctcttcctcaggaggaattgggtttccctacatacaattgagtttttgcttatgcattctttaatttcttttaattcctgttccatttccccctttgctgctttttataacaaaggtgttaatagaaagcaccactatttgccacctcttcacagagctgagcttcttctactggcagtggctgatatttggttaatgccatcaactgtgcggtagtgtgttgagttattactgcctctatagttgactgaatcctcctaataaacaggggtaaaaggtaagggaggatgaggcagatgccaagaataaacaaaaacccaccagtgagggttttgaatcctccaaaggttgagaaccatcctccaaacaaagaatccagggaccattaggaccaagtctgaattggaacatgggccaacttgtgcattctagctctgatttccatgacaacccggccattattagcaatttctaggcaacagttggttaaattaaattttccacatactcttccttcagaggctaagtgataatctaatgccaatctatttcaatatatagcatttctcatttgtgttgcttg

SEQ ID NO: 308932 - DNA, 562 bp, Homo Sapiens
tggcaaaattgccagaagctggactcgcaaatccaacccgttgctccccagaacccaaaccattcctggcctgctcagtgaactcacctcaaactctcgaatgtacggcgcaatgccacaataaggttgattgtggtgtttttcatgtggcagtttctccaggggtggcaggtatggaatagggtcacggggggcaaagagggccagaaggttgggcggcaggaactgggtcatcttgccaagtcttgagagcagaagcaggacagcctttaggttagatcgggtctgcacagagaagccctgtactccttgactctcaaataagaagacaggagaaagtctcggaattaaaacaggctctgtaagggcagagaacagtcctgtgttgcggagaaaagggtacgtcttggtggggggggaggtgaaaggccggtaaagaaaacaaaaataacggctggaaaagggttcctgaagagtgaagtctcagagtcctctgacacgagctgtggggcgggagaggttccctgggaatttctggggaaatcaaggacccgaggaggga

SEQ ID NO: 308933 - DNA, 921 bp, Homo Sapiens
  misc_feature (558)..(558): n is a, c, g, or t
  misc_feature (697)..(697): n is a, c, g, or t
  misc_feature (756)..(756): n is a, c, g, or t
  misc_feature (761)..(761): n is a, c, g, or t
  misc_feature (794)..(794): n is a, c, g, or t
aggcctctccaggctggtgcccctgctcctcacagtaacccagaacgaggaggcaggcagctgtcagaaatgtgatggccacaagagagagaagccggagatgaggacgcgatgggagaggtgggccggcagagacagagaagcagaaagcagcagagaagggagaacaaggccaccaggccagggccccgagagcccgtcgaaggcaggatgtgctcacctagccgccggggcctccagcccttcacggttcggcccctctccacgtccacaaggaccctcctgccatcaatcttcttgccatctgcgtgtttgtaagcggctgtaacagatgtgggaggggagggagaggagtccagaggtcctctagtcaggacaggcccagctctacagaatccgcccgtgtcccatcatcacgcacacgcacacgcccaacagacagccaggcaactgacagccagaccaaccctctcccaaaccggtgaagggcctgctccatctcagcgtctgcttcctctcagcgccccaaccactcctggtcgggggagacgtccaccntcacccgccaccccctaggctccccggcccttcctctcccacatgatggaacagccccctgcccagggcggccaaaatcgctgcaaagaaactgaaggttaactccacgctggactctgctgtgggggagggggctccnccacaaccccaagcatgcaccctgagacaccaagccggggcaggaggccagctgggacnctccncaccccagaccacaccggttttttctatttttnttttttttggaggggggtgagtgtggggggaacagacatcagaacagaaaatgaaccagaagggggtgggagaaatcttcactaggaaactctagcagggagcagagaggcgggttatacactccca

SEQ ID NO: 308934 - DNA, 309 bp, Homo Sapiens
ccctggagtttcagtagaatttcaggcctgtctgcttgagcagcagaggaggagtttctgtgtgcctgtgagagactgtgtgtgtgtgtgtgtgtgtgtgtgtgtgtgtgtgtgtgtgtgtgatgaatgaacagggttgtgtacgtgtgtgtgcgttagacaaatgaacagtgttgtgtacctgtgtgaattgtcactgtgactccaggctctaggctctgcagattcctcagccctatcgcctcacagacacttgggatgtgcagcaggtaaaagagagaagccagattcatggaggcgtgaaggatc

SEQ ID NO: 308935 - DNA, 1000 bp, Homo Sapiens
gggtaagtgcacttccagagctgtcggcatggtgaggatgacagtatgaggtcctttctaagcaggagtgagtccttctttctggaacttttttttttttttaaactttaacctggaactttttaacaccaggtcacctggtgggaacgagtggcagggccccgtctggtcaggaactggactgggatgagctccccagacaagtggctggatgatatctcgtacctgttggagagactgtaggtactgtaataaattagcttctgagatttctgctaaacgggtatcctttagcttaggcaagataggcggacgcctcctatacgtgatttcaaaaggtgaaaacccagcccggtaaggaatgcatcttactttaagaagggttaaaggaaggagtcttacctgatttttaccggtctctaagatcaattttgtaacagtattttttagggtgtgattcatgtgttctacccatccagagctctggggtcgataggcacaacggagcttccattgaatgtttaatgccttactgactgactgagctatggacgaggtgaaggccgatctattatcagaccccatggcagtaggcagcccatgttgagggatgatttcattgagtgaaaacttaactaccgtggtggcagtctcgtttttggtggcaaatgcctcagtctatccagaaaaggtgtctactagtaccagaaggtatttgtaccctgcccagtgtggttttatttctgtaatttcccacctttctcctggtgagtctccctggaggcggtcgcctgagctgggtttaggaccttgcttagtgtttacctgggcacaaaccgtacaccagagagctgcttggttaactaagtcctgaaggttggggatcttgaaacggctccttagaagctgggccagttttactcctccttcctgatttttactggcctgaagatccgaagcctgtttttcctcctctggggaatattctgggtgatctgac

SEQ ID NO: 308936 - DNA, 544 bp, Homo Sapiens
atttctctgtgaagattccagaagtatgcagttaagttatgaacctcagttttctctcagataaaataaaaacatggctgggtgcagtggttcatgcctgtaatcccaacactttggggagccaaggtgggcagatcacttgagcccagaggttcaagaccagactgggcaacatagcgagacaccatctctattaaaaaaaaaaattagccaggaatggtagcacacgcctttagtcccagatacttgagaggctaaaacgagaggagcccttgagcccaggaggttgagattgcagtgaattacgtttgtaccactgcactccagcctgggtgacaaagcaagaccctgtctcttaaaaacaaaaacaggccgggcacggtggctcacgcctgtaatcccaacactttgggaggccgaggtgggcagatcatgaggtcaggagatcaagaccatcctggccaacatgctgaaaccctgtctctaataaaaatccaaaaattaactgggcatggcggcacgtgcctgtaatcccaggtacttc

SEQ ID NO: 308937 - DNA, 625 bp, Homo Sapiens
gaagttttcagttgtctagtacattaatttattaaaatatttgttttgttccaatattgctcttttcttttgaaaataggtacaaactcacactcacacaaaaacagtccataactttcttgcacttaacatttatttttagagtaatatatgggtatagttaactctatgtaaaccaatactaaaattctgttatgtttgcaggcagagagacatgttcaaagaaaaatacataacaaaatttttaaaatgtttaagcaggactcagaattttaagactcaggattttatttatacttgtatataatttttattatacccatgaaaatgaccctatagtcaatagcaatttacttgtacattttaaagtaactaaaagtgtagaatcggtttgtaatacaaatgataaatgctggagttgatggatatttcatttgccctgatgtgattaatacctattcatatgcctgtatcaaaatatgccatatatggcataaatatatacacacactatgtacccacaaaagttaagaaaaatatgtttaaataagaataaaaatttaacctatgggaacaatgttctttaattaagttctttagtttaaagtcactggcaagagaaatt

SEQ ID NO: 308938 - DNA, 571 bp, Homo Sapiens
attgcttgatgtccccagttgagtatagtgtagtatgttctgagtatctcaagtatggtttcatctgaggagattagagaaaataatggctcaaccatgtgaatttattttggttgcctgttatctgggtacctgatctatttatctctgggctatgctgtgacttctaatttaagcttagctccagtctataatctgtttaaaataaagaatgccctaacactatggtgttaagatgaatgaatgaacagaaactcaaaagatcggccaggcgcagtggctcgcgcctgtaatcccagcactttgggaggctgaggcaggtgatcacctgaggtcaggagttcgagatcagcctggccaacatggtgaaaccccatctctgctaaaaatacaaaattagcctggcatggtggcggacacctgtgatcccagctacccaggaggctgaggcaggagaatcacttgaacaacccgggaggcggaggttgcagtgacctgagattattccactgcactccagcctgggagacagagcaagactctgtctaaaaaaaaaaaaaaaaaaaagcag

SEQ ID NO: 308939 - DNA, 666 bp, Homo Sapiens
atctgaagtgcaccaagtattagctaactggtatatgatatgatacttgtataatatgtcaataatgtaaaaggtatttaaatagtgtatgtacttaggtaatatgattcttattttatgtttaattttgaaatgttcattgaggtcaaaaggttttaaaatttgctttaatttaaaaaattatagcatcatccagctattctgactgcattatcaacacttctttctgtggtaaaggtactgtttaagagtaattcatggcagtgtgataatgccagccaattcacagaagagagaaattgtaattagtaataagaatgtgggccaggcacagtggctcacacctgtaatcccagcactttgggaggccaaggtgggaggatcacttgagtccaggagttcaagaccaaccttggcaatatagggagatcctaccaaaaaaatacaataattagccagttgtggggttgcgcaccagtagtccctgctactaaggaggctgaggagggaagatcctttgagcccaggagattgaggctgcaatgagccatgattgtgccattgcactccaacctgggtgacagaacaagaccctgtctcagaaagagagagaaggaaagagtaggagaaagaaggaaagaaagaaaaaaaaaaaaaaaaaaagat

SEQ ID NO: 308940 - DNA, 670 bp, Homo Sapiens
tttaaaaaaagaagttactaaaatcattaataaaataaaataaaatactataaaaaaaaaaaaaagaattgtcatcttccaaaccttagacatggccagacatccccagtgggctgccaaatcctgtcaccgtgtgccttccttaatccaaccaggaactgtgttttacctttctaccccacactcctcccaagatgctcaaccttggtttcatcattgtacagatggctgcagactcagttgtccaacatttccctggggtgagctgatgacctgaaccctaagaacgctcgatttgagaacaatgtgatttagtgttgtttttaaagacactaagttttgcggtgctttatgaaaagcaatggccagcttggagagtgaagtggcaatgggggtcattgaagctcaactgctgtggtcttcccatccttcaaggtcaagggcactcatctgatgtgtagcctgggggcagcaacagagactaaaaatccagggaatcaaatgaggcagttcacagccagggaagagacttccatagggatgaggactaaggcagataactccaggataaaataaaagtgactgcactttcttgcactgcttggagtcggctaccaagtatgctcaagcattgctaagagtatcctgatggacggatgcaaaaaaacag

SEQ ID NO: 308941 - DNA, 545 bp, Homo Sapiens
aggctgagccttttacagctacttggtaattaaacaaatttaaaactatgattaatgtatttgttaactaattagcttttggcctttgatagaaatgtgtaggtaatataaattttagaattggtcttgactactaaactattgctaaaattattaggctaaaagtttttgtctcatctgcaaaaggtgagattatcacctatttcatgggaagatttagattggtaataatgtagtctgggggccgggcgaggtggctcacgcctataatcccagcactttgggaggccaaggcaggtggatcacctgaggtcgggagttcaagaccagcctgaccaacatggagaaaccccatctctactaaaaatacaaaattagccgggcgtggtggtgcatgcctgtaatcccagctacttgggaggctgaggcaggagaatcactttaactcaggaggcggaggttgtggtgagccgagatggtgccattgcattccagcctagggaacaagagtgaaactccgtgtcaaaaaaaaaaaaaaaaaaaaa

SEQ ID NO: 308942 - DNA, 619 bp, Homo Sapiens
ggagaacaatcacatgaagagaataataagtaaatgataaaatatgttgttctgattttaagaatgacagttttaaagggagtgatcactatcagctagaaggattaagaaaaacataaggaaagaggtgaaaaataaagatccatagatataatgagcccagataattgattagtctggattccctggaacaatcccagctggaaatgttttgtatcattaccttcatgggacgcactggagtttcaaaatttaacagtgactagtataataattaaggacacaattattccaaagacttggaacacaaaattactccaaagacttggaacacaaaaggttatccaatttaaacaaaagcaaccttgcagattttattcctaccttaaagtagtttgctgagcacttacagtaatgttccaggcacggcaaggagcgacctgcgttagccaggcagaatgcccgccttcactgagcttatttctttcatggtttttttttttttttttgagacggagtctcgctctctcgcccagaaaatggcgtgatctcggcccactgcaacctccgcctccgcccccgaccccagggtattgaagctcatggtgctagctctctc

SEQ ID NO: 308943 - DNA, 629 bp, Homo Sapiens
atacttgggttgagtcaggctttccaatggaccctaatgacaattgctccctattgggtactattatttattagactcacaggcaatgccacttattccagcaggtgctttagacccactttattctggagcggtgctcagtgagaggaaggtgagccttcccagatgagttggaaatgccccaggcctctggtttctggctggttgatgagtgtcattgcatgctcaccggttcaggagccacttgactactttttggacttggtttgtgtccatggatctggagtcccagactaaaaaccgttttctttgtcaccagtcacggggatagttctttgctgagtgctaaagcaggcctctgattcctttacctctcttcctgctgaggcattcctgacggaagctctgtgctcacctggctctgtggtcctcagtcatgtctcccctgccctaacctttcctagcactcctccacagagtgtggtcgggggagcattagatgcaaatgaggattcctcagtctctgaaatagactttttgcagaaatgtttgcaagaggggagcaggtgggagaagagcctaaatgtcagtaataaatatgttgtagttttcaacaaaggacagggtat

SEQ ID NO: 308944 - DNA, 523 bp, Homo Sapiens
gagactgagtatcactctgtcttgaagaaaaaaaaaaaaggatcactgaggattatcttccatgtaaaataacattccttctaataccgtgttacaagtggatatttctagcttccacatcttacgctcctgcctctacctccctgaaaaacaaagaaatatttctgactctattattccagtaattgagttaactaagagtcactgtcaagcccaaaaatatttttttccctaactagagttcacaccttgggggtactttccttttctctaccatttacagtcaatagaggcttcaggtttagggacatgaaagactatttcgccaaaccgagtacattcccacctcaaatgcacagagcaaagccagggagaagagataacgtttgtatttacaggtggaatcagggaagaacagcagacaccctctctccagtggccactgagatagagacgggacaaaccaaacttagcagaggcaagataacccaatcaggagaaaagcagaacactatacatttcc

SEQ ID NO: 308945 - DNA, 452 bp, Homo Sapiens
cctgctagggcatgactcagattctagggccattccagtttgaacttggcatattagagcatcttagttctctatatgtacacattttctcatttattcttgttgccttccttgattcccagaaaaatctgacaggtgttcagctctttactcttcagtgatttcaaggcttggtttctgtttcttgtttcactgtctacagatattttgagcctactctgctagtcaagatttactttatttatttatctagtacttaatgtgtttataatatgtgccaggcaccatgcgaggcttgctcactggtgacaatggacaagaaaggcagtcagcttatgcccttgtgtagcgtatagcctaatgtgtaaggcagaaaatgaacacacagttaaagaggatgatattgcagatggggaatagcagggtattgaagctcatggtgctagctctct

SEQ ID NO: 308946 - DNA, 616 bp, Homo Sapiens
ttttttttttaatgaaacatacactcctataaaaggagacaacacagttcttgttctttagaagtttacggtctctcaggggaggcaaacccagacccagacatggaaaagacataaaaacacacaaagaaaccacagtcccagcataaaggaagtggttatgtggaagcgcagctcaagtgctgggggatgtgtgtgtgtgtgtgggcgggggggtgaccagtcttcagagtccctcaacagagcccacttactctcctaaagttctagcacctgaagacagaaagaagaacgttccaaaagcaagccagtaagtatgtcagcgttgagggatacatttttctttattttatctggtggcctttctaaatgtgttggtgtcatttttacagttaacaatgtaaatgcactgctgtatatcagtatataagagatacttctagaaagaagaccaacagggacagtggctcctctcaacgagggctgtgattatgctcagagtaaaaattactgaggacacaaaggcggggctgatggcatgagtgaacctggcagtcaccctccagtgacgttcccagaactatttcagaggcagatgtcacttttctcagcttcc

SEQ ID NO: 308947 - DNA, 403 bp, Homo Sapiens
ttttttttttgagacagagtgagactctgtctcaaaaaaaaaaaaagaaaacatcaaagttactactgcagcctcagaggatgaaccaacaattcccatgaaaggtggctagagggaactctagctgagggcactccatgaggggatttatgtaaaacagaaaagtgattggtcaaatatgatggatctccatagctactatgcaataataacctcgtatggcacagatttgtatagaacttccattttcaggaaccacattttataccctaaattaggtatgagtatagtaaaagtgtcaatttttttccttcttatgaaaacacaaatgtgcatgttcctgatttaatttcacacatcacattataaaaccatagtcatctcaaaatgcttaaactaaatg

SEQ ID NO: 308948 - DNA, 634 bp, Homo Sapiens
ttttttttttaaacataaggataccagtcatgttggattagggcccacccacatgacctcactttaacttgattatcctctctccaagtaaggtgaaaaaaccctatcttcaaataaggtcacatggtgaggtactgaggattgaggcatatgaatttggggagtggagacagttcaatccataacacgtatgatagtcatgtagagcaagaaagtacaatgcaaaaaacacaatgatacagtgataggagacctcacagtctttctggaaaatcaaggcacacacaagtaggtaacaattcagctgtgcacaataccgatacagagatttctagcatgatactgcattcattatcaggggccaaaagagatcctcagaatttttgcccacttctggcaagaccaccacctgatctgcctaatattattcaaagaattctcaccactttctgcctaaaggcattcaggactaatgtcattatggctgttacccctgagaatgtcagccaccatatgaaaccctgggctcccttcctctcctgcacagtaattcccataaggctgtgggaaaccttctgctgtgccttctggaaatcgcagtcattggcaaaaatcgccacaccctgacctcttt

SEQ ID NO: 308949 - DNA, 1000 bp, Homo Sapiens
gtacattgtggcaggagttgaggttactgtgagtagtgattaaagagagtgatagggaactcttgaacaagagatgcaatttatactgttaattctggaaaaatattatgggggtgtcaaaatgttttacatattacacatattttcaaagactttacctgtctgaaaaaacattaccttcatttttcctcttctgatgactctttggaatttctttaaacccccaaagactgactgaatggatgtaggtgaaatccctctttgttacattagcccacacttaggtgatagctctaattcatgcaattaacgccttctgtatgaaacagtttttcctcctttctttaagggggtggggatacaaaagtaactcagaaaattttctttgtcataaaactacactgaacatgtgaatagcatattgtggtggacaacagcaagagtaaacagatgaaaagaataaatgtttagatttgttgattaaacaggaagtgtattggtttcctgtttcagaatggttttacctttttatccacacaatgagctaattgcatacaataagatagattgcttcttacatgtcagctagagaaatactaagattagaatacttaaaatgcttattgagcttgaggtactgtttaacgctattttaatttaaaatgattatatatctgtttaagtctcttaatgtctattgtacattttttaaagggtgcgattgttaaatactcagaaaaaggtttgcattcaaggatactgatgctagttttataatagactttgtatgtgttatgtgtaaaccagtccatgtttctcgtttttatgtctttacctctttaatggatttttatttatcctctaaatcacctgggacactatgaatgtaacaataatcgttatgaaatatgatcttgtttttagtcagaagactaggatatttaggataggtgttcattcatcctcagtacagtgcacaaactggctgaacaattgtacg

SEQ ID NO: 308950 - DNA, 211 bp, Homo Sapiens
aaacctctgggaaataaccctctgtgcctcttagctgctggtggtggcggttgacgcgtcttcacactccttggcttgtagccgcatcattttaatttctgcctgtatcttcacctatcttcacatgtctatcgcagtgtgtgtgtgtgtgtgtgtgtgtgtgtgtgtgtgtgtgtcgaaatctctctctccttacaaagataccaatcct

SEQ ID NO: 308951 - DNA, 1000 bp, Homo Sapiens
gccggggtcattcaataaatatttcttgaataaaagtcattgctgaaaaactaatggagggcattagatggtttacatgcagagtgcctacatactgctgtagagtgacatggtggttatcttctgacctacagggactgagataaaaaatgtgagtgctttggaggcttagcaactgtggtgtggcaaaggaaaccatgggcaaatcaaatcttggcataaatagctctaataataagtgagtttgagtaccatgtttgtaacatataaaatatgacagactaaattataaataaggacctctgacattatgggcttcaatctgtgctagtcaaactgggaaagaagatgatgaaagaaatcattattcctataaatagaaaagagaaaaataaggagcatacatgtaaaaatgtgcttgaaatttattgcttttagagaagtgatttctattattcagaaacagtactgaacacagcttaacagtttaaattgcaattatatcatcaagtgacaattgaaaaggcaagtatcctgaaacaaagagtatacagtaaattatagtgtttttcatttgcattgctctttgatgattcttcaaaaagtggtagtagtgtgatatggtatgaaagatgagaatatggatgtagaagtcgtatttgccaatcaagcctgcacagaaaaaaaaaaataacagattatctgtaaaatttttacccctgtaaacacatttatattctggcctggtacagagtagatattatatacaattatagtttataaaatgcagggcccaaaataatatttgacacagagtagacaattaaacaattattaaattggttcctgaataaataaaaattatcattcagcatctacaatttaaattatttttcaatcatcatactattttattcttctacttaaatatagcctacacatttcatttatatgcatttcctctaaataatatttcaatacatcttttcttgattaaatg

SEQ ID NO: 308952 - DNA, 1000 bp, Homo Sapiens
gatcattctctcctgggccatccatcatctaaaaccaaaacaaacccaaatacaatttggggggaaaattctatttacaaaagacagtaggagcaggaatgggtattgggtttaagaatggtatgtgagtgaaattaaattatattatttcaatgtccatgggcacctggagatcatcagggccatccttttcccccttcagaagtgcagaccaaggctgagaaggagagtgcagcgtcacacgatgatcccattaacgggaaagccagaactagaactcaggtctgcttgctctcaggaacatactatactgtctctctcatagaaatgaaatacagagaactacagtgatcagagaaagctctctaactcatcagaaaaagtcacatttaggccaggcgtggtggctcatgcctgaaatcccagcactttgggaggctgaggcaggaggatcgcttggatcaggagtctgagactcatctgggcaacatagccagactccatctttacaaaaaataaacaaaattagctgggtatggtgatgtatgcctgtggtcccagctacttgggaggctgaagtgggaggatcacttgagcctggaaggttgaggctgcagtaagccaagatcacgccactgcattccagtctgagtgacagagtgagaccctgtctctaaaaataaataaataaataaataaataactgaaaaagtcacgctcaaatcaaaatttaaatggatgtctctggtctgtaccacctctgaactcaagacagttatgaactatgattctcctcgggcaaaaatctgaatctcaaattctgtacagtcaagatttttttttttcaaatttaggctaggtttgtcactttgtccaacttgtttacaaatatctattggctttcataccattaattacagcacacatcacacctctaaagggtgaaaatctgtttgctctactgagacctggcatagctccaagaacactttcctcagaa

SEQ ID NO: 308953 - DNA, 1000 bp, Homo Sapiens
gatctgttgcctgcctgcctggagagaggggaaacttccacacaggagcatccagcagtgagccttcttccagttgaggctgacagtgagcaaattgtctgcctctcactgtgtttcttgtgaacaagtagaggccacgcatcacatgtgtgaacaaacagccctgcagctatacccacaggatagttcagaggtcgtgggagcccttgccccctaagtgtgtcaaaaattactgctggttgtgtgtgtgatgatttttttacacattttaatagttatatatttactttaaagtgaatttaaatatatacaaaatatacatctatgattttttttttttttaggatttttgctccctcattcagctaaatccaggttcttgtctcatgaccagaaaaaaatgagtcacacagacacattgaagggtgaggagggtggaatttattaagcaaaaggaaagctcccagcaaagacaggggctctccaagcaggttttcccttcacagttgaatgccagggctgctgcacaggaggtgaagaggcccaggctcctcccctgcataagacgtgaattcctggtggctccacccattctcctagaacacaggtgggcatgcccaggcaagccataggtagtatcggaaaaggcaacatttgattggttgaaaggcattattcagaaagaatcaatcaggaaagggcaggcaaacggaggcagaagttctccttctgggtcacgggtttcatccaaaaccagcggtcccgtctttcagtccttagcctgttttagacttgaaggtgggtttcactggggacccttctctatctgtctaggcatttggctgcctcctacctctatcactataacttaattttttttcataaaacttataacctttttattgagccaaatctttagaaagtagttttacttaaagtcaagttaaaactgtttaaggtaaataatagtagaagagacacaaagatagggatgcaattt

SEQ ID NO: 308954 - DNA, 1000 bp, Homo Sapiens
gctcttaacggaatggaaatcttagaaatgttgatgggacaatgacatgaatcatgaaaagaaaggaatagtgggaatacgaatattagaaagccaatgttttgtggatgtttgaaactctcatatacattcatagggcttaccccactggtatgggcaacaggtaactctggtagtttctaaagatgctcccagtgaattatgcctcctggtatgtggtccttatgcagttcccttctacactgaatcgagactggcctgtaatttgtgttcacaacgaatagaatgcagcaaaagcaaagccctgtctcctagagattctggtatgttgtctctttgttctcattggttttaaggaacttatttatttctgccttaatttcattatttacccagtagtcattcaggagcaggttgttcagtttccatgtagttgtgtggtttcgagtgagtttcttagtcctcagttctaatttgatttctctgtggtctgagagattgttatgaatttcgttgataaaattttatatatttatggtatacataacattttgatatatgtacacgttacaggatgattaaatcaagctaagtaacaaatccataatctcacataaattttttttggttgctcttttaacactaagttttggggtggtttatttcagacaccccaaatgactgtctatctcatgtgattttaaggatgtctaaaggttccccagttgtgcaatatctacaggatcactgaatgccaagtccccagggaaaggaatgatgaaaggggaagttgctggaagaagagagaggaggaagttgaggccatagagaggaaggccctgaaagaaaactttaactgcttgccagtttggccagaggtctctttgagcaggaacaactgcatttagaccagcagttcccatgctctgttttacaggtctgagctttccagtaggtgaaattatgttttgaaactgtgtgccatgtagtaccagctaga

SEQ ID NO: 308955 - DNA, 1000 bp, Homo Sapiens
cccttcatccaccttccttcataaaagcagtttcactaataaatccccctgtatctaaagcttctcttgggagtaaaagtatagttagaaactattctaaattgtttttacaacttatacttaaatttagaaactgaactgggtaatccctagacttttgcacttttccttacgtgtgttctgctcatatacatagttcctatacctctgagaatataaaatttaaacgtccttttcccctaataattgtctactaatgaatatcaaatattagtagctaaatggataactgctacaataaccacaatccattctgcttctactcagagaagcatcaccaagtgagaagaaaatttaagaaaacgatgaaagacgtgataatggttcaacaaagacctgacccaaaaccaggaggaactcagttatctgaatctttatgattgagagattactgagataattcacacatgggaaacacttaatggcttagaatatacttttttcaaattgctccacatacagaaaagcatatgaccttcaaaaaatcttgtaaagtttgaggaaactgcagatcagacagcataagtcagttgcccaactccagagcagggtgtgtgtgtgtgtgtgtgtgtgtgcgcgcgcacgcgtgcgtgttcatgcacacagagccaactcatgggtttcggacttttccctcctgagctcgtggtcttttctgtcaattacaccacaaagcgttcctaaggccaagatccacagcatgcaaagctgctttttaacattaggaaaagaagtaaaaggaaacttgtatggaattctacgtagtcaattgtctaataggttttgtttatggacttcagagttgctcaaactatgaaacctaaaatacaacacagtgacttttctcttgagtggcacatctaaatgaacaattcacaaatgtcattaaaagtactgtttgagaaatacatatttaaaattaaaatgcatcaaaagatat

SEQ ID NO: 308956 - DNA, 1000 bp, Homo Sapiens
tattgggatgcagagaggtgagagcagctcttcagaagcgctggcaaaagaagaatgtgtattgaaaccatgacgggttagaagctcctaactccacttccagggctgccttcagaaatcctttctcttgaccatggccatcaacacaagggcgctgaccagcacagcatacatggtggccttccctagcaggatctcatagaggatggtggcagacaggaccccttgctggtaggacaccgaggtaaagccacagtctgctctaccccaggcctcggcgctgacgatctgggtgacgggtttggccctatcctgggtccactcgtcattctccgagagcccgtagaactggacttgacagcggaagtggttgcgggggttctgccagaaggtggccgagaccctcaggcggctgctcaggcagtatctggagtcattgagggcgggctgctccttgaggggctgcgggtccgtgctgaccccactgtgcacctccttcccattcacccaccagctcagctccacgtggtcagggaagatacctgtggccaggcacaccagtgtggccttttgggtgtgggagatctctgcttctgatggctcaaacacagcgacctcgggtgggaacaccttgttcaggtcctctaggatggagagtcgagtcccatcaccaaaatgctggggctgattcaaccctgctaagctgctggcacagagatacatggccgagtccccctgctctgtgcgctggatctccaaggtggagaaagatcccttaggcctctctgcagagaaccgatcactgagcagccttgatttttctagttgagcttcattctggaagtaagtcagaaactctgggccctgccccagggtctgtcggtaccaataaaggcggttgtgttcagaaattggatcacacctgaaagttacattctgtcccctctttgtgatgttgtgtctggggttctgggagactccagtatctgcgtgatctgcc

SEQ ID NO: 308957 - DNA, 1000 bp, Homo Sapiens
aaacgaggcgctggcggaaagcagccagcactcctccctccctctccctcctttcctcccctcctccctcacttttgctgggcccttggggaagtcttggttccccgggccctgggggtgcagagccggtgttcgggagagccgcctcgtgaccgcacggtgtgttcggtttgtgaaagctcagcgggctgatcgctaggatttgagcatttttctctacatatacggtggaaatggtggctgtgaatatcaactactccttatttaattgtgaaatgttagaaaacacaccgagagactgcgcaagcacatatgcgtgggctaaaaggcgctaagaagacacctgtgtctacccctgaggcatccttgtgctgacattttgggtcattattctctcccttttcttacagcttcatcacgtgtgtgtgtgtgtgtgtgtgtgtgtgtgtgtgtgtaaattcttaaacgtacatggtttagccacaatgaggtaccacctcatacccattaggatggctactataaaagaaaaacacaggctgggcgcagtggctcacgcccataatcccagaactttgggaggcccgtggggtgggggggggggggggtggatcacctgaggtctgaggtcaggagttcgagaccagcctggccaacatggtgaaaccctgtctctactaaaaatacaaaaattagccgggcatggtggtgtgcgcctgtaatcccagctatgcaggaggctgaggcaggagaatcacttgaagccaggaggcagaggttgcagtgagtggagactgcgccattgcactgcagcctgggcagcaagagcgaaactccgtctcaaaaaaagaagaaaagaaaagaaagaaaaatgcagaaaatagtaattgtttcaaggatatggggaggctggaaccctcatgcagtgttggtggggatgtgaaatggtgtagctgctgtggaaaacaggatggcagttcttcaaaaaattaaaaatata

SEQ ID NO: 308958 - DNA, 1000 bp, Homo Sapiens
gatctgggtgctgtgtgtgctcattgctgctggggtgtcactgcttctagaggtacccgtcagcaggcacagctaaacaataagccaggcgtggtggcacaaacctgtaatctcagctactcagaaggatgaggtgggaggatcacttaaacccaggagtttgaggctgcagtgagctgtgatcaagccactgcactccagcctgggtgacagagacccattctccaaataaatacaaatcatgaagctgggtgcagtggttcatgcctgtaatcctagcactttgggaggccgaggcgggcagatcagttgaactcaggagtttgagaccagcctgggcaacatggcaaaagtctgtctctacaaaaaatacaaacatggccaggtgcactcctgtaatcctagcattttgggaggctgaggggggcagatcacctggggtcaggagtttgagaccagcctggccaacatgacgaaaccctgtctctactaaaaacacaaaaattagctgggcgaggtggcgcatgcctgttatcccaactacttggaaggctgaggcaagagaatcgcttgaacccaggtggctgaggttgcggtgagccgagatcgtgccgttgcactccagctgggtgatagagtgagactctgtctcaaaaaacaaaacaagtggccaggcgcggtggctcagtggccaggtgcagtggctcaagcctgtaatcccaggactttgggaggccgaggcaggtggatcatgaggtcaggggtttgagaccagcctggccaacatggtgaaacctcgtctctactaaaaatacaaaaattagccaggcatggtggtacgtgcctgcaatcccagctacacacaaggctgggcaggagaatcacttgaacccaggaggcggagtttgcagtgagctgagatcgcgccattgcactccagcctgggtgacaaagtgagactctgtctcaaaacaacaacaaaaacaaaaacaaaaacatt

SEQ ID NO: 308959 - DNA, 1000 bp, Homo Sapiens
caacttcctgggctcaagcaattctcccacctcagcctcccacagtgctgggattacaggcttgagccaccgcgccaggctggacccacaattttgggttctgtgcttgttcatctataatgataatgaatgaatgagaacaataaagagaactcaaaaagacattccttctctacccaggctggtcctacgtccgccaaaccacatgttctgtcctgattaaagaaatgggcaagagaagctgcaagcctggcccatgctgactggttgctgtatcaggcaggtggctgcccctggttgctccaaatggaccccctcaaacagaatcatctggtgcctcctctgtctccagataggtggtgagctctgggaaacagcagcgctggatctggtccctcgggctcagcaccagccgatgtccaatgcctatgagaggaaggagccaaagctgccctcctcccccagcaccaagtcaattccctgctctcaaagggggtttattccagtttccatgatccacacactggctcagctcatgtttcatacattgacatcccaaccaggttggtgctgttactatcccattgtatatatagatggggactcaagctcagtgcagcccccagcctctgcagagtggatgttcagtaaacgtgaacatccacagcaatgacaccatgagtgaacaccagagctgctggggctgcaatggcctctgtgcaggaaacacagggcacaggcaagttgaaggaaaacgcttttgccaaggagaggcaagcattagaagaacccacaaggagaggcactagcgggaagctatggggccacagtggtggtggcagggagaatctaccagaaggggaaggggagtagggaatacacacctggcctcactttcttcccatcctccagtctcctgatgagttgggatcgttcccttagcccccttcataggcaggaattggagtggctcatttcattcagcctgccgctggccact

SEQ ID NO: 308960 - DNA, 1000 bp, Homo Sapiens
ccaattcttccccaaacccacctagctcaggaactcaagtctttccaaccaaaagatcaaagtaaacatttctgctttcaaagttttattgagatgttggggaaaaacagccaacatatacattcctcatttcgtcacaactggcatttgatccacattccataggctcctctctggctttgatctaacatcaggtctccttggcagttccccttctgctgttcttgttgctgcttggtgctgtgtgaagcgcaccagggcagagccgctgggggctcacaagtgggagcggtaattgcgattggctgtgggaaaggacaggtttgcaacagagacacgaattagaacattcccatcaagactcttgttgctcaaatctgcatttagttattggaaataatctcaggccaagatttcagggtcctgtgagagctgcctccaagagggagggcctggcagcaatgtgtgcctaagtttggcaatctcctccccatccctcactcaccgtcatcgccccgtttcctacttttcaggttgcccttacggtattttcttttgctgccacctctcttgactcccttgtgaggagatcggctcttgctcctcctcatgccatgactctttaatttgcggctggtcgacatggtaagttctgccaaaatgaggggctttgcaaggcccgggggcaggagtctgggtatttaaggccttggcattgtgacagggaaggggcatggctcagcaggtgggcggggctctactgtgctgtcactcacctttgctgcactttggtcacatttgtgaaataaggtggtccttttgccgtgcagctcaagggctgccctcagttttgaggtcctttttatgttaagtgaggctttcccatataggtgttattgagaaactgaatccagccctgtgccaggcatcggatgagtacaagagaccattcagatatgcttctcctgcctgtaggaaatgtaacagtcattgagtgtgt

SEQ ID NO: 308961 - DNA, 1000 bp, Homo Sapiens; identical to SEQ ID NO: 120015

SEQ ID NO: 308962 - DNA, 1000 bp, Homo Sapiens
gatccagaaggacactggggcccaagagcccagtaggcttgtgccccaatccttctatccataatgtccaacctaagaccccaagcctcagcttcctcctctctaaaatgggaaaactcagccgggcgtggtggctcacggctgtaatcccagcactttgggaggctgaggtgggcagatcacttgaggtcaggagttcgagaccagcctggccaacatggtgaaaccctgcctctacaaaaaatacaaatgtgggccgggtgtggtggttggtgcgggcctgtagttgcagctactcaggaggctgaggcccgagaatcgcttgaaccctagaggcagaggctgcagtgagccgagatcgcaccactgcactccagcctcagcgacagagtgagaccctgtctcaaaactaaaataaaatgggagaaatttatgagttgtgtgtagactccatcaggcaatgctggagcacagagccagtcccaagagatctcagcgggcacacgggggaagcgagtagcttcagggactggctgcatttgggcttgggagtagaggggaaactgtgggcgacggtgagtatctgttgctttattggaggaataaacatgagtttcctgcgccaccccttcatgggagactcccccagaccttggtccttctcccttttcctccagaaccacaacatccacagagctcataggccccttttaatcaaatttcgcgctccaagaactcgtgcatgcgcaattgccccaagggaccccccggagcgtctcccattttcccccactgcccccatagcagctcaggcctgagccccgcgcgtgcgcagagcggcctaacaggtcgcacgtatctccccaaagcccccagacccgcgcatgcgcagagcgcccgaacggagaccacctcccctccccacgccaattccgactaagggtgcacgcggcccccaccaacccatcccccgacttcagcctcgggcgccccatgaccc

SEQ ID NO: 308963 - DNA, 1000 bp, Homo Sapiens
ccccggtgtgtgatgttccccttcctgtgtccatgtgttctcatcgttcaattcccacctatgagtgagaacatgcggtgtttggttttttgtccttgcaatagtttgctgagaatgttggtttccagcttcatccatgtccctacaaaggacatgaactcatccttttttatggctgtatagtattccatggtgtgtatgtgccacattttcttaatccagtctatctttgttggacatctgggttggttccaagtctttgctattgtgaatagtgccacaataaacatacgtgtgcatatgtctttatagcagcatggtttataatcctttgggtatattatatacccagtaatgggatggctgggtcaaatggtatttctagttctggatccctgaggaattgccacactgacttccacaaagattgaattattttacagtcccaccaacagtgcaaaagtgttcctatttctccacatcctctccagcacctgttgtttcctgactttttaatgattgccattctaactggtgtgagatggtatctcattgtggttttgatttgcatttctctgatggccagtgatgatgagcattttttcatgtgtcttttggctgcataaatgtcttcttttgagaagtgtctgttcatatccttcacccgctttttgatggggttgtttgtttttttcttgtaaatttgttggagttcattaaactgaatccagcagcacatcaaaaagcttatccaccatgaccaaatgggcttcatccctgggatgcaagtctggttcaacatacgcaaatcaataaacataatccagcatatgaacagaaccaatgaccaaaaccatatgattatctcaacagatgcagaaaaggcctttgacaaaattcaacaacccttcatgctaaaaactctcaataaattaggtattgatgggacatatctcaaaataataagcagctatgtatgacaaacccacagccaatatca

SEQ ID NO: 308964 - DNA, 1000 bp, Homo Sapiens
ggatcccacacccatgtccagggaaagccggagccacggcggtataaattagcgcctttattttgatcacctgagcgagcgcccgcggctcgcccgcctgcggtataaacgtacaaattccctgtagcaccacacaccatgcctcagagataaatacagccccaggggctcctgctctggcaaagcaactcttatttacaggaatagattacaaaagtattacaaaaagtggtcctgaaccgggaaacgggttgggggtgggttacggttacacctgctacatttgggaccggagtgcactgggtctcacgcccccccaaataaccggtgcatcccggggcagggttaggtctgcgagggtctcacccccatgggggagggcgcgagaaagctgaacctagcccctcaaggttcagctctggcccaccgaggaacacggagcggccatcgcaatgggtctccgagaagggtgctgcgtggaaaaaaccgcgctgtgtccttgccctgtggggcgggggcggaaacttcagttctcccgcctctcctacctcaagagaagtcgcttttaaagcgctgttgggaggggggcatttaagttcaatcttttgggcgcgagggaccctaggggcaccatccctcgggcgggtgggcggccaccatcccctcagagcacctggtatatcgggttggggttcgcacccgcagggcactgcggggcggcgtccggtgactgggtggggtcgccgctgctctctccctcgctgggggcggcagcctcttgcctgcgcggaggcgactcagaaggcacgtccgccagcaggagggcgggcgccgcagggctctcggtggagatgcgctccacgatgctggacaggcagtctaggctcgacaccgccgcactcttcccgggcctgggttctgcgcggggagggctcggttagtaagcaggggtggggccgcgacaagcctcccacccccgggcccagtactttgagacaga

SEQ ID NO: 308965 - DNA, 1000 bp, Homo Sapiens; identical to SEQ ID NO: 120016

SEQ ID NO: 308966 - DNA, 1000 bp, Homo Sapiens
ggatctcagttttcactgaatgctttttgtccttgtattatgagttgtgtttttctgcttctttgcttgtctggtgagtttgggttggatgccaagcattgtgagttttaccttgttgggtgctaggcattttgtattcctgtaaatattactgaactttgttttgtgatgctggtaaaatacttggaaatagtttcattcttttgggtctttcatttaagctttgttagatggtaccaaaattgcatttattctaaagctagtctcctcgtgcaccccctcccccttgattatattaaagagatttgcaaaaatttaaaacaattatattcttcttactattttagggggaaaatacaggtttttgaaattaaaatgttactttgattaacataatgggtttattgttatttaaaagctgttctaattttttttttttttttaaagatacagtgtcttgctttgctaccaaggctggagtacagtggtgtgatcatagctcactgcagccttgaactcctgggctcaagcgatcttcctgcttcagccccctgagtagctagaactataggtgtgtgccaccacacttggctaattaaaaaaaatttttttttgtagagatagtgtcttgctatgttgcccagggaggtcttgaacttttggcctcaagtgatccttctgcctcagcctcccaaagtgttgggattacaggtgtgagccaccgcacctggccctaattttgagtgtagcaaatattgatagatataactcacataaataaaaactcaataattgggggtcctcagtaactttttttttttttttttgagacatagttttgctcttgttgcccaggctggagtgcaatggcgtgatctcagctcactgcaacctccgcctcccgggttcaagtgattctcctgcctcagcctcctgagtagctgggattacaggcatgcgctaccatgcctgactaattttgtatttttagtagagacaa

SEQ ID NO: 308967 - DNA, 1000 bp, Homo Sapiens
cctctcaagcgtttcagggcttttgtggatcgacccagcacccctgccctgcactcctaggaaacacacgaagagcacacacaacggtattctcgtcgtgtatttgtgatctcctctaggcaggcttgacagccccacccactccccaatcgtcactcgctaccatccaccacggacatttgagtccttgaacttgtcatgctcagggaagtcctgtgatgtgccttgtccttctcccaggtgctcaccccctaacacaggtgcagatgttcacaaacagccacattctgccgtagctgtctccaatctgatgtcacccctgccttggccttgaagccctccagctactagtgctgcccaaagacccctcaagggtaagtttgttctcgcattccgccccatctcgctttccagcacacagtaggatgttcaataaactgttgatcagattctgaggtctgtttgtgtttaatcagacaatatgcaaagtatttacaaccaattctggatacccccccaccccccgcaagtctgggccttggaatttcggagccccaggcccggcccagagccaggggtcccccaggcctctgcatagtcatctgaaatctacaaaacactgttaaaaaaaaaaaaaggacagtattaagacaccttacacaaagggccttaggcagttggagagggatttgagagctcgctggggtgagtgagcccagatttgactggaatggacgggagaagacttgggtaataaagacgtatgaaaggaaaagttgaaatttcataggcaggcactgcttggcctccttccccactggcagggcctggctggctcaagaacccctggcagtgggaatgttattgctatgatgagggggccatggtgaaatgtacaacatgtttgggggacggagcgggggggacatttttacatgttaaatatggacgcacatggagacacgcacacatgcacacacatacacacacacagggaccc

SEQ ID NO: 308968 - DNA, 1000 bp, Homo Sapiens
gaaagggctaaaatgattttatttttaaatgtggacaggcaagcagaggtggttggcaaaggcaaggtggctgacgatccggaagctgtacaggagagataagggcactggctgccagagtgccctatcgaagcatcatccgaaccctgcggtaggggtggcccacaccacggcctgaggcccagtcaatgccatatttgtgggcggcagcatcagacactgcatagcgaccattgagatttgatcggtaacaggatgcataccaccaggcaccgtggacaatcactgcacagttgctgttgcttgaatcgtggtcagcgtcataggtggtaaagggcctcccactgtggaggctcagggaatcccctgcagtgccctctgagaacttgcccagtgccagctggtagtggtctacctcaccgaggaggcggaaggtcgcatagtgggcgaaagtacggttaccattaaagtcttccagctctacccgcagctcccagttaccctggagagtaagctggtgcaaattctcatttcccagccagaattcactctcttggttcccaaaacctgctctgtaggaggaccaagagcggaagaaatccacagaaccatcctggcgcctctgaaacaccagccagccgcccccctcggtgtccatgtcacaaaagactgggagggccctgccctcaggtaggcacagatggtaccagccgctcaaggtggcgccctggctcaacagctcccggcagtttctggggccttcctggcaccggagcaggttcactggatctcctggctcacccttggggcccatcttgcctggtggtccaggtggcccttgaggacctggggctcccttctccccaggacttcctggagctccgggacaactgggcaggaggacaactttgctggcttccagttccctgggtcctgggcagctggggtgttcctgggtcttcaggcaggcaggccccccaagcaggagaagccacaggga

SEQ ID NO: 308969 - DNA, 1000 bp, Homo Sapiens
ggacttcagaacaaatgtttattactgcttaatggggccaaaggggcaacacaaagcattgaaaacatcactggctcacaaaaacagtcaccttgttaccttctcagttgcatttgtttatttcacaaggcttcattcacacataaaaacaagatactaatccaattcaagttcataacgattataaaagtaaacatttgttgggacaatgtacaataaattgcactttttagacaagcattacatttacatttatagagtgtactatacataatacatggaattacggaaacgtctaattggtcattgtttatagaggaagaggctgatcactaacgtttattttgtagttaattagtactgttcagactaatcaactcctttattctagaacctgttttcattagagatgccatggacaaaataatggaattcataaaaatagacaattccagaatctctactacctcctctgcaagggaaaggtaggagttagaaagaaaggaagtggggctgactgagaaactttgtccctcatttgaactaaggatccatgcattatgcaaaataccaaaaatagagaaactgatacaaaaggcttttgggacatcttggatctgggaccatctccagccttattcttgtgctttcatgacaccagagtctttcgatgcatttatattctcacaattcagtccatatattttatcccatatataatatatagttattaaaagttatacagtttaatggaaaagattttacatgttaactaattgccaatgaaaaaggaaaataacttaaaatgttcactttctactcaatgattcttttttcttaagcttttcagaataccactaatgacaaaccagagatggaggtaggaagaatgggatatattaatgaaatgtttttatagcaggcagcaaattcaggtggagataagcttgacatatgtagtcttttagatgcaaactgagaaaggaatgccagacagctg

SEQ ID NO: 308970 - DNA, 1000 bp, Homo Sapiens; identical to SEQ ID NO: 120017

SEQ ID NO: 308971 - DNA, 1000 bp, Homo Sapiens
gagacggagcttgctctgtcgcccaggctggagtgcagtggcgcgatcttggctcactgcaagctccacctcccgggttcacgccattcacaaattttcaatagaatgtttagtagtcacccaaagatgatttagtgtaataatgaacaactagaacataaaagaaaaaatttccatttacactagtatcaaaaaaggtcaaacacatagcaacaaatgtaacaaaatgtgtaagacctctacagtaaaaaccataaaacactgctaggataaattttaaaagacctaatggagagtgaaaatatgctcatggatctgaaacttgaaactgttaatatgaccattcttcctaaattagtttctagatttaccacaatcccaatcaagcatttttagtagcaatagataagttgattctaaaatgtctacgaaaatgcaaaggacccctaattgccaaagcaaccatcaacagaagaataaaggtggaaaacgtgatttcaggcaacatgatgtcacttactataaagcagcaataatcaaaataatgtggtattgacataagggtggacatataaatcactggaacagaattgagagtccaaaagtagatccacatacatatggccaattgcttttcatgagggcgttaagataattcaatgggggaaaagacagtcttatcatcaaaaggtactggaacaacaggatgtttgtagaaaaaaaattaaacttgacacttgcctcacaccatatacaaaaacttaaatctagaatacatagagaaccataataacacaacccaattaaaatatgggcaagaacaacaaaaaatatcaggtaagaatcacttgctagaaatagttttacttcaaagctaaagtttatggctagttataaaaaatgacatccctggccgggtgtggtggctcacgcttgtaatcccaacactttgggaggccaaggcaggaagatcacttgaggtcaagagttcaagaccagc

SEQ ID NO: 308972 - DNA, 1000 bp, Homo Sapiens
ccgagaacaagtgcactttattggttctgatacagaggagctgccagaaaagccagcaggcggctgcggcacccagccctgcccgaggggagcaccaggtctgcaggcaccgggcctgatccggagctgccaatcagcaggcagccctgcctgcacagtcctcttgggcagcccacagcctgtggccggcaagtccctccgtggaggcgtgggttcccaggtggccagtctttcctgcgcgaatggggcttctcacctggccacggccacagccacagtgccccagcctgcctagactccacgaggccccggtatctccaggacagctaaggctgctactcaccacgggctgtggctgccgcagagaccccaggccctcggcctctctggcctgctcgggcccacatcccgctgggcacagtccaggcagcagggcgggactggctgcccacgaccaccctgcttgcgccacgcctggtgctctgagctggccgcctggtgcgggctgagagtagagggatggagcttcctccagtggccccagcatcaacaggtgcttctcgctgtcctctgggccagactctggcctggctcctgctccccgacacgttcaaaggcggtggcagcggcccagagagccacgagatccagtgtgcctgcgcacgcatccagcctgggcgtctgtgggtgtccactcccggttctacagtttgagtcgggcaccctcagcttgttgtggagccctctccctgaatggcttcgtgccagccttgagaggcccatggccggggcagtgactgcctgcaggtaggacctcactcggcagggtgctcttcttgccccagggtccgaggggcaggcccctagctcccaggccccctgagacctgcccactttctggttagaccgtgactgtcttgaggctctggagccccacagtgagatgccacttgcaggggtggtgaagccagggtggcgaggacaggtgggcggggctgct

SEQ ID NO: 308973 - DNA, 1000 bp, Homo Sapiens
gtcagttcaagaaatttatattcaaaaattttcttaagaatacacatgattttacaagatcattcatcatagcaccaagcctaatattccttaatagaaaacagtcaaataacaaatactccagttaattcccacaggtataaattatgcaaatagccatttatatcttaatttacagtaatcaataaataagacggcacattcatatattgtttataaagatctttttttttacaaagctacagctatgtatatcctaaatagacaaaaataatccttgtactacaaaataacatttcattttcctcaatagttttcttagagctctcagtaaaaactttcagacatagtcaattaagccctgcacaataaggaaacattaaatctgctcaatagaccagactcccccaaaataaaacaatgatcaccacccactacaatatggtctgaacaatctcctgtctccaagtttagttaagtctgtcctgaggatgtacagtagggaacgaccatttttccgtgttcacaatttgtctttggcggatagtatcagcaccactgtgagtgacataggcagcatcttatggtgcaatttcaagggcagagggcaggtgtcccctgcaccacattccctccccacagctaccgcccctaccccagggacattctacacaaacacaccagcatttggcttaagggatccttgttggaatgcaaacggctccgattctgagtagaatttcagaagcctttttgagtcgttactcggggaaggggaaaagatgagggatgggaagatctagtcctgtacagctatttattcctgcagttgaacttttgaatttaaaagaaattcccttaggaaactgcctcagatgctgacgtaatttaaggagaccaatttccttctaacagccctaggaagcagatttcccaggttctacttcaaacattcatctgaaacctttaagattcagactaccttctgtctgaccaaact

SEQ ID NO: 308974 - DNA, 1000 bp, Homo Sapiens
ctcacttaaaaataaagttttattaatcaaaaggcacaaggaaacagtggacacatggaaagggagtcaaattttttatgttcaacattcattgcagggtaattagcaaaacttaaaagataaagtaggattctagcaaacaggactcttcatacagtcatctaatacagctaatatcaataatgctctattaaacagtatgtagagtttggattctagaacagaataagtaagcaaaaaataaaaactgttttagtgtctcattaaatgtcaggatcatttttctcaatataaatataaggcctgtcttttcagactgtcaaaaattacattctttaaaaaaaagtcttattctattcacctcatgcattgttggcatttaagaaacttatactatccataatgtttttaatcttactttttcagttaacatatcattgacactgtgttttcatcagtcttcacaaccatcattttaaagggaattgacagaagactggtggttcgatagtttatgtaaatgtcctcatatcactgaacttgtaagttttaaaaaatttcttgctattaaaaacaattctatataatactgttcacacagcattttctgtcatcagaatcttttcctgaggaaggtttccagaagtagaattgctgggcctcaataagcacctaccacctgttagactttaaatttttgttggggggaattctatctagaaaaggaagactcagaattacatagatgagaaatgaatggaaacctataggtgcagcacctaatcctccaaatgcataagagagaacatctcttgacacgctactacataacaggcactgtgctagatagacactgcatacattaatccaatctttacaccctgaactatatattattgtatctgatttacatgctagccttacaaaggttaagaaacttacacaaggaaacaaaactagtaggactcaaaactgaactctgaactcagttgtgattcca

SEQ ID NO: 308975 - DNA, 753 bp, Homo Sapiens
  misc_feature (5)..(5): n is a, c, g, or t
  misc_feature (710)..(710): n is a, c, g, or t
agtcnttccaccatccctcaaccccctttgtagaatttgccaccccttcaggcgctgttgctggtttggttctgccccagccaatccagggtctaaatgggcggggacctccccatctcccaaatccctgtgtctgggagccccaggccggaaccagtgttgggcaccaacagagggcaaggctgaagacccactccccactatggagctgggcacactgaggccccgagagtgcccgaggcggatgtggggacagagcagcagtgtgcacagtggggcgggtgtgggtgaggaaggagccgccgacacagacttatcacagagcagggagccctggacagatgccgacaggacaggcaggcagatcagccaactgaggagggacaggggctgcctcaggggacccctcccccgacccgtacagctgactgcagggccctgggcacagcctggctcctggcctacctgtggtggctcatagggcaccacgacgctctgcctgccggtgacagggtcatccacatactgcgagagattattgccttccacgcggatgaggtggctggctggagcagactgtcctgccgggaggggtcgacacttcagagaggtgcatagaggtgcccacccctgtgctaggtgcagagaggtgcccagccctgtgccgggttcaaagggtgcccagccccatgtcaggtgcagagaggtancccagccccgtgccaggttcaaagaagtgcccagccccatgtc

SEQ ID NO: 308976 - DNA, 1000 bp, Homo Sapiens
aatatgtaacatcatcttgaaccaacaaagctctgaagtttaatcgcatccagacatctggctggtttctttctcctcaccttcttatggttgtagatttcaccattgtaacagagccacaaatacggatatttcttcactcgaattggctgcattccaaacagcgggtcaactaccgccaaccggtgaaatccaaagcagcagttggtgtatccattgacattctcaaaacggaatgcatctggacctctgtgtgcaatcttcatagcactcagacactgaacagaaaggcaatcatcactgccaaacagcgcccaaatgccacacatggtgcaatgaagctataagctttctatggagagaaaagcagacaaatcaaaaatattcaatatccaatccaactctgcattaaatcttgattccggaaacgtgcataaaccacttcaaagactaaaatttaaaccatcttttctatagcgatttcccattaggttggcaggcacatgggagtagagaatgatttaatttacttacaggtattcggaaaagatagtgacctctacattcaaccggctacagcagcttagcacctagccaaagcctgcatctctcccaccttaggatttatggttggctagagctgacagcgtccatgccacatctgtctctgcattctaagtttgcttccaagatacagatacaaatgcaggctggctccaacctagccagagatcctagccccactctcaccatcccaaaatccctcaaagatccaacagactttccagattactagagtctcctctcaggttcccttgacagttaaatgccctctttatctgaactagctgcagctggtaccatataatgggtacaacagaaaatcatactgctgtaagtgtaaaagatacgcagctctttcaagcatttcactatattacatccaggttaccttcaagtgatttattcagatgtgattgaagaaaatctaaagggaaaa

SEQ ID NO: 308977 - DNA, 1000 bp, Homo Sapiens
gatcctgtagagctagtcaaaggaactcctgggccaggaaaaaagtcaacatagaatttgaagtctctcttttagtccctctatatcctatagagacattctcaaagaaatgctgcagggatcaagagacccagggacagaacctaagtactctccatgctactaggggatgatagctccttccctcggttcctcattcacccctgcctgtccctctaaggacctttttttgcagatagactctcagatgtgataggctgctgtaccctcgcctctaattagaaacttccagggaagagctctgatgggcatgtggtgattcacgcatcttttccttggacctgtccaggaagatattgtacaatgaggaggtggggaagaggttgatcagaggaaaggagacactctgttacgaaaggatatggcaataggagatgggaaaatgaatgcagcaacaaaaaagagcggttttagcatgcacgacatttggaccctaatgaaacaacattagcactacaaatccacctgttcttattcaaaagccggctgctgttttatctgccctgtgccctttcatttccccaagggcctggcatggaataggctcttaatgaacgtttgtcaaacggccttagttttgatgtaaattcacaggcacatcctgggcataaatgaatccagagatattgatttacaccaggccttggaaggccagatcataaaacagttggttaaaatttcagattcccttttgtttttattagttctctatttttgaattattttcctgtgcaaagagaagggttgaaaccctgaagttgaacttgaagctcacaatgcttccagtcacagtaccctcttttttcttcccagaagcaggcttttctggcctggggccgctatctactattatttccatcatctgaacttcaagtaccatcacagaaatgagtatctgaattctgaaaagcccttcatgctcagcgctcagtcttttctg

SEQ ID NO: 308978 - DNA, 1000 bp, Homo Sapiens
  misc_feature (20)..(20): n is a, c, g, or t
ctttggcccaactagctgantgaagaacacaaggagccgtgactccgaacgccccagcctgtgtcctggatgggccgtgtgcagcgaatccgttggcgactcctaactaccaagaaaaggagctctcggaggagatttcgtcgagtgctacgtgtggctgtgataagggcaggcaaagcgtcttagcactctacagctctggcgtggttggagggagggtgggggtttctccatctctggaagctctacacttaaacattttaagttaaattacatttatatagtattttcataatttatattgcttaaaattatgatttgcatgctaagatgcaaacttacgtgatatcttctttagacataatgctattaagagcacatgctttataaaataaaactggtctcattcatatcaggtgcagaaagccagtcctgaaagcatagactatcccttattctggctgttattaaggaaaaaattcatttaaaaaatacagtaaagattgaaaccaagtttactgtttcttgaacagaataggaagaaaatattttaaatggctgagctggtcattagactattactcatttatcttaaaggcagaaacttgtcaacccaactacgtgaaacagagaagcatgatttgcttaagcaggcgacattagagttaggcctctccactgaagcttcccgaccgtcagcacgtggcagacaggatgcgcccatcattccgcaagggagaaccggagaggcccgggagagtccttggctgtcctctcatcgaatgatgggtgctgagcgatcattcgtcacagtcgggcggagtttcacagtggcaaaggggttttctccgctgagaaaaggcggctttgcagtcccgttggcatcgttaggagccgcggtctcgggcttggacgctggggccttaaaggtggatgtcgtcctggccgaatctgctctcctgtcggcagctgcccccatggataggcattccaagtagtc

SEQ ID NO: 308979 - DNA, 1000 bp, Homo Sapiens
tctgcagatatgaggacttggtgggcagagggaaaggaaagagtggcctatgaggcagatggtgatgcaaaaatgtcaagttgccattcaacttgttgtttgctaactctgaagtaagaaagatgagggaaatgtaaagattgccgtctcccaccactctggaagttgcgccggaaaggagagaggcgggaaagaagagaatctgttgtatcaagatattactgtagccttttgaggagcttcaataggggaaggaggggagtggcccaatggagttgggtgaccttccttctccatttattgtcaaagagcaaacccaggaaacatttatgtcaacagggcacaaacaagctacacattaaacaacaaaaagtacaccttccagggggaagttgggcaggaaaaaccagactttgtgtgtacagctgaatattttctctaacttcatcctatgaaaataaaaaattattaaaaaccgatcttcttttaaattaggataataccgcggtttaaaaaatagccttgtcataagtgcttctccctatgaagtgcttctcatagaaaaatatacaaaatatatttacatttataaaaccttaaatagtaaactgtaaacagaacagagtaaaatccaatgacttaatttaacaggttcaggactctgtcttggggaaaggaagagaagaaacatttgatgctgttttgaccacatcctaaggagtaatcagggcagtagtgtcattgaatttactttagctgtgggttgcacgcaggtggcagagttccctcaacataaggtggtctagtccccaagttgtgggccttgaaatctgattagtgttctgccttcaactggacactgaccgtttaaaaattaagtcttcctatgtcttaacaaggggaaaataaagtaaccatgtcttaggaatgggacccaagggtcatcctggctgtgatactctcgttgttgcatgatttaaatcctatttaaataatcttt

SEQ ID NO: 308980 - DNA, 1000 bp, Homo Sapiens
caccactaaaaaaggcttttattacaaaatgaattctaataaaaccaggcctggtcttcaacccctcccgctgggtagaggccctagggtgggctagggtaggggagatgggggtggggggccctgaaagaacagagcaggctgccctcctctcatcagtctcagctgctgccctccttttataaagggctagaagagctcttccaaagccccttgagagagtccccatccttccaaccaggatccttccaaccactgctgtcacaggaccttagcaatgccgcattgcaggatccaggaggtctcggctggctctcagcagaggccatccagggtcactcagcctgagcgatggcgtaggagagcaaccacagcagcaggggacccagaatgaggacagcaagccagacagcaaagctggccaggatgagtttccgggcccgggccccccagcgcactgcctcctcggaccggcctgctttatgccgctcttccgccttgatggcaaacaccagagccatgactcccaggcaagagcagccacagataatgctagtagctgccaagcagcggaggcggagccagcagcagcggatgggggatggaggatgagcagcttccgtgttgcccaagatctccactgccttctcctcgtcctccatcacctggctataggccttgaaggactctgagtttcggctcctgcctcagctttggtttggcttgggtggtgatggagctgactcagggctccaagccaagcccaggggtggggttgagtggccagccaccacgtgaagagcccagggagctgggaaggggtgtggctgactcaaaccagtttggctagatgaagagccaggggagggcccaagggatggagcaactggagctaggacgcctgccctctggaaaaagttgtgaaaggaagcacctgagcaagagggataaaagggaaaggtctgaggcatcaaagagctccgaggaacgtctaggaacc

SEQ ID NO: 308981 - DNA, 1000 bp, Homo Sapiens; identical to SEQ ID NO: 120022

SEQ ID NO: 308982 - DNA, 1000 bp, Homo Sapiens
gatataaaataacttttatttacataatttatatatatatataactgctttctttagaacaagaaaatttataaatgacatgatattgctttttctgtcaaagacttcttcaagcaagatagtatacatggtcacttttgtttcaaataacatgatggtaaacagtggatattaatatttttgtcatgcctcaaccatttaccaacaattaggcgttcaaatcctcatgttgaccacttgctaagacataagtgttcaggagaaaaagtcaagaaaagataaaaacttttactcatatctcctttaaaatttgtgaaataaatcctttgcaacatcttcttcacatgaatcagacctaacatagttctttccaacatgtaaggtaaatacattgattaactttctcttttccaaaattaggtttaaggatttaacagtaggatactttagctggctgacttgattctctaatacaatgagtctctgtattctttatatagtaagaaattccattttccataaaactagctcattatagattaaaaagaaacagatgttaaagttaaaaactaatattacacaaggataaataatagtttaatcatggcaatctaactcccaagctaacactaagagaatgaaatcttttcagaatatgagttttaaaaacttacaaaaacagggtattcaaatagcaatgtgatttactaccatgatttctgtgacatatcaatcatgaaataaatgcctacttatagacaatttccgctccgaattatatagcctcctctctgacaaagtgttacgccataaatttcactaaaagacaatgaataagaagtgctctaacagcagtagtttcaataaattagcattactgttatatgtgctgagacataattctcttctattaaggaacttaaaaactggccaccattttttcaatatacaaacataattatctagactctaaaatatcttcccaactgaaatactgatc

SEQ ID NO: 308983 - DNA, 1000 bp, Homo Sapiens
gagctcggcagccgctgcgccgccctttggcaccagaggtgagcagcgccactcctgcccccttaactgcagactgggacccacgcaccgccccctgcccatctccgccccgcaggcgcgcacccgccttccctgagcgcgcccgccccccaccttcacccccacccccaccccacccccactcccacccggacctccaagatctcggaacggctctgagccctgcgcacgcgggaagggctgccggaggcgcccgtagggaggcgcgcgcgcgggcggctcagggcccgcgttcctctccctcccgcctaccgccactttcccgccctgtgtgcgcccccacccccaccaccatcttcccaccctcagcgcgggcgccccgcggtgacggcccaggggccggacgcctggaacgcaactccaggcagctcgccccctagctacatccgtcacctgacacggccctaccaggaacagccgcgctcccgcggattctggtgctgctcgcgtccccgctcccctattccccttattttattcctggctcccctcgtcgaaagtcttccattcttcaaactagattatttaaaaatgaaaaaggaagaaaggaaagcgaggtcatctcattgctctatccgccaatcaggaggctgaatgtcagttttgaactaaaagccgctccgctcctcttctagatttggaaaacaagcgaaattaaactaaaccgctgcacgcctctgacgcgacatctggacacggcgcggcgctggcgctgccggagctgtcgacccggcctggcgccggactaggtaggtggagtcgcacccgggggtcccagctgggtccgggcgcccattcccctcccagctgcccgcgtcgccgagggcgcctggctgggacaagcaccgagtcctttgtgtctagcccatttttattttcggttttaaccttcacgacagccgcggagcatctgagcgcttcttcctctttcctcttcccc

SEQ ID NO: 308984 - DNA, 1000 bp, Homo Sapiens
tcaattaaatctcttttatttataaattactcagtctcgggtatgtcattagcagtgggagaacaggtaatattagcaccatgaaaacaggtaatattttactatgattttgatttgtattttcccagttattagtgatattgagcatattttcatatacctgttggtataagaaataaattctttgctcattttaaaatggagttatcagttccaatatgcttctaaagattagttggggctttgctgtaacatctagacatgtatatctgatttggaacaaatccacttcctctctgtgtagtgcctggcactactggcacctttgtcattcaaataggcacactctcctgctcccaggataggaaacctgcaagagaagaagcagaatcagttggccactgaacatttcttcaacagcagagagaatgaagatgagaaaatgagaaaactaacattaattcagcctctaaaaataatgctgtttttccttgtgtagtggtgactaattagtcagtgggctttgcttagcaggagatgttataaatcaactataggaatactgcaaagtcctgaatcaaacctatttcatgtctgtaagcataatattctttcaagtacatccaaagccttagctggctgatgggagaagtctgacacgttttctttacacagtttcccaatattttgcttccttaaataactgaagactcagcagctatttctaaaaaccatgcttgattttattcctcctacttccctggtggttttagtactgaaactgcagtgctatttagctgagtttagatggcttggcacagatattttaggtcagcatttggattataaatttttcctctttgctcattggaatcactatcatctatgatataatttgctaattgttgaaacttgttagaccttaatcatataatattttacatttctttaagtgatgagcagtttccaaaaactggttagttaataatatatttgatcc

SEQ ID NO: 308985 - DNA, 1000 bp, Homo Sapiens
cactaatctcatatctagagatttgatagaaagattcataggactcagcataaagttgtatttgcagctaagatttatttattttttaattttttgaattaaaaaaagacctttatattccaccctttgagttgcaattgggacaattgggagagggggaagagttggagtgggatgaagaactaggaggggctcgacggctggaggtcttgtccacttagtttttgtactggaagggctcattgccggtttcattgagaagacacgtgttgatgagggcttctgtcaccgaaaagggttcgcagtggcagaggggcaacagtcttcaaagtaacccttcttctcctggccaacagtccagggaatgtgtatgttggcactacgattggctacaccagcagaaaagtcgttgatgttggaggtttcatggaatccagctaggtgttgggctttgtccaggcctcccttgggatcataagcgtggatgtggtactggtgccactgcttagtttctcgatggcctcctcagtgtacttcagaccattctcctcccacatggccttggtgctgaagttggtatggcagcctgaacacttcctgttcccaggaatgggcttgggatcaaaggttgctatcactccaaagtcttcacatacatgatgcaaaatgaaacagcccacccagaaatgatctcccatgctgattctttcacagggtccggtttgaaattcccactgggcaggcatgacctcagcattagtacccaccatcttggctccagcatacaagcaggcctggtaatgggcctccacgatgtccctgccatgggctttgcctgctcccacactgcagtaatatggaccctggggtcctgggaagccattggaaggccaaccaaagtggtacccatctgtccccatgagggtatattcctgctccatgccaaaccagggtgctggttgctcaccatgtccattatccacttacaagtgtgcctcaa

SEQ ID NO: 308986 - DNA, 1000 bp, Homo Sapiens
tagaatagttctcagagcagctaggggacatgggaacaaccagtgaagaaaatctgggtgaggcaccactatagtgtaaattttctttgacagcttgctatactttaatgtataatactcaattcaaggtacgagacaattgcatctaacattgttataaatcaaagagacatcagatcagttatcaagggcttcagaacatcaagggccccagttatgagcagcatcttcataccctccatgtttaacatctttactttctgggtataatttaataagatcatcaatttgaagaatggtaactgcagcttctgttgcaaatttcaaactcttaactttaactgtggttggttcaaacacccctgcttgtttgttgtgtctaggtttaccatttctcaaatcaagaccaattcattttagatttttactttctgggttaacttgagcctcattatgaaaagcccttaaactatgcaaccagatctgtggagttctgggcagcattaactgtcagtgaataacaggaagaggtcttgcagactctgcaatagcaagctgttcctgagactccatgctggtttcacagttttcggggtatatggaaaaggctgcttctacagcatccccaactagcatcatggattttgactccaaaactttcttcactatgcaaagagcatcatgtagagtgctccatctcatcacatacgaaatcatttgccccatgtaagataattgatgcagatgcacaagccttactggttttgattaagatcagctcatcatcacaaattctctcctgtaccacttcttccacctgtcccgacactgcagtttcaaaagtttcttcacccttcaaattggccagggttgacagaacagtccctccagaagtttcagcaatgcatttaaggtccctttttaaagctcttctaattgccatagccccaacctctacaaaatactttgacacatatcatcaattccaccagctattaga

SEQ ID NO: 308987 - DNA, 1000 bp, Homo Sapiens
gatcttagcactgcactccagcctggatgatagagtgaggcctccatctcttaaaaaaaaaaaaattcttggccgggcgtggtggctcatgcctgtaatcccagcactttgggaggccaaggcgggtggatcacgaggtcaggagttcaagaccagcctggccaagatggtgaaaccccatctctactaaaaatacaaaaattagccaggcgtggtggcaggtgcctgtaattccagctactcgggaggctgaggcagagaattgcttgaacctgggaggcggaggttgcagtgagccgggatcacgccactgcacttcagcctgggcaacagagtgagactccatctcaaaaaacaaaacaaaacaaaaaaaacttcttgctattcttgcctaattatgcttccctgttaccgtcaaagtaaatatatcttactgggactgaattataatttacaaacattttaacaatattgagtatttcatctagaaaaatatcatttctccttttattgacatctttatttttcaatatagtttaataatttcctttcacctctattgataaatgagttcctttatcatttgttttcttgtttctgatgtgacagttgtattgccctcataaaattaaaatcttttatacatttttctctactctagagcagaggttggcaaactttctgttaaaggataggaaatatttgcagttttgcgagccatatagtctgtcacagttgtctaaagcagccatagtcaatagctaaacaagtaagcatggctgtggtttgataaaactctatttacaaaaacaagcagcagataggatttggtccatgggctttagtttgataacctctgctccatagcagggatcacacacattttctgtgtaggatcagacagtagatatttgggctctgcaggccacatggtctcctgtcacaactgctcaactctgctgctacagcctggaagcagcacaatcaaggtgtaaatcac

SEQ ID NO: 308988 - DNA, 1000 bp, Homo Sapiens
ggacagtgaggccaggatggaaccaccaatccacaccgagtacttgtgctctgggggcatgatgaacttgatcttcatggtgctggatgccagcgtggtgatgccagggcacatggtggtgctgctggacagcactgtgttggcgtacaggtctttgcggatgtccacgtcacacttcatgatggagttgaaggtggtcttgtggatgccgcaggattccatgcccaagaaggaaggctggaacagcacctgcagacaccagaaccacttgttgccgatggtgatgacctgacctggccatcaggcagctcatagctcttctccagggaggaggaggatgtggcagtggccatctcctgctcgaagtccagggcgatgtagcacaccttctcgttgatgtcgcgcacaatctcctgcttggccgtgatggtgaagcttggtgaggatcttcatgaggtagttggtcaggtcctggccagccaggtccagacgcaggatggcgtggtgggagggcatggccctcgtagatgggtaccatgtaggtggccctgtctccagagtccatgacagtgccagtgatgcgcccagaggcttagagggacaacacggcctggatggccacatacatggctggggtgttgaaggtctcaaacatgatctgagtcatcttttctctgttggccttggggttcgaggggcctcggccaacagcaccgggtgcttctctggggtcatgcacagctcgttgtagaaggtgtggtgccagatcttctccatgtcatcccagatggtgatgatgccatgctcgatagggtacttcagggtcaggatgtcgtgcttgctctgggcctcatggcccatgtaggagtccttctggcccatgcccaccatcacaccctggtgccggggtcacctgatgatggaggggaacacagctcaggggccatccatccccagcaaagccagctttgcacatgccagagccattgtcaatgatgag

SEQ ID NO: 308989 - DNA, 1000 bp, Homo Sapiens
tttttttttttttttttgcattaagaaagctttatgttaaagtatgaacagcatttccaataaaacatgaaaagattcatattgtatctacaaaatttaagtctttgctacaataaatgctatatttcttttaaacaagcctaagaaggtaaggaatgtcatgatcaatccgtacattctctttgcagcataagcctggagactttgatgtttaaattggacaatcatagatgtgaatttcctggtcatctccaacagacacaatttttgaaccatttccattgtattttactccccagacctgtaaatttaaaaaaagatagttctacaaatgcctttattctttataatatttatgaaatgaacatccttattttctcgttattctgaatctaccaaaactgagatgaggatgttcttgtactttctaaatcagtgagaatggaggctttaaccgagcaccttccattattgctatttaattagaattcctgccccttcccatactccaaaaaaaaaaaaaaaaaatcatttttaaatacagtactaatcaagactatctacaaccctttcaaagagtcagaatcctgaagtgtaacctaatgccaggaagacggaagccataagagaccaacatttatgcttccaggaagaaagagccccacaactaccccgaggtcactgcctatagggaaagtcacaaactgcgctcctcagctgaccccttgtgtccgccccccacagtcagtaattctcactctgttattagtggcctatggagcctgcctgtccccaggagctagacaacatgatattgtggaccatagatttttatttgctatgtgttaaattaactgattcacacctccttcccagacagaattgatgtggttggagtttctctaatcataaataacttcctgattattaggaggtgattctgggtggtaagcctgtcaccctactctgattttagtgttgggattgggctgcatgatgg

SEQ ID NO: 308990 - DNA, 1000 bp, Homo Sapiens
aagagacaggttctcactctgtggcccaggctggagtgcagtggacaatcatagcccactgtaaattcaaattcctgggcccaagcaatcctcccctcagcctctggagtagctacatgtgcgaccatgcccgctaatttatcttaattttttagaagttaggtcttgctatgttgcccaggccggtcctgaagtcctggcctcaagcgatcctcctgcgtcagccacccaaagtgcttggagtagaagtctgagctaccacgcctggccctgaaagctattttatggaagaatttaaactaaagatctccaaatattattcataattacatacccatgttggtatctatgtttacttatctaccatttttataggatttacaatatgacaatataaaataatcgtctgtatcccaaaaatagagcataagaaaaagactaaaatttgttttatttatggtacaaaagtttgttctcacaaatattttaaataaaatattgaatatgcttcattatttctgaagatcttaacaccgtgtgatacagagattcaaagatctagttctaacatcagtttgaatatttgatttttaatggctatcaaagcagaaagggatgccttacaaaaaaatgagaattttttttaaaaagtttcacttaaaacctcaaaatcagcgtaatttttcttaattcatgagaacagatttgattttgtatatcttaccagctgaacaacaatgtgatcttatttgcagttaaacacttgattttctccacaaattccctaatcccagacttacatattttgtaatagttaaactagataactcataaatccgcatagatggacattcaaattatagtattgtgcaacatgcagaaagtgaacaaagcatgcttccctcaggacacctttagtaccaaatgaccatctgacacatagagcaaagaaggaatgactaaataactattacacagtagtagcttttaaatattaatg

SEQ ID NO: 308991 - DNA, 1000 bp, Homo Sapiens
gatctgggtggggacacagagccaaaccatatcacccaggctggtctctaactcctgagctcaagcaatctgcctgccttggcctcccaaagtgctaggattacagacgtgaaccatatttattaagcattgttacagcaaagagaagcattgttgcagcataacaattggaagactccattgatggacgtctccatcaacaagaactgtcggataaactatggtacacccatcccttagcgtgttatgaagtcattacaaaaagaagaagcagatctctgagtgtcaataagagctagtacttatagggtgtctactgtatacaagtgctgttagaaagtgagtattaactcatttaattcttgtaacaagcctgtgaggtggattctttcatatccccattttacagagaaggaaataggaatctctatatccaagatatgttatcaggtgacaaaagcagtttttgaatggtgccgccattttctcgtaagagcaaatctggaagattccatgagaaattaataattgtgtttgcctctgtagcggcaccctgaaagatttggaagtaggtgtggaaaggaaacttactttcttgtgtctttctgaattttgtactgtctacgcgttttgtctttcacaaaaccaaacagaaaatgaccatttggtgcattttgtgtgtcaggcattcttctagtctagagaagcacaggagagcaaaatattttactgacgagaaaaatgaggcatggagaagttaagtgacttgcccaggtagcagagctgggattccacatcatagggtttatacaggaaacaggtaaacagagctgtgcttgtgtgtgggtatgtgtgtacacatgcatacatgtgtgcatgtgtgtgtgtgtttgtgtgtgtgtgaatgtgcttgtgtgttgggagagggaaatggcaagagaagaacctacagaaggtcagcaggaaccaacccatgttttgaggagtttggactttatcc

SEQ ID NO: 308992 - DNA, 1000 bp, Homo Sapiens
gatctgcccacctcggcctcccaaagtgttgggattacaggcgtgagccactgcgcctggtcctgttatttcttaagtggagacatcagtggtttttactgtattcactatattatgcaactattgccactatctaatttcagaaactttcatcaccccaaaaagcagcactggaaccatcagctgacactgcccactgcctccccccagccccggcacccatgcatccccttcctgtttctgtggatgagcctgtcctgaacatttcacagaaattggatcacgtggccgggcgcggtgtctcacacctgtaatcccagcactttcggaggccaaggcaggtggatcacaaggtcaggaaatcgagaccatcctggctaacacggtgaaaccccgtctctactaaaaatataaaaaaattagccgggcgtggtggcgggcgcctgtaatcccagctactcgggaggctgaggcaggagaatggcgtgaacctgggaggcagagcttgcagtgagccgagatcacgccactgcactccagcctgggcaacagagcgagactccatctcagaaaaaaaaaaaaagaaagaaattggatcacacactgtgtggccttttgtgtctgccttctctcactgagcaaaacatgaatatgttttctgatgcccatcctattttttgagacagggtctcattctgttacccagcctgcagtgcagtggcaagatcatggttcactgtagccttgaactcctgggctcaagcgatcctcccgcctcagcttcccaggtagcggggactacaggcaggcaccaccacacccggctaacttttgtatttttttgtaaagacaagaatctcactatgttacccaggctgatctcaaactcctgggttcaagcgatcctactgccttggcctcccaaagtactgggattacaggcgtgagccactgcacccggcccttagtttcttctagaagcatctgttgccctcctggg

SEQ ID NO: 308993 - DNA, 1000 bp, Homo Sapiens
aaggattaacttaaatttattaatgccaaggggaaagaaggtaacagttcctgaccctccagctgtatccacagttcggccaggaacaggctctgccagaggctagggccagcgctacatagtctgtggttaatggaggtgactagggaggggtgagcacaccagctgctctagtctcctttccttccccagaaatgaggaagtggtcatgtattattttaggagttcccctgcccacccaatcctctcataattgggagcaatcaggtacatttttttttttttttccttttcacctcctggagtcctggacttccccacatctcccctgcccctcccacgtttccatagtccaagggccagagtaaatgaaaatacagcagccgcccaagcaatggggcccatgctggggcttcagtcatcagcatcttcactggagtctgagttagctggcatcataggatcatcaatgagtgagaagtccctttctgagctatcatagccctgagataagtcatcatcatcttcttcatcctcatcgtcatcctcctcaggttgcagtggtggcaaccgcaaggtagtaccagaggcggtagtcactggtgaagaggggtagccaggggctctcaagcctggatggtgatggtggtgatggtgggggtgggggtggtggtggtggtgatgaagcatggtgctggagtctacatgaggggatgatggtgcaccacccatcacaaatggcataaaaggcaaagatgcagaagtggcactgctgtgacccaaagatgacacagactgtaggccactactgctgtgttggaacgtgttatgcagagatagagacccagtgcttccaccctgcatgagggccatcatcttagaaaggtctggtcgcatcctacgggcccgcttcttgctgctctctggtgcaataggccctggcaaaacccggttgaacaccgtttcagtgtgatgaccctttttcccatttctagagtta

SEQ ID NO: 308994 - DNA, 180 bp, Homo Sapiens
agctacaatatgatgattgccaaagggaattccaaatctcatggcaattttttctgtcttcacaaatattcacatcaactctttgttgaattcccataatgaacacacacacacacacacacacacacacacacacacacacacacaccccaccatgttccccagtggaaagactgagct

SEQ ID NO: 308995 - DNA, 1000 bp, Homo Sapiens
gaattccatttcttctaaaacttccaaagattaaacatgactcatccaaaacgattttacctctattactttttccacaaaggagaaaccaaggaagtggtttctgctatgttctcaacacacactactcttttctaaaatgtgaaatacaatagctaaccctccaaagacgtcattatgctgtcacacaagtcatttaataaacgcttcataaaatagattgagataattctaagccacatcacatatatacatgttctactcatatacttttaagagcattaatcccatactatatgtgcttgtgtaactgactgtcctaagctcttatggggtagatgcgattattgccaccctaaaggtagtgaaggagaggtacacaatgacattaagaagcttgcctaagatcacaaaacaatgaccagtatgtgatagagcaaggatctgaaaccaggcaggcaatctccagagtctgctcatttgctcattaaccgcaatgcttaaaccctgagaagcaatttgtgggcatggaaacaataacttcgtgtcccttccagctctctacaaagaaaacttttttttttaaagggaaggaaaaaatttttaatcctagcaaaaggctgtgtaacttcagttgccaaaacccttggatctcaaacatctactttctaaatcaccagagtgtgagactccaaaacaatgaatatgcactcagaaaacgaaggcaagcttaaaagaactcactctccataggcaccttctcccagggtttgcaccaagtcccagtcttccacaaagggcactgccatgactccaccgagcacctcggctgtaaaaggcaggaatccagaaaagatgtagagtgtaagatcaccagtgaagccactgagccccgcctctccccaggattgcccacgaaaattaacagctcttgccttccccttctatctcatccacatttatccaagtctttcaaccacgaacaactattctaaacctg

SEQ ID NO: 308996 - DNA, 1000 bp, Homo Sapiens
ggatcaggaggtcaagagatcgagatcatcctggccaacatggtgaaaccccgtctctactaaaaacacaaaaattagctgggtgtggtggtgggtgcctataatcccagatactcaggaggctgaggcaggagaatcgcttgaacctgggatgtgtggaggttgcagtgagctgagatcgcgccagtgcactccagcctggtgatacagcgaatctctctctgaaagaaagaaagaaaaagaaagaaagaaagaaggaaagaaagaaagaaagaaagaaagaaagaaagaaagaaagaaagaaagaaagaaagaaagaaagaaagaaaggaaggaaggaagaaaggaagaaagaaaagaaagaaagaaaggaagaaagaaagaaagaaagaaagaaagaaagaaagaaagaaagaaagaaagaaagagaaagatgggaagaaagaaaggaagaaaaagaaagaaagaaaagaaaggaaggaaggaaggaaagggaaagaaggaaggaaggaaggaaagggaaggaaggaaggaaagggaaggaaggaaggaaggaaggaaggaagggagggagggaggaagggagggagggagggagggagggagggagggaggggaagggaagggaaggaaggaaggaaggaaggaggaaggaaggaaaggaaggaaggaagaaagaaagaaaaagaaagacctgaaactaagtaatgtattaagcaaagagtctttactggctcatggttctgcaggttgtacaagtatgatgctaggcatctgcttggcttctgggaggcctcagggagcttttactcacattgaaaggcaaaacaaaagcaggcatgtcacagggtgagagcagaagcaacagagcaagagagggaggtgcttcacgcgagtaaacaaccaggtctccaagaactcactcactctctccagaacagcaccaagagtatggtgctaaaccgctcatgagaaaaccacccctatgacccaatcacct

SEQ ID NO: 308997 - DNA, 1000 bp, Homo Sapiens
aactcctcaagctgctggccttccagagcttgctctcctgggtctgaccccaatatctctagatccacaggcttttgtccttgtctcctagctcccagatactactcatttctctgagcacacatgaggcctcaggtgactttatctctctctctctcacacacacacacacaacgcaaaccaatgcaattcgttaattagttttaaaaaaacaaacaaaacagagactggtcagaatcccagagcccagcctggccgtgttagagctgtttattaacagggagggcctgtaaggtccttggggcagtggtgtggtgataagtcgaggactccatctcagctcacccagccggggcctctctttaactcaccctggtatggctaaagccaagggccaggcacctgaaagaaagtgctaggaggaaagggcatttcaccctcctagacccagccccttaccacacccagggggatcccagggaaaacctagggaaagaagtgaggaagaacggggtcaagagcacaggccagggaccttctcttccacttgggatcggctttctcactcccaggagcctgtacaggaggccccaggctgagggaagggcattgccttgagagatcctgggagaggcaagaggatgtgactgatagggtcaagacagggtgaacaggcaagggcaggcaggagacaggagatggtgagtgagcagggctgtcctcacttcctgatcccaagaggtttcctcttaaggggtcagggctgggacagatgccttctagggcacatggtgttattcttaaggccctatgtgaccccggaagggaccaggagggagaggctgcactcacctggaagactctgcttcaccctgacatgatgtgcttgacaaaggctaggaaaaaagtgaaaatcagccaccatgtggctcagcgcctctaggcccataaaccacttgtcccttctctacactgcctgacttctaaccctcctgctccc

SEQ ID NO: 308998 - DNA, 1000 bp, Homo Sapiens
ccaagagaagtttttcttaaaatcctttttttgggggggccaggatcggtggctaacatctgtaatcccagcaactttgggaggtcgaggcaggcggatcatgaggtcaagcaatcgagaccatcctggccaacatggtgaaacctcatctctattaaaaatacaaaaattagctgagtgtggtagcacgtgcctgtagtcccagctacttgggaggctgaggcaggagaattgcttgaacccaggagacggaggttgcggtgagctgagaacgcaccactgcattctagcctgacgacagagggagactccgtctcaaaaataaaaaataaaaataaaaataatcccttttttttttttaactatgcaagtctcattacatttaaaacccttttttaaacttggtcccttttctgtgccaactttatgtttgtttttgttcttgtttttgtttgagatggagtctcgctctgttgcccaggctggagtgcggtggcgcgatctcagctcactccaacctctgcctcctgggttcaagtgattctcctgccttagcctcctgagtagctgggattacaggcgtgcaccaccacgcctggataattttttttgtaattttagtagagatggggtttcaccatattggtctgaaactcctgacctcgtgatctgcccgccttggcctcccaaagtgctggcattacaggtatgagccactgtgcctggcccctattttttattttctgagatgaagtctcgctctgttgcccaggctggagcgcactagcatgatctcagctcaatgcaacctccgcctccaaggttaaagcaattcttctgcctcagcctctaagtagctgggatcacaggtgcctggaacgtgcctggctaatttttctatttttagtagagatggttttgccatgttggccaggctggtctcaaactcctgacctcaggtgatctgtctgcctcggcctcccaaagtgttaggattaca

SEQ ID NO: 308999 - DNA, 1000 bp, Homo Sapiens
gtagtgcaactgaagaactgcttttttatttaaattaatttaaatttagatggccacatgtggccaattgggcagcgcaggtctagacactatatttcctattaaggtagtttatggccacatcagtgttttggagtaactatctcattctgccaacttggcagtgttctctaaaccaactgaaatcttctaagtcttcctcatttgtacgtaggcagtcagatctttgtttctaaatgtagcaagttacattcatctctgttaaccttcatcttacatttagtctattgcttcagtttttaagcaacagaaacaatctttaatagaaacttaatttttatttatttgagacagggtcttgctctgtcacccacgctggagtgcagcagtgtgatcataactcactgcagccttgacaccctgggctcaagtgatcctcccaccttagcctcccaagtagctgggactgcagacatgtgccatcatgcctggctaactgttgtatatttttttgtagagatggggttttgctatgttgcccaggctggtcttgaacttttaggctcaagcattcctttggccttggagtatctgtagcaagtgataatgcatatcctgagagctagaagatttttctttaatttttcatcactgtggcatgactatacctacatcaccacaatcagactttttctcaacctcacatactacagaagcatctgctggaagggtgaggagagggcacaatacttgtggctcctttctcatctagtaggactaggctactgatttcagatacagactcaaacggaaatgagtggtaagagtcaggagttttaggtatgaggctgatgccaggtaagtttttattatatttagaaaaaaaatgtaactggaaataaaggtaagtcatttaaaatgaatgagagtttttaaacccctataattctttaatggcagcatttgggtccactgcccaagccacttttaacccaaccaa

SEQ ID NO: 309000 - DNA, 1000 bp, Homo Sapiens
ggccttcaaaagatcctttattcccaaagctgaggtcacaaatacaaaacttgctccttcatggcctctgtcccctgccccccaccaccagacaattccccagccatggtaagatgccttctgaacctgcaatccctttcgcaaaagaccccagtctttgctcctccaggctcccaaggccggctggatcttcattcacagctctatgtgttctgtctggggtggcttctccactgccttcttggcaaagaggttggtccagaaagctacttctttgtccttcagcttctgggccgcctgggtgttggcaccaatctgcagatacccttccttctggttgtactctggccagtggggcagcccttccccattggggtttctggaaacagaatcaattagaattgccccaaagctgctgtgtgttcccaacaatcttcagagatgtgtgaggatgcccaagttatctctgtcaagaggcttgtatacctccagagatggagagctcactatctccaggggcggcctctccgtttgcagagagctctcattatcagagtgctatggtcacagggtcagaagtttgatcactagaaccttagaagctgccccttcccaataggcatgccccgccccccaccctcaccagccgtgctctgtctttgccaccagcctcacccattgcgagcaaagttggcccagaatttcatcaccatcttgctaagtctgatctcctcttctgaggcaccctctgtggggaagaagaaaaaaagcctttgttactcaaagtgtggtccgtggactgcagcgtcaacatcacatgcgagtctgctggaaacatagtcttggcacatgccccacacccactgagctgaggtctgcacttttagaagatcgtggtggatttgtgtgtactttacctttcagcatatctgacctagggctcagcaatgggcatgcgtcattccattggctggctgcctttgtctcctgtgaccctcgc

SEQ ID NO: 309001 - DNA, 1000 bp, Homo Sapiens
ggatcattgatttttttttttttttgcatcatccaataactattcattggtcagactgtgtgctaggcactgagttagagttgaagaccctcaagaattccactgacaactgaatcatcaaagggaaccgagccctgcccaaggacatacagttgttttcctcttccttgtcctttggagaagcacagctgaagcttcctgcccacaccccagcccctcctccttgagcatgaatgtgcagtaagtatgagagcctgtcatttaccctccctggcctccctctccagccagcttctctctgaggagtgaggatttcttgctaagtacatgatgatggcctgtttactttgctctggagtttgaggctcttgcgcagattctgccttcctggacagttcaggaaccaatcaaccagctggccttggcaacctagaaagcatggtcagttgccctgaaataggttgattgcaccccagaagtgcttttccgcctctccccatcaaaggtgtttgcaaccccattttccctctgagtcagcttgtccattaatgggtttgtgttccttgatggggtctgtttttccagggtcttgaggagtggccctttccacccagtttggctgcggggctgagaaggtgcccttgcattttgtattgtgtgtccgtggtgggtctgtgcctcccttctgtctgttttccctcaggaccacccaccgccccatgcttgtatctacaacagctatgaggaagaacatacagattaatcaccctgctgcgggatgccagctacccagtggctctggcagccccagtcaatggatcctgcagtgtagccttcatcagtagagctgccactgccagcacccaaaaggtagcactaatatgcatgtgtgacctgaaaattacaatgtaaatggtggggcaacacatgtataggaaggtaaattttaattaaaagtctgttctccaactcagcctgcctttaaagatacagaaatgcc

SEQ ID NO: 309002 - DNA, 1000 bp, Homo Sapiens
gatccatttataggaaatgtccaggacaggcaaatccacgcagacaggaggcagattagtggttgccaggggctgggaggcggggagaatgggggtgtggtgagggaaagcaaagggaaggcaaaggtgtgtggggtttattcttttttcttttttttttttgagatggagtctcactctgtcgcccaggctggagtgctgggattccaggtgtgagctatcacgcccggcctcctctgtaattctatagggtctctagagggcagtggtcctaactgggcagagtgcgagtgagaaggcttccctgagtaaggcagatctttccagacactccagctggccagcaggagaaagtaacaagtacatgcaaaggccctggtgcaggaatgcacaccttccctcccttccagttagctctcaagcaccttccatgtttcattagcaactccactcagatctgcctccctgggctgggcactgagaatacagtggccactctcctcctaatctggtaacacccgttccgtctgaaagggctgctgtgaggaatagaaacggcaagtgttcaaaggctcagaggtacaacctaaggttgagtcctggctccagcaccgacctgctcctctgaccaggagctccaaatctctgctttctccatttggaaatcgaggctgaggaggtcaacctgattctacaaactcaacctacacttattgttactgaatgatcattcaagaaattacacggaaacattactagtcatcagggaaatgtgaatcctaaccacagtgagataccatctcacttactgagctgctaccctggcaggccacaagcaagacacaggccctgccccttacaacacccaggcgaatggaggaaccaactcacaacttctatgagctccccgaatcctcttagcaagacttcagggctggtttcatactccccttgcaaagctggaaaaactgaggtcatgtggaaattgaggactgtcctg

SEQ ID NO: 309003 - DNA, 1000 bp, Homo Sapiens
gtgtgggcaggaagcttcagctgtgcttctccaaaggacaaggaagaggaaaacaactgtatgtccttgggcagggctcggttccctttgatgattcagttgtcagtggaattcttgagggtcttcaactctaactcagtgcctagcacacagtctgaccaatgaatagttattggatgatgcaaaaaaaaaaaaaaatcaatgatcagaaatcgttttcagccagagctatatgttaaaatcacctggagaatgtgaaaaaattcagatgcccaggccacatcttcagaaattctgattcctgttcataatcgtgatttccaaagtgtggtcccaggccagcagcagcgagtcacctgggagcttgttagaaatgcaaattctcaagctccatcctggagccactgaaactcggaagctggagcccaggaatctgtgtttacacaaatcctccaggtgattctggtgcccactcaagtttgaaaatgaagggcgtggagtagactgtaggatcctggcattgttttttgttaaatgatcccagatgattcttatgtgtggccagggatgagaattactaacttaaagaatcacaggagcactcccgatggcacatggtctgctttacccagaatcacagaattggagggagcttctcatcagccaagaccacatcaagaccacgcaggctgaaactgctcttcgggccctgatctccactgacccaaccttcctaaacagccacggaacacacgagcagccacgttcattctcattccctcatttctctggaactgcaccatgtgcagcactgcctcaagggacactgatcgcgtatccagcgacactccatgaggcacgggtcgcaatcacaatccagacgagcaggaatgactcaatacttgcccgatccctccccttgggaaggtcattcccagaaacccttcctctagaatattccttgggaaaaatggagagaaggggttaaaagtaccaggag

SEQ ID NO: 309004 - DNA, 1000 bp, Homo Sapiens
gatcctgaagcagtattcctcggaccccgtcatcgaggtaaccaggcccctgcttgtctccctgccagtctcgggtccctgggaagccctgcccagccctgccccagccctgacctggagcagcctcagaccctccccatctctggttgccagggcgaccacttggccaaggatgccccagggatgaggaaggcgagggcgacaatctggacagacacttgctgcgccccatttggcaaaacggcgacaaccagctttgctcacccgcttccatcccgggccttgagcccctgagccggcctgaccccctttctctgaacccccacgtccagtccctctgccaagacccctctgaacccacccagtgccctctacctctgataccttgtcctggcccaccagacctcttcagagatctcctgctaccttccaacatttcttcttttttttttttgagacggtgtctcgctctgtcgcccaggctggagtgcagtgggcgcgatctcggctcactgcaagctctgcttcccaggttcatgctattctcctgcctcagcctccagagtagctgggactacaggcgcctgccaccacgctcagcaaatcttttcgtatttttagtagagacggggtttcaccatgttagccaggatggtctcgatctcctgacctcgtgatccacccgccttggcctccaaagtgctgggattacaggcgtgagccaccgcgcctggcccaaaaatgaaacaaatttttattttattagttttttctttatagagatgaagtcccgctctgtcgcccaggctggtgttgaactcctgggctcaagcgatcctcctgccttggtctccctaactgctgggattaggggcatgagccgcttcggccggcccgtcattcctttttgtggctgagtcacgttccgtggtgtggacggcccatgctgtgtccactcactgtggctggatgcttgaattgtctctgctttttagctgtt

SEQ ID NO: 309005 - DNA, 1000 bp, Homo Sapiens
aagcttaagggagaaaggggtgggaaggggtcttcctccacttagaagtgggggtgggggaagagagtggggagaagattcttaaacagcaggaaaggcagttaaacccgcttcccaacggtcccagcccgtccaaccgccgcttaggccaactcggactcagaccctcccgaaaggtgggcaaaaaaaacaggggtgtaggagcgcacccagttccggccacggaggaaggagttggccgggctctcctcagcgaacgttggagccgttacggatggtttcagcaacacccacccctcactcactgcccccaggcccgaggcgctgtagacagggctggaagggctgcggtgggtgactgcctttcagtgcccggagcctgagggccgggggaaacgagcacgaaatcttcggaggtctctccgtctgacgttcccctacaaacacggcctcgcccggaccccatccccaccagcacagcccaggcctccccggggagccgagcggctgagccagaagaagccgggagtgtgcgcgttcgggagcgcgggcaggcatcggggcccaccgccgcccgtcctgcccccgccgccccaaaagtgtcccccagacactaacgccccccacaaacatccgctccggggctggacccgcggctcctccccgcccccagccagcgctggccgcccccttcttgaccccggcccgggggacacctggaggcccggggaccaggcggtggaggggtgccctggtctggagggtggggcgcccakgtgagggccgctccgggccgacgccgccaccacacaaaggaccaggggctcccgccgccatattgaaaactttcctcctcgcacgacaactcgcaagtcccccacccccaccccaccccatcacacacccccgcaccccgggagcggaggcgaggaccagcctgccgagcctcgccgggcccacagtcctccctccagcccgcgcctccgccaggctccgtgag

SEQ ID NO: 309006 - DNA, 470 bp, Homo Sapiens
gatcttcctttttaatgagtaaaaatatgtcctttgatacagccttaaagaaagagtaccttgtataaattcaatgccaagagacaagataatcttcattctgaagccttgttcttttatacagcaatgtaattaataagaagaagaaaagcaggacatagatatggagtctattttcaacaaaaattgtctatagattttgatgataaaatttaaaactctactatatttagtcagtcacaaaaaactaggttgtgggaacatatttggtcaataaaacacccctaccaaatgctgacaagaaaaaaagttaggtaccacctttcttctctgcagatggcctgagatgggttaatttgaaagaatgcttccaaacctgaggtgacccctgagaacagcataatccactgctttctcccacattcagtttctcagtctgtgctcttttaattttcgggggagggaagcca

SEQ ID NO: 309007 - DNA, 1000 bp, Homo Sapiens; identical to SEQ ID NO: 120024

SEQ ID NO: 309008 - DNA, 1000 bp, Homo Sapiens
tctaatcatgcttttctttattcacctcatataaaagtctctttagaatgcatttgaacacaatatataataataatactataacatacattgtgagaaacatttgaaaatgataaaatgtccacctgaaacaatgcagtgttcatagacatacattggtcatgcacatttgtgccattttctgtaattactgagtcacaatgctgaactgaaagcatgaaacatattttacaaactgaaactgacatcagtaagaggcctaacaagtgttatcagaagaggcttcacatttgcgtaatttgctacatcagttcacattttattataaaaattcacattgttttattgttttcttttgtaatgaactggaacatgacattcctgcttaatggcaggcaggaggctacctcttcaaagtcagtagttcgggagcattcagaagaatcatctgtgagcaaatgtagtgtttccttttgaaccaaagccacaatgatagtaggatccagttataacccaactcatgcccacatagatttggatagaacctgggtaaaaactacatcccattgccccctgcccctatcaagctatacaaaagtaaaagctcagtataaaccatttagtatctaatgtgagaatattgtttccaaaactggttcataaaggggttgtgcagaagtagcaactcaggcagggaaagggcagaccctttgaacaaaagcccacccctgtcctctctgccaagggggccatatgtctctactaagtgacgtttgggttatataatacacaatacaaaacattacaagaaaaagtcgtaactcttaggcagagttttctacacaaatttaacaccaccattggcaggcaatgttagatatataaattaataacttacaaaacattacattatatacattaagtaataaatacccggttataaacaggaatggaggtgttagcgcagaaggcagtgcaagagaaggacggcagcattaca

SEQ ID NO: 309009 - DNA, 1000 bp, Homo Sapiens
gatccaccctcctcggactcccaaagtgctgggattataggcgtgagccaccgcgcctggcaggtgacccatacttttaaaagtttaggcccacaattggctcagactcacacctgtgtgcaccctggtcaaggctgggacttgactggtagtaacctgccgtgaccagcctcgaaaggccaagggcacagccacgtggggcggctactgaacatgtgcagagcagaagagcagggagtgggaccgaatgtagatgccggaagagctgaggagctggggaagctgctgctgcttcccacgacttttttttttttttttttgagacagagtcttgctctgtcacccagactggagtgcagtggtatgatcttggctcactgcaacttctgcctcccgggttcaagcgattctcctgcctcaccctccagagtagctgggactacaggtgcatgccaccatgcccagctaattttttgtatttttagtagaattgaggtttcactgtgttagccacgacggtctcgatctcctgacctcatgatctgcccgccttggcctcccaaagtgctgggattacaggcatgagccattgcacctggctttttttttttttttttgaaatggagtctcactctgtcacctatcctggagtgcagtagcgcaatcttagctcactgtagcttccgcctcctgggttcaagcgattctcctgcctcagcctcccaagtagttgggattataggtgcccgccaccacgcccagctgatttttatatttttagtagagacggggtttcaccatattggccaggcaggtctcaaattcctgacctcaagtgatccgcccacctctgcctcccaaagtgctgggattacaagcgtaagccactgtgcctggcctgattttttaaattactattaatattttatttattgatttattgagacagggttttgctctgtcacccagaatggagtgcagtggcgggaacacagctccc

SEQ ID NO: 309010 - DNA, 1000 bp, Homo Sapiens
gatcatagaggagaaaagggagatgagacaaaggaccagccctgcaagggcttatcattttctggagtctgagaaaattctgggagcaaaatgcttaactggaagtcagaaaacttgagatcttgtaccttgtcttttgctgcatgattttaagaaagttactccccctctctgagtcataaatttccatatgaaaaaggaggtgagaggatagatgaactctaatttctctcccaactctgatttcctagtcttatattttgaaggaacatttaactttgttcctgaagttttggtaatttgagtctgtaagataaatgtaatgcacagattaccaggggaaaaaggtgtaaacattttattagcattcatatgggcttgggagtcatacaaaatataaagactcaaacaaatgtcaagatggttgatgcttttagccctcttgaatatacagaaaataggggcttggatcatggcaaaaaggatacgggagagagagaagaggagaagaggcctggttagcagaggcagtcttggtacacagctggagcctctcaggtggcagccctcaaagggggtgggtggcagcttctggtaaatgtttctctgcaagacctttaaaggtgtcagcctctcagttaatctttcctggaccttgacaaggaggacttcggagaaagcctttcacatctgttgtttacttccctttatttcctctgcaggtgcaaatctgccccacaaaagacagctttgcagggctccttgtgtttgcaggccctctgaacagccagctcagaatatgcctaagacacatattttggggtgaagtattttggttttgtgatatcacataattcaaacttaaaataatttaaacttaaagttattggaattttaccttattctgagccttgtgaggaacatggctatgcagcagagtcacgtggaatgcagctgcggcttccgcttttttctgctcgtaaataattataacccaaca

SEQ ID NO: 309011 - DNA, 1000 bp, Homo Sapiens
gatcatttgacctcaagtatatctccctttcctggagttgtagaaggatgttgaaatatttattttctggatttggctttccagagggagatgaagaaagttatatatcaaacactgatgacctcatgggagcaataccacttttgtttctttataattcagtttgctgctgctatttcttctcctttctaggaaaaatattccatgggcttctttggaaattaaggtaaatttgatgactgggctttgatgcaaattttatgcatgatgttttattttattgtgtgattttaaaaaatgtgtataaataatatttttcaaggtcttttatgtgttagtgttaaaatgaatattctcctcttttgccagcgctcactattaacagaaaaatgtatatcttttaaaaacaacaaaccaggcataatataataatgctctgaaaattgctattgctgttttcccttaacaccttgtggaaaattatgtctgtacatacagatccacctcatccctgtgtatttgtgttctactccattgccagaattctttcagttataagttacagaaactcagctcaagcaggccttatgaggtttggtcctggaactaggaagtctgaggacaagagctgattttaggcatggttggtggatccatctttttagttctgccttttctggtgtggctgtcactctcaggttggctttgttcgacgtggtgccaaagatggccccagtttttatggactcggagagagagactcctttcttctagcatctgcttgggtcatattttccgcttgttttttgaccactcactatacaaccagagaaatgaagtcatctgttcccattaaatcacatttctgtcctgatagagagtgggtagagcctcatgaatgatacctcccaggtgatggaagggcagtttctaggggaaagggggcggttctgttgctagaagaagatggaagaactgctttgcaggcaaaaacatctat

SEQ ID NO: 309012 - DNA, 1000 bp, Homo Sapiens
gatcctgcaaacacccccagctcagtcccagctcaaggcctctgctcctacagtctcatggccggcgacacccttcatcctcagacctcagcgccaccagtattttgcctgatgtcaccgtaccccagctacctatagccctccctcctgcgccactgccccaggggctctctcctgcctgacttcgggggcccgtgcacctgcctgactaccactattctccacttcccattagactgtgggctccatgaggccagggactttgttcctggcgctcggcacagaccctggcacacagcaggtgcccaataaatgagtgttgaatgaataaatgaatgaatgagggggaggagtagacaggccaacaacacatgggcatgaaccgaatttcactgacccagatgtctctttcctcgttaggtgcgtgatttcagatatgctagagcatgaaaaggtatggggttgagagttggtgaaatacagtaattctgaagtgctacaaaaggcaagatctgggcaccgtgaggggatgatggaggcctcccggaggggtgagattggagccatgacctatggcagacaagaggagcctgccatgtgtaagtagaaggagaaggccaggtgcggcagctcacgcctgcaatcccagcactttgggaggccaaggagggcagatcacctgaggtcaggagttcgagaccagcttggccaacatggtaaaacaccaactctactgaaaatacaaaaattagccgggcgtggtggtgcacgcctgtaatcccagctacttgggaggctgaggcaggagaatcgcttgaagccaggaggtggaggttgcagtgagctgagatcacgccactgcactccagcctgggcaacacggcaagactctgtctcaacaaaaaaaaaaaaagaaagaaagaaagtagagggagagagttccaagcaggggcagcagtgtgtgcaaaggccctggggtaggaacgagcttggctgttgg

SEQ ID NO: 309013 - DNA, 1000 bp, Homo Sapiens
gacaacagccaatgtggaatgcatgttgtatcttccagtaatatgtgctacaagaagtccattttcgaggcagatccctttttgttgttttgttctgttttgttttactgcttattatggaagcctttgtgtgaggactctgactttgaaaaatgacgtgtattactatgctggtttgtgaagtgggtgggatccacatcctcaggggccatcgctgcgggtggcggtggtcgtgacggcctgtcaatcttggcacgctgtgtttcatcaccttcttttgactttgagtgtgctgactttgcttttgacttgcagtcatagtcatgtttccttttgtccaaagatgacttttctcgatctttggctttcttgtaagcttttttttcttcagccatcagaagtcgagcaatttcctcatcctgggcaacctgagctgctcttatgtccatatgagtagccaaaagttcttcttcttgcaatttccgggcaatttctgcatcataccactcctggtccctgtgactcactcgagctggagcagagacagcttcatttattcctcttgatttcattcctccatcctcataatagtagttatctccagaagcactgcctccagaaaactctggagtgtgtttcttcctctttttctcttcctgtagttccttctcttgcaaaagacgtgctatgtcctcatccttcttctcctgaatacgtcgtctctcagcctcgattgtcagcttctcctggatttcctgagcaatttcacaatcatgttgttcaagggctttgtagcgcttctggagctgagcttgggctttgaggtcttcctcttggagctgcttggcaacctgcagatcatgctggaccagacggttccgctgaatgttggatgctaaatgatgctcaatctcttgctcctgcaggctgtgagccagggtgtggtcctccaggacagcaaaatctcgacacacttccttcacgccgggcaacttggact

SEQ ID NO: 309014 - DNA, 1000 bp, Homo Sapiens
gatcctggatcctcccgcaccctcacccatcccaccctgtacctgcggggctcggcccgagcgggcggacaaggctggaggggagagggtcccgcgcggccgcggacccccagtcgggagccggagccggggtcgcggacggggcgggcagcagcgagcgggcgcggggcccgggggcggcggggccgggggcggcggcggcaggcgcatcccccgccgcccagtccacgggcccggcggggggcgagcgcccgcccgggccgggagagaagggggcggtgcgacgcgggagccgccgccgattggccgagcccgggttggcaccgccttcgacgaccccgcaagccccgcccatatttaaagatcccacattccccggcgccccctgcaaccccccggcatgcggctggtcttcgaactccccctcttgccccataagacgggaaggaccttggtgaagctccaacccccgcccccaacagccctccggacctcctaactataccccctccccaaaattaggtcccaaacttcagccgctctgtcaacctttgcacgcctggggactgtcctccccgtaagcatcagctgaaagacaactttgcaaagcaactcaatgcctgcccctcaaacgacctcctccggggtctagctctgcataggggagccttgagggggactagggtgattgcaagttggggggtgtctgggagccaggtgtagggccttccaggggtgggactgggtacatgctggggcactcggttagaggccaccttctgtgggaggagagacgcccgtctggatcaggccacccagtcctaacctccaacacccatttccaggatgacaggaagccagagccccagggagtttgggatcaccagggctgggggtccccaaaactgtgctccttcccccagcacccaggctgaacttggccgactcattcattcaaagttaatggcggctccagggagctttggggaccagtgggtag

SEQ ID NO: 309015 - DNA, 1000 bp, Homo Sapiens
tttttgggagacaggaggcccaggccccagccaggacacccgggagagtgggaacggcaggtctgtggtgacctctggcatcgctgggccttggggaagacgcccaggaagaggcagggtgacagggatgctgcggcctgtggtctagccatgagagcctggtggggccctggagtttacaggaaggcagggctggggcagcaggactccagagagcataaagactaggtggcgacctagtccagttggaggcaccacaggcctcaggcaggccaggaacggccccaccctggaccaccagagtcaagacaagaggccgtggggtcggagtggttttattgggcagcaggggctgcaggccggtggggcgtcaccgatacaagtagtcagcctggatgttggcggcgatctcggcctcccacttgtccccgttgttgagcaacttctccttgttgtacagcagctcctcatgggtctccgtggagaactcaaagttggggccctgcaggttgaggtgcagggacggtggttaggccctgctgaggagcctcaggccccctcccacccgggggcctcacgtgcctcgacgatggcatccacgggacaggcctcctggcagaagccgcagtagatgcacttggtcatgtcgatgtcatagcgggtggtccggcggctgccatcagctcttggctcagcctcgatggtgatggcctgcgggaggggccaccagacactgccacgctgccctgtcacatcccagcccccagggcccctgtcactgctcatccccacccctggggtctgccagaagccctctcccctcaaaggcctcctggactccggctaagaggccgccctgcacctctggtgctcgcgcctgtctcctcagcacgtgccctgctggcgtccctgccttgctggtttttttttttttttttttttttttgagatagagtctcgctctgtcgccaggctggagtgcagcagcacaatctcggct

SEQ ID NO: 309016 - DNA, 1000 bp, Homo Sapiens
ggatcatatggtttttgtacttcaaaagcaggattccagagtctagaatcaattctgccaaattggccatgccccttacagaatgccacttggtaggggagtgcatgtttccctgcatcttcaccagcactgggtgttatggtcgcgttggatttctgctgtggtgcccggtgtgtaatggggcctacacctgcttgcccacctgcttactccttgtcgcccccccacccacgtgtctttcagcccggccgcaccacctgggtctccgccatgaacgggcctgccctgcagccctcctcgccctcttccgcgccctcagcctccccggcggcggccccgcggggctggagcgagttctgtgagttgcacgccgtagcggcggcccgggagctggcccgccagtactggctgttcgcccgggagcatccgcagcacgcgccgctgcgcgccgagctggtgtcgctgcagttcaccgacctcttccagcgctacttctgccgcgaggtgcgcgacggacgggcgccgggccgcgactaccgggacacaggccgtgggcccccagccaaggccgaggcgtccccggagccaggccccggccccgccgcccctggcctgcccaaggcccgcagctctgaggagctggccccgccgcggccgcccgggccctgctccttccagcactttcgccgcagcctccgccacatcttccgccgccgctcggccggggagctgccagcggcccacaccgctgccgcccccgggacccccggagaggctgctgagacccccgcccggcctggcctggccaagaagttcctgccctggagcctggcccgggagccgccacccgaggcgctgaaggaggcggtgctgcgctacagcctggccgacgaggcctccatggacagcggggcacgctggcagcgcgggaggctggcgctgcgccgggccccgggccccgatggccccgaccgcgtgctggagctcttcgacccaccca

SEQ ID NO: 309017 - DNA, 1000 bp, Homo Sapiens
gatctttgtgaacttgctttggtgttgaacatttgaagaagtaggcatcccttctagtctttacagactagctttggtagtgaaagcccttcatcagagatattgggtgggctgtatagagaagtttgtgggtgggattactgctgaagttatcagacatgctggtctggtgccagggtcaacaaatggataggcctgaggactgtccatgggaaccagcctgaagtctgggtccacagaggttgacctggtgctggggtggtctggacataggcccataatatgccttggtcttgagctcataggggtcaccctgcttccaggatccgcttgggcaggcgtggaccctgggtccactggagcatagggtcacaagaaccagcctggagcttgggtctggtctggggcatatttgggtctggattccacaggggtcagtctgaagcttgaggctgtgggtgctgtcctagggatatggaggccagcctggagcctgtgtttttaggtgtggttctaaagctttggtctctaggagctggcctggcacttggggtctcctgggccaggtctggatattggatgcggtggagtgggtttgaaccctgggtttgtcagagtgtaggaccatgggagccagcttagagactggagccacaggggctgggtaggctgacagcctgtatccatgggggttatcctggagcttggatctgtgggtgccagctttgtgcctggagctgagggtgccaccttggagtttgggtcaagggggccagctggtcattgggtttcagtggagtagtcctgctgccagggtccacagcaaagttggtgttcactttattcatcctctaacacggagggtatctcaccacactataatttctgggctgggcttgggagagtgatggactaggtaatgcaaaacgctccttcttagcctctttaatgtatcttttcctgtttctgtgctacagcaaggtgctctaatctcttactt

SEQ ID NO: 309018 - DNA, 1000 bp, Homo Sapiens
gatcaggagcccattttactggccatataataaaacaagtgagttcagtttggccaatttctcagcatttccactgtctacaatccccaatcttctggctcagtggaacaaacaaggggaactataaaaacccagttggatggccgggcacagtagctcacccctgtaaccccagcactttggaaggctgaggcaggcagatcacttgagatcaggagttcaagaccagcctggccaacatggtgaaaccccatccctattaaaaatacaaaaattagccaggtgtggtggtacacgcctataatcccagctacttgggaggctgaggcaggagaattgctcaaacccaggggacagaggttgcagtgagctgagatcaagccgctgcactccagcctaggtgatagagtgagactccatttcaaaacaaaaaaacaaaaaacccagttggcagaatttatctacaccttccttgacctaagttcctcctttggtattattaaatctaagggccactctctttggggctcataaactttcacctttggaaatagtcacaggccatcctatgcacttggcctcctctgcttttgacccttaattgataaaaggagacatatccatctgggtgcagtggctcacactcgtaaaatcctaacactttgggaggctgaagcaaggggatcgcttgagtccaggagctcgagaccagcttgggtaacatggcaaaaccctgtctctacaaaaacacaaaaattagctgggtgtagttgtgtgtgcacctgtagtcccagctactcgggatgctgagacgggacgatcacttcaaccgggaggcagaggttgcaatgagccaagatcccgctaccgtactccagcctgggcaccagagggagacactgtctcaaaacaaaaacaaaaaaacaaaaaaaaacaaaacagacatacttcaatattaataaagccttactaaggtaaaggcattaataaagcaatggat

SEQ ID NO: 309019 - DNA, 1000 bp, Homo Sapiens
gatcacccacttgagtccaaggataaaagagtgtctgacaatagttctttattaggaacttctcatttatttgtaaattctatgacttcctagattcaatggggcaggggtgtggtttaaggagatggggacaaacaaatttcagtggagacgaacatatgtactatggttctctccttgatattaacataccaatgcatccagggatggctcaacttgcctctatgacagaaagcattctggctaccttatcagttcaacaacagatataattcaccaatctgatctagttaccaatatccttcatttacgtattcttcagtttggtctcaggaagttatcattcatgataaaaaatgtccattaaactaggaacagaagaaaacttcctcaacctgaaaccagacatttatgaaaaacccacagctaacatcctacttaatagtgaaagactgaatgtttaccctcccaagatcaggaaaaagagaaagatgtctgcttttgccactcttctttttttttttttagatggagtctcgctctctcacccaggttgtagtgcagtggcgcaatctcagctaactgcaagctctgcctcctgggttcacgccattctccggcctcagcctcccaagtagctgggactacaggtgcccgccaccatgcccggctagttttttgtatttttagtagagacagggtttcaccgtgttagccaggatggtctcgatctcctgccctcgtgatccacccacctcggcctccctgcttttgccacttctatttaacaccataccggaggttctggccagagaaattagagaagaaaaagaattacaagacatccacattggaaaggaagaagtaaaactatctctatttacaaatgacataatcttctatgtataaaacactaaggaatccactaaaaagctatcagaatgaatacaagagttctttaaggtcgcaggagacaagttcaatataaaaaatcatttgc

SEQ ID NO: 309020 - DNA, 1000 bp, Homo Sapiens
gatcaacacaaaacagtgagggtgtcctgggttttctttttattggacagcagtgtactagcctatcactttcccagtcaggggatttttggtctccccattcccctaccatgggttcatgccaaagtccatattttttattagtgtttggaattggattttttttttttgaggtggagtctcgctctgttgcctaggctggagtgtagtggcacgatctcggctcactaacctctgcctcctgggttcaagcaattcttctgcctcagcctcctgagtacctgggactacaggtgcatgccaccacacccagctaatttttgtatttttagtagaaacgagatttcaccatattgtccaggcttgtatagaactcctgacctcatgtgacagggaaacaggcactcagtgaacttcatgcgattgaggagttaatgataatgagagaagggctgtgaggggacagcactggggacaccagagcctgtgacgggctgagttgctgtgccttgggagatgcccttttgactgagccctgggaaggagggggtgtgggggcaggagctgcctgcagagggagtggcctcaggtgggcggccacctggctgcagggaagaggtgacagagttcgtgtgcagagcttggagggtgaggaggaggtgggttgaggtgaccttggtgagggtgaaccatggggggctgtgggccctgctgagggaggccagccagccctggacctacagggtggtttggtcttttttgtcccattcccagcatccactgagtggtgaaactctgcaggccagggaccatcccactggccagaaggagcgcacagtaggtgcccactcagtgcatgttgggctggacagaacctcactctgccccctgcccccagctttgggagctgcagcaaggtccctccccctagggatctccatgcctctgtctctgaggggtgagatggggagacttcaaagggccatctcagagtgtgggg

SEQ ID NO: 309021 - DNA, 1000 bp, Homo Sapiens
tttttttttttttttttttttttctttgatcaagtttttaataagcttttttcttacatgtacagtcatcttaaaaagacaaatattaactattataagttaaatactatacaatttatgagaaatgtaattttgtgaatttgaaaagtaaaagggaggtaactactaaacggattaaagaagaaaattctactttttaagacattttaaccagacagaaagtgagaaattactaatttaagtaaacactaaaaacttttactgaagctggagaccttatactattttagatcaagccttcatctacacagctttaaataaactttaaaaaatcttttctagtacatataagactgctaaaaagagtgcatgactgggggaaaaaaggcatrtgctagaatgtgaactcctgaagaacagaaatacatttcattcatctttatccctggattcctaacacaatgcctggttcaaactaaaatgcttaaacaacgtttgctgctttgaagtgaactggggcaaatacatctttccacctctggtccagttttcactccatattaagcacatctgaagtacctgagctgctcctggctgttggcttttgactttaaattgagtaaggtaagccaatatgcatacattttttacatcagctttctcacatcagcctcagaaccaaatcatcactgggctgggaatattctcacgtactccgatacttatttgttggacaacagttaatatcaatgtgcaaaagtaatgcattttcaatgcaggataaatatgctcttatgaatatgaatggaataaaggccctgtttctccatgttttaaataacagatacatagcatcttaaattatgacttaattagcagtttttagacactgaacataatacactgtattacaatgcaatgtggtaggcttccattttaggaaccaaaataaatttcacatgaaaaaatatttattttaattcacatcaaatacatttag

SEQ ID NO: 309022 - DNA, 1000 bp, Homo Sapiens
aagcttctggaaaaaaagcctagggtgaatgtctcccctacccggacactcagatctctgggcccttgctgcttcccaggagagccacacacagcactgaccgcagcggcagggtattatttctttattaggtgccacttcaaagaacagggaatccaggtgggtgggggccacagggcaccaggtacagccctcacagcccaaccttctgagcccaggcgaagaagacgcccttgacatcatctacgcctgtctgaaggtgggcaggcatgatataggtgcggaggtcccggaccttgtagccactacgcaccagggcctccctcacctcctcctcagacactggcaccaccgtcagcctggcctccccagccaggtaccacgactcctccagggccccgatgaggaggaggtgccccccaggcctcagcagcgtggtgatgtggtccagggcccgctgaaagctggcaagatctgggctcacagcctccaagcagaaggcagagaccagggcgtcagcaggcaggggagctgggctcccagcacccaggggctggggctggtgcacgtcgatgggcaggacccgtttcaccctggctcgcagctggcgctccttatcctgccagcattccctgtgcaggaggcacaaggcagggctcaaggctgttctacgctcaggcctctgttgccccaaccagccactctatgggaagcctcctccccaaccctcaccccccagtccttaccccttgccctcaatgaggcaggcatgttggctgtacatgctccagttgaaggcccccggctcctcctgcagccagcgccccagctcctggcggttgacctccaggaaatctgtcatggtgatgtcctcaaagtggctgcaggcactgagcagctggtacacggtggggcctgaaccaatgtcgatgagggtgcgtccggacacttcacctgggcagggcagaggaagagggtcctggtgccagccagcccaggc

SEQ ID NO: 309023 - DNA, 1000 bp, Homo Sapiens
tttttttttttttttttttgtcaatggatttggctttttttttttcttatgagaacaaaggttctctaaaatccttcagccaccagtgaaatgatcaggcaggatgaaaacttttttttagagggagtgctgtcattaaaaataaatacaggttgcatggcatttttgaaggaagaaccaagctgaaaggcaggggctgggacttaatctcaagtgccctccacggtggatcactcagtggctgaggatggagagagcaggaagcaggtctggtcgtcatctcagagctaggccatgctggatagaccagctctggctctgaggatgcacacggacctgtacttctgacatccagcagggtccagagtgggtccagagtgggacatgacagccagcttgccgggaccttccttattgctgcagctccttcatcctgtttagggcactgcctgcacggaaccattcgatctgggtctcattgaaggtgtggttcaagaggatggtttcctgggtcccattagggtgcttgatgatgcatttcagaggcttgccaggggcaaagtccttcaggccttgaatagtcagtttgtccactggatggatcttgttgtagtcagaggggtcagcaaaggtgaggggcagcaagccctgtttcttaatcgtctcatggatcctggcaaagctcttggtgatgatggcccggcccccaaggtggcgaggctccagtgctgcatgttcccggcttgagccttcaccatagttctcgtctccaatcaccacccacctgatgccatgtttcttgtagtatcgagcagtgtcaggcacagggccaaactcctgggtgacagcattacgcacggagttggccttgccgttttcaatgttgatggcaccaatgagcaggttattagagatgttgtccagatgtccacggaacttgagccaggggaacgcagcagaaatgtggtcggtggtgcacttccctttgaccttgatgagg

SEQ ID NO: 309024 - DNA, 185 bp, Homo Sapiens
aaacgagggatgccaggagagtggaaactctcgtaaaagactagtcaagtgcagtagtgagaaggggggaaagagtagaacaaggagttcgatctgtaactgactgtgaacaatcaattgagataactcactaccttcggaccagccaataagtcctcctactgtttgaactatttaaagccccc

SEQ ID NO: 309025 - DNA, 1000 bp, Homo Sapiens
caaatctgcttccccatgaaagaacagagaatagtttaaattagaatcttagctttgggtgctaatggtggagttaaagactttttctctgatttgtccttggaaaaaggttttcatctctggtttacaagactggtgtattagtttatactacaaggacaggcccatttgagtattttgttttcaattagggagacggttggtattaggattaggattgttgtgaagtatagtacggatgctacttgtccaatgatggtaaaagggtagcttactggttgtcctccgattcaggttagaatgaggaggtctgcggctaggagtcaataaagtgattggcttagtgggcgaaatattatgctttgttgtttggatatatggaggacggggattattgctaggatgaggatggatagtaatagggcaaggacgcctcctagtttgttagggacggatcggagaattgtgtaggcgaataggaaatatcattcgggcttgatgtggggaggggtgtttaaggggttggctagggtataattatctgggtcgcctaggaggtctggtgagaatagtgttaatgtcattaaggagagaaggaagagaagtaagccgagggcgtctttgattgtgtagtaagggtggaaggtgattttatcggaatgggaggtgattcctagggggttgtttgatcccgtttcgtgcaagaataggaggtggagtgctgctagggctgcaataatgaagggcaagatgaagtgaaaggtaaagaatcgtgtgagggtgggactgtctactgagtagcctcctcagattcattgaactagatctgtcccaatgtatgggatggcggatagtaagtttgtaattactgtggcccctcagaatgatatttggcctcacgggaggacatagcctatgaaggctgttgctatagttgcaagcaggaggataatgccgatgtttcaggtttctgagtagagaaatgatccgtaatataggc

SEQ ID NO: 309026 - DNA, 1000 bp, Homo Sapiens
ctatagtccagtgagggtctaggggacaggggtagctctgctccatccattcattcaagcctaggttctttccattatgtggtacatatggcctctaaaattgtcacagaatgggaagagggaatgcaggttgtatggaagatttttaaatgagcccagcctagaaatggcgcacattgcttctgccttcattccattgttcagaacctgatcccatggcatccgtttgactgcaaggaagctgggaagtgtagttcaaatttgggaggtactgtgcccagaaagagacacacaaatgttggtgtgtgttgtggagcactagtagtttctggcgcaggcagggagaatggctgtgcatcttgtaggggtcgtagtagtgtctgtcctgggctgggttgggagtgtactctctgagaataccttggaaggaagctgatatgagaagatgtgtatgagtggtgcacacccatgtgctttatggctcaacaatcattccattctttcccattctcaaggtctttcactggataagatcttaattctctcacaccttaccactgaaataaccttgtgaatgctttatcctctacaattttcccccatcaaatctaactggatattatagtctaactaatcttcctaagacttggcgtatgtcatgcaatccctgttcaataaaaacaataacaatttcaacagcagcagcaataatttgttgaattactgtgttgagcactttgagtgtattatctcaatatatctcgatctttgtaacaagcctgtgatgtttcatcatcattccctgtgtacagatggagggacaggagtcctgggtctagctgtgctaacacagtagccactagtcatgtgcagctacttaaattaattaaattaaatttaaattaatttaaattaaatacactaaacttaaatacattaaatttaaattaatttaaattaaatacaattaaaaattcagttcttcagtcacactagtcac

SEQ ID NO: 309027 - DNA, 1000 bp, Homo Sapiens
  misc_feature (43)..(43): n is a, c, g, or t
tcaactgcttctaatacctaatataagctatctaattccatcnctagcgtattattattctatatgtatttatttatttagctcattactaagtgtcatagattatcttattatctttctatttataaccatataattatagcttatagttggtccatattatgtccatacaatgtggtccatgtatagatatagttttctccccaattcccactattgtgcattagtgctttatgttttaaaaaataaaacagtgatgtttattggtcatccctatggtactaaacaggcccatgatcccaggaagactgtcatattctgcttccagattccaataacaaactggatttcacaagcatttattaagcatttttatgtgttctatatcaagtactagggatatagaattcaagtaactgtaggtcaacaaatgtccctgccctcagggtcacagcaggtctcctcagagcagattgaaaagaagctcagtatttctctggcaggccagcaggtcggaagtgattggggtctttgccactctggccccatttgttggtagcctggccagccagcgaatcctctgcatggtctcctgtgagtctctggacgttctctctggcatcgctgtagtccaggcaagcaaggagattaatcaccaggccagtgagcaacagcccaccttcccattatatgctttccaagggaggactctgggagaagcccaggaaggccaaggaaggaggggtgaaacaatgaccctcctggcactccactcagcaggctggcacctaggctgcagctctaacttctctgcaaggagcttacctctctcctgactgtccaaggcagtccaagctctgctcacgcattcctggcaacatcaggaatgtgcattacctgatcacttctgtagcccagacacccccagggcccctttgtacagcatcatagttcccccgagcatggaagtatttgtctgattttttgtaattggcttctt

SEQ ID NO: 309028 - DNA, 1000 bp, Homo Sapiens
ccagctctctccacgctctctgggtgcccacaggtgccaacgccggccaggcccagcatgcagtggctctccccaaagcggccatgcctgtcggctgcctgctgcccccaccctgtggctcagggtccagtatgggagctgcgggggtctctgaggggccaggggtggtggggccactgagaagtgacttcttgttcagtagctctggactcttggagtccccagagaccttgttcaggaaagggaatgagaacattccagcaattttccccccacctagccctcccaggttctatttttagagttatttctgatggagtccctgtggagggaggaggctgggctgagggagggggtcctgcagggcggggggctgggaaggtggggagaggctgccgagagccacccgctatccccagctctgggcagccccgggacagtcacacaccctggcctcgcggcccaagctggcagccgtctgcagccacagcttatgccagcccaggtccagccagacacctgagggacccactggtgccttggaggaagcaggagaggtcagatggcaccatgagctggggcaggtgcagggaccgtggcagcacctggcagggcctcagaacccatgccttgggcaccccggccatgaggccctgaggattgcagcccaggagaagcagggaaccgccagggccacaggggcagagaccagggccagggtccccctgcagccccttagcccaccccctcccagtaagcagggctgcttggctggcttcctttgctacagacctgctgctcacccagaagggcccacgggccctggtgacaaggtcgttgtggctccaggtccttgggggtcctgacacagagcctcttctgcagcacccctgaggacagggtggctccgctgggcacccagcctagtgggcagacgagaacctaggggctgcctgggcctactgtggcctgggaggtcagcgggtgaccctagctaccc

SEQ ID NO: 309029 - DNA, 1000 bp, Homo Sapiens
tgggataacaggtgggagccaccgcgcccagccaattgccactttttaaattacggtggctgtccaggtttcctcttgttgtcctggcataattattagtagcaccctgtttcactctcagtagtaccctggtttgtatgataaaatcacatgaacactgctgtactgtcactagctcatgtggcaactgggcacctgaaatgtggctggtccaaatttagatgcatgaaattaccaaaatatgtttaattctgaagattaagaaaagctaagaacataatctcaaagtttttaaatactgattacactttcaaataatatttttgatgaatcaggttaaataaaatgtactattgaaattcaattaccgtttctttttcctttcctaatatagtttctagaccattttaaattacatatgtggcttgaatttgtggctagcactgtatttcttttggacaatgactttcttcacagaattggaaaaaactactttaaagttcatatggaaccaaaaaagagcccgcatcgccaagtcaatcctaagccaacaggacaaagctggaggcatcacactacctgacttcaaactatactacaaggctacagtaaccaaaacagcatggtactggtaccaaaacagagatatagatcaatggaacagaacagagccctcagaaataacgccgcatacctacaactatctgatctttgacaaacctgacaaaaacaagcaatggggaaaggattccctatttaataaatggtgctgggaaaactggctagccatatgtagaaagctgaaactggatcccttccttacaacttatacaaaaatcaattcaagatggattaaagatttaaacgttagacctaaaaccataaaaaccctagaagaaaacctaggcattaccattcagggcataggcatgggcaaggacttcatgtccaaaacaccaaaagcaatggcaacaaaagacaaattgacaaatgggatcta

SEQ ID NO: 309030 - DNA, 1000 bp, Homo Sapiens
cccacctcagcctcccaagtatctggaaccacaggcatgcactaccatgcctggctaagttttttattttttgtagagatggggtcttgctatgttgcccagactggtctcaaactcctgagctcaagccatgtagatttctgatcttagacgtaattgtttagcatttaactaggagcttctgttgggatcaagtctttagcagctaaagaagggctaactgaggctatgcccccatagacatgcaagatttaaggaatacagttttgctccaagagatacggacttcacagtgccagtcacatctcccccactagactgtgggttatcctgtctggctcctccaccccaagacccaagatgccccaatttactttccaaatacgggctccagcgtgcaggggatgtagttatcctggtcactcactgatttcttccctatggagatcttgatgtaaggatcacactggaggaggagacaaaacacttctgtgaaaacactttccaaacctgtctttgaggcttcatgagtgccttgcctctggatgggatgagggagcagccatcaggaagttgagatgtgggctgtgtcctgccaagacagggccccctcccacacaccacaccactccacttggaccctgacatgggcttctggtcttggctccagccgtgggaatggggcacctgagtccttcacactcccaatctactgctccattgggagaggccaggcccttatcagaaacacaacagtctgcattacacacatgacgagaccaggctggggtcctctctgtgacctctgcttaagcatatggaatgagagaggggtggtcagcctatgtcagcctaggctagcccagggaggtctccctccatgcttcctggaagcagcagcacccctcagccagcgacccagcagctggggctgcagagtgcccagggttagtctagcatcaggaaggcttcaagcatataaaccaacccactggccatg

SEQ ID NO: 309031 - DNA, 1000 bp, Homo Sapiens
gaattcagatcctgccctggcactcgggagcttgggtcaccttgggcaagtcacttccctctgtcccctccatctagcctcaacctggagatggggctattgtaaggactcagtgttagcaagggaagacaccgcaaggtgaacccacagaacccggcagccagcgcccttcagctgcaagctgggtccgagtctcctcctcctagctggttgcctggcacaacaggccctgccagcgttggctgaatttgaatttgttgaactgcaaagtcacacaaacccccacagccctgcagcatcttcgcagggctaccaacatgatcttcccgtcagtcaccctgctgtttactatctccctcagcccccgggttcgaggcccagagcccacccacccacaaccagccttcacacagttaacgccttctgcccccagtcagggagctgctgtgtccctgccttcagcagtcacactgtctcagtcacagtcacacgtactcacactgggcccagcacccccctcgggacacgcaggctcctgcatcacccagcctcccggctttgaggcaccctcatctcctccgcttgcactgtctctgttatccgcccttccctttgggatgtcagcctgcttctcacagaggagcacactgagagagtcacacctgctctctcttcatagactgtcttcttggacctggacagggtggaacagaggaggaaggacatctcaggtggtctttacagaccactgcaggcacccacccactgctgcctaccacccagcagcgtggcacagtggcagagacacagcctgaagacacatcaccttggtccaaatcctggagtggccacttgctggacaagtgtctgcaggaaggttttttaacctctcagtacctcggtttcctcctttataaactggagatgaatttataaactggagctgggtgtggtaacaagctcctgtagtcccagctactcaggagactgtggatcgttt

SEQ ID NO: 309032 - DNA, 1000 bp, Homo Sapiens; identical to SEQ ID NO: 120027

SEQ ID NO: 309033 - DNA, 1000 bp, Homo Sapiens
tttccctctgtacatggcttttattatttacataatacaatatagcatcaatgctgaatagcatgattatgtgcaatacataaatatgaactatctgtacacatctgcaggtctaactcagaactaaggtacataaaattgaaagcaaaactgaatgctttaagaataaaagtaaaaactaggactgaacattgcaataaatcagaagtagtgcctcgtgtacatacttaactatttacagatgaaaacaggcattaccacaacactaactatactcatttatatataaaaaacacaagtttcatacatcacaaaaaaccttccattataacacagaagtgattattaccagacaagcatcagtgaagtatactgccttttctagttgttattgtacaatgctgtagataatgcagcccatgcaatacacccaagaacactagagtcctacacccaagtacaatatgataaagcagccctctgcaagtggcgctggataccactaagaagtctactgcagccatgttggttatgattttccatgcagaagggtacagttacattaagaactgaagtcttttaaaaagctttaaacattctttcttgaaccaaaacattcgacaaaagatgcacatgaaaaattattcagatacctttgcaacttaaaattcagatgcatgttattcaatagagctgctgtatgtgaaaaccaaacgtagagtttaaatttcttcttgtaaacaaattaatcctagtgcagttctgtgctacacatttttagcaatgagtaatgcagacatcttctggtgcaggccagtacaataagcttcaaaggttatctcaagaccctgttgttggcttgatggttttacttataaccagtttcgatgtttacctttcacagaatgtcttatttgacagctttagatgaccaatttaaccaggcttatatatggcgccaaatactggtttcacgggaaagaaggtctgatcctcttta

SEQ ID NO: 309034 - DNA, 1000 bp, Homo Sapiens
gatccatgtctgtggttttaagaccccctcccagtcccccatttgtggcactttcttacggcagccccaggacacccatccacagagttcctgggaaatggggatgtcaggcccgtcgtctgcacgtttggcaaccagaaaagcccctgtccgtgggggtgcgtcccctgctccccgcatttctgccaaagccccttccgtcggcagcttgtccttgcatgtccccgaggaaggtgaccagcaggcggagctgctgcccagcggcggccgtcccctcgccctcctccctcctcttgttaccataaacacttggagacctcagaggaaaacgctcaaggattcccagcctccagggctgtgtgccgagggcttcagaggctcgcatggggagcgccctttcctgcacccgccctgttgactctgctatcttcccggtcgcccggcttcccggggcagcctgatggccagggcgcaggtctgggtgggtgccaggtgcctgccctcctgcccgcccgccctggccaccctgagctgcaggacacagagacccggacgggagccagccgtgctgggcgtggcctggactctgggttacgctggggcagtgaaatttcaaaacaaacttagccacatggtccgagtcaggtgtgtccgggtgacccctgtgcagaccttggcgtctggacctgcccggccgggggcacccatcccgcagatgctgaggcggagccccaaatcacgggaccctctgctgcaggcaccggcggggcgggctgccagggccggagacgagccatgtgcattcttgggatgttttttcgtttaaccgtctctccctctcccagccatttcctggcctctcgcagacaagcgacagacaagcaggtctggcgccgggccacgctggtggttttccatgccggggtcagtctgggatccacatccccacagctcggcccctggggggccgggagccaggggtttgaggccccgatccacc

SEQ ID NO: 309035 - DNA, 1000 bp, Homo Sapiens
gatcccagccaatacctggacctgggagaatttagtaactgggttttgttttccctgtgaatcccacaactgttctctgaacagcagccagagggcgcccgtgagcacctaagtcagatctcgtctctcctctgcccacagccctcaatggctcccacctccctcagggtcaaagcccaagtcctccccgaggcctaccaggccctgcacgacctgccccagcccctccctgccctctcctcctccttgtctccccctcactcactctgctccagccacatgggcctcctcgttgttcctccaacaccccaggtgaggtcctgcctcagggcctttgcacaggctgtgccctctgctggcaagctgttccttccaaaagccatgtggcagcctccctagcctcctttgtgtctttgcttcagtgtctcctcagtgaaaccctcatctgcatcctaactgaaagcttcaagccctactcagaattgacagccccctccacttctacccttcagacaagagagcctgggactccctcaacagtgctctgaagctaagagcctaggatatcccggcctgcccacgaccttgtcctcagcctggcctttccccagctcgctctgcccctccctgcagcagttcagaaattcgtctggcgcacagatgccaggtgggaaaattaattgggccttcctggggctgctctctctgctcccccgtcaataacagccgtaaagcgggatttatgcggccgcgctggctcctgatggaaactgggaggaggggcaaaacattctagaaaagtcaatccctcgcccagggagccgccggtggctggggctctgggaccagagccatctccctgctgcccttccctgggttgggtgggcggggagggaggacatcgtcccggctctccctgtctctggttgggaatcacatatctaattatatctcacatgtgggccgggcacggtggctcacgcctgtaatcccagcactt

SEQ ID NO: 309036 - DNA, 1000 bp, Homo Sapiens
gatctcagctcactgcaacctctgccccctgggtacaagtgattctcagcctcagcctcccgagcagctgagattacaggtgccggccacgacatctggttaatttttgtatttttagtagatatggggttttatcatgttggtcaggctggtcttgaactcctgacctcaaatgatgtgcctgcctcggcctcccaaagtgctgcgattacaggcgtgagccactaagcccggccaagggtctggttttaacatcgtctggcttagatggcagatgccagaattaacagccgactccactaaggaccactcagctgtgtggccttgagccagcctctctgcctctgtgggctgcgatttttacttccatcacacggggatactgttcccacaggaagggctttcaggagccttggccacatgaaacagatgcaggtgatcgatagaaaccatgaaaaccccagcctggacagcagagaccccgtttctaccaaaaatacagaaattagccgggcgtggtggtgcgtgcctgtggtcccagctactcgggaggcggaggcaggaggatcgctggagctggggaagtcgaggctgcagtgagctgtgattgtgccactgcactctggctggcctgggtgacagagtgagaccctgtgtcaaaaacaaacacagaaacaaaataaccaggccaagtaaggtgactcatgcgtgtaatcccagcaatttgggaggccgaggttgggtggatcacctgaggtcaggagtttgggaccagcctggccaacatggggaaacctcatctctactaaaaatacaaaaaaattagccgggtatggtggcaggcgcctgtagtcccagctacttgggaggctgaggcaggagaattgcttgaacctgggaggtggaggttgcagactgtaccactacactccagcctgggcaacagaacgagtctcaaaaaacaacaaaagcaaaaaaacactatgaccacacccaccag

SEQ ID NO: 309037 - DNA, 1000 bp, Homo Sapiens
tgagccacatacaccaacacttaggtgatgcatggctatcagatggacaggccatgtcccaggaaactggaccagcctaaggatggccctggctccaacaaggaaccttggtccagacaggttctaggacagaagttttaggattataagacaaagcatgactgcttgtttgtttggcttttggttttgcctaaagaacagtttaaaggggcttttctcagaagagagcagtgtggtgaggattcccgcacaatgtcagttactgcctgtctgtagtgtggaatgtgccttagacaaaggaagtaaattgcttgcgaaactcccaggatcttatggcctaaaaaaatagacggactaccctataaatccaaacacaggcacactgggaagggacaaactagggtacaaagataatgggctttgaattagttcatctccagggaaaatctggatgagaatacttctaaatatataattttggcccattactttatcgcatccctctgaagactgttaggcaataatgcattagagtttagcatagtgatgcaaaaattgtaagtgctcaacatattttagttccatttcttccctccatatctgacacatgttgaaaagtgtgcatgaagagcacagcatttgtcctcaaagcctgtatgtcgcttagcagaggtgctacaagcatgagctgttacccatagcgtgtccatacctatgtaaactagattattttcctccataattccaagttaaaaaaattgcttttaaatgtatttgaatatatttaatttttttcttctttccttttcactttctgagatttataactaatagactgaaactggagagcagagagcatgtgagagtcactgagccaaaaaacggagagttaacagccagtgaacttctgttgcactggtgcagaaaaacagactggcgttgaggttgaagaaacaacctctgtgagtttctaacaaccacgcctgtcttacttatgtcc

SEQ ID NO: 309038 - DNA, 1000 bp, Homo Sapiens
atgctgctatcaactttggtgttctgatgtttgaatgtaatggcattcagggacattttgatccttctttcctggttttctttttgtaatgttaaggaggaacccaaatggaatcaaggagtggaacataaaaatcggtttcttatgcctctgcacttcacctttctcctgttcatcccactctgccatcattgcctgcttgcctccgaattgcccacgacagtgcagtctgggcacggatcacacctcccatgcagcggtggctttgtgatctgtccacctgggtaagctgaaccacacttcccagaattcccttcccgtgtgtttccggttagagtggagcacagaggagaaacttgtggaaggtttggaggtgggaagtgaagcagcagtcattttacagctcacacgaattgtggcttctctgctggctcacctcagcagaggcaggaactgacatggggccgggtgcagtggctcacgcctgtaatcccagcactttggagaggccaaggcaggtggattgcttgagaccgggagttcaagaccagcctgggcaacatggcaaaacccttctctacaaaaaatacaaacattagccaggtgtggtggctcatgcctgtagtcctagctacttgggaggctgagttgggaggatttgcttgagaccaggaaggtcaaggctgcagggagctgagattgggccatgacactccagcctgggcaacagagtgagaccctgtctcaaaaaaacaaaaaagaactgacacagacggatgtgtctgccttcaagggcttccacttgggcttgtcctcccttactttatatccgtctgtccttcccgattgtctgcagagcctgcttaagcagccccagtgccagtgactgtgtaaggtcaaattcccacaacaaatctcttcaaacaagtacctcttagtggttctgcttctctgatgaaaccctgatgggtacacactcatttattcattcaaccaaaaa

SEQ ID NO: 309039 - DNA, 1000 bp, Homo Sapiens
catgctatctcatggactagtgatactcctaagaataacaatagaggtaatagattagtcaaagattgacatttgtctcaggtatttcctaattatatctaggaattgtgtttcattattttgataattttaaattacttttgaatggaaaataatatgtatttactgactttataaaaactcacaatgtagagacaatactatattgcttattcttatgccattttcctagaggtgacataatgttcatgcaaagtaaaatgagagttgtggaagcaaaggccctcatacttgtctgctgatgctcaccaactgaagttaaaagaattttgactactctttcctttgtgcctttaccagcccctatgctgacgtctgttgagtcaccacaaagctcgtcactgcatttatttatttattcatctgatttcctgttcccagctattagcacaatgtaatatgatggttgttcatggtatttgtgttgagtgaacagataaatcaagaaggggatggagggatggatgaaatgatgcagcacagggatttttagggcagtgaggctcttctgaatgatactgtaatggtggatatgtgatattatacatttgtccaaagccatagaatgtcaagcacagagtgaaccttaatgtaaactatagtctttagttaataatattgcatccatattggttcgtttactgtaacaaatgtgccacactaatacaaggtgtaaaaaatagggggaaattgtgtggagaaggggggagaaaggagggcatgtaggaattttctgtaattttagatcaatttttctgtaaacctagaacagctctaaaaaacatagtctattaagttaacgacaacaaaatataactcaagataacttagatgagatggtcttagaatgtgcgtattgcaagcaacagaaaaccagatttaactagtgtaggtgaaaaggtaaatgtgttggtttgtttactgaagccatgagaaagca

SEQ ID NO: 309040 - DNA, 1000 bp, Homo Sapiens
gatctctcaactctcctggcccctttttgctcattaacaggaggcgcccactagaggacgccatcgcccttcctggagctcatgtcctccctttccttcctgagacaaatgtggctgcttttactgccacaatcccagccctctgcactctagatttgctcagggggcagctcctggacaggcatcagggactcaagggaggaccctcaatctggagattttggtggcatggactggagacctggagccaccccaggggtcacgtcattggggaagggctgggttcagtcgcgggagctacacactcagggtccagatgcccctgctctgtgtgggcactggggacatggccgtgcacctgtgtccctaaaggttctctcactcaggatctgtgtccaagggccttagctgggctgctgtggaaccgtccacactgggcctttcccagtgggggttgagtcctccctgggatttcaagaagggccctcagctgaaagaatcaggagggatgtggcagcctccagggtgcagattcccctcagggacagaggggaccagtggcctccaggccaatccatcacccccagagtcagtcccctgggcatggggggacgtgtgatcctcctgaccgcacctccataggaccctgttgctgggtggtctgtgggaacgtgacctccactccttgcaatgcagaacagggaccccagaggcccttttgtgtggaatgagacaggaaagatgcatgttagggcaggagttgtgtccctagaggcgggggctgtgagaggatgggcagcggggaggtacacagaccgtccagtgctgcaggctacatcggggtgggagcatttccttagagcactcaggcttgtccagaacattccagaacttcccacttcagtgcttcttttcccactgaggctcctcaggtctgtccctgaactctcagctgagcctcccgacccgtctgaagccctgagccctgtgtcaccctctg

SEQ ID NO: 309041 - DNA, 1000 bp, Homo Sapiens; identical to SEQ ID NO: 120028

SEQ ID NO: 309042 - DNA, 1000 bp, Homo Sapiens
gatcctgcccctttttttcttacttaggctgcctaataatttcttaattttgttgaactttttcttttgtttgtctcgctctgccaccaggctggagtgtagtggtgtgatcttggctcactggaacctccgtctcccaggttcaagcaattctcctgcctcaccctcccaaatagctgggactacaggcaagtgccaccactcccagctaatttttgtatttttagtagacacgggttttcaccatgttggccaggatggtctcgatctcttgacttcataatccacctgcctcagcctcccaaagtgctgggattacaggcatgagccactgcgcccagcctaattttgtttaaattttcaagaaatcaacttcttctttcattgatttctgtattttttatttccattttatttatttaaactctaagctttattctatcttcttctcattttagctttggtatgcttattgcctctctagctctttaatgtgcattgttagattgtttatttgaagttcttcctctctacaccataagacgtaagcatgtcctcattatgtcataagatgtaaccacttacagctataaacttccttcttagttctgcttttgctgtatctcataggctttgttatgttgtgtttccattatcaattgtgtcagaaatttttcaatatttttcttaatttcttcattgagcaactgatcatttgggagcatatttttaaacttccatgtacttacatagtttccaaaatacctcttgtgatcaatttctagttttattccactatggttcaagaagatgcttgatattatttcaattttttttcacattttaagatgtgttttgtgacctaacatatggtctactttttttttttattaaactttaagttgtggggtacatgtgtagaccgtgcagttttgttacataggtatacacgtgccatggtggtttgctgctcccattaacctgtcatctacattaggta

SEQ ID NO: 309043 - DNA, 1000 bp, Homo Sapiens
gatctcatctaaaatgagggagggaggtaaaatgagggagggagggagaaggcagggtacccctttctagtaccatccaccatttcccctcacttcactgtactccaagccactggcctcctctgcccctgcaacgtggcaggcttggtacccactgacagcctttgccacagctgtgccctatgctcagagccacctttctcttttctgtctctatggctttctctcattctcaggttcttgcaggtctctgctcacatgtcacttcttttttttattttttgagatggagtctcgctctgtcacccaggctggagtgcagtggcacaatctcagctcactgcaacctctgcctcctgggttcaagtgattctcttgcctcagcctcccaagtagctgggattacaggtgcccgccaccatgctcggctaatttttgtatttttagtagagatggggtttcaccatgttgtccaggctggtcttaaactcctgaccttatatgatcctcccgcctcagcctcccaaagtgctggaattacaggtgtttgccactgtgcccagcctcacaagtcacttcagtgaagcctctgtgaccctataattaatccagccacccgcctcactcagcaccccaccgcctccccacctggcatccaactccctcccctcttcctgcttctctccctgacatgcgggtggaggaccgctgcccagagctctggtggggctgcagctcaaacccaggcccgtggaggaaacgcaccgctgaccacctgaccgaagagttcctcgggggtatctccaaagaaaggcacgcagcccaccagaaactcatagaggacgacgcccatggcccaccagtccactggcttcccatagccctggcggaagatcacctcgggggctatgtactccggcgtcccacacacctgggccagggagaacggggaaactgaggccagcccccagcccaagagaggtcccaggagagaggagga

SEQ ID NO: 309044 - DNA, 1000 bp, Homo Sapiens
gatctctgtctactactcaaccccgccattggagcgtgaaagcagccatagacaaacacgtaaactggtgggcgtggctatgtgccaataaagctttatttataaaaacaaacggtgggccggatttggcccccgatatggcgatgataaaaatggtctccgtctacgcaccgtggtacagtcgccctgagccgaatgtggctattgagcgtttgaaatgtgtccagtgcaaccgaggaactgaattttaaattttattccattttattccgtttaaatttaaacagccacatacggctcgtggctacggttttgaagagcgcagtttatctagaaatcttctgtgaacatttagtaggcggctggatttatattcccttgtttaaccaaatggcagcatcttctacatgctgttctgtaccttgttttcttcccccccacttaaaaatatagtatcttaaaagtaattttataattgtacatctggtattctcattccttttcacagctgtgatactgatctcataacactaagagatactgatctcataacactaagatactaatctcttcgatcattatttgacctcttgtactgttatttttatttatttattcattcattcatttatgtatttatatttttgaaatggagtttcgcttttattggccaggctagagtgcaatggcatgatctcagctcactatagcctctgcctcctgagttcaagcaattctcctgcctcagcatcccgagttgctgggattacaggtgccggccaccacacctggctaattttttttgtatttttagtagagacagagttttgccatgttggccaggctggtctcgaattcttgacctcaggtgatcttcctgcctcagcctcccaaagtgctgggattgcaggcgtgagccactgtgcctggcccccttgtactgttctttacttaaccaatctcctatcgatagacattcaggttgcttcaagccttttgc

SEQ ID NO: 309045 - DNA, 1000 bp, Homo Sapiens
gatcaatctctcaacctataacccgagactaattcacaaaccttggattacttcccacattcatttattcattcatgaaatatttactgagcacctcctgtgtgccaggtaatcctaggccctggggttacagcaggaatacagcagacaactcttgcccatagaatttgcattttagtaactctaaattttacctaaatctaatatctgaggtgattatctaaacttgagataatctccaagtttcctttatttattttgttaagagatgggtcttgctctattacccaggctggagtgccgtggtacgatcatggttcattgcagcctccaatcctgagctcaagcgatcctcccaccttggcctcccaacctcccaccttggcgtctcaaagtgctgggattactggcatgagccactgtaccccacccacattcctttaattccagttaaatctctagccttgagaatttcaaaacctgggtagcttccacacttccactccccagctgccctgccaatccacagccctccctctcctaggatgggtaaccttttctcctttctcttcccagctctggggtgtcaccaagcaaggctaccgctgtcggggtgagtggggtgtcagtgagtgggagggaagccttggcccgcaggctggaagaatggatgacacagatcggacccctgccgctgccttcccccagagtgcgggctgtgttgccacaaacactgcagagaccaggtgaaggtagaatgtaagaagaggccaggggccaagggcgatgcaggaccccccggagctcctgtcccatccacaccagctccccatgccagctgtggtaagacctagagcacaccggtgctgggaaggggcctgggggaaaggggttgagtccaaggtcaagaagaggtccttcccatcagacccacatcccttccatccacccacaaacaggctccgaggaaaatcactcctacacgctatccctggagcct

SEQ ID NO: 309046 - DNA, 1000 bp, Homo Sapiens
gatcatgccactgcactccagcctgggcgagagagtgagactccacctcaaaaaaacaattaaaaaatatatgtatatattttcatgctagcatttaaaatcggggagctaggccggaggcggtggctcacacctgtaaccccagcattttgggagtcggaggcgagtggattacctgaggtcaggagtttgagaccagcctggccaacaccgtgaaaccccatttctgttaataatacaaaagaaaaatagccggccgtggtggcgggtgcctgtaatcccagctactctggaggctgaggcaggagaatcacttgaacctgggcagagtttgcaatgagccaagatcgcaccattgcatccagcctgggcgacaagtgaaacgccatctcaaaaaaattaaattaaaaaaaaaaaaaaagagagctagccaggcttggtggcatgtgcctgtagtcccagctactcaagaggcagacgcaggaggatggcttaagcccaggagtttcagtccagcctggacaatatagcaataccccatttcttaagaaacatatataggacccagtgtagtggctcatgtctgtaatctcagcactttgggaggccaagataggaggatttattgaggccagcctggacaatgtagctagaccccatctctacacacacaaaaaattaaaaattagctaggcgtgatggtgcacacctgtagtcccagctactcaaggctgagatgagaggatcactggagcccaggagttcaaagctgcagtgagctatgatagcaccactacactccagcctgggcaacaaagcaagaccttgtctctaaaacaaaaacaaacattaaaataaaatcggagagggctgggtgtggtggcttatgcctgtgatcccagcacttcaggaggctgaggcgggtggatcacctgaggtcaggagtttgagaacagcctggccaacatgacaaaacctcatctctactaaaaaaaaaaaa

SEQ ID NO: 309047 - DNA, 1000 bp, Homo Sapiens
gatccccctgtcttggcctcctaaagtggtgggattacaggcatgagccaccgcgcccggcattttctgactttttgatctagtcatcctagtgggtgggaagtagtatctcattgtggttttgatttgcgtagccctgataactgactaatggcatcttttcatgggctggttggccatttttgtatctttggagaaatgtctattcaagttctttgtgcattttttaattgtgttgtcttttgtagagttctttttgtaaagtcccatatttgatatgagttacaaatattttcacccattctgtgggttttttcaccttcttgatgtgtcctttgtagcacaatagttttaatttttataaagtccaattttcttttattgcttatgctttgggtgtcataactaagaatctattgataaatccaaggtcacgaagatttacccctgtgttttcttctaagaattttatggttttagcttttgcagttaggtctttgttccatttgagttaatttatttatatcgtatgaggtaaggttctaactttattttttgcatctagatattaagttgttccggcaccatttgaaaaagaaatgaaagagactgttttccccccattgaatgatcttggcatctttgttgaaagtcagttgaccatagctattaagtcttctaatccatgaatatgggatgtcttttcatttactgagatctagtaaatgaattaatttctttcaaaggttttgtagttttcagggtgtaagctttgttctttattgttaagatttttttttttttgagacagagttttgctcttgttgcccaggctggaatgcagtggtgccatcttggctcactgcaacctccgcctcctgggttcaggcaattctcctgtctcagcctcctgagtagctgggattacaggcacgcaccaccacgcccagctaattttttgtatttttggtagacagggtttcaccatgttggcgaggct

SEQ ID NO: 309048 - DNA, 1000 bp, Homo Sapiens
gatcccatctagcgcctgcgctagcaccagccacagttgtttcccgcagcctgtcgctttggggctgactgcccatctccctctcctgttccccaggtggtctctggaactgagcgcgcaggccggccccacctgtccgtcacgtgggcccagggtctcggcagcccgtcagcccccgcgtaggcctgcacgtcttaggatcactcagcctctgggttccccagggaacgtagagcagggggtgtgttgctgccatgaagtctggcctggggcccgggttccatgctcccctgagggtccccagcctctgtccgcttgtccccagctccatggtgatccgggacctgaccctgcgcagcgctgccagcttcggctccttccacctcatccgcctgctctacgacgagtacatgttctacctggtggagcaccgcgtcgcggaggccaccggagagacgccgatcgctgtgatgggagaggtgaggaccctcctgggtgggacggccggggcttggccgggcctgtggggagagggcggtgtgctctgagcagcccagagagaggacactcgcaggtcccactgctctgccgcccggacagagctgcagctcgataaagaacaagccacagaaacgggcccacccgtgccaggacacagcagtgtctcaaaacatcaaaaccacaagttttatcagcactgggaaggatttggggctctgtccaagttcacagtccccatcgcaccgctggctctggaaggaggttgtccttgggcgtcccgccacgcaggggaggcctcggacacaccacccagagttttctgtttattgtggtaacacacacatagggagagatttccacgtgaaagcgcacaatcaagtggcgcttagcacatccacaacgtgcagctggcacctctgtccagttccagaacattccgtcaccccaaaaggaaaccccgtccccaggagcagtcattcccaagctcctcctgcagcac

SEQ ID NO: 309049 - DNA, 1000 bp, Homo Sapiens
gatcactaggtcaggagatcgagaccatcctggctaacatggtgaaatcccgtctctactaaaaatacaaaaaattagccaagcatagtggtgggcgcctgtagtcccagctactcaggaggctgaggcaggagaatcgcttgaacctgggaggcggaggttgcagtgagccgagatcgcgccactgcactctagcctgggtgacagagtgagactccgtctcaaaaacaaaaaacaaataagcaaaaaaccccacaagtcagaggccagtcacagtggctcacgcctgcaatcctagcgctttgggaggctgaggagtgaagataccttgagctcaggagttcaagaccaccctgggcaacatagtgagaccccatctctgcaaaaaattaaaaaaaaaaattagccagcgatgatagcatgcacctgtagtcccagctcctcaggagtgtgaggcaggaggatctcttgaggccaggaggtcaagactacagtgagttatgatctcaccacttcactccagcctgggcaacgaagtgagatcatgtctctaaaaaaacatttaaaaagtaacaaaacaagtcagaaacagccaaacaaagagacacataggacaaagtctgggagggtccccaaaagagcttccatgtcttttttttttttttttgaggtggagtctctctctgttgcccaggctggagtgcagtggtgtgattttgactcacagcgttccacctcacaggttcaagtgattctcctgcctcagccgccagagcttggactacagttgcccgccaccacacccagctaatttttgtatttttagtagagatggggtttcaccatgttggccaggctggtctcgaacacctgagctcaagtgatcctcccacctcagcctcccagtgtgctgggattataggtgtgagccaccgtgcccggccccatgtcctcttcttgaggcattagagtgtgtctcctctcctggaagaacatcaat

SEQ ID NO: 309050 - DNA, 1000 bp, Homo Sapiens
gatccacccacctaggcctcccactgcgctcagcgagaacattttcttggaggagagagagacattcactgggaggggacatgagagagtttctttgggagctggtagtagtctctgtttagatcctggtgatgcttattcacatgtacacgaatataaaagttcattgattttaagattagggcacttcaccaaatagaaattatgcctcaataggccgggcatggtggctcacacctgtaatcccagcactttgggaggcctgggtgggcagatcacgaggtcaggagttcgaccagcctggccaacatggtgaaaccccgtttctactaaagatacaaaaaatgagccaggtgtggtggcgcgcacctgtagtcccagctactctgaaggctgaagcaggagaatcgcttgaacccgggaggcagaggttgcagtgagccgagatcacgccattgcactccagcctgggtgacagggtgagactccgtctcaaaaaaaaaaaaggagggagggaggaagagaggaagagagggaggaaggaaggaaggaaggaaggaaggaaggaaggaaggaaggaaagaaaataaattatgcctcaataaaaacagtaaatttggccgggcgcagtggctcacgcctgtaatcccagtactttgggaggccgaggcaggaggatcaagaagtcaggagtttgagaccagcctggccaacgtggtgaaatcctgtctctactaataatacaaaaattagccaggcatggtggcacatgcctataatcccagctactcgggaggctgaggcaggagaatcgcttgaacctgggaggcagaggttgcggtgagccgagatccgccattgcactccagcctgggcaacaagagcgaaactcgatctcaaaaaaaaaaaaaaaaaaaaaagagtaaatttgagaaaataaaatatgaataagtgtgaacatccatacactccaaatataacagttccaataaaaatacat

SEQ ID NO: 309051 - DNA, 1000 bp, Homo Sapiens
gatcacagaatcttttacagtcttttaccattaagtatgatgttagctgtgagtttctcatagattccctttatatggttgaggaagtttccttttgtttctggcttgtgaaagattctcatagtgaaggagactgactttcatcaaacattttttctgcatcactatggatttagttgctctccccctcacgcccacaatgtatagtctgaagctctaaccctcaatgcaaccatatttggaggtagagcctttaagagagtaagtaaggttaaatgaggtcataagaatggggccctactccaataggatttgtgtctttataaaaagcagagaagacaccggaagtgcacatgctctgaggaaaggccacatgaggattcagtgagaaagtggcaaatgcaggccaggaagaaaggcctcaccggaaaccaactctgccagccctgtcatcctgggacttccagcctctagagttgtgggaaacatgtttctgctgcttaagccacccaggctgtggtgctctgttacagcagtgcaagcagactaatgcatacatccattgagatgatcatgtgttttgccttcctcctactggtgcgttacattgtttgattttaatacatcaaaccactaaccttgcattcctgggataaatcccacttggtcatggtatataatcttttaatatgctgctggattttgtttgctacattaaaaacaaactactttattattactgacatacaaaaagccacacacatttaatgtatgcaagttttttttttgataagtatatacccatgaaactattgatacaatcagtggtcataaatatacacatcacctccaaaacatatctccctctctctttctttattcatttttggtaataagaacgctggaattgaaatctaaactcttagcaaacttttagctatataatacagatttttttttttttttgagatggagtctagctctgtcccaggctggagtg

SEQ ID NO: 309052 - DNA, 1000 bp, Homo Sapiens
gatcaggagttcgagaccagcttggccaacatggcaaaacccgtctctactaaaaatacaaaacttagctgggcgtggtggcaggtgcctataatcccagctacttggaaggctgaggcagaagaatcgcttgaacccaggaggtagaggttgcgatgagccaagatttcgccactgcactccagcctgggtgacacagcaagactccatctcaaaaaaaaaaaaaaagtacatggtggtcttgtttgcccttcatccacttacctgatgctaacatcttatataactgtaatacaacatcaaaacaggacattgacattagttcaattctaagaccttaatcttccaatttcactggttttactcactcctatgtgtacctgtgcacatgtgtgtgtatgcaggtgtatgcgtgtgcacctgcacattcctatgtgtagcactaggcaaaaattttttttaattttttgagatggagtctcgctctgtctcccaggctggggtgcagtggtgtgatctcagctctctgcaacctccacctcctgggttcaagcaattctcgtgactcagcctcccgagtaggtgagactataggtgtgcgctaccacgcccagctaggtttttttttttttttttttttttttttttttgagacagagtctcgctctgtcacccacactggagtgtggagtgcagtagcacttgaatgtagactgcgagaagttaaagatgtggactataaactctacagtgaccattaaaaaaacaaggcaggtgaggcgcggtggctcacgcctgtaatcccagcactttgggaggccgaggcgggtggatcaccttaggtcaggagtttgagaccagcctggccaacatggcgaaaccccatctctactaaaaatacaaaaattagtcgggcttggtgtcgggcacctgtagtcccagctactcaggaggctgaggcaggaaaatcacttgaacccgggaggcagagattgcacta

SEQ ID NO: 309053 - DNA, 1000 bp, Homo Sapiens
gatccgcctgcctcggcctcccaaagtgctgggattacaggtgtgaaccactgtgcctggccgagatggagatgtctctttttttttttttgagatggagtctcgctctgtcacccaggctggagtgcactggcacgatcttggctcactgcaagctccgcctcccgggttcacgccattctcctgcctcagcctcccaagtagctgggactacaggcgcctgccaccacgcccggataattttttgtatttttagtagagacggggtttcaccatgttagccaggatggtctcaatctcctgacctcgtaatccgcccgccttgaaatcccaaagtgctgggattacaggcgtgagccacttgcacttagcctttttttggagacagggtcttgctctgtcgcccaggttggagtgcaatggcgtgaactcgcctcaccgcaacctctgcctcctgggttcaagcgattctcctgcctcagcctcccaagtagctgggactacaggcgcataccaccacactcggctaatttttgtatttttagtagacaaggggtttcaccatgttggccaggctggtcttgaactcctgaccttgtgatctgcctgcctcggcctctcaaagtgctagaattacaggcatgagccaccaagcctagcttttttttttttttttgagatggaatcttactctgttgcccaggctggagtgcagtggtgtgatctctgctcactgcaacttctacctcccgggttcaagcaattctcctgcctcagcctccccagtagctgggactacaggtgcgtgccaccacgcctggctaatttttgtatttttagtagagatggggtttcaccatgttggccaggctggtctcaaactcctgacctcagatgatccacccgcctcagcctcccaaagtgccgggattacaggtgtgagccactgtgcctggcctcattggcagcttctgatcctgcctgtccatcagtgtctggg

SEQ ID NO: 309054 - DNA, 1000 bp, Homo Sapiens
gatcacaaggtcaggagttcgagaccagcctggccaacatggtgaaaccctgtctctactaaaaatacaaaattagctgggcgtggtggcacacgcctgtaatcccagctacttgggaggctgaggcaggagaatcacttgaacctgggaggcggtggttgcaatgagctgagatcgcgccactgcactccagcctgggtgacagagcgagactgtgtctcaaaaaagaaagcggcggggggccgggggctatctcgagggatacaggataggcctggcccatctgctggtggccacagacaccagcccctctgtgtccccagcactcggggagcagagcgggcgggggtcctgacaggctgtgtgtgccccgcagcacgccctgcgaatgctggccttccggcagacccacaaggtcctgggcatggatctcctgccgcccagacaccggctgggggcccgcttccggaagaggcaacggggacctggcgagggagaggagggcgcaggggagaagaagcggggccggcggggcggagaggggctcgtgtgagccgcctacctcccccacctgcgggcctttgcatccctgcactcctggacgtgtgcgcgccgaccaatggctgcttcatccccgacgttggacaatggtcatttccttttgagtaacgctctgtaggtttcctttaaaacacctgtgcttcagaccgggcactgtggctcatgcctttaatcccagcactttgggaggctgagttgcttgagcctgagagttcaaggccagcccagacaacagagtgagacccccatctctccaaaatatttttaaaaatcagcttggcatggttggtggccaggcgcggtgattcacgcctgtaatcccagcactttgagaggccgaggtgggcagatcgcctgaggtcaggagttcgagaccggcctggtcaacatggtgaaaccctgtctctagtaaaaaacacaacaattagcctggcgtggt

SEQ ID NO: 309055 - DNA, 1000 bp, Homo Sapiens
gatcacctgatgtcaggagttagagaccagcctagccaacatggtgaaaccccgtctctactaaaaatacaaaaaattagccaggtgtggtggcaggtgcctgtaatcccagctactcagaaggctgaggcaggagaatttcttgaacccaggaggcggaggttgcagtgagccgaggtcatgccattgcactccatcctgggcaacaagagtgagactccatctcaaaaaaaaaaaattacttctatgttttattccaataatttaataatgttagctcatatttaggtctgtagttcattttaatttttgtttgttttgttttgttttgttttgagacggagtctggctctgtcgcccaggctggagtgcagtggcgcgatctcagctcactgcaagctcagcctcccgggttcacaccattctcctgcctcagcctcccgagtagctgggactactggcgcccgccaccacgcccagctaatttttttgtattttttagtagagacggagtttcgccttgttagccaggatggtcttgatctcctgacctcgtgatccgcctgcctcggcctccccaaagtgctgggattacaagcgtgagccaccgcgcccggccaattttttttttttttttttttttttgagatggaatctcattctcttgtccaggctggagtgcagtggcgcagtctcagctcactgcagcctctgcctcctcagttcaagtgattctcacgccttagcctcccgagtagctgggattacaaaattgtgccaccacgcctggctactttttgtatttttagtagagacagggtttcatcatgttggccaagttggtctcgaactcctgatgtcaagtgatcctcctgcctcggccttccaaagtgctgggattataggcgtgagccactgcctctggccaagttaatttttatatacgtgtaaggtaagggtccaacttcactccatgtggcttatcgcgttgtctcaacag

SEQ ID NO: 309056 - DNA, 1000 bp, Homo Sapiens
attcctggtctcaagtgatccgcccgctttggcctcccaaagtgctgggattagaggcgtgaaccaccgtgcccagtcgagaatttgcatttctaacaagatgctgatgctgctggtcatgggatcacgctttgaggaccactgttctagctggagagacagaagtgtttcttagtgattaacagagggaaacaaatgtgaagatagatgtagacacaggtggtaaacatgaggggtacctaacctggctgggaggataagggaaggtttcctagagtaaactccacaagctgagtcttcaatacaaacaggaactagccaggtagataagggggaagagcattagacacagggaacaccctatgcaaagatttggaggtgcaagaattgagggtaaagagcagggtacaggtgtgggagcagaagctggggagacacacaggtgtcccatcttagagatccctgtaggccctgctgaggagcctgagaccttgaggactgtgcagagccatcaaagtgtccaagggcctgccctgatgtttcccaagggtttgctgaactcacctagacccttgcctgggagtgagagccaggtagcatttctttttcagtcccctgctcttggctccatttctgtccatcccagcctcacctttggtcttgtctggatattccagccatgggtacaggaacattgacctggagacatcagagatatcagttgatttttcataggccatcttcttctcctggtggggccagagggaacctgcaggggggaatacaaggcttttaggggagtgggggcacagctggaggagacctgtcctctgtggtacgagaggtacaggggaggtgtctggacttctggaggtagaagcttccaagtgctaagcgaccaggttactttggtaaatagaacactcaggtttcacttctgagccccagctgtggtatctactggcctggacttgagctagtcactttattttctgagctt

SEQ ID NO: 309057 - DNA, 1000 bp, Homo Sapiens
cttcttggcctttttgcccccaacgggtggcatcttcgtggtgtccagacaggtggtcgacacggatgcggaccgactaggcgagccttcccgctgcgcagccccgagctgctccgagtccgcagcctgcctctttatacccgcagttgggcgtggggagggcctcccagccaccgcgcgggccaacacggaccttgggcgggaacacgcccaccagcccttcatcaggcccgcctcctgttgggaacctggcctgccaaggaggtaatccagattgttcacccaaatgggtggaaccaccgaaaagtaagataagaaaaagcgaggttgccactcgctcagatttcaaacctgcctagcgtcccttttgcctcttgcacttttgccccgaccctgaccgtcctctcgctcacctgggatcatgcaccatggcccacttaggctgccagagaggcctctgagaagtccattcgatgctcagatatttgtcaaaggccaaggcgtcaagattatggaatcaggggatgaagtcctggaagatcttcagcctggagtgtgatctcctgtgtgatatacatccagtataacgggacacaaatgcggctttagtagaggagtccaatactaaccctgaattggcgggtatgttcaaaatgaccttctacccctatacccaaacatgccttgcagtttctaataacacagtagtttctaataagaatatgtttgtaatatttaacaaggacagacttttaacatttataaatggaagcagaaatgtactttgaagacttcaaaattcagcatgaaaacgatataaaaacatagacattagaagaactggagggaatagagatgttaacagtagttacctattgatggcggaattaaggcttgttttattttattcttcatgtttcactgtattttccaaaatatttttataatgagaatacattgattttaaaataataaaaacattactttaaaaaatgtacag

SEQ ID NO: 309058 - DNA, 1000 bp, Homo Sapiens
gcagaagctcctctgctcttagagacagcaggtgcaggcctgaaccccaccgctggctcctccttgggtctgtgtctcaggccactcctagtgcctctgcctgatggcaccatgctgccacctccacatcaggaggggcagcctccttctgtgtgaccttagccaagtcccaccccaaatctgggccccatctcagtttccactgaagggcaggccggatggggtgggagagagcctctgtgaaagataaagtggatggtgtgttgggttaggattggccttgaatcttggccccgttcctttctggctgtgtggcctgtggcaagttgcttcatctctctgagcctcagtagtaacagccaccactggccgggcacccaaagccaggcgctctgctttcctttcaccgtctcatactgctacttttgtttttattttgttttattttgttttttgtttttttgagatggagtttcactcttgttgaccaggctagagcgcagtggcacggtctcggctcactgcaacctctgccttctggtttcaagtgattctcctgccccagcctccccagtagctgcgattacaggcatgtgccaccacacccggcttattttgtatttttagtagaaatggggtttctccatgttggttaggctggtcttgaactcccgacctcaagcgatccacctgctttcacctcccaaagtgctggaattacaggcgtgagccaccacgtctggcctacttttgttttttttgaggagtctcactctgttgcccaggctggagtgcagtggcacgatcttggctcactgcaacctctgcctcccgaattcaagtgatcttcctgcttcggcctcccgagtagctgggattacaggcacatgccaccatgcccggctaattttttttttttttttaatagagatggggtttcaccatgttggccaggctggtctcaaactcctgacctcaactgatccgctcaccttggcct

SEQ ID NO: 309059 - DNA, 1000 bp, Homo Sapiens
aggacttgaacatccatggattttggtatctgcagagggtcctggaatcaatttcccatggagactgagagatgaccgtactacccacttcgcaagcaatgtcttctttaatgtactgaaccatcccattgttcagaggagaaactgaagctcagggctttgaataactagaccaaggaggcacagcatgggagtgggacatgaagcactctacaattaaccctttcaggacaaggccctgtctcccacacccatctgcccaaaggctctccagggccccctcctcttgggtgtaccttgacaagagacctagattttagctcactatgctgtctgcagtcctggatggtcccactccagtgtctggtgctctgagatggagtcagcattagtggcggatgtggagactggggggacctgtcttcactggggtagacagaggagatgtggactttgccccccatgagcccggcacaaacccagagccgccagcagggcctcgaggcatcagtcccgggctcatgggctccctgaggtgtttctcctactgttttccgttcccctcctcccttccatgctgaggttggtggggtgggggtgggggtgcccacgcacggaacagccaccacttctaactatcgcctgagccctgatctgctgtcagcttccacgtagtctcagggtcacaaaagtccaagaggcctcttgggaatgtgtcaccttccagcgtggagtcacactgaggaaggaggaggggagggcagccaggggggtggcgatagggagagagtttaaatgtctggctggctctgagcttcagtcagttcccactgcagcgcaggtgagctctcctgaggacctctctgtcagctcccctgattgtagggaggatccagtgtggcaagaaactcctccagcccagcaagcagctcaggatgttcctgaaggccgtggtcctgaccctggccctggtggctgtcgccggtgagtagaagctgtc

SEQ ID NO: 309060 - DNA, 1000 bp, Homo Sapiens
tgctatggtggctcatagaacttagggaaacacttatatttaccagtttattatcaaggataatataatgaaaaagatacagatggacaaatgaagagatggagagagccaggtatgggggaaggtgcgaagagcctccgtgtcctctccaggtgggctgtcttccagacacccccaagtgttcaccaacctagaagctctctcaacactgtcctcctgggttttttatggcagcttcattacatagacatgattaattacatcagtggccactgatgatctattcaaccatcagcccctctccagagcctctcaagagcctctccagaggtcaaagggtagagctgaaagttccaaccctttaatgccatggctgattccccatcctgaggttatccaggagcccaccaggagctgcctcattagaacaaaagaagtttctattgcccaggaaattccaagggatttgggagctctgtgttagaaaccagggtcaaagaccaaatattagaacaaaagagcctcctagcacccctgtctacaagagttttagaaattgtctcagaaactggggccagagaccaaatatatatttcttattgtaccataatatcactaaaacaacgaaaggcagtaagaacagaggaacaaagacaggaggcatgtacaaaacgataataacgtgaaaaatgtaaatctaaacatatccatcattctattaaatgtagatgctcagacagggcaacaataattgtgataaaaatagctaatgtggattgagtgctgactatgtgtggtactatcctgggcacttcacatgtccagtcttgtaatcttcacagtactgctatagggtaagtgctattcttgtttctattttagaaatgaggaaaccattgaaaacagggattgaagaacttgccaagggaatgcttggacaagaaaatgaattagtttcctgaaatccatgtgactcaaacaatgagaagaccctcaaccc

SEQ ID NO: 309061 - DNA, 1000 bp, Homo Sapiens
ctggaagcccctaccctctcccgcagccccttccccagagtaaagaagcactcaggagagaattttctgtaggatttttattggtggcacctggggccacatggagggagtcctcagcacaggcgctggggtgtgggaaatttcagaggcccctcctgggatgtcacccttcaggtcctcatgagtcaatcttgagtttctccttcactttctgaaatgtctctgaaaaccactccctgtggggaggaataaggaagggggtcactgtgtgcagctacctcccaggctgtccaaattctgcctgctacctgactcccacctcttccccttgcagaatctccatccccactgtctgtgggattaggaggaccgctgggctgggtgggccaacttctgtgcctcagtttcccagatggaccaaagcacgttgaagtctaaacactttacccttggctgggcatttggctcacgcctgtaatcccaacactttgggaggccgaggtaggctgatcacttgaggtcaggagttcgagaccaacctgggcaacatggtgaaatgtcatcttcactaaaaatacaaaaaataccatgtgtggtgtcacacacctgtagttccaagtactcatgaggctgaggcaggagaattgcctgaacccgggaggtggaggttccagtaagccgagatcgcaccactgtactccagtctgggtacatctcaaaaagaaaaaataaggccgggcgccgtggctcacgcctgtaatcccagcactttgggaggccgaggcgggcggatcaccaggtcaggagatcgagaccatgctggctaagaatacaaaaaattctactaagtaaattctacattctactaagaatacaaaaaattagctggcgtggtggcaggtgcctgtagtcccagctactcgggagggtgaggcaggagaatggcatgaacccgggaggcggaacttgcagtgagccgagatcaggccactgcaatcca

SEQ ID NO: 309062 - DNA, 1000 bp, Homo Sapiens
aaagctgcagcaactcaaatcctcctagggtcaataaagaaaaacatattgagaaatacatttagggctatcaccatgtctggctgtaaatctattttttaatctttcccctccccccatatatatgtatatactttattgcctttatatttctgctggtttaatataattagtatactaaatagttttctgcatttatttggtttctaaaaatatataaaatgcattgaaaagagctcctgcagctttcaggcagtcactgtcctggcatcgaaagcttattctggagatgtaaagcagcaatactgaataaatagtgattgttttgtctttttgatacagctgatggccttcaccccaaacttaaaaatactgtagcaaatagtataaacatgcaacttaaaaaactgaacacaatacaaaagtaataattataagctaattttaacacaatataaaccaataaagacaactttaggtaggagagggatgtgaacacagcatcgttatataaattaaggcccaatttatcaaaggcaatgcacaatgggaactgtccatctgcccaagcactttgcatgcctgaaatcaaaagtttttgtcttttctgtgttatttcctcaatccattacagttctatcttggaagatgtttacagaaatggcttcaaatgaacagtctgtttctctgaagaccattttgctcttattcacagagaaaattatcctttaatgcagatgtaaattacatttatgctgtggaagcaagtgcttacatgttcttgttatatattgctatacttcatatttcacaccataaattctattttttttttactgtatttatatagtttttactctatcagtcttgctgtagctcttgtttatgactaatttgaactataggaattgatgattacctcattgatgactgggagaattaaataggtaactcctattaataccaactgaagtctcatattataaaaaagtccctgtgc

SEQ ID NO: 309063 - DNA, 1000 bp, Homo Sapiens
ccccatttagaaacttctgtgcttagaacatacttggaaaactctaagtacatacatacaagggctattggcacaagagcccaagatgagtaactatctttctccctaatttgacatcaaatttaatagatttttaagaaaaagaatcactgccagtcacagacatttaaaaaagaaatgactgaggtgataagcctcaggaaaattacagagtagcactgctccagaaggagcagaaacagaaaagcagaatttccatttacaaatgatgacagtactgtgaaagctcccagaattagcagtaagaagcacaactctgcaggttcattatactctggacacagtatatgtttcttctcttctgaatttcaaggtaatatgacatttgcttaataaatgaaaattcataatatagaagatggaggacctcagtaagtatttagatattaaagacaggaacaaagtggccattttggaattagtcttttatcaaaagttatccaagtctatttttcatgagaattaccagggtattatctgcaaattaaaatgccaagcctccaaatcctcataggtatcaattaattatattttccattcctgtctcaacaatttcaacttcctgttttgagcaaactcatcagcttagatttatcaacatcttgttttaaacccttcaaagaacattatgaataaagagaatttaaaacgtttctcagctgagacatcctcattctcaaatgagaatattggcttaatttagagtttctacatggctaaaagaaaaaaaaatgtttaaatacgtgatactgagttttccagtcatggtaaagggtttgtgctaactgacctcttctttccttgcagggctaactgcagctacctagcaaaattactagctggagttactggtgcaatgagcaaatgcagaagaatttctttctctgtgatgctaactggattgttcaagttttgaaactgtgaccctggtccattagca

SEQ ID NO: 309064 - DNA, 1000 bp, Homo Sapiens
atcccagtactttgggaggctgaggcgggcagatcacctgaggtcaggagttcaagaccagcctggccaacatggtgaaaccctgtctctactaaaaatacaaaaaattagccaggtgtggtggcgggcgcctgtaatcccagctattcgggaggctgaggcaggagaattgcttgaacccgaaaggcagaggttgcagtgagcccagatggcaccactgtactccagcctgggcaacagagcaagactccatctcaaaaaaaaaaaaaaaaaaaaagttacagaaaaaacgtgattaaaaaaagtcatgggataaaaataaaaacaaaagcaggcccctgtcagcaaagcctggagaagtggggccagaggctccacccccaccatgtccctgccaccccttcccagtcacccctttaccattagagtagcaagacaagacccctgtctaatagggagagacaaacagaccctttgccaccctggccagggctgagtccttaaatttctggatgatgatgattgttatttaagaggcagaggctgatgggagttggtttgttcggaggaggcctcatggcctccttactttcaccaaagcaatttttccctcaggctcccgtcttcttagtcagagaggcagctgaggcgggacagtggggctaactgtagaccaggcaagggcatgagctgctgagggtggccccccttcccccatgtacacattgtgtctgtgtaacgttttatatattctggggggtagggccgcccctgtatagtacctagtggagattggagctggcacatggcggggaggttctaataattatttgcagctggggaatttatttgatagcataggacagaggaaggaggcggggatggggtcgtgacttcctggcgatgcaactcctgtttattttgctttttattttggaataaatggatttagccatactgctagcctggtgtgttcctgcttcccccactgggtcctgga

SEQ ID NO: 309065 - DNA, 1000 bp, Homo Sapiens
ttaaaaaagtcatggaataaaaataaaaattaaaagcaggcccctgtcagcaaagcctggagaagtggggccggagtctccaccgccaccatgtccctaccaccccttcccaggcacccctttacaattagggtagcaggacaagacctctgtctaatggggaaagacaaacagaccctttgccccctcgatcagggctgagtccctaaatttctggatgatgatgattgttatttaagagccagaggctggtggagttggtttgtttggaggaggcctgatgccccccttactctcaccatagcaacttttccctcaggggggctcccaccttcttattcagagaggcaggacagtggggctaactgtggaccaggcgagggcacgggctgctggggtggcccccgttccccggtgtacatattgtgtctgtgtaaggttttgtatattccagagggtagggccgcccctgtatcatacctagctgaggttggagccggcacatggggaggaggttgtaataattatttgtggctgcgaaacttatttattgctagcataagacagaggaaggaggcggggatggggttgtggctccctggtgatgcgactcctgtttattttgctttttattttggaatatatggatttagccatactgcccgacctggtgtgttcccatttcactcactgggtcctggagtttgtgccaccaaatgaggagccccagagtgtcttgagtgtgtccagctaggctgttagggaccttccaggcgtgttacctgtatgctgcctagtggcgcctgggggattccacggggactgccatggtgcctatggggcgcagtccagccctgacagccaacaggctcggaagcctgttgtagcggtggccgggaagacaggtaccagcacctaagggcactgacttccacccaccccaggcgtcttcccttctgtccccttcctccctcccctgtctgcacctggtggcctgttc

SEQ ID NO: 309066 - DNA, 1000 bp, Homo Sapiens
atgaactcaaaggcttagggacactagaatgttagagggaatttgtcatttaagactttcttacccaccatgggcaggtccaaagggcattatcttgcaccttgaccataaggaatacatttatgaggggagcctcagcatactagaagagctctggcattgctcttctctgtaggccagaccgtacagtgggaactgcagctgctgaactgggaaacataaatgcaatggaaataatgagagtccaagggtggcagggaccaagtggaggcactcaaccaacaaaggcaaggtaggtacagctactctaatggacagcagagccaaggcagcactcagaatagtcagactcctgtggatctatgacgttggctacttgatcatgacattcctagaagtgaaactgataggaagcctactaaattgttattgacttgtataagcaggaaagttcaaggacaagtgaacaaaaatctaatttgaatcacaaaaacagagtcttggcacctcaatcaattctcagacttaagccagtttacagacccagaaccccttgaatgaaggaggggctgggcccccttgagaaagggccccagtacactgttgaaaatatttctaccagtgttctccaaagggacctagaggctttcactggggcaattgtggattgagggaaaggaagtaatcagacctttcaggaactacagggcactggctctgaactgtcattgatcagttcagaagccatattgcaatcccagagagatggcagaaattagtgccaccatcaaggacttgaaagatgcaggagtggtgattctcaccacatccccactgaactctgctatttggcctgtgcagaagacagttggatcttagacaataacagtgaattattataagcttaatggagtggtgactccaattgcagctgctgtgccagatgtggtttcattgcttgagcaaatgaacacacctcctggccctgggctgcagctat

SEQ ID NO: 309067 - DNA, 1000 bp, Homo Sapiens
ccagagtcttcaaagttcatgcaccatttttattatatactaatgtcctactaaatggaaaatcaatcacaaaaataatttgaaatgcttgtttatttttaatacaactctaacaagatgaataatctgtgttactacatcattcccataggttatagttgtgcatgatatttataaaaaatagaaaagaagaagaggaagcaaaagaaaaagaaaacaaaatttaagagatgatagtaggaaaaaaaagtttcttatttctcatatgcatgtacagctcaataaacatgttacctgggccaggcatggaggctcaagcctgtaatcccagtattttgggaggctggtgtgggaagatcacttgagctcaagggtttcagaccagcctggacactatagcaagcccctgtctatacaaaaaatagaaataaaattagttgagcatggtggtgtgtgcctgttgttgcagctacttgggaagcttgagcccaggaattcaagaccagcctggacaatataataagacctcatctctacaaaaaaacattaaaaaaattagccaaacatggttgcacatgtctgtagtcctagctacttgggaggctgagatgggaggatcaattgagtcaaggaggtcaaggctgcaatcagccatgattgtgccactgtcctccagcctaggcaacagagtgagactctgtctcaaaaaaaaaaaaaaaaagttaaacaaaaatttaaaaagaaaatgtcaacataatccatgattatgtcttttctagcaatctaaaataagaaaaagtggagaataatgaaaagaaatctttaatatcagatatgttaagtaaagaaagaccttcttagatctcagttcgaaacttcagtgtagattccttcatttgctgctcataatgtttatcaaatttttcattcagggctactgtaaagtgatttttccagtctcctgtaattcctgtaacaaaaaagaaagctcaataaatat

SEQ ID NO: 309068 - DNA, 1000 bp, Homo Sapiens
aagacatacatttgaagcagcctcaggagtgaatttctccttcccttagtaccctttgcagtaattggcacacaaccatttgaggcatggatgggataatcttcaggtctttggcaccagggttaagcttattttgaatctatgccatattagcaggcgaacattgccacactgacatttaaatgcccaccatattatcttaaggttcctgaagcaggggtaactctactttcagtaaacaaaaatcagattggacaatcggaactgtacaagttctacaaaagcatgttggagtcacataatgaaaaagcagatttttttattatgatgtttctccatatttggcattgctgtaaatggctaacatttactgccaattcggtacaaatgtgtggtttggtaataccagaacagcaaatttaaatgaaaaaataaaagttaaacatttccacacaaggttttacagtctgacatttcactgcgtaggtaaaaagacactttttttttaactacagattattattcagcatgaataaaaaactacaacttttatttttaaacaggagtcactggttttaatttttacacattttaaaattactgtgataaaaaataatgaaaaagcttcttaataatgccatacacagtataatatagatttgtccccattatatagcatttaatatacaaaatagaatattgacacacttgaatctatatgtagttaagcaagttatttgaggagggtattttcatacagcctttcatcagaaaataaaatcctttcagacattttctagagagaagcaaatcctttcctgaaaacctggtcactaatcctgggtggaccaggttgcttgaaaatagtctgggaaattacgaaactccacccaaagggtttaaagtgtcctccttacacttttatttcccttctgacactaaaaccagacacacacacacaaaaacacattcacctacagctacagtcagggagtgacca

SEQ ID NO: 309069 - DNA, 1000 bp, Homo Sapiens
aatcatggctcagagttatggaaggaaacaagtcaattttttaaaagatttattcttggctttaaacgtatttataattagatttgaaaacatgatattatacagacatttaaggcattaaaacatctgatttaagaccttctccatgctattaactcccagttagaaatgttttatcccttttctctattaaacctaagaaagtaacaaatattggccgggcacagtggctcacgcctataatcccagcactttgggaggctgaggcagatggatcacctgacatcaggagtttgagaccagcttggccaacatggtaaaacccagtctctactaaaaatgcaaaaattagctgggcatggtggtgcgtccctgtaatcccagctactagggaggcttgaggtgggagaattacttgaacccgggaagtggaggctgcagtgagccaggatcatgccactgcactccagcatgggcgacaaagcaagactccatctccaaaaaaaaaaaaaaaggacgtaacaaatgagagtatcatcttaaattgaattaatcttctgcttttgtggtaagtttaaaagggcataggctctgggtcctgtgatagcgctaaaaataaagcaggcagaatcagtgccaatttgaaagcaagatattttctcaagtttgagtttggatgaccattttgttgaaaaaaaaaataaattaactatgaaatcttctgatttaaagtatttgaatttttagttgaagtaatttaatttcagagatcacactggaatagtaaaaaggaattagagttacactgagggttctatttttcttataatcatgctgacttaaggatgaagaattgctcaaaaggaaacaccactcttcatattcatcctgacttttgaacaggatggaactatagcagaaccaacatatttgcattaaggagaactatttcatagtgagttacctctaaaaaaaatcccctaaaatagtagctaaacta

SEQ ID NO: 309070 - DNA, 1000 bp, Homo Sapiens
aaacaaagaaaaacgttcagcaaacaccacaatttactctcctattgaatttgtttttaagcatgtgcagctaagcaataacatcaggtattttgcagtacatgtaaaattttattagaaaattttaatgtagatatgacatctaaacagatagttttcaaatagcattaaccagtaaaaaattacttggaaaaaaattccttttcctttgaataactcaaaaaattcatggagtaagtcagtatcgacctctctccacaaaaccagtatgtttcttttagtaatatgcaagtaacaatgaaaaaagaacatttcaatttttgatttgcaaacaaggtttggtatgcaataactattattttgaatacttgctttaatatgtgcttcagtctcctttatcatactgactttccccaccatctcctgtagatgccacataacttcagctaccatatgcttcatgaggagcaggtacaccctatcgagggaagatggatttctttcgtcttttctgccaatgtgctcatgaccacaggaataaaaatcaccacagccctttgagtaactctcccgacttctgccatatctatctcatatattgttataatcatagtggctgcttctaccataagacactttaggccctcgtgcaggtggtgcaccatgagaggtccctgcagggttggtaaaataatatgttggactacatttaaacatttttactgccatcactaaagcatgaattagttaaagtactatctggaaatatctgctttcctctgcctttgttgaaaggatattaattatgcctgcaatagtcagaaggttttatttaaaagaagtgtaagggtagcattttgaagcttaacaaatttatttctaaactaaacattgagtctcattttctgaatgtgaagttttcaacttcatatcgttcccatgctttatactgttaagaatactccatatttaaacatgttatgtttgtcctttataattt

SEQ ID NO: 309071 - DNA, 542 bp, Homo Sapiens
gaaggatagtgcatgtgggggattttattgcggtgaaagtggctctcagtgggaaggggagctgagaaaagggtaggggaagggtaggtaatcttttcctggagtctagccatctctaaccagattcttctctgaagttacaccatcaagctgtccctctgaagtcaaactgcttctctcctgacgtccagccatagtcatcccgaggtccagctgctgcttctctctgcaggttttctgggatcgggcttaatacctaggtaatgggttaatagatgcagcaaactgccatggcacatatttacccatgtagcaaacttgcacatcctgcacatgtatcctggaactcaagagcagtctattgctgagacgtgacagcgtgctggcaggcagccctcgctcgctctcggcgcctcctctgcctgggctcccactttggtggcacttgaggagtccttcagcccgccgctgcactgtgggagccccttcctgggctggcagaggccggagccggctccctcagcttgcaaggcggtgtggag

SEQ ID NO: 309072 - DNA, 1000 bp, Homo Sapiens
cctgtcagaagcaagctgaaactcaggaaaggagatgcctgctctccatcgtcatggaagcaggaaaacttgccttcctttttggaaatgagtaaaacttcagaaaaggagttgtacagcaaaatcaaccttacatctcaaccaaattttgggagatcagggactctctgcaggggagaagctccacaacctcagcaaattatcctattggtttgggcaattaaaacagcccaggttggtatcaagcaatgagatttatcaaaggtcaggaccacctttgtaatgtccttctcttttttatctttattcgcatagtctgttttgtcagaaagtaggagtgcaacacctgctttttttctgttttccatttgcttgaaatatttttctccattcctttattttgagcctatgtatgccaccgcatgtgagatgggtttcttgaagacagcatactccagtgggtcttggttctttatccagcttgccccgtgtctttcaatgggagcatttagcccattttcatttaaggttagtaatggtatgtgtggattttatcctgtcgtcatgctgtcagctggttattttgcagacttaacgtatgtggttggtttttagcatcactggactgcgtaattcactgcgttcttcactgcatttttgtagtggctggtgatggttttttctttccatatttagtgcttccttcaggagctcttgtaaggtagatctggtgatattgaattccctcagcatttgcttgtctgaaaaggatcttatttctccttcacttatgatgcctaattttgctggacatgaaattatgggctgaaatttcttttctttaatggcagttgatgtgggttggggtgtgtgctgccctcctgtgtgctgtcagtgcaagtaaagcaaaatccacctgtgtaaacacacacagcaaagtgatgtaggaagtttccatataaagggctgcagtatggagaggtaatgtgcaggctggtgc

SEQ ID NO: 309073 - DNA, 1000 bp, Homo Sapiens
tttttttttttttttttttttttttttttttttttttttaataaaatgattttatttttaacagctaaaataaattttaatgtgcattaaaaaaactacacattcccaagtaaactcagtctttcagatattattcaggattaaacaaggccgccccgaggttaatccacttacacagaccacgtgtgagttacagccggggtattcaggcatgtccgtgaatattcccaacttgtagtaacagaaccttcaaatacgtcctctcaagcatggacagtagcctgggtgtcaccatgcctcttctgcgggatggatgggaaggtgaatatggattacgtgtatggattctcacgctgcatttgtatgcaccttgcaggaagattcgggaattcaagctgctgcctggaagcaagatctaagcattgcttcttacctagcggggcactccaatgccacagacagggcagaacacgacttttaccccctccttctgcagcatgattttaagagacaaaacttataaggctgtttaaaatggtaaatcatgttagagacgttctttttctttccttggctctgtgaagagatgagtagttaccccgcctcacacctgaagcatactggcttctgtgggtagcagtcttacttgtctactattcgttctgaggagtcttgtctttctggatgaagcttttaatctggtgatcacatacatgattggaactggctgtgcaaatgaactgataggaattttgcatacatgagcgaaaaatgtatcctcacgaggcaactttacatcagtattgcaccctggagctgtgaagtgtgcttcctcgtcatgctgagtttgtttagatctaaatctcagaaaataatcagctatcactttacctcaacaacgctcttaaactattctgaacattaagaagagattcttgaaggacttgagaaaacatcttcaattattttcccaacccaggtggcagcaatgagcagacaa

SEQ ID NO: 309074 - DNA, 1000 bp, Homo Sapiens
ctccctgaacctgacccaagcctccccttctcgactttctcagtagacggtttcccgaatgatggtccagactttcttccagaacctcctaggactatcagactcattgccaaggctctggcactctgaagggtgcattgttctctcatgtatttacctccttgctgcatcttggggacttctctagctgtgccaatcctaaagcagcagaatcccgaggaccaccaggaccaagccagccacagccacgcggatgagattctccactgtgtaatcctgggggtgtgaggctggggatggtggaccaagaggtctcagaggtcagggcagatcaacatcacccgggacccctggatgtccacccagggcacccacctccccttcacaggacctgaccctctgtgccagccccataaccgagagcatctccttacacaccagtcttggagtctgtcttgttttgcgatgggctgagggtctcagctgctcctgagaatcaaccaaaaaagggggaggtgtgtgaggagttgaagagacttaagccaacatgtccctcagttgctgcattcctttgtgtctacacttctcctaactgctctgtagttgtgtgatagaacctttccctgctgtggcagaggtacattcgcatacatacatacatatatgcataggtgtaaatatgtgtgtatacataatatgtgttatgcatatgtgtatacataatatgtattatgcatatgtgtatagataatatgtattatgcatatgtgtatgcataatatgtattataagatatagtgtgagtatatataaatatataatatataagatatataatagtgtgtgtatacatataaatatataataagatatgtaatagtgtgtacatatataaatatataatatataataagatatataatagtgtgtatatataaatatataatacataatatattataagatatataatagtatgtatatataaatatataataca

SEQ ID NO: 309075 - DNA, 1000 bp, Homo Sapiens
ggatccaggtctctgatgccaccctggatagctctctcaccggattcccagacctatgcctatcttctgtgtcctcctgagtgccccaatccagttcctacactgcctccatgtggaggacaatttctgtcttccctgatgctggaatctggtttcctagatgtcagcactgatttcccggacacttaaggttcttcaaggtcagggccaaggaaaaatgctaattctgcctctcacctagggccttcccctcagttctagattctggtctgaatatgagtttttctccagccacccaagaagatggtgtatttcaggtgagaccctttctctactttgagaaagcagctttgctcttaacaggtccaaggataaagcgatagataagaacgcctataagaactacccacttaaagttttcagaggaattcactgacagacgatgctccaatggagcaaatgtgaagagtgaaagcctagaaagtttggaaacctttccctcttcttctctgtctttctcagagtatctcttttttggcttcatacatcatattcgcacatgtaatgcatttattgattgtcactaattatgcccatgagcttttataagcttcttagcaagtgagtatcttaatctgcttgggctactggacaaaaataccataaactgggtagcttataaacaatagaaacttatttctgacagttctggagcctggaagtccaggatcaagatgccagcagattcagtgtctggttcatagacagccgtcttctctgtgagtcctcacatggtggcaggggcaaaggtgcttactgggcactaattccgttcatgtgcccaagagtgctccaccttcatgacctaatctcctccaaataccatcacattacagattaggaggtaacatatgaattttggcgggacacaaacattcagtccgtagcagtgggctttccacattgtatagcacgtgaggagtaccatctttcattacaa

SEQ ID NO: 309076 - DNA, 1000 bp, Homo Sapiens
aattaaaggcctcaagttcctcttcatcatccttgggttgcaggtgtctgctgtccagctcagcagtgtctcagtcagtggcagcccacatcaggtgtctatgatttgccacatgcacctctgcagtcctacctgctggcttagagctgaggactggccactacctgctgttgacttggctgctgcctcctgccccagttctaagcccagggagatgcatcctgccatttctctggctgctaccagataagctaagcagtatgaggccagggctccagggagggagggaaggaagcagtatttgttgtcttcaaagacgtgttttgtggaaaccccatcccactctgatagcaagaaattgatctgtggtcaaatcagccggtgaaattcttcactccctcttgaagatgtcacaggcacctctgcaggagagaagcctccctagcttttaaccccaggcttccttaaggcaactgggcttggacaggacccttcttatttaacatttaacaacacaagggatcagtgttctgagaagagcacacctgggcaaacaatgcaccaggctcccaacacgcgcggaaggcagacgttatgttcatcttaaaggtatttacagctggccaggcacggtggctcatgcctgtaatcccagcactttgggagaccaaggcgggtgaatcatttgaggtcaagagttcgagaccagcctggccaacatagtgaaaccccgtctctactaaaaatacaaaaattagccaggtgtggtggtggtcgcctataatcccagctactcaggaagctgaggcaggggaatcgcttgaacccaggaggtggaggttgcagtgagccgagatctagccactgcactccagcctgggtgacagagactctgtctcaaaaaaaaaaaaaaaaaaagtattaacagcaaatggccacatagcacttaatatatacaagctccgttctagtgcttcacatgatatgagctcatttaatc

SEQ ID NO: 309077 - DNA, 1000 bp, Homo Sapiens
attccatgacatgcagtagaacaaaatgttttttctttaacttttcaatgtcaggataaaaaatctataaccaatagtattaaactatcagttgtatcaaaatttaaataaaaatatattcatactcattcaaggtagtcttattttaaaataaattagcatctattttaagtaatgaagataaatacattgcaataaaattattttattttaaagtaaatataactttgccagattttaatcaattaacagcagtttagagatatagatatacatatatatatatgtgtagaatatatactttttttaaacaggaaggcatactttatgatatataatctttttaccacaaactatatacacttctcagatattaaatcaaactaatatactaggaagacactactacttgggaccagtgcagcacctttacaagtagtttaacttttatatgtgactttagtaacaccattatacaaataagccatcttacgggcattgttttggcagtgtaaacctataagacacaggttgaatttcacaaaaagatctgcaacttgacgactactgcttagcatatctttgtacaaaatgtgcagtaccaggtgcaagtgtagcacagttgctaatagctgaaaaccggcacgaaaactttactgccctttggaaactggacagaacaatctggaactctcatctcctgttgctcctctaacgatttaatatattctaaatacctttatgtggaaataaaaaataacaggacaaaagcaggctagggagattgcatttctgtcagtaaaatttctcaaatcaacacattcatcgagtttctgacattgttcttcgagcagccgtcatctgtctaatgcaaaatgtggctttgctttgtcttgttgcaaaaggaaagaaaagcttttgttcagagctttagaaaagtcggttcagtccacataatgcattttctccttcaattctgaaaagtagctaatgctcattt

SEQ ID NO: 309078 - DNA, 1000 bp, Homo Sapiens; identical to SEQ ID NO: 120031

SEQ ID NO: 309079 - DNA, 1000 bp, Homo Sapiens
gatcaaagggctctggaaacacacgctcattaggaaggccagcgagccggcaggccgggggcgtagatggggctctgctgttcattcaccaccaccggggtcagaaaacccagccccccaaccgcccaccccgagccacaggctggagccacagaacgcccatgggcctgggccatggtgggagagattttcgggtagcccccaaggcccccacccttctggccttcagtggccatcctgcggttagtgagaggaccgatggctggccactgggacctgggactcgagggccctgcccgcgggtgtaggagggacacatgggctgcccaggggctggggcatggcacttcccccagctggttcctaatggctggcagacaatggccaccgcctggaccgggagcacaggaagctggggccccggagcaggcctggtggcggcttctgggagggaggcctggctgtgggtgtgcggcctgggtgaggggccaggagtccgggtttccactttgagctgctgccttgcaagcctgaggcccctggctgtcactttgtcttgatttgtctaaaatgtggagacgaggccagatgcagtggctcatgcctgtaatcccagcactttgggaggctgaggtgggtggatcacttgagtccaagagttcgagaccagcctggccaacatggagaaaccctgtctctactaaaaatacaaaaattagccaggtgtggtggtgggcgcctgtaatcccagctactcgggaggctgaggtaggagaatcacttgaacctggaaggtggaggttgcaccactgcacaccaccctgggtgacagagcaagactctgtttcaataaatacataaataataatataataaaataaaacgtggagatgataatgcttgcccaggagacacgggcctccagaagaagcccgcctaacatcgagcttcgccctgagggtccccgcccccgatacccagcccctcctcccccggtgcc

SEQ ID NO: 309080 - DNA, 1000 bp, Homo Sapiens
ttttttttttttttttttaacagcagatagattctttatgttcaagacagcaaattcagatacaaaaacccaccgccatcgtccctccctccctcctgctctgggccagggatgggcctggaaggagagatgggaggtggggaggaggttgcggggttcacagcaactcgtgtcaaatgcggaggtaacaggctccacagggagggggctcctctcaggaggggtgagggcattattgcatttgctggggggaaggacaaccctctcccctgtattccctgcgtcaggaaactaggaaggtcatgacccccaaacagaacccaaggccccagggagacagagggaccagtttggcagctgatggtggaaagtggtggaggcgggggtggccgcccaaatttggctgatccctccccttccctgtgcctgaccccagctgaggtagggtggggaacagggcacaggggggccggggaccccggccagactgggaaccagggaggggatggtaccgattggagcggggcagggggcctggccccacctcccctcaccatcgtccttgggctgctgagctaggctcaggcttggaggctcgggtcctgacgtcagtgtccctgctgggggcccccaccaggttgcgcccgggtcatcatcgcagggtccgggggcagtcctagtagcggccgaccttggcgtccccaatggcgccccagacgtcaaagacgaactcgtcagggaaggcaaagtcacccagccgttcgtccagggcctcggccagctcatccgggttccttttgtcctttcccagctccaccatggtggccgccagctccgtgtccctgatacccatgtaactctccagcaggtcatccaccttctcaatggccttctcttcaaaggcagagggcagatcctccaccgtggcggggccccgggatcggagccgcagggtccctcggccagtgcccagttgtgggccagagccagggcggccacc

SEQ ID NO: 309081 - DNA, 1000 bp, Homo Sapiens
  misc_feature (233)..(233): n is a, c, g, or t
  misc_feature (667)..(667): n is a, c, g, or t
gaattcattaggaaaaatgagcgcagtgatttctagtaccttatttcatcaaaaagaaacaataaggtagaattgccatatgagatagttgaggcaaggaacacaatggaaatttgaacctgtggttgaaattgtgcttttgtgtaatgggaacctatttcatcactttgtaacagacccctgacaattggtgttttgtttgttaagccctggatgtttaaatgaaactaaanaggcttttattttgttttcctgaggtgtgtatgaaaagttgagcaaattcgagtgcacttcttatcttcagcaaagatgctttagaaaggtattttagcattctccgtggtttaaaagacaaaaccaagtcctgccggctttgtgttgtgcttctcctacaggctgcagtgccttctgtctgctttagggtgtggcatctgccattggggaggaaaaactggcatgtgtcgccttttatagcagactgatttcattgtgctgggggcctctattttatagtctcttagttccaatcttctagttgacttgctgaagcaaatggaattaaaagagattttgacttctctactaatttttttttagtttcacgatttgccaatatgaaaaaatattttaaggaaaagggccatagctgaacttggtgactcatttncccttttaggattagttgtgaaaataagccacaacatatggctacacttgtatgaactgacttcgatatattttatcaatttgaaaaaatgcacttttaggatgatgtgtacatacttagtttgactatgtctaaaagcataaatatgtaattgattttagaatatatgtatatacacacaaaacagacatatatttatatttgcatatgaaaaactaaaaattcaacttctgtggtgtaatgcgtataattagtatgtatttgaatatataaagggagaaaatccaggaaaaaatgtcaaaaaggcacactaacaaagatgtagtattctct

SEQ ID NO: 309082 - DNA, 1000 bp, Homo Sapiens
  misc_feature (116)..(116): n is a, c, g, or t
  misc_feature (144)..(144): n is a, c, g, or t
  misc_feature (156)..(156): n is a, c, g, or t
  misc_feature (165)..(165): n is a, c, g, or t
  misc_feature (174)..(174): n is a, c, g, or t
  misc_feature (241)..(241): n is a, c, g, or t
  misc_feature (257)..(257): n is a, c, g, or t
  misc_feature (283)..(283): n is a, c, g, or t
  misc_feature (340)..(340): n is a, c, g, or t
  misc_feature (422)..(422): n is a, c, g, or t
  misc_feature (494)..(494): n is a, c, g, or t
  misc_feature (498)..(498): n is a, c, g, or t
  misc_feature (519)..(519): n is a, c, g, or t
  misc_feature (522)..(523): n is a, c, g, or t
  misc_feature (527)..(527): n is a, c, g, or t
  misc_feature (601)..(601): n is a, c, g, or t
  misc_feature (771)..(771): n is a, c, g, or t
  misc_feature (779)..(779): n is a, c, g, or t
gaattccaattaggcttaaactaatgagctggaaactttggggaaaccactgcagcaatgagggaagagcgtgatcttcttcgatttaattagcgctggaaaaacttggggtccanctggtaacacgaggacggacgctgttcngggggcgcaaantttctgaangtgtcagangggggattcccctggtggtgtacggagacacgctacggaacaaacacggactccttcttcatcttangtggggagaagggaanaccctaaatggggaacggtgagccanaatgaagtctggagtccctcttcccccatctgccctcctcacaggatggatggagtntgagactatatgagaggaaagcaacccttcaggggactttattgtttatcggggcctgcactatccccaggacaggtcgtcnttgatcatttctgcatactctttgttgggcagcctctgttgctaataaggaaaaaggagagaaaccacctgntgangtcagaggccacagaccaccnggnnggcnttccagactctaccctccagccacacgcgggaccctgggcacataggtagcaggaagagcgaagtaggggtggntagctgtgtgtatcctggcgtggggtcctcctcactcccgaagcccgagggtcctggggagctcagcctgtggaatccagttgacagctggccactcctcccctccccactgggggctctttggggaaaaaaacggcctgaccggggcgccccgccgtcctcccagtgtncccctccnctctcggctgggggcgcagcaccttggatataggcgcctggccccgcgcctgggctgggggcgctctaccttgcgccctgggggtcaggggcgcttgccgggccgctgccgaggggccctgcccacccctgcccagcccggagcccaggcgagccagcgcggcgagcctcctcccctcccgcctgggttgtcctgagtccgcgcccgctccagttgctgca

SEQ ID NO: 309083 - DNA, 1000 bp, Homo Sapiens
ggaaagaatagggaggtgagtaaaataaaccaagtgtagaaagtaaaaaaggttcctcttcaaagtttcccttcttgttaaaaaataaatcataagtgttagaaataatagtttcttttaaagactaacttccttcaagccaccttgttttgtgctaataactctttgttaagccctatcctgtgtagctgttagatataagggaattagtacattctatgtccttgtactttaaccagatatttggttattacttttctaagtccttttgcaagcaacttcctcttttcctttgttctcccttgccttcacctatttaggaaagttttaagttattagccagtcaggtttagcttagattgtgtggtctggcttcagccaatggagacaggacacagtagcagggacaagctgcataaaggataaaaattgcttccctcctttgttcgtgtgtgctctcgccattgttccatctgtgaggaacacccttcctgcagaaagtaaaattgccttgctgagaaaactttttgtctaaatgctaatttttccttatagttccaaggaacaagcattctgtttctgaataaacattttacttataacaccaagtaaaccagaggattccattataaaaaaggctaccaatttcagagatgccctggttccaagcacccctttttttcttccttctcctcttttcctcctgttcccctggggctgtcactctctggactgagatgaaccatatgggacctgacaattcagattgctctgccaagatgaccagcaaagaaagaaaacaaggaggcaagtgctgtagtgaccatcccttagctgtgggcctctgggatccctcacactggggctggtgcctgtacgctgtgctagttgtttgcctgcagacgcttggttcagttcccacccttccacatgctcctctatgctgcaagggctggaagtctacaaactccatttcctagactaccatgcatttttttcc

SEQ ID NO: 309084 - DNA, 1000 bp, Homo Sapiens
agcacaagtagggcaaatgttattaaaaaaaaaatgcatttgtagtgcaagtcaaactataggggctttactcaaaagtactggccagctaaaagaaacatacatttgtgagtgatcattaaaaagagcccaaatttaagtcaatctaaatcatagttgacattattacagaatataaaaaatatggtaaaaatttacacattacacataaagtagttaatgttttgatttaatagtttgcaaaagagatctgcagatgtgttttcaattatgctggcttctatatccatctattttaataatataggtatggttacatataccaaaacaaaggaaaaaacctatagcatagctatacagcaatattttaaggtctgaagtttgaccagtacatgtcaaaacatttcaacatttcactggtttactaaactgacaaagaaccatttacaattaaaaagaaaaaaaaaaacttacagacttattctgactgaaagtttcttttattaacagtctttttagtttttggaccttacaagaagcttccttaggcagctgatacataacatgtgttttcagggtctttatcttaatgcagactttctcggtcatataataactcacttgggttttcatcccattaatatgacctctttttttctggctcgtttgagttcaagttccttaagccatccatgagtttctggcaaagtatttggtctccactttatacacctgttttattttccaagggcaatgaaacgttcattatatagtaacacacaataaataactcactgttaactctaagagtaagaatgggaagggtgcctattgcatagcaatacagaaaaatcaagtgaggcgcgggataggaacggtacgtacagcaactccacttaatgggattttcctgtttgttgtggttgttgttgttgttgttgttgtcgttgttcacataattaacactaataaattcttccagtgtttatttttttcttta

SEQ ID NO: 309085 - DNA, 1000 bp, Homo Sapiens
cctgtggcaactagagagaccatttgggtattcccaccgtttcaagggtgggagggcctagctgcaaacaagaagctgcttttatttgctttttggtacttaggacctggctccaggatcctgtgggcatgaagcctggacagggcagtgtttctgtgggatgtgaaagtcctctccccaaagcacatgttcattctctagtgtcagacatctccccacaaaccctgaggtgggatcacctaatgagcgagagtccagtcatccacagccaggagagacaggcgtgctccgtgaatgtctcactccctctctcctcacatcgcacacgtgttcacatgccacatatacacaccacacaaatgcacaccacacaaatgcacacgccacatatacacaccacacaaatgcacacgccacatatacacaccacacaaatgcacaccacacaaatgcacacaccacatatacacaccacacaaatggcacaccttcccttcacacatcaaacaggcatgcacacccccaaaaagcccatacactcacgtttcaggtgtcactgcgtcatactcacatgcatgcacacacacatactccacaaatgcacgtatgtcacgaagttacacccaggccatgcacacagctacttccaagccaatttggcttttttgggaggcccatgaaagaaaaaggacctcctaccaccactgccaagggtgcaagcctagagcatcgggaaggggactagagacaagggggttgaaaaagatgccttagggaaagagatactttccctaaacttgaaacctaaaacttaatcttcagcgtgcaccacctcccatccccacaggccttggcctgggctccagaaggaggggactctgtgaagagtggctggggctgaggaagcaaccctcaacaccactttgttctttatctcctgctgctggcagccgccgtggtgcctcagggagaccagatggctgcaggactttgctgctgg

SEQ ID NO: 309086 - DNA, 1000 bp, Homo Sapiens
tatgcacagaagaaacatgcacacacacatgcacacacatacacacacacacgcccacatgcaatgttctttccttgcggaagaaagaaatgggagggactgaggaggggaggtctcctgactgtgagctgctggatagtacacagccaaccctgatgagagtggccaagaccttcagagcatggaagggagttgactccatttgccctttgtggtgctgtgccatctttgctaggctacagttgccgtttgctagctgtctccaaattcagaggttctaaagaggtaaaggggaggttcaagaccttttaggttattttagtacactctgtgtgactatcaatacaacttttcaaacacatagagaggcatcagaaaaaaaaattaagccaatccattaaaagagtgctggaattgccatccaaaatggcttatgtgctgtttctatgtatatgtgtgccctgatgcatttcatttcttaagtttaagacaaggatgaatgaagtaccagtgtaaaaataggaaagcacatccttcccctcctctcaccagtataaattacaaaggagatgacactttcaccatctgatgagtctacctttgctgctgtatttcctcttcagtagaaattccagataacaccactgacttttactcagagtatcttgaacagctatttatagttttcacctatccttcccagaggcctcactagactgagagaaaagggcttgtctgggtcctggcccagctcaaccaccctctagtgttgtgaccttgggcaagccacctctacaagcctcattcctcaatcctatagatcgggccaggggggatcaccaaggtctttctctgctcagagctctcccagagctccaacgatgtggtctacagcatgaggcacgctaagaccataaaaaatcatctctgcaatccagaagctcattttaaagggaaggaactttgcaatataagtgttttgtttcagttctgcgattca

SEQ ID NO: 309087 - DNA, 1000 bp, Homo Sapiens
atcctgtggtcaggaaatgctttgtgtgctcagcagctgccctcaccccaaccagccaatatctagtatcatggttggggctactagaaggggaagttgctgttgccagtggtgaggaggccataggcaagcagggggcctggtgacattactgggaacagggcactcagggaatgggaagctactccattcactatctggggctaaacagtcagaaggataaggccaggccacagctctgacatagctcttttctgttccatcttccagctgggtggctctgggctgaggccagggtctaccttccttggcctctctggacagcaggaaggattggcatcaggcagttggagccttctctccatagcgcatctctccccgcctcccccccacttgcctgtgccttctgcacccccgagggcggctcaccatctccacagggttggcgctcccgctcccctcccagcccttctgtcctctgcagacgcagacgggccccgcctggctccatggtgcggtctccagcgggcagcaggcagcccttgcccgtgttgcctccttccttcgcagtgtggcctgccctgtagagctcttgtcccactcagctcaggtgacagctccaaagactaaagtcctttcaggaggagggggcctctgggagtgcgataggttatctgatctggaggcagagcttctcagattcagacctcactctgctgtctgtcgcagggatcgccacatccccctaacaccccaaccaccatccagatgcccagctccaagggtgctatccaccccgccacacacacacaggaatagtggctgggtacatcttggggaggggaactttgcctctcagaagcttgtcacctagcatggctggccttccagtctctctcccagcaggctgaaggtcagggaggagtcagaaatgtcttcatgtatcagtgcgttcagctcgctttcaccacaaggtgtgtgattgacacatgtggtaata

SEQ ID NO: 309088 - DNA, 1000 bp, Homo Sapiens
acagacgggcacagacactcaggggcactgggacctcacaggaggcacgaccccacccctcctggaggagatggcatccgatccaattcacctcgaagggtgatatggggtcacatcaaggggaggtgagaaagtgttctaggcagagggaatggcgtatgagaaattagggacccgaagaccaattcagcctgtccagacagtggcgctccgtgtgtctgatgagggggtgctggggtgggaggcagaggctagatctcctcgggcctggaaagatgaagatgaggaggcttagtgaggctggctaacttgcccagggttactccgctggtaagtggcactgagggctgaccccctttgcactattctggcctggtgagctctctctgctccacctagaaggcccttcttggtgacccaaacactgctggacccaaatgcagcctccctcccttgggcctgctggttgcaccccctactctaggttctctgccaactacccgcttctcttgagctttttaggcattttagcgtggattcaattgcaataggcgttttttgttgttgttgtttttgttgttgtatcttttggtcagaacatgatttcctggcctttgtccaggtggggtgggatgtgagaacgcattgttcctggggtgggatcattcctggtgagtgggtggttggagcccagggtctatgtgaactagactatgggtcctaagctatggctgggaaggggcagttgcaaacctccccacgcctctaggtgaggctctgtgctctattccagggctgtggccactcttcaaggcctctgcttagtggagctgttcaactttcacagaacaaacaacttacgctgtgtcctcactaactgctagcacctcagtttctgagcagttcccgcaactgatccactggctgactggccaaagacacctctcggctgtcaggacaaccaacttacagaggcctttgccttggaggttgctctgga

SEQ ID NO: 309089 - DNA, 1000 bp, Homo Sapiens; identical to SEQ ID NO: 120032

SEQ ID NO: 309090 - DNA, 1000 bp, Homo Sapiens
ttgtaatgccactcacctctccccacggtctggtcccagcccaccttttctcaccctcctcagccttccaaagccagcctcaatttatcttacatgctccctgtccgtgcctttcctctcactcttcccaattcctggacaactcttaccttccagaagctaccagtgaaatcccgcccatttctcaaaccccagaaatttatgtcagttccaagacgggtgtctctctccatcagattataacctttggctgggcgtggtggctcatgcctgtaatccagcactttgggaggctgaggtgcgtggatcatttgaggtcaggaattcaagaccagcctggccaacatggtgaaaccctgactctactaaaaatacaaaacttagctgggcgtggtggtaggcgcctgtagtcccagttactcaggaggccgaggcagaagaatcacttgaactgggggaggcagaggatgcagtgagctgagatcgtaccactgtacgccagcctgggtgacagagcaagactctgtcaaaaaaaaaaatagattctaaccttctgcacgagaggaactgtgttttgcttatctctgcaaactgcccggtgccttccacacactggagaagcaagacatgttataagttaagtgaaaaattaaaatgcagtaagttttgaaccaggtactgtaactgggcatttcgtgggcattgtctcattcaatccaccttgttatacaggtgggtatgcagactctaaaaggtcaagtgagccgcccacagccatctgcaccaacaggggcagaattaggatttgcactcaggtcggctcccaaaattccatattgatgggtctgaagtgtccccccgcaaaagaaagacacctggctgtctcactccagggaaaccaaaagaagccctctctcctcccaaggagtttaacatcatctctctgctctttcacgacacaagctgtgggaactggatgcatagtgatggcaggtgagca

SEQ ID NO: 309091 - DNA, 1000 bp, Homo Sapiens
gaattccaacaaatctaggaaaaataatgacaaacaacccaagagaaaaatgagcaaagcatatgaacaaataactcacagaaaagggaacctcaagaccaatacccagataaaaagttgctctttctttctggtaatcaaagaaatgcaaagaaaaatcacccacatcagagtggctaaatttataaggcccataatagcaagtgttggagaagacatggagaaagagaacgtctactattggtgggaattttagttggtacaatcacttcagaaagtcttcggcagtatgtaataaatttgaaaatatgttttccttaagactaaaaattccatttctagtatatatcctagaaaggtcctcattcatgtatgcaaaaactgaaatgtttgcaaaagctaataactgtaaacaatctaaatgtctactactagaagaaaggaatgtagtatatttattgatagaacactatacagcaggcaaaaatagatgccctagagctaaacatatcaacactatgtagaacaatttgcagaaaactatagaaaccatttctgtgagtactatataatgtttatgaacacttaactatgagactaacataggaaagtctggactactgtgataaatgccaattcctggcaaagattgcctctggcaatggagtagtggatggaactaagtggagaaactttacctgtaatttttttaatttttataataaaaatagatctgaagtacataagatacaatgtaaatatttgttcattctgggtaatggggttttaggggtttgtattattctccagatttttctattttaatgttttcagaagcaaggaaagaaaagcatataatgctctcacattgtatagaaaccctcacaccctaaatatgtctacattgttccctccatctcactgcctgagctcagactttcatcccttctcatacaggtcattaatgagctccctgcctcatgtttccacctctacattg

SEQ ID NO: 309092 - DNA, 1000 bp, Homo Sapiens
gaccaagaacccaccaattccggacacactagggctcagcgagggcagaaggaggaagggacagatccaggcactgatcccttctgcctgctctgtgggcacctctgctgtactaataaagtcgatgtctgcactgcaagaagaaaaaaaaaaagagagaaaagagaaagaagaaagaaaattaaaaaaagcaggaatgaaacatatacaagtaaaaatgtaaaaggaacaataagaaacattaagaatgaaaaatatagaaaacaaaatacatacctcagtggatagactattctagccgggcttagtaaaaactaacagttaatttaaaaagagtaatgagaaatttcctaaaatgcaacatacggagacaattattgttttaaaaaaaattaagagacctagaaaataactcaagaagcttcaacagataataacaacagtttcagaagaagagaatgagaatggtaaagaaacactatttaaagagaaaatagctgggattttttccagaaatgatgaaagccctgcctttctaattaaatcttattaaatagattaagtaaaaataaatacacattgaaagtcattgttgtgaaactgcagaacacataggaaagtagtaggggaagctttaaaaattaccagaggaaaaaaaattacagattacctacaaaggaatgatatttacaccaagagcagacataatcaacagcaacagatgttaagaaaacatggtttaatatttttaaagtgctgaggaaaattacaaatggccttgtatagaattctaaacccaaacaaattaccaatcaggagtaagcatagaaaaaaattctaaatttcattgattatataccttattcagatagttgtacagaaactgatgattcaatatctaaaaagtgtctgatctaatcagaggtcagaagaccctgtgggcatgccaataaagaagaccaagatgtttgaatatgcaatgctttcaatgtgatctgtg

SEQ ID NO: 309093 - DNA, 1000 bp, Homo Sapiens
accctcctcagtgcctctttcagtaatataaagttaaaaccaggtactacaatcattcacttgaattttggttctaatgaaggtgcattttttgtgtagacagttgttaaatttggtgttcctgtggggaagacaattggtagaagcttctattctgccttcttgctctgcctcctgcgtttctgacactttttttaactcaaaaattactaaaagagtggactgtgtgtacccaacagtctttgtttctctgttgttctataattacataacttcacttcttaagctctttgcttgcaactatatcgagctgctaccaggtcaacagtaaggccattgtgatggtctttgtaacattctagggatagggcccacagaggcagaacagaactaagaaaattcagattcactgaagcagactttccacgtttcccagcccctttgaacaccttccctatgtatgaggaattttccttatcatgggttcctccttttcaaggcacaaaccagaaaactcactttccattctttcttgtagctgcagtacagacacatgagctgggctccaccaatccgacacaaaataaagataattttaattctaagtagagaaaagagaggaagcaagtatcacacagattccattttccagcaaaagtggctgtagaagcagcctgttttggaaggcagcagtagtggggtttgggcagcaaaggtgtcatttgagatgctgtgtccatggcagtagtagaggcatctccactggacagtggccaccattcctaggtgcaaaccctccaagcctaattccctggtcctcccagtggctccatgagctatgtaatgtcctataataaattccttcctgcttatacaggctagagaatgttctgttgtttgcattgagagtcctgaatgaatcacccattgtattagtcggggttctccagagaattagaaccaacagaatatatgtatattattattattattattatta

SEQ ID NO: 309094 - DNA, 1000 bp, Homo Sapiens
ggatcaaaactggattaattagtctacaatgtatctttcctgttagatacgaagattatctgctctatccaatttgtgttttcttagctgagaaatcactgttgaattttaaaagcagcttgcctggtcctcatttcctggtcttctgatggaaatggtttatggaaaaaaaaatatttactagagtcagataattagaacattttatgtattttgcatatgctaatgcgtttgagttcctttgagggagagccgcatggcataaagcagaatgaaaaggatgattcaaatttcttcacccagcctcctcccctggccagatttagcacttcctatataccaccacctcacagcttagcttggctgggagctcctcaggtttccaaaggacggtccttccttctccctcccccaattgccatccctacaccagggtgccaactcccaagtgggctgacaggaagggagattggaaacagctttatagtagatttgatgctgttataagacacgttgtaagacatcaggtaaatatagcacatcagattttattaatcataagaattctttaaaagccttcagcagagccgagatcatgccactgcactccagcccgggtgacagagcaagactccatctcaaaaaaaaaaaaaaaaataaagccttcaacagtggctaaacacaaaaccagaatccctttagatttcttaaaatgcctttgtagttcttttgtaatatgggtccttgttggacaaagttagtaatttgttttttatatcctttacattaggggtttctaacccccaggccatggaccagtaccggtccctggcctgttagaagccgagtggcacagccggaggtgagcagcagttgagcgagcgttactgcctgagctccgtccacctcctgtcagatcagcagcagcattggagtctcacaggagcgtgaaccctattgtgaactgcacatgcgagggatctaggttacctgctcctta

SEQ ID NO: 309095 - DNA, 1000 bp, Homo Sapiens; identical to SEQ ID NO: 120033

SEQ ID NO: 309096 - DNA, 1000 bp, Homo Sapiens
ggatcactttaagtaaggagacaaaagacattattcccaatgatggtgaatgatgaaaccaaggcagagagaagcacacagcctccatccagtgggacccaggctaagactgacctctccactcctaaaccttccagtttctctggcatcataaatccacgctccgtcctcataggatgcatgcactctcctcttctgtgggcgtctgtttgccatcttcctatgtcctgcactcccccttctcttctttctgcttaggtttttctgacactctctggagccagtggtatccgaccctgcctagcccttctcctccagggtccttgaaggactggcgaaacactggatggcctgactcgggccgagggcacttacagtgctgcccggattctcccgcagcctcaactgcactgaaagtctgggccaaaagggagaagaaggggaggtcaggagaagtccatctttaagaacccgaaagcagaaggcagaagtcaatggcactaccatttttcatctcagaatggagtcaggattcacagagcagaacctagagctgtaaaaacgctgtaacactcgatcatctctgtgactctgtccccctatctctgttcctctcctctgtctgtgtccccacaggaattaggagggtcataacctttaagacaaattggacctgcttctggtctatgaagacaggaaagaaaaagtggacaggtgggagtgcaggatctagaaatactgagttttatggggacaggactgcaagcacattgagtgaattacagcagccacctccaagaagagatagtgtgatctggtggttaacagcaaaagcaggagccctaagttcccgtctgtattgccatttactagccctgtgagcccgggcaacttatttacgtttctgagacttagatatctctgagttgtgacaagagtcttgaaacatttataagcacttagcatggtgcagccatcgactaagttctcagggggaagt

SEQ ID NO: 309097 - DNA, 1000 bp, Homo Sapiens
ggatctacccgcctcagcctcccaaagtgctgggattacacacgtgagtcaccaggcccggccctgggcttcattttcaagaaggtaggccctctttctgtaaccacagaaacaacctttgaatttgactctagacaaatctcttgcgaatgtggccactgggctggcgtgaggatgttggtgtgactgagacctctgaggtggcagcactgcaagcctgaaaatgtcctacgggaggcatgtggctgtcactctagttctgtgctcacagccgtcaggaccaacgttgttttcatccacaccccatttctgccgggaagctagagcaacagtgtacagaggacacataggaaaaagcatttccgggacaggccggctccgacattcctcacatgggcccttcaggcagcaattactctattggcttcaacattctccatccaaaccacgtgactccagtttctgtgctccgttttgcagaggaaggtatagctgagggctccagtaatcccaagatgatgcacgtttctcttgtaggggaccttccccaaaccctctccccaggaggttcccgtggctcagtctgcaaatccacacagcccggacactgatttgcaggctgacagccactgctgctgctttcctaaccttcctctgtactcttttagctgctaccagcacacccaccccccaccctaaaggtgtccattcgcccattaaaggactccagcatggccatttcccagtttctgaatttcctgtcgccgtctatgaagactgtcgagaggggtcgagtgttgtgggtgggggattccaggcgacgtggccacacataacagcaatgaggccagtcccacggccgtctacacactgaagcaggtatcaacaacaccttgcagtccttcctgatttgggctgccttccgcttgatacttcagagataaagcctccctgtgccattgttcaagcctgttagttcccactcctgtattcattccta

SEQ ID NO: 309098 - DNA, 1000 bp, Homo Sapiens
tcccactctctccatagatcccccaccccgccactccgccatccaccagtggctccagagaggtgagggtgggatctccaggggcaggaggagacctctcagaggctccggctcccgcgggatgccgcccacgagcaccctcgaggggaaggtctgtgctccccctgggcacaaagcagggagaaaagaatggaagaaggggactccagtgggggtccaagtttcagctgcctcctacccccaggtcttacaccgaattaccatcatcttttcaggaaaaccaaattgttactgccgggtcacgagatccctggaccgcggaggcacccactgccaagatggattcctgtcgccccagccaggcaggcacacagcctggcgtcctccctccaaccccgcggtgcccctgttctccccagccctcggccccctgtggctcccagcaccctcggccacccccacccgagctgccccctgcgtcccccaacattccctcgcccaaggctgcccccaacccccaagctgctccccgcgccctcggccacccccacccggctgctcccgagctgtcccctgtatcccccggcccccagcgccctcggccaccccccacccggagctgccccctgagttccccccacctccctgtgcccaaggctgccccccacccggagctgctcccggagtaccccgccccgcgcgctctcggctgcccctcacccttgagctgctacccgcgtaccccgccccccgcgccctcggctgccccccacccccagggctgagcccgagccggctccggctgtctgcgcgcagcgctccaaggcagcggggtgaatggacggcatccagcctggccggcagcttgaaaataaaaataaaacagagggaaaagaaataaataataaggagcgcgccagaaagccaaagaaaatacaatcccaagctccgagcaggcttcaagcctgcagccggccctgggccgcaagcctccggcgtc

SEQ ID NO: 309099 - DNA, 1000 bp, Homo Sapiens
agatttccagggatggagctcaggagtctgaatttttaacaagttcttcaggaaaccaaaacgctcatgaaagcgtgagattaactattagagctcacggaaaaggagggacaaataaatgaaatataaaaaggaggaaatgcctccaaccagtgggctcagacagaaaaggaatcagtcatgtaaattatggtacctccatgtcataaaacacagcaatcaaatacggtagatggaaatatactgacatggagataattcgacatggaactatgtctgtcatatactgtcaagtgcaaaatagtgtgtatgggataactccattttatatgtatatatgcatagaaaaaacatcttaaattcattcatccaaagaatatccactgagttatcagctgtgaacaagacagctagggtcctttgctcatggtttagtatgcatacatataccattgctaacacattatttatgggtataggaattatcttgtttatatgagtttcttaaaaattttctgtacttaacatgcatagattttgtaataaaaataacaaaaaatggatataaatactctcctcatggatccatttggttttatgagtcacattccttgcgggtatataactttgtaacagagtgcttttctgccctcatcttcttttacactggtttcttttgatcatgatctaatctttcttttctacatccaaagcatcagtcttattccactatctttgtgtgaacgaaaatcaaaatcatttaattcattacccatatactacgtatgggcatataaatacctgctttcataagttttgttcacaaccatctttcttgttgtcttctcttgtaaacattacgggtaatgtcttccattatggtactttcttctagttcagactacatggtgcacaggtgagtaataattcctggtaaagaaagtaggagtcaatgacaacacttatcagtttgttttaggtaggtctagagtctgtgagt

SEQ ID NO: 309100 - DNA, 1000 bp, Homo Sapiens
acaatataaaaagttatgtatcaaaaaatctttctgtcaccccatctgtgccagactcatttcttgccagccttgtcccctaaagatagccattttgatgaatttcttgcatgatctttgagtgttactggaaatattaacacaaatatattaacagatgtattttgctacataattgtggcacactgtttatactattctcctctttgctcttttctgttaccaccatatcctgaagacctttgtccattggagcagagagagcttccctcataatataaatgcattgggtccctttttgagttggtatcattatttatttaactagttctcgtgacacatactcttggattatttccagctcaattcagaacaatgctgcagtgaacaaatttgctcatacatcactctgtgtgtgcacacgtgtgtgtgcgggtgtgtggtgtgtgcctgcatccatagggtaaatttccaaatggggtcactgagtgaaaggataaatacatttgtaattttgatagatattgccaatttgccctctgtgggcattttgccctcccaccagctacctatgaaagtgcctgtttccccatgcagcctcgctagtagatcaagttgtcacacttctggatttttttcattgtaatagataaaaatggcatctcagtggaattttaatgtgcatttctcttgctatgtgtgaaagtgaacatgaccagggccgccttcagcaaatgaaacatttggtgcagaattagaaaaggtgcttcttctgggaagacagattatgggaaggcatctcctctgggggaatgcagaacttgctgggctgtgcaggggccttctcctgtgggaaactcagctcccacctgtgtcccctgtgcagggtgcctttgtgaagggatccacacccagcagcccagatgcgtgttattggagaaacaggtggggctgtagctggtccaggtgggaatttcccagcggaaccctgaacagcagg

SEQ ID NO: 309101 - DNA, 1000 bp, Homo Sapiens
gtcaatggcagtaatcctgaaggtgaagatcctgagagggaacctgtagaaaatgaagattatagagaaaagtcttcagatgatgatgaaatggattcttccttggtctctcagcagcctcccgataaccaggaaaaggaacgactaaatacatccattccacaaaaaaggaaaatgagaaatctgttagttaccattgagaatgatactcctctagaggaactctcaaaatatgtagacatcagtattattgcccttactcgaaatcggaggacaaggagatggtacacttgtccactgtgtgggaaacagtttaatgaaagttcttacctcatttcccaccagaggacccacactggagaaaaaccctatgactgtaatcactgtgggaaaagcttcaatcataaaacaaacctcaataaacatgagcgaattcatacaggagagaaaccttattcctgttctcagtgtggaaaaaacttccgtcagaattctcatcggagtcgtcatgaaggaatccatataagggagaagatatttaagtgtccagaatgtgggaaaaccttcccaaagaatgaggagtttgtgcttcatctgcagagtcatgaggctgagagaccatatggttgcaaaaaatgtgggagaagatttggtcggctgtcaaactgtacccggcatgagaaaacccactcagcctgtaagacccgaaagcagaagtaatactgggaaccctttctgggtctgatggtgctgcctcaacctgagagctttcataagtagttctgaattcccaagctgcctaaaaaggtataaatgtgtaaaaatctcattattgccaaaattggataaatgcccatcttagctaaaacctcaaattgctagaaaattcacagggaagaaaacatttcaagggctatacctcagcatctaggctttttggactaaggagctttcctttttgaagttatatgataatgtacaggtcacagatcccctttcc

SEQ ID NO: 309102 - DNA, 1000 bp, Homo Sapiens
gtgtgaacagagattgttggacacatgggcgtccagtgtagactgtcagcgttgtgccctaccaagccttactggcgcttgaggcaaaagaaaaatcagtactactgcctttatttaaaatcttgatattttgttgggtcatggatgtttttctgtattgttttattccaacggctgtttcacacctttatgaaaaagttgctctcctcccactcggatctccaacgctgtctctgaagagtctttaaatgcctgtgtattattctgtattaatctgtatttatatccctattcctgtaacagggttaactaactttagctttgtattaagtagttaggccttgacagctgctagagcaagtgctatttttcctaagcgtcttggctattattcacccttggtacttccagagccaccttgttgaactggattaactctcacattaagttaagtttttaaacttcaaaaataaaatacaatgaattagcaaagctctgaaaacattctctggttttaaaaagttgttctttctgtaattgaaacaccgtgcggtggctctttatgttaaaagctgaattcactgaagatcttcacggtgttaacctaccaatagccctaggcttcttgaaatactggctggtttggtttatcacacatgagacagaacctgagacctaccacatcatcagctatgtgaatgtttcttttcaaaccctaattacattttagaccacaatgaattcatttttgcaaagcaagggcattcacaaaaaggcctccccagatgaagctgatttttaacgaaaaagaactgaatgtatgtttttctcataattaatagtcactatcaatcatcatcaaaataaaaacagtaaatcagaaagagctctccctaaagacaaaacacttctttcttttactttttaaaagaccaaaacacaagtcttaacaaacaggtctacctgaagagatgagatgaactaagcttgtcagacctac

SEQ ID NO: 309103 - DNA, 1000 bp, Homo Sapiens
gatcataggtggcacttaggagccatgtttctttataattaagccggaaaaaataattaaaacttcttttgtcttaaaggagctttgacctttttaaaaattaaaggaaatttgttttctaaaatgtcccttaactgtgtttgaggtttccacgttctgaattttgggcaggaatactgcagaaagatgtctttctcagtgcatcatttcaggaagtacacaatgctagtttgtcccattactggtgatattaacttcggtcatttggttaaggtagaatcagccagttctctccactgtgaagttgcttttttctccctttttctttttttttaaagatagattctctctctgtcaccctggctggagtgcagtgacgcgatcatggctcactgcagcctcgacctcctgggttcaatcagtcctcccacctcaacctcccgggtagctgggatgacaggcgcgtaccactacacctggcttattttcgtattttttgtacagacagggtttcgccatgttacttagcctggtctggaactcctggactcaagagattcacctgtgtaggcttcccaaagtgctgggcttataggcaggggtcaccgcacccagcctctgtttttctttgtaataagaagtatcccaccggtcgggcgcggtggctcacgcctgtaatcccagcactttgggaggccgaggcaggtggatcacctgaggtcgggagtttgagaccagcctgaccaatgtggagaaaccctgtctctactaaaaatacaaaattagccgggcatggtgttgcatgcctgtaatcccagctactcgggaggctgaggcaggagaagcgcttgaacccgggaggcggaggttgcagtgagccgagatcgcgccattgcactccagcctgggcaacaagagtgaactctgtctcaaaaaaaaaaaaagaagtatcttttggggagattcactgagacgaggtaaatagtctgtaaatacgttg

SEQ ID NO: 309104 - DNA, 1000 bp, Homo Sapiens
gatcattctttagactatacactaacaatgaacaatctgaaaggaaattaaggaaagaatttcaattcacattaacatgaaaaggaataaaatattttggaataagtttaaccaaaaaggtcaaatgattataccttgaaaactacaaaacattgctgaaagaaattaaagacaatatcattatatggaaagacacttcattttcatggactggaagaatcaatattgttagaaagacaatactacccaaagtgagttgcagattcaatgcaacccctactagaatcccagtaacattttttgcagaattagaaaactctgtcctaaatctgacctgacaggcacttattaatgactgccacaacagaaacactgtgaaaaagatgcaaccatgaaaaggtggaaagttttgatgacatagaaaatagcaatcagcctttctcacatcccaaagccttcaaatatatatgagtgcagcatggccagtatggaattcaccgaaaactaatcaccaagctagaaatgtggtgagagaaaaaaaagggcaagaatatatttggcttatcacttcccacttttgtctactaatctgatgctgaaaagaaattctcactgaagcattttagattttgaatctttcagatttgggatgctaaaccagtaagtatatgacaaatatttcagaatcaaaaaatgtcagaaatccaaaacactttttgtcctaagtcttatgcataagaaataatctgtgtgaacaatacgcatcaagctctacagcagatctctagaaactccccaacttgtataacggaaactgcacacccatgaacaacttctgattctccccactcccagctcctggcaaccagcagtctcttctcatattcactctggaatccatttacatgaggtccctagagtagtcgaacccaggggatcagagagtagaatatccaatgaaagaaactacttgcaaaacttttctccaaatttgtctcat

SEQ ID NO: 309105 - DNA, 1000 bp, Homo Sapiens
gatccactcacctcggcctcccaaagtgctgggattactggagtcagccatcatgcccagccttgttccttattttctatggctacaccttggctgggcatttaagaatatacacctcctgggaactctaaagcatttataggagtcaaacgtgcaaatgaaatgcgcaaagtgctctgccttggaaatgcaataactttaggagagacagaagggaaaaggagaagaaaatgagtaaagcagtggggtgagtgagaacactgataacaggattgcctgatattcatgttgagtggtgtcttttgccagtgcatcaggaaagtatgttcacaatacagaattgacaatttctgagtgtttatgtgcagaaagcaaggtaaagggctgagttatgagttatttatttaaatatgaagtctttaggcaatggttaaccagagtagtttacttaagcagaaactcaaaatcagaaatgttcatgaaaatgtaagccagctgggaatttacaaatactgtggacatgaggatgggaatttactagacctgacctgattcatattatgagggctggagataattttgactggacattaagtgatattattgtttatcaatgccataaacatttattgagtgcctatcacatatcagacactatcttatttgcaggggattgggatccatcagcaaacaatatagaccaaaatacctgccctcagatagcttacattctcattacttgaaagaaacatatcaagtaccatacagttattatactgtctcatgccaataagtgaaaccacatttgcaaaaattttgacagtgagagaaatctaacgtggctgactccttcctgcctctagcctcaaaggttatctgtctttgttcactcctggttgtaggctaagataactggggaagaatttagtttatagtttaacatggaagcaaggatgatagtaggccttccctaactaacacccttcttgctctgagactg

SEQ ID NO: 309106 - DNA, 1000 bp, Homo Sapiens
gatcctttctgacccagccctatttgtttgtctctttggcttctttggatttgtatattttagctgttataacactgtaaaacaaacagagtgatttttttgagttgtgtgaatgatgctagctccatagtcaccctgagagtgatgggaacttttgaatttgtggcaagttggagggtagtgtaagtgacctgagattgccaaattggggctagcactggatgtgaggttaggctagtggaaaaatatgcccagaaccagaggagtgtgggctcactgcaggtggttaggctcagatccaaattgtacagatggatagctttggggtaaagaataacatagttgagaagtgcatgtgttagtctgttcatgcactgctataaagaattacctgagactgggtaattatttataaaactcaggtttaattgggtcatggttccacaggctgtacaaaaagtatgatgctggccatcagctcaacttctggggaggccccagaatagttagagtcatggcaaaaagtacaagggaagcaggctcatcttccacggccagagctggagcaagtggtaggagaggtgatacacactttcaaacaagtaggtcttttgagaactccatcaccggacagcacctatgggatggtgctaaattattcatgaaatatccgcctccataatccactcaactgtcaccagcgcagccagccccacctccaacagtggggattacaattccatatgaggtgtgggtggggacacagctccaacctcaatcagtgggcatcctggattgggtctactatagaaggagaaccaggagctgactatgatcttgaaccctacccatgatggccgggcggggtgactcatgcctgtaaccccagcactttgggaggctgaggtgggtggatcgcctgaagtcaggagttagagaccagcctggccaacatggtgaaaacctgtctctactaaaaatacaaaaaattagaccggcg

SEQ ID NO: 309107 - DNA, 1000 bp, Homo Sapiens
gatcatacaggtcaaaatcttgaactcagagcaataatttaaggtgtctctgtccgacataaacttttttcttcttttgccatgcagaggcaaaaaagaaaaagccaggaaaaaaagctaaaatccttcctcatccacatttgttaatcaagcaaaccacatcaccaccacccgcccccctccaacccacacaaaaaatctagtttaaggctagttggagatttttttttcttatacaattcagccagttctagctaaagtgtaagcaattgaaaatttaatcctaaactcatgtgaaacagaaaaaaaaaagatgctgaaactgtagaggtttcatttgtttatttgtttataagttacactgccattagaaactgctttacccaaaatatttcccccagccttcattatattacctataggggcaaataaagtttatccatgttaacgattccaatttgtcagaaatacaattggatccagttgactttaatcaactagtgagtttgtattactatctcatcactaaaattctaaaatgaaagctgtaagatttttatttgtttgtggatatgtgtttaggtgtgtttttgcatatgtacatgtattatggtctatattgtgtctacatgacaaaatccaccttagttggccagaaacgccttaataaactctatttgcattaccttagagaaatgagcataagaacatggcttttaccctagtagcatcgggagggaattcagggtctttctaacagtgaggggcaaacccaattcattccctgacatcattcactgacattccctccaggctctaacatatgtctttctcacaaacacaccaaaactgacacaaactccggatattcgatcccaggtggatcttccaccagggcagaatgaccacaagaaagtcagggagtgattccccagcctcgagatccccagtatttgggacatctgcctatggtccctgcagacatttcaccaggggatcc

SEQ ID NO: 309108 - DNA, 1000 bp, Homo Sapiens
gtgttgggattatagtcgtgagccaccgtgcccagctccagctgctatttgaatgcctatgctttgcatacgtgaccatacgtgctcctggacctgggtgcgcgttggactctcctaaggtacttttcaaaaatactgattctaggctgggtgcggtggctcgcgcctgtaatcccagcactttgggagtccaaggcgggcggatcacgaggtcaggagatcgagaccatcctggctaacacggtgaaacctgtgacctccgtctccactaaaaatacaaaaaattagccgggcatggtggtgggtgcctatagtcccagctactcaggaggctgaggcaggagaatagcgtgaacccgggaggcggagcttccagtgagtcaagatcgcgccactgcactccagcctgggtgacagagcaagactccgtctcaaaaaaaaaaaaaaaaaaaaaaaaattctagagccccatcccaggtggagccctggattctgtggttaagtatctccaagtaattctgatgccaccatgcacagactggtgtttggacaccactggatcctcccaccagctgtgagaggtatgtgtattgttctcattttaccagtgaacaaaatgagccttgaagtggcatagtcagactagtgacaaaggtctcctgacttccagtccttaggtactggtcctataaagaaacaccttggctgggcacagtggctcacacctgtaatcccagcactttgggaggccgaggcaggtggatcacgaggtcaggagttcaagaccagcctggccaacatggtaaaaccctgtctctactaaaactaaaaaaattagccgagtgcggtgtcatgtgcttataatcccagctacttgggaggctgaggcaggagaattgcttgaacctgggcagcagaggatgcagcgagctgaaatcgcaccactgcactccagcctgggcaacagaatgagactccatctcaaaaaaaaaaaaaaaaa

SEQ ID NO: 309109 - DNA, 1000 bp, Homo Sapiens
aggcaatatacactaggaagggataggaattagttactgggccccattcacaatgatatcatcttcctgggaagtacaactattaaacaaggacagaccctcaatggccatgtctttacatgaatctcaacctaagatcattagagtctccttcctgggaatttgggatttggaactaaaagatacaaagatgtttgactaggaggaagagttggaccttctgccccaaaggacccagagttctagagaggcctgttttagcacttactcgtctccatcctccggtgccagcctccttgccatcattgcctcattgaggtgtagctaggtttttcttacaacagaagacagtctctcccctcttacctcaacttcctattctggggatagggggaaccggtgatattgaagatgattagttgctatgttatgggtttgaactgcatttggctataaaacaatcttgtttagaaaagtatatgggggagaggacctcttcccatgcactccttgagacagatcccaaatggtctgtgatcttgtttgcaagagattctattggtcaaatgcttaaagataaaggtgggatggccttcagattgtatcagcttagctagtattgctaagcaactgttgcaagctctgaaaataaaaaaattttgagccaccactccccgcccccctcccaaaaataattgattctgctctttttaaagcttggatgccatctttgttagtgtcctgtggctgctgcagcaaattaccacagactgcacggtttcaaacaatagaaagttattctctgacagttctggtggccagaattccaaaatccagatgtcagcagagccccactccctacagaggctccagcagagtgggggcagcccattactggctgctcttagcttccttgacttaacagctatatgacttccacctccgcctctgtcttcacatcatcttctctcctgtttgtttactctgtgtgtctcataga

SEQ ID NO: 309110 - DNA, 678 bp, Homo Sapiens
  misc_feature (476)..(476): n is a, c, g, or t
tttttttttttttttttgaggaggtcaaaaagtttaatattgctaagaagaatacaaatactgatcatgcgatatgttattgttatcacaccatctcctgctacacgccaggtttcctttaccatgagatagaagagatttgtggatctgacctaaccctccaaattataaggtctctgagagtgggctcatgacattcatgttttataaatgtggcataaaggttaatgctggctgccatgtgacccaatgccagtttgacgctgcattcaaagaaccatcgttccagcatccaagcacacttaaaggcaattgaaatgtttaccgccttccctcaagacaaacaccaaataaaaattattttcaaaatgcatagcaacacttcttaaaatcttattttcccatctctttctctctctctaccacattcccaggagtttcccaggagcaaaactgtcataaagacccaggagcanaatgattagtgacttcacgatatctgattctcatttagttggtttagagtggtgtccgggcatacgtattttttaaaatcttgctgggcacagtggcacacacctgtagtctcagccactcaggaggctggggcggaagaatcgcttgagcccaggagtttgagtccagcctgggcaacatagcaagaccctgtctctgaaa

SEQ ID NO: 309111 - DNA, 1000 bp, Homo Sapiens
gctggccttgctggggcaccatggagcggggccccgtgctggtgggttgttcactgggaccacccttctggaatgtgggaaggcggcatggcaggacccaccgaatgccttcaaaagccagtggtccatgcccctgtctccttccttagagtcttccagaaaagactggtcagaggtgcagcacagatgaacctacaaagcttttcatcaaagcatcacttacaatggtgaaaaggcagaagaatcactgaattccaccaaggtggagcagccgaggaaatcgtgggtagaacactagggagtcacaagaaacaacatatttgaggggacatttatagcagaggaaaatgctcatgatctaatgctacacaaaaagggcaggatacaaaataaggtgtatttgaagaaagagggtggcatggttgtccatccactgctttcagggactggactaagtgacctggatcagagggagggcaagagatctgcttcctgcctgagccctgtgaacagttgaaatcactcgtgtgtctgcaggaatcattcttatatttgctattctgtggtaacttcaaacctacacaaaatttgcgagaataaaaaacaccctgccacatactcttcacctacattcacccattgttaacattttgtcgtatttattttctctctcattcttttttttttttttgacagagtgtcattctcttgcccaggctggagtgcagcggtgcgatctcagctcacagcaacttccatctcctggatgcaaatgattctcctgcctcagcctcccaggtaactgggactgcaggtgtggaccaccatgcctggcttatttacttgtattttagtagagacagggtctcactgtgttggccaggttggtctcaaactcctgatgtcaaatgacctgcccacctcagcctcccaaagtgctgggattacaggtgtgagccaccacgcccagcctgtttttcacatttctatttcatgctcc

SEQ ID NO: 309112 - DNA, 1000 bp, Homo Sapiens
ctgtgaaacagcactcatgacaggcaggctaggcgccgccaccccgaaacctccgagggaggaccagccagcccaggttggcgctggagctgcagcaccacctgcaggccaaggagtctttttctgggaggctggagctacagcgccacctgcaggccaaggagtctttttctgggaggctggagctgcagcgccacctgcaggccaaggagtctttttctgggaggctggagctgcagttgcagtgaagtcacaggttccgtgacgtcacaggtgggcaggcgcactggtctgtaacggattggcttggccttacccgcgaggctttgcggtggctgcttggcttggcggtggtcgcttggcttggcgtggcagtgatcgcttggcttggcatttctggcttggcggtcctcctttcgcagattggaaaccgcgggctatcctgctgggaggttgtggccgaggcagtagctcgctactgatggcctcctggggtggagaaaagcggggaggggctgaggggtctccgaagctggcagtctacgccacgaggaagacccgtagcgtcaggagccaggaggaccagtggtacttgggctacccgggggaccagtggtcctcgggcttctcctacagctggtggaaaaatagcgtcggcagcgagagcaagcacggtgagggcgccttagaccagccccagcacgacgtccgcctggaagatcttggcgagctccacagagctgcccggtcgggcgacgtccctggggtggagcacgtcttggctcctggagacactggcgtggacaagagggataggaagaagaggtaatggccaggtgaaggatgcgggtgcgccgtcctgtcggggacactggctttctggtgcccggaggccccatggcacccgggatggggaaacgtcagaggggtcaggggcccaggcctcttagtgagacgggatcaaatataaaggattattactattgcaaaagtgttggtc

SEQ ID NO: 309113 - DNA, 1000 bp, Homo Sapiens
gctggccttgctggggtgccgtggagtggggccccgccctggtgagttgttcactgggaccacctttctggaatgctggaaggcggcgtggcaggacccaccgaatgccttcaaaagccagtggtccatgcctctgtctccttccttagactcttccagaagagactggtcagaggtgcagcacagatgaacctacaaagctgttcatcaaagcatcacttacaatggtgaaaaggcagaagaatcactgaattccaccaaggtggagcagctgaggaaatcatgggtagaacactagggagtcacaagaaacaacatatttgaggggacatttatagcagaggaaaatgctcatgatctaatgctacacaaaaagggcaggatacaaaataaggtgtattggaagaaagagggtggcatggttgtccatccactgctttcagggactggactaagtgacctggatcagagggagggcaagagatctgcttcctgcctgagccctgtgaacagctgaaatcactcgtgtgtctgcaggaatcattcttatatttgctattctgaggtaacgtcaaacctacacaaaatttgcaagaagaaaaaacaccctgccacatactcttacctacattcacccattgttaacattttgtcacattaattttctctctcattttttttttttacacggagtctcactctgtcacccaggctggagtgcagcggcgcgatctcagctcactgcaacttctatctcctggatgcaaatgattctcctgcctcagcctcccaggtaactgggactgcaggtgtggaccaccatgcttggcttatttacttgtatttttagtagagacagggtctcactgtgttggccaggttggtctcaaaatcctgatctcaaatgatctgcccacctcagcctcccaaagtgctgggattacaggtgtgagccaccatgcccagcctgtttttcacatttctatttgatgctccagaa

SEQ ID NO: 309114 - DNA, 1000 bp, Homo Sapiens
tccctgccccatcccggctgttgggctgggccgctttgcctctgcttcgccctgtgctgtgttctccagctttgtagcagcagccttgacaaacccaggcgcactgtaccaaggcaatgtaacttttgattttcggtcaatttaagttcttttgtcaccaaatattaataaacagttttgacttcacaccaaggttggataaactgcagggggtggagggtgctggggttttgccttggctgagtgacgggttggggtgtgaaggaggccagagggagacaggcaaagcccagaagggacaggtctgccttgcaggactgaagggcgacccctgcccctgggcccttcccgtaggcagcacctgggcctgtccgggcggctccccggagtggcgcgttaggcctctggcaggtggcctggaggtggaaaggcctatccgatcaccaagactgaggggcgccctccccaccacccaggcaaggagtccaaggagaccagcggagcagaccacgcggcatttattgttgggcccgcgtccctgcccgccccgggttagcggcagccgcactcgtccaccaccatgtcctcatactgccgcagcaccacgttgtcgctgttgtcaaagaagagcacggagatgggcgacaggcgcgcgggcacgcagcagggcaggtcggcggctcccggggcggccgcgtgcatgagcgcgcgcagcacagcgtggttgagcgccggcggccccccggaccccgacagcgcgacgggcagcgcgcactgaccctggcagtagttggccaggaagccgcgcggcgcgatgacccagcggtgccagcccacctcgcggaagctcacgtacagccgccgcgcgcgacaagcgcccccggggccgccgcccaacacgggttcggcgtcgcgccgcggccgggccagggggtggcacaggcgcgggtcgagggtcaccagcagcagcgaggcctcggccaggcgcgcgcaggcggca

SEQ ID NO: 309115 - DNA, 1000 bp, Homo Sapiens
attccactcactgtccacaaaggcttgggttacactgtctgcatcactgatcacagtaatgtacgtgtgtgtgtatacacactcacaaccatattgccacaaatgcatattagaaagcagggccttactttccctgaactgttacaatgcctagcccagagtactctggtaatagtgacttcatggagttttgtacacacacccatgtgagaaaggatacaagctaagctactcatccacacctcatgaaacctatgggagttagccctgactcatggttcatttacgaatacagaagccccagttaattaaattaacttggtctcccaatccatgatcttgagttttaattgataagtataaaataaatgacacacttgaaaatttctggattcacatcacaccaccagtacatggccttttccattaatgtccgcattgaccaacctttcatactatgttggttcttacaagaaataaaagcagagcctgcccctttgttgtgcagcacagaggctttattctatagtttcagagtctctggtatctccagtaggaacagagtgggcctcaccctctcctcatgactaagtccagaaaatctgaggtgaaagtttgactttttaactttagtattccactcattgtccacaaatgcttgggttacactgcctgcatcactaattaaaagtgaggtaacctggtataagccgtgcccaacccaatatttgagaacttttagtgagtacttaaaaaccaggctgtattactaaacatccccagcttccaaagttcagaagtttggcgggcctaatcattttccaaaatggaatcttaagatctccagctgccctcctcaccgccaagtatgaacaataaatcctgactttaacgctaaaatttgcaactgacttctgaggacatctaacagcagctgttttccagcgatgggaatagattacatggatgcatcttccaacaccctgtgacaaagaggtgc

SEQ ID NO: 309116 - DNA, 1000 bp, Homo Sapiens; identical to SEQ ID NO: 120035

SEQ ID NO: 309117 - DNA, 125 bp, Homo Sapiens
tgttgtactgaaaaccgtggtgtcctgtgtccactgagacaggacacccccaaaccagtcctgtttctcttgctcacagaggacaggtcaggaccacgtggagaggaccgagccttagtgagcgc

SEQ ID NO: 309118 - DNA, 1000 bp, Homo Sapiens
agaaggttccagaagagacattagagataatttagtctatttgcctcattcctttagattaaaaaacagttcccaggaggcaaagtgattagtccacaacttcttcgtggcagagccagaaaggggatgctcatatccaggctctcagtaaaatgatattttctgaggccctaatcctactctgccttcagatatgatattagcacttatcctctcttcctacatccctgaccttgactgttctttcctaccccaccccaccccacccacccctgttgtgatggggaattactctgatgcaatggtggccttttcaagtatgctctacacatagttgtcacccaaaccaggggtcatggaactggaagctcacagccaaattaggatgctcagatcacatggtttattaaatcaatttgaagcacacagcaaaacaaaacaaaaaacccaaaaaacaaaaacaagaggaaagatatgggataggtctgtgcacttaggataaggtagaaatggggagaaggatcacatccctgacttctgggttacgtatcaaagtctatgtcctgtgtatctctctgccacgtcagcctttcttgctgatgatgtgtttatggaaaccagaattgagaagtgagcaggagggcacagcaggcaggaggtacctgttcctaacatacactcaccttttcagagaggcactggggcagctatgctggccaggggagccactcaccagttatcctgatgaactgctctgggttctgggtgcatgaattgggcagaggactggtgaggcctgactaggatgtgaagacacagtttgagagactcctgacgtagtctcgtaactacccacctgcttcctgatgtactgcacgtgtttcctgaggccctatgccatagctcagctggttggcagtggccttaaggaggtcaaaccatgggtctgattcctatggggcccagctagacttacacagaggaacaaatggtttctact

SEQ ID NO: 309119 - DNA, 1000 bp, Homo Sapiens
tccttatttcaacagtgttcttctcatatgcaaaacagcttcccaaaataagagattcgtgaatgaaattttataaagcttcctgtgtaccaaagagattgactccacatcaactgtcccctactgaaaatccaaaccatacaggcttgaaggaccagaactgagccacattctattaaagttatcaaagataaaatcttaaagatctacaaatggaacatggaactaccttctaccaccaattcaatacactgggcaaacgtggtaaatcttggcctcaagacaacataagatagaatgattcttgaatatgtagcaacagatatatcaatattatccctattacagagacacatgtataccaatttataactgttctttgcagtaagaaactcagaaatcatctaggaaatatctattttcctatgttacaactgaaatgaaaatgacaacatattttgtaaaatgatgcaatgtggtattgtcttttgatgagacatgaaaacacaactcactggctagaaatagttgtaaaacaagcctactctcactgatatatacttactttaaaagttacacttacttcttagttttctgaagaaagaaggataatggtcctctattcaaagtagtaataaaaataattgcacctcaaattactcccagtgtaacataagatatttaatattaacataaatatcatttgcatagatgatagaaaaattctaatttcttaaaagtgctatgccttactggaatttgaagacaaaaaaaaaagtgaggaatacactcttctgcctgtccgacagaagcctctaccgagaacgtaaaaggttctgaaactcatctatgaatgagtccacttactataagtgtcttaaatttacaatgcgcaaaaaaccaatgcacccaagaatacatcatggcaccttgccccatggtaaccacttggcagactcaaataataactaccctcatagggagaaatcttgccaaggga

SEQ ID NO: 309120 - DNA, 1000 bp, Homo Sapiens
  misc_feature (764)..(764): n is a, c, g, or t
  misc_feature (768)..(768): n is a, c, g, or t
  misc_feature (780)..(780): n is a, c, g, or t
  misc_feature (788)..(788): n is a, c, g, or t
  misc_feature (800)..(800): n is a, c, g, or t
  misc_feature (806)..(806): n is a, c, g, or t
atacctaatcagatattttaagaatgcgtgtataagtgaccaggtgaattaaatggattttgccttctttctccaccattactctcaccaaaatgtttaaagaaagtttggcgtaactagagttttagtaagcagttattattcccaaaacataccaatgattattttgccatctattttctctaagataaagcgagcctgattattcagtttagcagattcagcaccaagcattcctaggagccattcttttcttaatccataatatttaagtctgagttcaaaaaagtctcttagaatatccaacaccgtgtcatatttctttaaacagcctacgtggtcaaaaagcacctgaaaaaggaaaacaagattagagccaagaatagacaaattggctaaactttataaaggtagactaagatatacttttaaaattgatattaatctttaatataaattgaaacgtgtacatctcacaaaacaaatacataccatagagttgcatgtgagactagtttggagtttgaagactttgtgtagtccaactctctctgcctctgccagtttttcttcagtcatcttcacaacaaatttcacagtggtatctgtatggtattccctatagtctgttatgagaggaggtgtcttctcggtgccattcaacatgggttctagaacttgttctttgtatgtctaaagaaagaaataatcctgaagtttctaaaatataggcttctgaatagtccacagcaatagtacaaaanggtnttctttggatcncaaacctnaaaaaaaatccncaattntttacctgggtccatgttctgacgggaagctctgagatttcaatggttgtagaattaagaatagctacttcaccactaatcacatattgatttggagccagttcttcaatagtacccttgaagttcttgtaacttggaagctaaattggcatttaaaaaaacagtatgttttctaaatgtgatactagacggaa

SEQ ID NO: 309121 - DNA, 1000 bp, Homo Sapiens
  misc_feature (928)..(928): n is a, c, g, or t
ccccccccactgcgctcagcctcttctgacggtttttaatccccaaaaagaagtaaatacatttctacttctagatctttcaccctactttgactatgacagatgaaattacaaatttccaaagcaagtaattacaataattttatcaacatattaaaaagtaaatatagatgcacatctcctaatttcaatcaattttagcaataattacctgcgtcaatggctccactgacccaatatatgtatcaggacgaagaagaatgtgttcaagttgtgtcttcttctgatacactctctcaacagacaacttctttgaagaatcatttttgttggcagtttctgactcttctttttttgcagcattgttctgatcaaaaagagtctaaaattaaccaaaaaatcaaatttaaataacctaccaaggggtagacaatgagtatggacacacgacatgggttttcttttttaatggcaaaattatctttcagactgattttttaaatctaaagaaaacacaggtctatttactgaccgtctggctcttattatacaacatgaacctgtagttttgactgagcccaaaacgtgggtatagtcaccagaatcactagagcagtctccagcaatccaaaaatacaaacatttcccaattctgtaagatatcaagtttgtttgtttgttttgtttttgagacagagtcttgctctgtcacccaggctagagtgcaatggtgtgatcttggctcactgcagcctccacctcccagtttcaagtgattctcctgcctcagcctcctgagtagctgggactacaggtgcgcaccactatgcccaggtaattttttttttttttttgtatttttagtagagacaaggtttcaccatgttggccaggctggtctcgaacttctgacctcaggtgatcagcntgccttggcctcccaaagtgctagcattacaggtgtgagccaccacacctggactcaagttaatttttgtgg

SEQ ID NO: 309122 - DNA, 1000 bp, Homo Sapiens
ttgttatacatgttaccacatttttaaacatgataagataagatcagtagatcaagttgaatgggagtagaaagatgaaagagttgcataaggatctggacatctgttaggggaaatctgacctttacaatggtcaatacaaagctaaaaatgcaattagttacataattccctactttagttcttggcaaaacaattgttttaggaaacattaaagtctaccctttaaagttatcaaattaagcatattagtttgtagtgcaagcatgcttatacccacagttaatacgatgaaagaaactaatcacaaataaagtaaatcaagaaaactacctaatcaactcttaataacaacaataaaaaaaatacaagttttactcactgctttaaaaaatttttctgacagctggcatttagacccaaaacttttgggctgcagagtcatgttttccttagtctgagaatcaaaagttggattttcaataaggcaattaataaaaacccatatatggttttttacctgttgaaaacatacccaaaaaagtcaatatcagagctgatatttagtaattcagtatatatataatgcatatgtatgcatcatgtacaatatataacacatcccttacttgaaatggtttcactgatacaccagctttgttctttttcttaactacttcaatcagtttaccaacaacttgatctaccacataatccacgtgccgtccaccctaaagaaaaaaaaatatatgaaatctgaaatcctgtattgttaaagtagcaaaatactttatctgtattataaaccctattttctaaaagagtaatagagtctcagaacgagagttgagattttaaaaaaataagacattttggctacagagccaataaaccaaccgctgtgttttttttgtttgtttgtttgtttgctttcctcacttcaattctaacaccaattctcaggtgctttcaacaccagcaaccaattctctgattctcc

SEQ ID NO: 309123 - DNA, 1000 bp, Homo Sapiens
  misc_feature (36)..(36): n is a, c, g, or t
taacaatactttaaaatcagtgatagctattttcgnagtctaagatagtcaaactttcaagtcatcttttagattgctttcataagaatacatttatatcagtatttaagatctaagtattttaaaatacaaacctttatagtactttattttccaggctttctggttttctatatgttttttccattcgtcaaattcaggaatactgtagaaggaaagttcctgcttatttttgcttgccttaaattattaaaaaacaaaattagtttttctgctaccctttaagacaacaatataaaaatatattaatgcaaagagtacctttacaataggagtaatgaactcttcaagaaaaccatgcttcaaaagtgatggccaattgtgatggatgaaattaataagcaggccttttatgtgagaaccatcttgatcctaaataaatgttagtaaagtaaaaaatgttgtaatacttttataaaatgattacttatataaacaaattttaaaacgtgaatgcaaaaaaccaaaattctgaattttagaaatgcattttacaaaagctattaagatgatcatactaaattttttaatacacaaataaagaatatagtagtaatagactgaatctgtcattataaaaatatattatcattttatctgttttatagtttccccagatttcactaaaagaatgatttaaggatagaaaatacataaaataaaacatggttataatgccaccttaatgggcaatggtagggaaacccaggtaatacagatattcacaagtcttccctagataaaaaattggaaaatttctgcttaaaactatatattaatagcagttttttcagttgcagattttctctacaaatactttgagagtgcataagagaaaacagttgaatgcatctgaaattcttccttttcaattttctagttcttttctcgattacaatcattttactatttaagtcctggtatttgtgcattccaaatc

SEQ ID NO: 309124 - DNA, 1000 bp, Homo Sapiens
tagtttctaattttttttcaaattagaaatagttcctagatttttttcaagttaagttaaagcattaggctttgggtaatacagaataaaaggctttttaaaatttaatctctgataaatattttagaaaattatcaaagttccattttacttttttagaaaatctgcagacaacttgggcaaaagctttaagacttttaaagttaattttcctgaaaaactcggaaaaggtttaaaagtttcaaattaaggaatattaaagatttcagcactatgaaaacataaaacaaaagcaaaatcaaaaaggccttaaattcctctgaataagctcttcatatacaagatttaaagtaagaattttaatatgtatcataaggatggcttaaagtacatgaaattaaactatagtaaataacattaaaaaatgaggtttttaaatattactcaccatcaacaagagatggtatagatctttcattgtctgagtttgagaagagaatcaattccttgttgatgaaatcattataagtcaaatgctttgttgcagtaccatataaaaattgctaagagaaaagttatatagcaatattatcattaattactgcatggattctaatctctctctccttctttccccaggtcaccactctttaagactaacctctggtaagccatgtagcctacgctgtctccggtcttccataaaatttgttaaccattcttttctgtcatcaatcttcttcttactaaatgcctgaaagattccaggtaacgattttgcacattaaaaataaaataaattttattacaaaattaaaatgtataagtggccaataactaattcttaatttctggaaaattaggttattttacaatattttaatcaaaaacacatttaaactaaggtctttcaattaaagaagtttatacaagcacagcatcatctgggggaaaaattaaaattaactagcttgagcattcaaaagagacttatcatagg

SEQ ID NO: 309125 - DNA, 1000 bp, Homo Sapiens
cgggtacacaaatagtcacagcatctttatttataacagcaaaacactggaaacaacccaaatgtccatcaacagtgaatggatacacaaaccctggtgcatccatttaaaagaatactaactcagtaacaaaaattaaaactatttagacacctaacaacttggatagatcttaagggtaatttgctgagtgaacaaagccctatctcaaagcttgcgtaccttacgattccattttaatagcattcttgaaataacaaaattagggtaatgggatcagtggctaccatgggtcatattgggaggacagtgtgagtataaagaggtagcaagaggaggccaggcgtggtggctcatgcctgtaatcccagcactttgggaggctgaggcgggtggaccgcccggggtcgagagttcaaggccagcctggccaacacagtgaaaccccgtctctaccaaaaatacaaaaattagtcgagcgtggtcgtgggtgcctgtaatcccagctacttaggaggctgaggcaggaaaatctcttgaacctgggaggcggggttgcagtgagccaagatcgtgctattacactccaacctgggcaacaagagcagaactccgtggtttttattattatggttatgtaagataacattgatgatgctaagcaaagaatactcaggaaacttttgtatattttgtaatctcttgtgaatctagaattatttcaaaacaaattttagaaaaataacatttaaggcatttttgtaaactacataatggtacctagtaacttggataaacacatccaaatatactgaattacatttatcagtaaattgaaaaaaataaatttggggcctataatatgtaagaactaataaataacaccagattggcacagaaaacacctgtgttatatataggattaaaatttaatcagtgataagaacagcccgctttacaattatggaatcattgataatatgatgcaaggtatgctgtc

SEQ ID NO: 309126 - DNA, 1000 bp, Homo Sapiens
ctttttttgtcttttttttattcaatgtcaaacacagtttactgttctgagacagaagctttggtgggtatcattgcttattgacactgggagggtgctgggggcctggtggcagctcattctgagctatcagtgcatcaggaagcaacttaagtgcctctcccgtaagacagaatatgctagaaataagctctggaggcagtgccaaaaaagattcatgtctagggtggcaaagtagagatctgtgttaaaccaaaccaccctcagcaagtagtcatcagaaacagatcagagcaccatcagaagcaggccttcctcaggacagaatcatgggggaaaaatggaaccagtccatccagagacagtagagatgtcttcacaaaaacagtcactactcaaaaaggctctcatatgtaaccaaccccaaattccttctgctgaccacagtggaaaggctgaaggatacatacggcttctgactgagaggaatacagtaggtttttgaaagccttgttgcctgcccgaagaagtgaccacacggaacatgtccgttcctgagtatgcttttcccctctctccttggcgttgttgcacaggaatgttccaaacaggcaggaataggtatgctgcaccagtttcacaaggaatgcttcattgaactcaaaagagcaaggaaattgcctctgaagctgatgaacacagtcaagccactgcagaaacactgggcaacgttcattcagatcatccgagttctccccatgaccacaccggtcagcaaatttatggccaaaatccagccactccatttccacgaggacctggaaaccctctatggttcggtaataagggtccagcaagagcttagccaatgccacaatctggggggtgcggtcccagccatctgagcagtgtactagcaccggccgctgatcctgatccacagcatgcactaccagaagcgctgatttcagaagcacagacaagtgatggagccattttg

SEQ ID NO: 309127 - DNA, 1000 bp, Homo Sapiens
cccacagaagaggagagtgcatgcatcctatgaggacggagcgtggatttatgatgccagagaaactggaaggtttaggagtggagaggtcagtcttagcctgggtcccactggatggaggctgtgtgcttctctctgccttggtttcatcattcaccatcattgggaataatgtcttttgtctccttacttaaagtgatcaggcactgagttgaaatcagcattccttcagcaaacacttcttttcatactggctgtgtgccaggctctgggctaggcacagagccacagagatgagcacgtcatggcctgccctggagatactcacaggtgcccagagtggagcttttggacaggactgaaactgtgcagagatgaggggttgatctaacttcccatcaaaccagctctcgcagccagaggtccgatgcctgatttttaacggcgcttgagaaaactgttgatatatttgaaggtgagtctggttttactcagttgtgaaggcatgtttgtgcatgtgcacatatgatttatttgatatttgaaaacaatttatgaccagaattctttgcatccttctctgggcctatgtcatgtgctgagggcttgccggaagcacttgtatagggtagagacttgtcctgccacatatctctcctctggactggcctaaagtctatcctcccatctccttcctgaaggacagcttccaaatgccttcccctctggttcttttcctgaggacagacctctttctctttcctcttgggatgttcttccaagtattctgagtctctttggctttttaaaacacattaaattgaggtaactttttgttatggtaaaatatatgcaacataaaaattatcattttaaccattttaagtgtacaatttagtggcattaagtacgttcaccatgttgtataaccatcaagcactatctgtctctagaactttttgtcattccaaaccaaaactttataaccattaactcccat

SEQ ID NO: 309128 - DNA, 1000 bp, Homo Sapiens
atccattctccaagtatgggaaaaattatagactgtttccttccctatatttaagctcattcaagggagcagtaagcatattagtatatttctgaaaggtgttttgaagacccagtgtgtcagaattaaaactctgtgctcttagtgtagaaagccagtgattttcatgagtgagcttagggtctgtcttctcaccatcggtttcctctgcccctctagctaggtccaccccagcaggtgggcagcctgggccagcttccatggactgactgcagggcagactggacagcccttgactgtcctagacaacttggcctccgctgtggtcttgcagaattacaggaaatcgattaatacatgcccaattctcccttcagatagctgggctgctaagtgtatttttagaattcatttaaataaatgctcattccccaaccccagactctggtttataacccactgggccatttggatttctttcatttaacctcataattggtgactctaattctcataatctggtggtccccttttgcttacaaagtccacgatcatgagcctgaaccataccttcccttcaccttctttgcctaattcctgctcatccttaaaaacctacgtccatagttccctcttcatccctcctgcacacgtttccccctgaacttcatccattgtgatgttgacgtgtccgtttttccagctgtgagctatcggagttcagagacagcgtcattcattcccttctcttcatctccaggacctatgccacatagtgaggcctaggatgttcaataaattaatagattaattaactagttaatctcagaggggaaaacagatacatgaaccttcagcagaccttctgcaatgctgaatgaggaggggagacgcaagcagggcagcagtgagaagagtgcaataggcagatttgcagggtgttctttgaggagagctgcagaagggggtgtcttggtaaagcattgcatgttggggaggg

SEQ ID NO: 309129 - DNA, 1000 bp, Homo Sapiens
cccaagctgattagttacaacagacactgtcttgccagtaaatcttaaaatatctactttctgtccctttccagaaaacctttacaaacccctgatatataacatagggtcaccagcaactgatggaaggagcacgtgtcactctgctgaaaatggtaacattatctcatacccctggatgggagagaatgcaagtatctagacagcagcactaatgacttctgcatgtcttcctgaagacttgttcaaaggtgacttagcagtcacatggaaaactaagcccaaaatgtaatccacccttaatcatccacaaccttcataagatctacctttgcgatgcttctcttaatcccttactgctataaactgaatgtttatttctccaaaaagtgtatatgttgaaacctaatcaccaatacactagatggtactagaaagtggggcctttgcaataccattcaggacataggcataggcaaagatttcatgactaaggcacctaaagcaattgccacaaaagcaaaaattgacaaatgggagttaattaaactaaagagcttctgaacagcaaaagaaactatcaacagaataaatagaaaaccacagaatgggagaaaaattttgcaaactatgcatctgacaaaaatctaatatccagcatctacaaatttacaagagaaaaaaacaaaacaaccgcataaaaaagtgggcaaaggacatgaacagatacttttcaaaagaagacatacatggcaaccaacaattttgtgaataaaaagctcaacatcaatgatcattagagaaatgcaaatcaaaaccacaataagatatcatctcacacgagtcagaagggctactatcaaaaagtcaaaaaataacagatgctggcaaggttgtagagaaaaaggaacacttataaactgttggtgagagttcagccattgtggaagacagtgtgacaattcctcaaagttctaaagacaggaataccattcaaccc

SEQ ID NO: 309130 - DNA, 1000 bp, Homo Sapiens
tttttttactttaaaaatggttttattgaatattaatcatttacaagtacagtgagctagacattaagccaaagcacaattgcaggttaaatataatcacaaagatgtcttaaatagaaacccaccaggcaggcaggttaagttccttgatgccctcctttggaaagaagtggagggtgagggaaaaaggacttccatttcaggtgacgagatgatgactagaggactttaacatgctgtaggtgatttcccatgaccacagctgtaggattgccagatttagaaaaaccaaacaatgagaaaaaccagcatgctcagttaaatttgaatttcagacaaataatgaatgcttttactgtaaatatatgccaaatattgcatgaaacattcttaacgtgaaattgtttctctgaaattcaaacttaactgggcatcttgtacttgatctgacaatcctacaaatagataaatacaaaaaagaaaggagagggggttgtaacccctgccactgttgggtcacacagagactaaaaataaaaacaacacgaataatgaaccaaagagtcactacactggttgctcacacagaccaacatcacaatgagaaaacacaattactactccgagtgctgttgccaggcaacataacattttctcaaagctggttttgtaaatgttttgagaaaccttgataaaagtacctttttagtttgtaggtatcaaagacaaacattactactacaaagataagatgagcttgaaacaatgggagcagaagcaggtgttatatgcacatgaagagtttcagtgttttgtgtcacggagacaatgtttacatactcaaggtcatcttctaggtctaggctatcggcctcaaagatctgtgttctttcctaactttgaatgggttttctagcctttcatcctgaactttgggaggggtgcgcgggtgtgtgagggacaccccactaccagggttcaactgcatttctctgcaaac

SEQ ID NO: 309131 - DNA, 1000 bp, Homo Sapiens
ggaagatcaccttaaacaagtgatcaaacttagcattatgagccacctggggtcacgaggcaggaaagatacgtcacctatgcagtattcttcccaaagatgcttaccttggaactcatgtggaaacagagaaatccagattgtgggacaacttacaagacaactatctttgactcaaaaaatgccaaatgtcatgaaagatcaaaaaaagtagaggcatgttttagattaaaggaaatgaagacatgacatgcagtgcctgatctttgactggattctgtagtatcctttcatctttctggcatgtttgaatttttttcaaaatataaatttgggcaaaagagataaccagggtaatggattaatttattgtaatggctccttgggggcagtttcagagaaataaaaacaatctctgtaactggaataaattctcaaggttaatcttaagcagtatagcatggtcattaagaatacggattccacagccagactaggcttaaatcccagctctgtgaataatgtaaatttgggcaaattgctaatctctgttccttggccttgtcattataatagtacctacctcaaatgagtttgaggatttaaatgaatccctacctgaaaaatgtctggcacacagtgagtgatcaataaatgttaactactgtaaatattacattatagaagttgtaggggggcctcttttgagtcctctaaaaggatgactttgttgggccacattaagactgtggaaacagaagagtattcaatggatacatgaagtctgtgagttgggggtatgatgtatagagttttaaattgaaacgtatccagtaagttggctgatacatctttcaaactatagaggaataatcacaagtgactcgtattcctttgggtccaatagagcctctgatcttcatatagattgaatgtacccagaaccataacctagcattttacttatatagcaaccttaactctgacacaaagatgtctc

SEQ ID NO: 309132 - DNA, 1000 bp, Homo Sapiens
gatcgataaacaatgtattcaacctcaaaaatttcaaattaggagagattctttaaacactttaaatgactttcaaaaccttttgggtaacgtaaattatttaaaacctactttaggcattccaacttatgcgctgtgtaacttgttctctatgctgtggggagattccgatctccacagccccgggactttgacccctgaggctttactagaactggaattcatagaggaaagaattcagacctcccagttatctagagtacagccgtttcagccttttcagtttctgttttttgcttcatcacactcccctactggactaatagttcaacataatgatttaatggagtggcgtttccttcctcattctatgtccaaaactttgtttatgtagaccaaatagccatattaattgggcaggctcagtgtagaatacttcaaatttctagatttgatccaaatgtaattgtacttcctttaaattggcttgaagttcaatctgcctttcaacattctgtactgtggcaaattcacttggctgattttattggcgttattgacaatcattattcaaaaaacaaattgtttgatttttatataaatgacgtcttgggtggttcctcaattaaccaaagatcaacccattcctgaggccattacagtgttcactgatggctccagtaatggcaatgctggttacataggtcctacagacaaacttatttctacctcttatgcttctgctcaaaaggtggagttaattgctgtgattactgccttacaggatttcctcaaacctttaaatattgtctcagattctgcttatgttgtacatgccactaaaaatatagaaactgctgctatcaaacacattgataattctgaattggcttctttattttcaaggttacaacaggtggttcaccaacgtagacaccctttctatattacacatattgggtctcataccactttaccaggacccatgtctgctggtaac

SEQ ID NO: 309133 - DNA, 1000 bp, Homo Sapiens
gatcttcttaaaagaaaacaccggttatcactacatggcataaaaccatggcactgaaagttatgcattcaatgaatatttattgagcacttaccttgtgacaggcaatttatgtggtgcagggatgttccaggatagagaggtgactgagcaaacccaccttgctgtatagagtgttagaacatcgctggaggaacaggaaaaacagaacacaaaatagaaagagtgctctgtaacaagaagcatggttgctgggttccaaactgtgattaaattttttaaaaattttaactgtattatgacctttatttttaaaatgtttatacaaatcatttaagtaatataataccttcttgtgggtaaaattcaaacattacagatttataccttgacctcatttcttctaaacccagtgtccccccctacaaggaatgccttcttttgacattttctagtgcatttatgaatgtttgtgtgtacttatgagatcaattttatttttttgtcgttaaaataattggtctcgtattatgcatgttttcttcatgccttttcatactacagcatttcttgaagatatagccatgccagtactgataattttgtttttcttttatatatagtctatgtactggctacttaattaaaaactgtactgtaaaaaatttcaaatgtttgcaaaaggagagaactgtcatccccagattattttagagcaaatcccagatattatataatttcatacacaaaacctaaagtttttcgggggaacagtgtgtgcttggaaagatgtagttgaaaagaaagactgaaagcaagtcgtagggcataatggatttctgaagaaatagttgcaaccagcagaagtatgggctattgtgcagaggatatggaagttaaagaagatcaatctctctgcatcactgaaaggattgctggaatgcctgagaagtaaataacatcaacatctttatccacagcttactaggtggccagacgc

SEQ ID NO: 309134 - DNA, 1000 bp, Homo Sapiens
gatctctttcacctctttcggggatggcttaagtgtcacctccttggagacgcctcccagaccaccctaggcccccttctcgcttcccttcataaccattccatagcgtgtgtggaacttgatgttttgtgttcacggtctgttttccccactcagttgtcatctccagaagggcagggaccttttttctgtttccttcaccatttccccagcgtcctccgtactgggcctggcacgcagttggcactcaataaatccatgctaactgaacagacacggggatcccgccccctagcagtaactttccaactcccggctggcctcattcccaggccctgggagggtccccgaggacaagccgcggctggtggggacctcgcccgggccggagccggagggcagggcccggaaggcgcgctccgggagctggcgttgctcctcgcccaggctgcggcgcaggcggcagtggtgccagccacggcggatctccgactgcacctgtgagacgatggcgctcagaggcggcgccgtaccccgcgctgccgccagagggcgggggcggcggccgggtctctgcctacctccttgttgatgaagcagtagaggacgctgaccaggaagccctgcccagaggaggcgcggaggttacatcgctggtgggggcaggactgtaaccgcctccgcgcctccctccccgttttttgtttgtttgtttgtttgtttgtttttaagagtcggaatattgctcttgttgcccaggcgggagtgcagtggcacgatctcggcaaacggcaacctctacctcccgggttcaagtgattatcctgcttcagcctcctgagtagctgggattacaggcgccctccaccacgcccagctaatttttgtatttttagtagagacggggtttcatcctgttgtccagactggtctcgaactcctgacctctggagatccacccatctcagcctctcaaagtgctgagattacaggcatgagc

SEQ ID NO: 309135 - DNA, 1000 bp, Homo Sapiens; identical to SEQ ID NO: 120037

SEQ ID NO: 309136 - DNA, 1000 bp, Homo Sapiens
gatctgcagtcttcagacggggacacccaggctcaggcagggggagtccctcccccaaggtcacagggcagatggagcagagtgctgggatgcgaaccccggcctgctgattcctcctgagtgctgagccaggcttccccacaggcccaggcttcttcccaggagagaccagggaggcaggtggagatcctggagataaggcctccgatccccaccaagataaggacctggagaagaagccctgtcaggtggcgccagggcagccagctggaggtgggatggcaccacgctgaaggcagcatggctgagggacccctgcgaggggcagctggggcagtgggtgacaaagcccctgggggccgggggtgggagctaaaattggcctgcaccaccagctggcctggctccctcccgcccggctggcgccccaacacccgggactgttgctagggaacctggggaggctggccccctggtggggggccctggaacttggggtgggggagcatgaccccacgtggctgtagccatggtaaccaggtaacaggagagggggctgcaacctcccattccagaggcaggcaagtgactccccaccaggactgacaggcaggtcttagtgacaagagttggaggagagaaaaggggattagccatcctcaaatccgcaccatgcacgcatcttaacaacccagggaacagcaagtcttcattaggcgttccacttaacagacaaggaaaccaaggctcagagaggtaaggttacttgcccgaggtcacacagctagggagggacagaaacaggatgtgaacccaagtttatctgaacaattaaagtagtgctaataaccacaacagccacgacacatgccaggccctgtgcaccttagtcacatcacgtcgctggctcctgcaaacatccctaacagtggggggccatcatcaacccgatttagagataaggaaactgaggctgcaagctgggagtgaatctgcaggc

SEQ ID NO: 309137 - DNA, 1000 bp, Homo Sapiens
gatctgattgtgtcaatgacatctccacggggcggggacaccaggtcaccgtgccactcgtgatgttgccatgcacaggctaagggcattctattgctcataacatcatcattgtttcaatttttattttttattttttaatttttttcgagaaggagtctcactcctatcgccggggctggagtgcagtggcaaaatctcaggtcactgcaacctctacctcccgggtttaagcaattctcgtgcctcagcctcccaggtagctgggattacaggtgcacaccaccacgcctggctaatttttgtatttctagtagagatggggtttcatcatagtggtcaggctggtctagaactactggcctcaagtgatctgcctgccttggcctcccaaagtgctgggattacaggcatcagccaccacactcagccaggcctcctcttataaggaccctgtggtgacactgggccccccagatcatccaggatcacctctgagctcagggtccttcactccatcccatctgctgagtccctcttgctaagtgaggtggcctaaacagaggtcccggggatcagcgcggggacatgttgataaaatggttctgggccccaagtggctgacaggtgatatggctcaacctagcccagaattagggaccaccaggttcagagagaaagagctagagagaatatatgaaatacagacaggcagaaagggacagaaaagcagaaagtggggatttgtggtggggggagcgaggagcaagaagatgccaggtgtagttgtagcttccaggctgggcgcggtggctcacgcccacaatcccagcaagcactatgggaggccgaggtgggtgaatcacctgaggtcaagaattcgaaaccatccttgccaacatggtgaagccccatctctaccaaaagtacaaaaattagccaggcatggtggcgggcgcctggagtcccagccaccagggaggctgaggcaggagaatca

SEQ ID NO: 309138 - DNA, 1000 bp, Homo Sapiens
gatctaggatttgatcaagtgctgggcaacatgatacctctgcaatttagcacttccctatatacctccagttggctcagcccattagggctaaaactacccctcatatcctagtgtctcttgtaggcagaagccttgcctaaaccctaagctgcttggctcacattctgtcttgtgctttttttgtagggggttcaaatatacacaaaagaaatatgttgaacctccatgcacccaacccgcagattaagcagttacctccatttttccagatttgtttcatctgcttcaatctccctaaaaatttatgtttgtacaggaaagactgaataaatagctaattctccaccctacctctcatcttaagtcacttttcagagtagtaagttagtgacctagtaaccttccctctaatgaccagtagtttttttttctgaataccattatgaactcatagattattgtttgcatttgatgtatttcaggccattgcagtctttattgttttggatgcttacattgtctcatctaggttaataattatctcttcaagttgactttcatgtctttttgacgtgatcctgttggactttgatggcttccttgctttctggcaaaacagatgttccaggatcaatatactgcaccatacatggagtcagccatttctctagggaaccttgattccttttagtagagaacacagtttgaggtcttggactgaatgacttttgtgaacctcctctcctgagactacagcctgcatccctgcatatagcccgtttggagctcttgctgggcaccaacagatctcctaaaactgctatatagttctgcctcactcttacaaagattcatctcttgagagttttgtgctctacccccagatgtggtctttctggttatgaagcttttgcttcagtcaccctgaattttgccagccctatgcatgctataccttggattgccaacttgccctcactgaagccagtttctctgg

SEQ ID NO: 309139 - DNA, 1000 bp, Homo Sapiens
tgcgggacggcgttaccagaaactcagaaggttcgtccaaccaaaccgactctgacggcagtttacgagagagatgatagggtctgcttcagtaagccagatgctacacaattaggcttgtacatattgtcgttagaacgcggctacaattaatacataaccttatgtatcatacacatacgatttaggtgacactatagaatactaggatcccccactccactccatatgggggctccaggaggtctggggggaggggaaacctcagcacctcccccagcccagcagggaaggagctgggcgggccccaggggtctcactgctcctcaggacacactgtcccggacccctgcccctgccctctgctctgacctcgcccagccagcggcctgccatccccctgcgagtctgagaggcagggggaacggggtgggggcgggtttgggtcctggcctctctgcctttcccttccaggcttggctatcgcgacttagccgcccagtccggccacttgttgtcgccaccgcctcccgggccgccttcccggcgcgccgggctgggggtccccgcagggctgcagggaaggggctacggccgcaggtggggacgggggcggccccgcagcgggcaagagcagggcagtcgccctctccccttctgctgctgcccgagcagattgaatttttaaagcgacacgagcggaatgtcaatgcgagcagagagccgcgggcgggcgccgcggaggggatcaggatgcgggtgctccggccgggccggcgctgggggctcagcgcggacccccgccccagtccgccgcgttgccgcaccgtcaccgccgactgcgcggccccgtgaccccgctgcggggcccggcaagtttccgcagcgctggggaccacgcgggcaggggctgggccgctctccgcctgagcgacccccaccgcggcgccccagggtgcggacaggtcttgccgcggggcacagctgctagctggggcgc

SEQ ID NO: 309140 - DNA, 1000 bp, Homo Sapiens
cagctggcgtcagcagctccccactttctcctgttctctccggcgactttctggtgtctgtctatagagtctcactctcactcgaatgttcgcgcgtcactccgctgcgcggtcgctgcggcatttactcgcctctctctttgtcttcaccgcacagacccctctctttgggccgtgccccctcatcggggttctgctcctcatcagccatcctccgggacgctgcgcaccgcggcgtttctctgacatgcgcccccgctccattgtgccgcaatccctcttgtgtgttggagccacccccgctcttgcgctctaggcgtttgtgacaagctctcccccatcacgcaatttttgtacccccccaggcacccctgcgtctcgccgatctcggactcctccaccgtctacacaccctcccgcgcgcacgtgcactacacttggtgtcacacggtctctgacatacgccacccgtggagcgcacattctgcgcctcttgtgcgaccccccccccgtggcgagctccaccgcgtcacgcggtttttttgcggccgttctgcagaccccccccacgcagggtctctctgtgcgccccactggtttcgcgcgctgctcctcgacgatgctctcttttttgcgccgacacaccgcgatgccacactcgctacacaaccctctccgatttcccgcgcccccaagcgtctcccgccctctcgcgacttctgcctttccatgaagcttcccgcaacgggttacacttggggaggttctcatctccggcaggcgcttcttgggtgggccgtcgtttctcggcgcaaacaaaatgttgttcaccggcgctggcaccacgtgttcacacgttgtaacccccatctttactggcgtgtgcgcttttacgtgtgcgcggcccattctcgccccaggccccccatttgcgcaaggccacctctctcgcgacatcacagccctctcaagcagtcttgctctttcacagatcacttgt

SEQ ID NO: 309141 - DNA, 1000 bp, Homo Sapiens
cctaggatgggcagtataaacaactgtgtttttaaatgacaaaattattactctaatcaaatttatctgcagttatcgacagtaatcatgatccatcccaccttttaagtttctttcattttcaatatcagccaattgtggtttatcaaaccatccctagccaaaaaaggaattaactgcagtaatacgtaaagtcaatttagaactaaactccaactttaaaaaaattccctgattcatcaaaagtacattttatccacttaggtaagaaaagtataattgtaactcaatctttgattcaataaaaaatatcttcagcaaaagtggataaccttacatgaaagtgagaaatcatgtattacaactttaaatcagacaacttttggtatattcttaaaattatataaaaatagttttagtgataaaatgcattggtcccctggatttcataaagcagatctggtaggcttagaaatggcccaaaaacaacaacaaaaaaaaaaaaacaaaaaaaaaacccccacaaaaaaagtacctgatcacagaattagagattattattaaacaagtaatacaacacaactataaaaacaaacctctcaaactcattcatttgcttcaatgaaattatggtaactacagaaaaaaactcaactttgtagtcaaaatagtaacctctaagcatttttcccatgatgtttttaaacacatgaaattgacactaaattcctatgtaatatgtcactcattctaaaattactttggttttaagatcaaatagtctttcaaatttattctacgtataagagataagacattatcagaatgcaactcattcagtgtaaatggccactttctcttcctgaccaaaatactgtatgggttactctgaccctgtatcggggaactgatagcactataaagtcgaagtcttgcctcagagctatgatagttttttctcccctcagaataagatcacagtgataaaaggacttcgaaa

SEQ ID NO: 309142 - DNA, 1000 bp, Homo Sapiens
aaataaaaaaattaaaagccagtccaaccactcaggcacgtgcatgggccgccctatggctacaaccccccttccctcccactcactttaaaaaagtgtctctgttccagagcctgggaagagggtatgtttgtctctgttctgtctcagcctaggctgtagagggcttcgtcctgttccgtcctgggctatcagtcctactaggttaataccagagaatgacaatgttcagtcagttctactgccacccaagaccaagtagtgccacaccttactacagataaaggcctattcatattaaaaagctccaagaaaggaaaccctggcatactgcagaagagtacagttaaaaaatcttcctgaagtctaatggatcttgctttgttttattcctatcttcatatatcacaaatctctacttccaaccatcctaaatcctaaaacttgtctttgtgagacgtgaaatggagtggagaaaagacttaaaagtcaaaacccccctaaggctatagatagggaactttttttttttttttttgagatggagtcttgctttgacacccaggccggagtgcagtgaaaaatcttgttcactgcaacatctgcctcccaagttgaagtgattatcctgcctcagtctcccgaatagctgggattacaggcagccaccacgatgcctggctaatttttgtatttttagtatagacgaggttttgccatgttagccagggtggtcttgaactcctgacctcaggtgttccgccagcctcagcctcccaaagtgctgggattacaggtgtgagccactgccaagagggaacctttgagcccagctgagatctgtcatttgccttagagaatgtctagataccacatgctgctgagtctgtggtgcacttttagtaacgcataccatggaatgatctaggaaaggaaagcccaggacattgctgaagaaaactgtttgaaaggcttaccttaattccagagcattggttca

SEQ ID NO: 309143 - DNA, 1000 bp, Homo Sapiens
gccatgaggccaatttccatgtggcattgcatgcatccaaatattaatgcacggaggcacagaattagagcaacaagagagcatattcaaacactagcatgcgccattcccctttttattgcttgtttgcttagtacttcttaaaacagaaggaaagacttgaattcaactttcaactaccaaagaaggagtaacagcaggacacatactcaggacttgaatgaaattgtaagcactagctgaagcaaaacagtagacatgggtatatatccatatatatatatatatgtatatatccatatatatatatatatgtatatatgtatatacatatatatatatacacacacatatatatacctgtatatatatatataaaatatctctatatatagacattggtatatatctatatatatctatatatatacagccttattatctaaaactcttctcaaccagggccttcccaacaaattggtaacaacatgatttatgttgaaatatacacaagaaataagagtgtgttctttgtctttgggaatttaataactcagactatccaaatttgaattcaggtctgtaggaagtgagaagcctgtactaagcaactgtcctacatttctgctgcagttaggttattttggacaattatacctaaactatcttggtttcatccagcaaaatgtatacagtacaaacaggaaagcatgccagccagctaggggtttaataacgcatgatttttattctcttggtctgaaaagttgtatcaaaaaatgtaaactaatgcaaataactcaagatttatgggcctcttgtgctttaaaaaaggaaaaaaggttacccactaatttgctcagatatagcaggcttaatggttctatattttcaaaagtttttaagaatggtttctaacgtaggagagggaaaacatccaccatcccttttcagaatttaaatggagggcagtaaacattctttacacccaaaacctatg

SEQ ID NO: 309144 - DNA, 1000 bp, Homo Sapiens
cagcctatggtcaaagataacagaaaggaacagggaagtggggacaagactggaatgcaaggcaggagtaagtggaagagaaaagagaaagaaaaaacatgaatcccatattgagaaggaagagaagttcctatggaaggagttgtgtgcctaggtggatgacataatggggactgaatattaattgggcatgtataacctgaggactgcctgttatccacccaacagaaaacacctgatacatttcacacttttatgtaaggtaaaaaacaacgataatcatcatcatacactgaatgtaatttatatttgtaaaatgtaaatattgttcaaagtacctgagtattatactttattaagtaaaggcaaaagcgtaagtttttcactcttttctctacagtagtactcccaataaggcaaaaacataaaaatataagtaagcaatatttaattattgataaagtgcagcatctagtatacataccaccaaaaactcttttttatccaccatctcattgccatcagtgtcaaacatgttgaaagctattctgaaccctgcatgtggctctgccagaaaaaacagagaaggtattcacaaaatggaaaaatgtattttaaagtacaaaatccatattagttgtaaagttactcatattctgtattggttaaagatagtagaaagcgtataaaagtatatatatttctgctttataattagtacacttaataaaaattgataatatactttaaaagtacttctgtgatacttgttgcatagcactgagagaaaaatttgaatactttcctaaagcacttctcttttttaatccaaagtctgttagtttgttttaaaggaaaatatcaactcgtcacattttaaatatattcaatatgttcagctacttagattggcagaaaaaaaacatgacacaatgaactagttccgattcttgggaaaattataactaaaatgacctatgaaaataaatgtcaagcataa

SEQ ID NO: 309145 - DNA, 1000 bp, Homo Sapiens
actctgggtggtgttataaagtcttgaaatactatccaaaattttcttttcttttctttccttttttttgagacagggtctcactctgtcgcccaggctggagtgcagtggctcactgccacctccgccccctggggctcaagcaatcctcctacctcagcctcctgagtggctgggattacaggcatgccccacctcacctggctaatgttagtatttttctttttttttttaagtagagacagggtttcaccatgctggccaggctggtcttgaacttctgacctcaaatgatctgcccgctttggcctcccaaggtgctgagattacaggcatgagccactgtgcccggcccaaattttaaatattaattttctatatggtgataatgcttccttctgggtaatacattaatacacaatttaattctgtaagatatcattgaataaaatatgctaatttaaatatagcatatttggcattttaaaactttaatagcaattttaaatttttctaaagaatgaggatactcatagaatcattaaaaatttgaattattcaataaggcacttaaatcggtgtgagatgactaaagccaacaatatttttcataaattatgtaggtgactcagttataagttcataatctgaattaggaaaggaaattgttgatatccctatacctcaaagccttaagaatctctggcacaatgacagccatttcaggatagaattctttgccaagggtctgacagaattcaatctgcaaacttaagagaaatgagacatctttaaccctagcttgtctccacattctcaaagaacaatttattaatcccaaccaaatctaagtgaatacaattttttttcaaactatttaaaaaatctataacattaatataatctagcttaccttgttcgccagtgttttccatggacactgtaaagagaaaaaaaggtaataggttacatgaagcttatggcaaacggggcttgacac

SEQ ID NO: 309146 - DNA, 1000 bp, Homo Sapiens; identical to SEQ ID NO: 120038

SEQ ID NO: 309147 - DNA, 1000 bp, Homo Sapiens
actctgcctcaaaaaaaaaaaaaatttaatttaatatgaaatgatggtgtgctaaaactaaaatgccacataaaattatggatatgatactgactactaagacttttcttagtttgtgtgcttttattatatatgaagactcaactttgtctgccatttttgtttgctttttttccttaacaactaaagaactctcattctatattgaaccataaaatcatttactttcacttggcttgaatgcattatttatacattaggcccttctctgttcttttcttctccaacaattaaggtattaggataacataaatgtaaatgcaaacactggaagagaactttaataaaaatatgggccaagcgcagttgctcacgcctgtaatcccagcattttgggaggctgaggcgagtgggtcaagaggtcaggagatcgagactttcttggctaacacggtgaaaccccatttctactaaaaatacaaaaaattagccaggtgcggtggtgggtgcctgtagtcccagctactggggaggctgaggcaggagaatgacgtgaacccggcaggcggagcttgcagtgagccaagattgcgccactgcactccatcctgggtgacagagcaagactctgtctaaaaaaaaataaaaataaaaacaaaaatatggaagttttacattttcatagataacttgtatactgtaatatgagaaacagtgttgacgtgaattgttagtgagtattatatccgttctaagaaatctaagttggtcaatatggaaattatggttacagaatagaatatgaatggtatacttcttgactatatatataacgtatatattatataatacatatacaaatttattttaaaatatgtaaagctcaaaaccatttttcatattaagagtctaaagttatctttaggtatctgcaagtatctaaatattgataaattaataataagttataaatatctagagattccaagaatatcataat

SEQ ID NO: 309148 - DNA, 1000 bp, Homo Sapiens
attttttacaaaaacgtgctcatttaatagaaatgattgattatataaaattgtttacacatgtataaaaactaggaacacgtatgtaggtaagcaatcaaaatcatgctttctgttagaaaagttaacacttctgtgaatagactggatgacttccttttagtttggatgtctgggtcggactcacgagacgctggggttggggtgtggtgcttgacatcagcctctggcaaagcactaataaaaggaaccccaaagctgactgtgtacacaaatgggctttccataagttcattacatttccttttccaagtcaggaaaactcaacagtggtagctactgtggtctgtccttgaagattctgagcagtgcaaatgtaatatcctgcatcaatcgtctcgaagtcttccactgtaatgacactctgggagattctcgtggtgtgtcccagtcctctgtggatcaacctccaagtgtcttggatcgtcacaggcctttcatcctgtttaacgacacccacaaagactgaagcaagagggacaagctgctataaagagctcccactcacccaacactgttgagcgttcctttcagagagcaaagcacatgcttataaaagactgtttagtatgcgtagctcataagctgtggaagcttctacactggaatcattttaggttgcattttttccaaacagcccttgaatttcattacgttgtttggcactgtctttctgcccttttcttctgtaaggttttacttaatctaaaatgtatgcttttagaactccaaggaagtggaactggtattaagcataagcagggacaaaattttccactggccccgttcttcacattgcccactttcttttcctagctaagtggttcttacctacagaactgaaagtcagtagcctgaaaaagcacccactgtataaatgactaagagctcccaattgctcagatttgagagagggagaagtatgattaggccagtgtgc

SEQ ID NO: 309149 - DNA, 1000 bp, Homo Sapiens
taaagtcatgttaggccaatgaaatgtgagcgcctcaagaatagctattaagtatcatactaaatttggcggacgtacagatctgtgttacaaagaaatggaaaagtcatccctgtgtcacggggatgaaaagcctgctagccattccaattgactgagaacatcttgcaaagaacccaccttacttctgccggtacagccttgggcaaattaaagtcatgtcaaatcaatttagtagtaagttcccttatacaaatagttatgtgtccacacacgtgagaatgttttatggaaactaatgaaagcgagcaaatcccagaagatctctgtacctctctacaatttagtatttgtaggtttcatttttcaaccctaccatgaagcctcaagtgtgaaagcctgtaatgcttagaaatgttttacgggctgtttatttagattcaggcctagtgtcaaggtcaaggagacatgaccacagaggcgtgagtggaggaagaggggtttgcagcacatggctccatccccagaggatctgggtggaaacaggaattcattagcttggagtgttcatcatctgggagaaaaacagaggccaaaagccattgggagaaagagtgattcttatttgggatattgccacacctggggagtcaaggcatgagtgagatgaaagctctagtcctggctgggtgtggtggtttatgcctgaaatcccagtgctttaggaagccaaagtgggccaggagttcaggaccagcctgggcaacatagcaagacactatctctaaaaaaaaaaaaaaaaaaaaaacaacaacaaaaaaaaaaaacagctgggcatgagagcatgatggtgtgcccttgtaggggctcctcagctattcaggaggctgaggcaggaagatcacttgagcccagaagttcaaagctgcagtgagctatgatcatgccactgtactccaacctgggcagcagagcaaaaccctgtcccttggtggtgaag

SEQ ID NO: 309150 - DNA, 1000 bp, Homo Sapiens
gaacattcttgcatattccttttggtggacgaaagcatttgcttctcttctatatgtaccttgtgtgaggtatacagatgtttagctttagtttaatcctgcaaaactatttttcaaagttatctttccaacttatacccccaccagcaacgtatgagacttctagtcgctccacattgtttccaacagtgtgtattttcaggctttttgttttgttttgttttgtttttaactcatcatcttgatgggtacatcatggcatctcaataataggcatttccctgataactaagagactgagcactttttcatatactcattccattacgcccattgggtaacttcttttgggaaggatcgagtattcgagtcttttggcccatcttaaaattcagttgtttgtctttttctaagggtttgtaggtttcctttatatacggatataagctctgcaaatattttctccgtggctgtggcttgccttctcattctcttttgatgggtagttcttgcgtatttattagttttgtttttgtggttagtgtttttaaacagcagtttaagaaatctttacctaaccatagaagaggacgaattaagtacaagacacatgaaggcttatcctatcattctgaagttatagtgcttgatagacttgtctgacattcttgataattagtttcatgtctatactaagcaaacattcttaaccatactatattatttggatgaaaatatttcttcctccctatatattatttgtgtaagaaaaacatattaaaaattacttggttatggccaagagcaatggctcatgcctgtaatcccaccactttgagaggccaaggtgggcagatcacctgaggtcaggagttcgagaccaacttgaccaacatggtgaaaccccatctgtctgtactaaaaaatacaaaaattagccaggtgtcatggcgggcaccagtaattccagctgctcaggaggctgaggcatgagaatctc

SEQ ID NO: 309151 - DNA, 1000 bp, Homo Sapiens
catatagaaatataaatacatacggaaatacatatagaaaattgctctctagaaaactaattgttctagagaccaattaagttgtgtcctttaaaatgtacaccaactgacatagtagttccacttctccaaatccttcttaaaaaacacaaatgcacaaaagcttgtgcaagtatattctttggtgcattgtttctaaatagcgaaagattgaaaacaagtatatagtaactggatgctattatacattaactaaagtccatcgatatactgaaaactgtactgcagctacaaataactgtatgtactgtgtgtatatatatatatgcagtattatttatattttataattatcatatttgtgtttcttaattacttataattatatagaactatactgacatgaaagttctctgagacaatgtggagtggggaaaaaaggaaagctataaaataatacttagtgtattatatatacagtttgtaaaaacaaagaaacataccacaaaacgtcatgtatttttttaaaaataggtgcatagtgatgtacctaactgcacagaaaaggcctagcaacttcagtgaagaagaataggattattaatggaggtaaagacagagtttattagtaatatgtactttttgtgcctgcaatctgagcactttgggaagccaaggtgggtgaactgcctgaggccaggagttcaagaccagcctggccaatatggtgaaaccccatctgtactaaaaatacaaacattagccaggtgtggtggtacacatctgtaattccagctactcgggaggctgaggcagaagaatcgcttgaacccgggagatggagcttgcagtgagccaaaatcatgccactgcactccaacctgggtgacagagcaagaccttgtccccaaaaaataaataaatacaaatacgtactttttttgaaccgagagagcacgctcaccttttacttgagtaattcaaagtacatagcatttca

SEQ ID NO: 309152 - DNA, 1000 bp, Homo Sapiens; identical to SEQ ID NO: 120039
  misc_feature (156)..(156): n is a, c, g, or t
  misc_feature (320)..(320): n is a, c, g, or t

SEQ ID NO: 309153 - DNA, 1000 bp, Homo Sapiens
taattattgaaatgttaaggcaagatgtatctaggtataataaaataaggaaaggtagcagttgaaggtaattggagagtgcattccctgtctaaagttttttagacaaaaaacattgaaaaaaaaatttatatacaatgactcaaatgagaccccttagacctatcgggtcttggtgcaatggctcacgcctgtcatcccagcgctttggaaggccgaggcgagtggatcacttgaggtcaggagttcgagaccagcctggccaacacggtgaaacccccatctctaataaaaaattaaaaaaaaaaaaaaagcgaggtgtggtggcacatgcctatagtcccagctatttgagaggctaatgcaggagaatcacttgaacccgggaggtggaggttgcagggagctgagatcgtgccactgcactccagcctgagcaatagagtgagactctgtctgaaaaaaaaaaaaaccctattggtttccaccgtaggtatggaagggcataaaatagagcctgctcagggtacctaagagggaagacggggctggctggcaaggattgaggactggggttagcacagaaagaatactttcaataacttacctggatcccttcagatctcttttaccatctcacagtgcccctggcctgccttctgtgttcttctactttcggacctgtaccctagactctctttggaggactcccaagggctcctgaagctgctttgccctcctttgcagagagcaagaggtgccagggatttatgtcctggcagggcagtgctggatcaatgacttagtaggaggtctggaaagcctagtgcccttgccttgagtctggacacactttggagttgcagttcacatccaggctgcagctggggctctcccagcacttccttcagtcacacacacatggattcttgtcttggtgtctggtttgggggaacctgacttaagtcacttttgtggacattttggagagctgtgtaaa

SEQ ID NO: 309154 - DNA, 1000 bp, Homo Sapiens
tatgctgttctcataatagtgaataaatctcacaaaatctaatgggtttatcaggggtttccacttttgcttttttctcatttttctcttgccgtcaccatgtaagaagtgccttttgcctccctccatgatcctgaggcctccccagacatgtggaactataagtccaattaaacctctttttcttcccagtcttaggtgtgtctttatcagcagcatgaaaactggctaatacagtaagttggtatcagtagagaggagcactgctgaaaagatacccaaaaatgtgaaagcaactttggaactgggtaacagccagagattggaacaatttggagggctcacagaagacagaaaaatgtatgaaagtttgaacctcctagagatttgctgaatggctttgacagaaattctgatagtgatatgaacaataaggtctaggctgaggtggtctcagatggagatgaggaacttgttggaaactggggcaaaggtgactcttgttatatgttagcaaagagactggcagcattttgcccctgtcctagagatctgtggaactttgaaattgagagagatgatttagggtatctggcagaaaagaaatgtctaagcagaaaagcattcaagaagtaagttgtgtactgttaaaagcattctcttaaaagggaaacagagcataaatgtttggagtaattgcagcctgatgatgcagtagaaaaggaaaacccattttttgagaagaaattcaagcaagctttagaaatttgcataagtagcaaggagcctaatgttaatccccaagaccatgggggaaaatgtctcctggccatgtcagagaccttcatggcagcccctcccatcacaggcccagaggtccaggaggaaagagtggtttcttgggttgggaccagggtctgcgtgctgtgtgcagcctagagatttggtgccctgtgtcccagccactctagccatggctgaaagaggccaatgtacagct

SEQ ID NO: 309155 - DNA, 1000 bp, Homo Sapiens; identical to SEQ ID NO: 120040

SEQ ID NO: 309156 - DNA, 1000 bp, Homo Sapiens
gcttccaatcttaccccctctaattcaccctctactcttcatttgagttctgataggagagaaatcacactcaaaaggtaaactaaagagagttgaataagcaggtactaggaaacaatagttttcccagaaaagactcaagtaggtgattgctcctagaaaagccacacacagtttgtccaggtcgcttcacagtgaccgtagtaggccagatgcaacattctgcggttgatccagagcatgaggctgcgatgaaacatactacaacctccactaccaaatgttacattttgatgtcctctggcccaggagatcccccgtgaaataagtagttcactattgcaccgtgtcagagcacacagtggaaagaccagagccttccagaaagacctatataggcaaaaggcttcagccccttgagcctcagttcactcatctgtcaaacggagataatgtatatgtcgcaggacaatggtgaggaatgaaagagtgcatgcttgtgaagtgcctagcacagtaaataaggaaatagaaaacctgaaaggggaggagaaaagagtatagttaccagggcctggcaagatctgtggttgtgagaaagagatggccattgtagtaaaactgtgatcatatcagggagaaacagccacaatcaagaccagcacctgcaaagaggagcagggtggaatgaaggttaaatacccagcttctctcatctaccttcttctaatgtccacctgataccagagggccaggtgcccacatgatggagtcagcagacacttagaatggatctggaaaggtaaaaggagactacccagcacaaatgattccttctcagtttttgctctgtttggctttttacaatcaatgctataatgaatgtcatgtgtatatctttgcatactgggcttttaattctgtaggatagattgctagttgtgagactgtcaactctaagggttttagaagttctcaatgttttctgatgctaccaaat

SEQ ID NO: 309157 - DNA, 1000 bp, Homo Sapiens
taagctgctaactcctttcctcaagcaagtatactctttccatttatatgatagttgtctattcctgtgttttgttttgttttttattaaactcaagtctccttgaagacagatttttgctttatgattaaaggcatcagctttgaagccaggacacaccagtattgaaattagggtgacaaactcatcccaattttcccaggattttcccaacgttagcacacaaattcccacatccatagaaagttcttagtcctgggaaaagaagaatatttggtcaccctagttgaaatctcatctctgccatatactgaccacataagttgggattccagtcattagatttcccagtgtttcattcaagacctgcttcttgaatgtccataatgtgccagacactgttttcagaaagctctccttgtttttctgatcactctagcactagctgtttgatttcccgcaatcgtgctaaagcttcccctggactgccttctgcgtgaccccctctctgcaccccatcactcagagatgatgtcagaggaagcctggccgcctgacgaatggggcttgggaaatccccaggagttttcagacactgtttctggcctgaaaaacaaaacactcgtgaaacagccaagggtcccaatctgctcagggaacatgttgtcctctcctgtttgcagggccatttcttggacaagcagcagctctgtttgctggacttttggccccatgcagtcactgtgaggcaaggcacatctcacacaaacgggccagtgaaatgaggtaattgcggctttcgatgaatgctatttctgtctcatgggctatgctggctgggatatgaagaacaagagttagtgtatctgacacattatggctttctccacaaagtggaaatagataacgcaggaatgggaaagtccctctctgttttcttctcctaatgatgagtgaatattccatgcacatgctattttcaggcaagacctgcaccatg

SEQ ID NO: 309158 - DNA, 1000 bp, Homo Sapiens; identical to SEQ ID NO: 120041

SEQ ID NO: 309159 - DNA, 1000 bp, Homo Sapiens
ggttgatgaagaaaactgacatttattgaattcctaaggatttaacaaattcattttgcattcaacaacaagaaaaaaagtaaagcagttattacatgtcttgtactagacaggaagctgtagctcaagaaggttaaatgtgtggtcaatatcaaacagctactatgtgttgaaccaagacttgagttcagatcaaattctaaaatgttttagctacatcccagtgcccatctgttgtgtgcgtgtatgtgtttgtctctgtgtgtgtgtttgtgtgtgtgtgtgtgtgtgtgtgtgtgtgtgtgttttctaaacctattcctgcttttaaagaagggaagagggtttgaagggattattatgtgtactctctgcctaagagtttgtttacaaaataaataatcaataaacataggattgaaactttttataaaggaagttcaaatttttggggggtacacacatttattaagtattcagtgtttcttctatacattttctacaatacactagcagcaattgtcatctctccatgctgttttggggagtatttgggttctttgggattggaacacaaacaaacaaaacaaaacaaatacaaaaagtatttttactctgtcttagatgcaccaagcaggggagaaattagtcagctggaactcagctgttgatgctttggctaatagtctacaaacatgccaaaaatattcttccttttcagaaaactgttagctaagatcatgcaaaagcctgtaagaaaagtcgagaaatttgtatagttctcactctcaagtcaagcctggaaaatggcttgccccagtggctggaagccagcgagtgtgattatgttggaatcagagatgaagagagaaagacatctgagcccacatttctttcattaaacacaccagttcttctgccaggatcatggagttattggatttgaccatgaggaggcataacgaaacccaaaccacaggaaacaacattattgaatagc

SEQ ID NO: 309160 - DNA, 1000 bp, Homo Sapiens
aggttttagaatgaagagctgtagtcaccaatatgataagaatgcagataaaaccagtcttcatttattgaccacatcagacaaagttctagatggattttatggatggtattttatttaatcctaactaggacacagaaacagaagtgataattatttctatattatatatgaggatactatatctcagtcaggtgttaaaaatttaccttgttactcaatgagtaaatgatggttctataatttgaattcaaatggttctcattccagagattaagctttttctgatataccaagcagtctctcaagttttaccttcttgggctttttaaaaagatgttcatttcttccttcacacacattacttctaaacagttatatatgtagaaaaggaagttcggttatggagaaatatgtgcttgctgttaaagttttatatcatccttattttgagtcattttctaggaaaactcataattagatgaaaatctagtcattgaacttttaagaacattattttgtgatgatgttaataaacataaaaataatatggccaggtcaagttgaaactatcccctttagttctttgtgaatgggagtagagattagacagttttttgaaggtctgtgagcccatgatggggatttgattccaagtgttctaggagattgacgtgagctgacttgccttttttatatatttctcattccattaagtggaaaacaaatgaaagggcccacgtagaggcagggaaacaagtaacgaggctagtgaggctatgttggtgatgggggagtgaaacagggcgagggactggagtgatggactagggggaagtgaaactgggtgatggactagagtgatggacaaaggagaaatggacaaaagaaaggctcactaggggaggtggactaggatgatagtctgggggagggagactaggggaaaatgaaacagggtgagggactagggtgatgatgaagtggaaatggactaaag

SEQ ID NO: 309161 - DNA, 1000 bp, Homo Sapiens
ggttttgatgaccttgacagctttgtggaatgctgctcagatattctgtaaaatgtccttcagtctttttttttctttttgttctcttctgtcatgattagagtggacttgtgcattttgaggaggaaaatcacagagataaaggaccattttcatcaagtcatattgagagtactgtcttaatctgtttgtgctgctataacagaaagccatagactgggaaatttataaagaacataaatttatttctcacagttccggaggcaggctagttcaagatcaaggatccagcatatggtgcatctggtgagggccttctagccatgtcctcacctcaaatggcacgaggcagaagggcaagataggatgaactctgtgacctcacatggtagaagagcaaaagaggaagaacccaattccatcagcccttttcatagcagtgttaatccatttatcagggtggagacttcatgacctaaacatcttccaaaactctatacctcccagcactgttgcattgggaattaaatttttaacacatacattttagagaaggggacacattaaaaccatagtatgtattatatatactatcaacctggtttgtgactatggatgttaaccttgaacacctggctgaggtaccatttgtcaagttcttcatgagaaaaattactctttattttcccccttccatatcatactctttggaagaagccactgtaagaagaagaaatgtagtttccatattttggaagtggaaattattctccacctccttgagggcagagtaactacataaattatttgaaattcatcttggcatttgtcttttctccccaatttacttattcaatcatttatttacatcaatacagagtcatggatatttatcttatgtttaatgttatattccaataccgttttatttatttggttgctcaaattgttacagttttggccattgaaaactctttcaattagcttctgtgtccttttg

SEQ ID NO: 309162 - DNA, 1000 bp, Homo Sapiens
gccattctaactctttatgcatatatgtatgtatgtatttgcttgtttttaattgagtgcataaaattagatgaaatttaattcttggttcatgacccaccctaacccttgatctatgactgacattcatatatatatgtatatataaaagaccttcatatatatatatatatatatatacacacacacacatatatatatatatatatataaaatgtatcatgtactgctatcccttttttactacaatacttgatcttttatggatgtgttccctctcttttaatcatttttagtagaagagcaatcgtttcaatgtcaggtgactcaggatcttattctgctttgtgtaggatctttagatctcattctgttctaatgtaaaatgaaaaaactggaatcaaatattcttaagatcacttccagatttgaaatataatgtagcctctaattatcggagtaaggcaacaattcccatctagtcatccaatattcagttagtttccttccttccagccctcctccccagggactcccttaagttcctgaggattttttcctaaaaggtactttgactctgtttcttcgctcttatgatatactccttcagtgttcattttgtttggtaattactaaaagcgtttttccagaaaggacataagattctactggaagttagaaaagtaacatcaaagtagagccctaaagattgagactgatttgaatgtgggtgagggtggttaaaagtacatctcagagtcaccctgacctgggttcctatgactctcagcaagttgcttaatttctctgagtctctgtgaccttaccatggagttgtcatgaggattagattagtgtgttgcatgacatagtaggtgctcaatatataagtaccctcttttcatttccacagatctaatttttaatggccctttgagctttttttctcagcttttctctggagccagagccctatgtacttcttatgtcaagccagatg

SEQ ID NO: 309163 - DNA, 1000 bp, Homo Sapiens
aagtcatactgatggtaaatgtgtatcgaatttagagcacaacttacactaaaatttaattacaggttgtgaaatcattatctaaaatattaatatatacataaggagggtaagcaccttatgacttaagcttaaatatgcatttaaaatgcataaattaaagtttattggtatgtagttaatatgataggtcaattaaaacctatctgaaatctgtagacaagtcatgtgattttgcgggggtctgtttttctgtcttttaattaggatgtttgattcttgtcccataccactgtgaaggtcaaataagaaacaaaaaagtcatataggaggaaggggagagacaggctcattaccctatggaaacatcacattttgcttcttccagaaaactctctctgagctccttaaatactcattattgatcctattgtttctatatcatagcattcgtttatcattgtctatctcttcaaatagtctctataactaaactgtgttatatttctttaaaacttcatcctctggaataaaaacagctatcatagtttctatgtgttgcctacttattatatgctacgcactacgtatcatattttgtatttacagtctcaaccaaaagaacaatccctcgaataattatcctccttgtgagatgaggaaactaacacttaggaagattaagctacttgccgatagtcacaatatttttgtcatggagtagggatttgaaccagttctgtctaactccattccaagacagtgctttccaaagacagaagccccaagctttctcaaagtacagcagaatagaaatcaaaagactttgttttggatcacaaagaccttacatacaaagaccagttgaaagatttggaatttgtgtttcatgacttccaaatctttgtttttctgtattaatttcatagtatttccctatgaaatactaccgttgactcattgaccatggacaagccatttcctctttctgtccacccat

SEQ ID NO: 309164 - DNA, 1000 bp, Homo Sapiens
tgactttgggaacatcagggtcttcctagtcttggaactctctactgttcagtttttataacaaatttatatgtaagaaatacgggtcctaggaaacagcctgaaggacatgcaatccattcactccaaattttacctctggggcaagctcaagagctaattgctaggcccgcattttttgggtccctgtataattgcctttcctgaacaatgctgtggtgttactcctttggcttacagtgaaggaagtaattagccctatattaaacttgttgttatgattactatacggttgctgctttggctgcggcccttaacatcacagtgccctggtaaactgaggatccacagataaaacttcttgtgggtctcacgactaggaaaagccatgcttctcctgagctgcttctggcttgcttttcactataaactctgttaatcttgttactatatacacttcatttgtcctacctacttgtcacaaagtgaaatatgtgacttggctgtagcaattgtacagaacattatattatgcatttgatgtggtggttttccctctagtttttttcccccatgtattctttataggtttatacctgagcacttcttccagtttttattatatattttatttctttatttttatgtttattgcatgtatcactaagatggctcaaatctggttttgaaataagaaaggtctacaaataaagaaattttgggtctacgcagaaatgatatgctagatattttgttttcaatcataaagagagccacccacatcttgaactcattgtactaataactgggaactcgaaacaattttcacaggactatctacacctgcaggcactggaatctgtgactagtccttcacgaggactgccatagtgctaggcctacacttccaaccctttttcctcttcttctccttcccctttcatttgttatgctgctggtctttctcacacttattaaggccttcgtgcggttcttaaag

SEQ ID NO: 309165 - DNA, 1000 bp, Homo Sapiens; identical to SEQ ID NO: 160488

SEQ ID NO: 309166 - DNA, 1000 bp, Homo Sapiens
  misc_feature (168)..(168): n is a, c, g, or t
  misc_feature (262)..(262): n is a, c, g, or t
  misc_feature (271)..(271): n is a, c, g, or t
  misc_feature (282)..(282): n is a, c, g, or t
  misc_feature (318)..(319): n is a, c, g, or t
gatccccaggtcttgttacaaatgaccaaaggttagcctagacctttggtcaggtggtgaaggccctgggtaatgcaggttctagaaggggtgggcatgggccaggaggttgctagagataggaatgggaatcgagtgacgtagcagtactggatgagtcaccagggnggaatggccaaaccagatgggtgagaacaagcccaatgtgatgcacacctacccttgctaaataaactctgctggtcagcctctagcccacaancccctcttngtccgcatgtnttgtaataacaacacaactgtagctgacccagcctnngattcgaaggctttcgtggcagctgtgccttcatgaagaagacttcagtgttttcaactactgctagacctggggaggtccaagtcaagctccagagtagacaactgacataaggccaccagtcccagcgctttgcagggtttgctgcctcatgagcagggctgagttgtcaacctgtttctgaagtgaaagggcaatgacccaaaggttcccagaggaagttcctttgcccgtcaagaatgtagatacaaagacataggtggacaggaagtagaatttattggtgagtattaagaggggggcagcacattggaagccctcatgagtgcagggcccgccacttgtccagagggccacgactggggatgtacttgaccccacagccatctgggatgagccgcttttcagccaccatgtcttcaaattcatcagcattgaacttggtgaagccccacttctttgagatgtggatctaaggagcaatggaaagaactgagtcaggaggcctgggcaaaggtgggagaagggggctgcagcactacataccttctggcggccaggaaacttgaacttggccctgcgcagggcctcaatcacatgctccttgttctgcagcttggtgcggatggacatgataacttggccaatgtgaaccctggccacagtgccctggggctttcc

SEQ ID NO: 309167 - DNA, 1000 bp, Homo Sapiens
ttgtagctagaagtgacacttaagtcaaagtcggcaattccaggggattctctgtgacctacaggaccccaaattaagggctagcttcctgcctcagcaacctgagcattacctacatatgattttcaggatgagaagcttctcctacccagataccacacaccaacctatcacttaccattatctcaaactctattgaaagcaatgcattcctttgagataaagtttcctctatgaatgctctcttaaaatggtgatcaccacatcatattgtctacattcaccatgctagtattactgccagtggagttgaagccagtaatcctgggttccactttgaggctataaccttaagcaagtcactagatcagtcccttaagtcacagttaactgaccacatacatcagaataacctggatgggccaggcatggtggcttatgcctgtaatcccagcactttgggaggcctaggtggatggatcacctgaggtcaggagttcaagaccagcctggccaacatggtgaaaccccgtctctactaaaaatacaagtattagctggatgtggtggcgggtgcctgtagtcccagctcatcaagaggctgaggcaggagaatcgctttaatccgggaggcagaggttgcactgagctgagatcgtggcattgcactccagcccgggtgacaagagtgaaattccgtctcaaaaaaaaaaacaaaaacaaaaacaaaaaaaaagaggataacctggatgacttaccatgattttagattcctcagtcccacctactgaatcgatttttggaaatggaacatgggactctgcattttcaacaagcatacagggaattcttatgtaacttgctcagatatacagggctaggtctagtcaattccatctatgaaaatattaagaacctttgcttcagatataaaaatagacaaaatgagaaaaaaatgatatggaaagactggttcttagttcttcctgggtgaggtgat

SEQ ID NO: 309168 - DNA, 1000 bp, Homo Sapiens
ttcacaaagtagaaagctgccaggcatgtaaagcctggtgttttccttgttgctagcatatggcctctagctacagaaaccctgtcaagttccaaacaggaaagtttggaattcctgcttcagaatgaaccaatgcggaatagggtttctcatgtaaagacttaaagaataaagaggaaataaaaagtaaaagaaaacaaagcaaaccataaaatcttgcctgtcacagctacttaaattgactagatattttctgtttctttcagccttttgttggttttggttgcatgtgtatgtgtgttttttaaggatttataatttagtgctgctattacattttcaaagatcacacaataatcagttattctcatgaaaagaacatcagttagaaatcaaggctaatagttggactggaatcatatggtttcaaaagagtacagtgtattaagcctttattagatgctagaaaagaggccaatatgctcattttttacatagtaggtgatatttagtcaaacagaagctcaatcaggcattgcgcgcaatgagacgatgagagttagggaggaaaagtattcagtctggaaaaaacacaaatcaagtttttacatgaaaatgctgttcttaaaacttgaatttttaaaggaaagaggacattactgataaagatgtgaagttgcaagaagaagatatctctgcagggtgccttggtgattaaaaaacacaaagtgtgttttttctttaatccgaccaggagctggtagatagcctagtcaaggacttagcagggtcccagtttctaaggtaccagagtcattaagaaggaaacaaggatttttctggtacaaagataatggtatgttatgggtagccgtgttctcatgtcatttcttttgtcatcattgaacccctaaaagaaaaaggtgctaaaatacaaaaatttaatctaaacccaaaagtgagcttttggaggaagaaaaaatattcacacttaggtaaa

SEQ ID NO: 309169 - DNA, 1000 bp, Homo Sapiens
gccctcaccttggccaaggagcagtacacacgactccagctctgcatttttccgctgtattttcctttccgccaatactttcacctccgctgggcgcctccgccgctccgccaaggtctcccctccctgcgcatgcacaggcgcagctacgtcatcacccgggagcagcgcgattggcccgcccggttctaccgcacgaggcgttcctgtcaggctcggcgtcgtacgctgtcgtaaggagcgcagggctttgtcgcagcgggggtggtggtgggaatgctttaggggctggtgccaaaatgtcgagctacaatgtattcttatacttagaagatgaaataaacaaataaaactagcgtttgcttaatgcacattatcgacagtaaagcgtgacaagttcaacaagctcttggttgtgctaggcattcctcggcacttcctacagacatctcatttcatcctagcaacaaccatatggagtattattagtatttccatttcttggatgagacccagagaggttaaacagtgcccccaaggtctcacaaaggagagataactgcggccctgaggccaaaacctttggtattatctactgctttatactcgctcctctcaaatgccatataagggatggggctacagattttggcatcaccagcattctgctctaattagctaactgacaatacgtagagaacacactttcttctatttctttagttgagaaacacatctccctggtaaaaagagagtgggatggtggatgagattttaggttttgagagagaatctgttgaaaagggttgaaaaacattgtcttcaagattgagcacgaaagtctaaggtctcattcttgccttgcaataagtctatatagtgtgaataaacttaattctacatttattggaagtctaccacccaggccttgtgctgggctaaacactggttagaaattactgcctatgttcagatttagatatgaataattaaatttagt

SEQ ID NO: 309170 - DNA, 1000 bp, Homo Sapiens
gaattctttgccctttatggaatgtgatatcttggtttttattccatctgttacttcccttttacttaattttatcttattgttttgcgttgtgtttctaaaataatggctttggcttgttttttcctgaatgtttctgcagtttggtttgagtatctgggtttgggcaccactcctgaacttggactccatctgtacttgtgacttttggaaggcagagtcagtgttttctgtggaagatgacatttttttaatattatatatgtgtatctccccctcccctttttggtttctcttaaaagactggaaagaaagcagttaaagcagttctgtgggtctcagcagatggactcagagttgtggatgaaaaaactaaggtaagattctttatttttattttgatttattttattttttttggagatggagtttcactcttgtcacccaggctggagtgcaatggcacgatctcggcccaccgcaacctccacctcccaggttcaagcgattctcctgcctcagcctccctagtagctgggattacaggcatgtgccaccatgcccagctaattttgtatttttagtagaaatggggtttctccatgttggtcaggctggtctcgaactcctgacctcaggtgatccgcccacctcggcctcccaaagtgctgggattacaggtgtgagccactgcgcccggcctcgcctggctaatttttgtattattagtagatacggggtttcaccatgttggccaggctgatctcgaactcctgacctcaggtgatccaccggcagcctcctaaagtgctgggattacaggagtgagccaccacgcctggcctaaggtaagattcttataagcttaaatgggactgctcatatgttttttaaaatctctaatgatcaaatataatacccttaagctgttgaagggtattatattgttgaagctttatccttccacttagtccaaagtacaatctcctgagagactatt

SEQ ID NO: 309171 - DNA, 1000 bp, Homo Sapiens
agtgtctgaaataaaatctagtttggtaggtggtaatgagttggcatgtacaggtagagggaaggttgttgaaggatctggggatacaaaagtaccaatattcagcgaaattagagccaaaaaggagattcctacttaaacaagtgggacaggggtgctatatatggaaaggagtctgattgggatacagaaaaagagggtctatgagatatgacatgaatgaattactttctttctccactcccagcttatacattggcaaggtggaagtatgttttcttggggggaaggtggggttggacaggcaagtttatctctgctgtattgtcccatgcttgttcagtaacttgttcagttgtctcagtctgtaactcatccccatagtgggagttcctttattcaacctaccagtgtcagatctggcaagaactcagagaatcctactaatgggacagtgggaagggggttgagaagttcacatataagacaatgcatctgcattgttttatgtccattgatcttattggagtactgggatacgaagacctgacctgctttttagctattccccagaagacagaaaagggaaaatttttcaacccagtcaaatttattagagcaaatgagttgaggggtattctgacaaagagaaatatacaaacatagagccttcctatgctttggataataatgaattactcattgacattctgaatgctctgccataggattggcctcttccacagccaacaaagttcagccagggttcaatcttcatcccatcataagggaatgcaagtccaagctcacatcaatcacaccaggctatattatttatttatttcccattgcaatacacacgtgcaattagccaatggcctttttcccaactacgcttccgttgggttcacaactttccctagaaagagaatactccttgtgcttctctccaaaatcaacaacatgaaagatctatcaatttggataatagggtgtagga

SEQ ID NO: 309172 - DNA, 1000 bp, Homo Sapiens
cctactgatgatgccagagagacctgaaggaaatgggggctggcctggtctctcaaccctgctgagggttctttgcaacactccatgctacccactggtactcaagctccttctgctctaccctgagctaggcctgatataatggttgacagacaaaactatcttttaaaaaatttttttatgtttctgtcttttcctgtgtcctcacatggcagagagaagcagcaagagacggccagacaaaacatcttaatgggatacttagtctctttgtttcattcaagagggatctaccaaaagggatcacctcctacaaatgctaaatgggtttaaggtttatacagcagctcatgtgggttcagggatgcacaggcatttcccaacgtgtcatcatccctggttctgataaaatccagagtggggcctgtaaatcagagggcttcacccctgaacccacagcagcaccaccaagacacagtgtccccactgtgcacaagattacagcttctctcttgctgccctttcaatataccagtccttactcaagcacacaaaaactgtgcttttgcccctggcatttgagaagtttgtgaatagacaccagcacttggatattgatttttcacacgatggtgacttttaaattcctctattgctcctgactgagtttagcaacctcttgactattctggaaaaccaaagaacttcggaaacaatcaaacaaatattaaattcaatcacccagcaacactggggaggcaaatgaaattttactcctaagaatctaaagcccccatagtaaatatttctttgctggctggcaaatgaatgtttctcagcccttctcatgtctggagacaccaagtaatgggacagctcttaagctgtccccatggtttgtgaccaagactgggggctactttggccttcgtggaagtccagcacacttcaactgagctgccagtggtgccgaatcctggaaaatgctgagagccctaaa

SEQ ID NO: 309173 - DNA, 1000 bp, Homo Sapiens
gaattcggatcacgccactgtactccagcctgggcgaaagagcaagaccctttctcaagaaacagaaacaaaaaaccccaaccacatctaaaaagaaagcggctaagattcaggtggttggctccaggcactcaagctgccaggccacgcttggccaccaatagaacagaaacacagacccactcaagatgtgtcccgctcctgttgagcccctgccatgctcatccgcaggcggcacaggcacacaccgactgggcagacagtgggccagcgggggccctttctgcatggccccctcccttcgtcacaccctgtcctccagccccctgaccccgtctgcccaccctggctgggactttcccctggttcacaagccttcatgcctcatttcttcaggactcagctccctgcaggtggctgcaatctcacccagcagacaggccctgtgtgggacggggctcgccgttagggctgcaaccctgtgatgcagaacccacagcagcccggttgtggcaggagggcgggggcactctcacgttaggctcctgtgggcagagctggcagaggcactgtttcctaagccagaggcaggtgtgggacagcccaagggaggaggcagtgctccgtcaccacccaggttggaaggggtagcaggcatgtcgtgtagccgaaagctccctgggagcacctgatgggcagaagtgtgagccggaacccagctccccagcacccccggctcccgagggcacacctgctccctcagtgccactgttccccttagcctttaacttctggtgcccctgagcaaaacgagactgggagcaaaatccccctcaggatttgagaactgtaattcagaaatgacttttaagcacagagtgttttattttgcttggaacctttgtgcaaaaaactgaatcatctgccagagtaaacacatttcagttcataagcagcacctttgaatgaacactgaaaagggaacgtacggttcggtcta

SEQ ID NO: 309174 - DNA, 1000 bp, Homo Sapiens
tctgggccacactgagtgaattttaatgcaggatggaagcacacagatgggtgatcaggtctctctttactgaaacacagaacatgtgccaaggtgagtccaaggacacctctgggaacaggtgaagcccctccccatacatacactccggtggatgtgagcgagggtcctgttgccacatctggggttaggggcttggacatgctgcccttcatgggaaccttctgggtacctctcagcacagtaacgcagctgcagtctgtcggtgggggcccaggctaggggcagcaccctcttttggcatacgggacatgcctggctgcagctgatgtccgttagcctctcctgacacgcagtaaggagacctggaagtgaggcgcgtgggcgtggagttcccggtggagctggagagcaaaagagccagctgtcctttcagcccatctggcccatgagctcgccagaggcagaggacaggaagggacactggggcagagtgcatgcggaggacggcaacccttcctgggcctcctacatgctggacacaggctggtgcctcacacacattatgtcatctaaacctcacagcaaccttataaagcaggtgttaggatcctcattttataagggatgaaagtcgcatagaataacttatccaagatcacacagttgggaactagaattcacacccagatctagctggttcctaagctcattgtctaatccctgagcccaaactgttgggctgtccccggacgagaactgatgcccaaccccatgtggcctggtgcctgcgcctcagctgcctgacctgctcctgatctcccggtttctttccgattcctgaaatcatttctggtttgggggcttagacctgagattcaaaactggcttcccagccgggtgcggtggctcacgccaataatcccagtgctttgggaagcagaggcaggtgggtcacctgaggtcaggagttcgagaccagcctgaccaacatggagaa

SEQ ID NO: 309175 - DNA, 1000 bp, Homo Sapiens
aggatctcctcaaagagtctcagggacaccccccctgactctgcttgagactatgctttgagaacagattctaggtgtttcagagcaagcagccttgtatagtggaagtactagactggacccaggtaacttggtctaggcccagatctgccactaggtggttacaagatcttggacaagtcactttgctcagcttctcatttcttataaaatgaaggggtaggattcttataaaatgaatgggtccatagaattccttctagttctagcattctaggattctatatttatagtggtgtggaagccccttttttttccttcttatgagcactaaaatttacccaaacttgtaccatcagggcattccaaggtatctgtgggtgtagttctaagtagtggtacttattgtgcaattttgttctgctgattctacttaaaggagtggattaggtagtaccattcatattcatgtgttatttttgtatgtaggtgcagatgtttgtacatgcctgtttttcattctctttaccactaatgaatttgtttgtgcatttgaatgattcaggagtaagtgaccataactggatatatccttaggaagggataattagccatctttcatgaattttttttttttttgagatggagccttgctctgttacccaagctggagtgcagtggcacaatctcagctcactgcaacctctgcctcctgggttcaagcaattctcctgcctcagcctcccaagtagctgggattacaggcacctgccaccatacccagctaatttttgtatttttagtagagatggggtttcgccatgttgaccaggctagtcttgaactcctgacctcaggtgatccacctgcctcggcctcccaaagtgctgggattacaggcatgagctaccacgcccagttattacatggatttttaacatgataatgaacttctattccatatacttgggtaaacttgctctctacaaaactaagaaag

SEQ ID NO: 309176 - DNA, 1000 bp, Homo Sapiens
attgtttcgctttctcatcaacagacaacataatgtgtccttttttcatttgaaccattctgatgaattatataataatatctaattgaagttttagtttgtatttccataaagcttaatgatgctgagcaattcaagtttgcattgtcaacagtgatccttcatttgtgaaagcctagtttattttgcatacataagcgcactgttggctttattttttaaaaaaacaatcactggtatatagaagaactgcttgttcatgcaaataattgtttcacatggaaccttttgaaagtaaatactaacctgattccagatacttgaggtattttagtatgtatttactcaaaacaatgtgcttgtgcttctcttatataactatagtaaaaccatcaggatcagaaaattaatgttaatgcactggaactttctaattcttgttcctgttggtgttttaccaaaagtcccaaaatatatgctttttgtccctctcataatttagttcagaatccagaatcgcatgccacaactagctgtcatgtctctttcatcaacttcagtgtggagcagttcttcagttattatttgacttccaagacattgccactctttgagagtataggctgaatacttataaaatgtccctcaatttaggcctgtctgatgttttttgatgactaaattcagcagaggaatctctgctaggaatatcacagaggatacttttcatttttgagtgatagacaatttcaatgtgtttcatcagaatgatgtcatttgattactaggtttagatagtttgtggctgtcttctccattgtaactaggttcttctcaactatgtaacttagatgtattctgtgggtagattctttgaaattttgtaattattgtaaactaaaaataaatcctaagcctgcttggacaagggaacctcagcaaaaaccttaaaaactattcctggccacgagaggatgggaggtcagacacgcctctttag

SEQ ID NO: 309177 - DNA, 1000 bp, Homo Sapiens
atgtagggaccacctttcattcttttgagtaccactgttctcttgaaaaaatattctaaccttctaaaatcccagagttaagaaccatttccaaggggaaaaacaaatccaaggccacaacataacttctgaacaagtgtgtgcgcgtatatatatatgtatatagatgtattaagttggtgcaaaagtaattgcaggttttgccataaaagtcatggcaaaaaccacaattacttatgcaccaacctaatatatgtgtgaaacagagaaaaggatgtcaaactacttaatttaatttctgtaaaataaacttctgaaatttgaagcaaacattttgcttgatcaaaatgtgttcttcttcgggttgtttgatccccattccatgcaaaaaacaaaaccaaacaaaaaaagaaactgcaaaagccagaaagtgttactacgtgggaaataaggcttcaaatacctaaatgactttgaaagtaggtatgaggaaaaataaaataggccaagcttgggcggaaactgtcccccaaccagccattgccatggcatgtcttacaaaacgatccttttatccttggtctcaaaaaatcagtaccagaaagactctcacctctggcacataaattcctgctacaaaaagataattatacttcagcaagttatgttctaagcttagctttctccaggctttataacgcagaactcaggttgaagctttctataaaactctaaatgacactgttatacagcaccttgtgctttgccaattaaaaaaataaaagaatctaaaattaaatattacagaactaatggataatacaatagcatacgtgttagaatccaagtgctagcctctgggaatttttcattatatttattttctcccaactgttccttttttttaaaaaagtattgttttagacagtacatatacataaatttaggtagggaaatctgttaaatatctctctggcacctgatacctaaagaccctgac

SEQ ID NO: 309178 - DNA, 1000 bp, Homo Sapiens
gttggtagacttctcctctccccaccaatagagagaatgctagggtataaaaattagagcctagttatccgtctttgcaaatattattctccacctttgccattattcaaggcggtgtttataataaaaaataagtacaaagtaataatttttttctcttaacagtgatggtggcctgcgttttggagaaatggaacgagattgtcagattgcccatggagcagcccagtttttaagggaaagattgtttgaggcatcagatccatatcaggttcatgtttgcaatctttgtggaataatggcgattgccaacaccaggacccatacatatgaatgcaggggctgccgcaataaaacccaggtgtgtatagactttactggcagttgatatttgtttagaggaaactgtgttggtctgattatccaggcagaattagtgtggcagaacagattggcattttcacaattttgatagcatgcttctgtgagattcctagttctaaataaggaaaagataatttgatttttctaaaaaccagtttaggttttagtgtggtaatttctctaagctattcatcttttggaaataataagactttgtacaagggattttaaacaatgagtttttgaaaaccttttagttgaggtgggtgaatataaattatgtctggcagaatgggtaaaataccaaagcctactaggagaaagaaccaccataagctgaggtagcagaatgtgtgttctcagctccactcatttattcattatctacagtaccagatctttgtctttttctggggtagagaagtggggtcacttcaatacaattctgctaattaccatttgttttttcttttcagatttctttggtgcgaatgccttacgcatgcaaactattgtttcaggaacttatgtctatgagtattgcaccgcgaatgatgagtgtttagctattttacaggagtcaacaagataattaaatatcttggtgtcttgtttc

SEQ ID NO: 309179 - DNA, 1000 bp, Homo Sapiens
caaagatgatttaatgtgggaaaatctattaatatacctcatcaaaacatcaaatgagaacaattatatgaatgctttaatagatgcccaaatggtatactgtttaaagttccagagccatttctaattcaaactctttaaaaactaaaagagagacactgtctttcagataaagactatctaactcccaacagcaaacttaaaactatggacattcccattaaaataagaaaaaaaaatgtctaacatcattattgttaacattgtcctaaacatttcagataacaaaacatgcaataaaagtgaaataaaactatcagaagaaacactatcattattcactgatgatactgaagtttttcctagaaaacccagaacttactgaaaaaagtatttgaattaagtgactacacaccaggaaaatatcaatttatcgtctgataagactattaagtatatacctatcatgtctctccacatatctccactactattacctggactctagttagaatcactattatttttttgtctggatcactgcatcaggctcctaattggactggcttccctatctccagcctggtgagattttacacactaaggagatagtgatgtttctaaaaccaaatctgatcatgtcattcctttgcttagatcttctcatcgattcttatcatatttaaagtaagatccaaattccttattatagccttatttatgtggctctatacaacgaggtcttatatacagaaatgccattcttgacactctagctgcattgtcctttttgttcctcaaacatacaaaagaggctttatgtttgctattcactccacctaggatgttctttccttgaatctcacaaggatagcccattctaaaatgtcaatcacatgttatcttaaatgttacttctttaagaggtctctttggccgtgcagcttatagtggtacggtgcggcacagtgcagtggtatagtggtgagcatagctgcct

SEQ ID NO: 309180 - DNA, 1000 bp, Homo Sapiens
aatctgctcctagatgactttatttctgcttattcagggaagcagcttctgtggttttcaaaaggtaaaaggaagaaaaaaagctcctatttcccagtatcctgcattgtgaacaatttctacttgccgagttagtctctgttttctttccatatcccagctcctatacctttgcagtctctcagcttaacctttcccctcccatttttggaattttacttttttttttttttttgagacggagtctcgctctgtcacccaggctggagtgcagtggcatgatctcagctcactgcaacctccgcctcctgggttcatgagattttcctgcctcagcctcctgagtagctgggattacagacgtgcgtcatcgcgcccagttaatttcatatttttagtagagatggggtttcactgtgttggccaggctggtctcgaattcctgacctcaagtgatccacccacctcggcctctcaaagtgctgggattactggcgtgagctaccgcacccagcagaattttactttttctttaagggtcaatccaagattacactgcttatgaattaattatataatcatttgctctcttgttttcctaaatattagtcttttctcttaactagtgtacacatgctttatgtgtaggaaccacattttccttgtttattctttagcgcttagcattaataataattagtgagtgaataatttcatgaataatcaaataccttttgtaacaaatggtacttcgaatacttgaattttcttctctttccttctttttttttttgagacagagtctcactctgtgacccaggctggagtgcagtggctctatcttggctcaatgcaacctccacctcctgggctccagcaatcctcccacttcagcttcctgagtagctgggacctcaggcacacaccagcacgcctggctaatttttttgtatttttgtagagacggggttttgccatattgcccaggctggtcttcaaa

SEQ ID NO: 309181 - DNA, 1000 bp, Homo Sapiens
cttgttctgcacgaattactctttctccactgcatcccccgtctgataaatcggttctgtctaggcagcgggcaaggtgaacccattgggcagttacagtaagaagataggtaaatctgcaggtgagaatgtaggtgagaatgtgggcaagaacacaagaaaatacctagaaaagcatgcaggtaaagatgcaggtgaggacccagatgaagatgcagagaaaatacactcaccggagaggatgtaggtggaaaaaggtgagaatataggtaacaatgctgttaaggtaaagatacaggtaagcttaagatagagatgtaggtgttggggccaggtgaggatgctaaaaaacaaaaacaaaaaaccctggcggggcacggaggctcacgcctgcaatcccagcactttgggaggccgaggcgggcagatcacctgaggtcaggagttcgagaccggtctggccgacatggtgaaaccccgtctctaataaaaatacaaaaattagccaggtgtggtggccgtgtgcctgtaaccacagctactcgggaggctgaggcaggagaatcgcttgaacccaggaggaggggtcacagtgagccgagatcgcgccattgcactccagcctgggcgacaagagtgaaactccatctcaaaaaaaaaaaaaaaaaaaaaaaaacagaaaaacccacaaaaacaaaacaacaacaacaaaaacccatacatggattcagctgagggtgcagaggagtgagcaggtaaagattcagatgaaaatattggtaacattgggagcagggagaacattagggaaaagacctaatgcatcctggacgtaataactaggtaatagggggctgggtgtgatggctcacgcctgtaatcccagcactttgggaggccaaggcgggcggatcgcttgagatcaggagttcaagaccagcctggccaacatggtgaaaccccgtctctaccaaaaatacaaaaattacccaggcaaggt

SEQ ID NO: 309182 - DNA, 1000 bp, Homo Sapiens
tctgatggtgaatagctatctttctgagtagagttttaaggcaggggaagtttggaatgatgctgttagcacatggcccagctaccccagttttgtcctctgtggctctgcctgatgatattatcgggtctcctgaagggtcacctggggtggtccaggggctcatagccatggtgtacacccaggtgtcttgaattcactgacatttcctttcttttccctccatcacaggaaatgctgaaggatgaggtgcggactctcacttaccggaactccatgtaccacaacaagcacgtgttcaaggacaaagtggtactggatgtggggagtggtactgggatcctttccatgttcgctgccaaggcaggggccaagaaggtgtttggggtgagcacgccgcttcctcctgcatgctggcttccacagagccagcctcttgccctctgcctccacccgcccttctagaagtacaaaatttggtccatctcttttgctggggtcacaccttcgaggagtagaagaaatcaggtgtgactctcaggaaggggagcaggctgcctgtcccctgtgcatggctcctggatccttacaaccactgacatttgcggaggaactgtggctttcctgagaccattccaatgtcatcatgacctttcagtgcttagccccaaggtcagcttcagaggcagtgcaggtggttactcgggggagctctggtttgaatctctgcatttccattcactaggcatgtgaccttggactattcacttccctgcacctcactttttctccatctataaaatgagcttaatagcagtcccttgcccatagggtgattgtgaggattaaatgagtataatacatatgtaaagtgcttaaaacagtgcccagcatatggcaaatgctcggcgtctattattatagttgagatggggccctagagataatgggaacatctccttcttgttttctttagagggcaagtcggtcaacttaaatt

SEQ ID NO: 309183 - DNA, 1000 bp, Homo Sapiens
gatccttcccatcgtcatcacctcatggccaggctcacagctaagcagagcccctatctggacctcagtggcaggtgtggttttgtccccagcaacaccaggcagggttactggagttcaaggccaaggctgagtgggctcttgatgtctgcattgcccaccagccccatgccagaggaacaggcttgttttcagtgtggcacttgccccctgggctgttctcagagtcctcctggtttacccccagtcaaggagggatcctgggcttaaccccaccctcagtcactttgcatgtgtggtcctagtctccagttccttctgcttcttgtcaccgccctttccccctctccccttcttccctctacctgccccccttccagggtgcctaggtctcagcagcctccctgctggctcagttacctctcagccatctgctcccgcctcaaggcttgcattgattccctccccttccgcctagtcgcataccctcccaacccccccacccccaccctgatgcttctctttgttcttgtggcttctgctgtctttccttccaggactgctattttattgggtcttgaggagggagcagaggtgcagaggtataggcttaacctgtggaatcctgggggccaaggtggcttgtttgatttttttgaaaaaagttttaattatctgttttggtcaggcacagtggtgcacaccggtaatcccagcactttgggaggccaagacaggccgattgcttgagctcaggagttcaagaccagcctgggcaacatgacaaaatctcatctgtatttaaaaaaaaaaaaaaaggccgggcgcggtggctcacacctgtaatcccagcactttgggaggccgaggcaggtggatcatgaggtcagaagtttgagaccagcctggccaacatggtgaaaccccatctctactaaaagtacaaaaattagcagggcatggtggcgtgcgcctgtagtcccagctacttgggaggctg

SEQ ID NO: 309184 - DNA, 1000 bp, Homo Sapiens
gatcacttgagtgcaggatgttaaggctgcagtgagctgggatcacgccactgcactccagcctgagtgacacagcaagactctgtctttaaaaaaaaaaaagcggctggcctcggtggctcacgcctataatcccagcactttgggaggccgaagcgggtggatcacctgaggtcaggagtttgagaccagcctggccaacatagtgaaaccccgtctctactaaaaataccttaaacccaggaggtggatgttgcagtgagccgagatcgtgccagtacactccagcctgggcgacagagactccgtctcagaaaaaaaaaaatcctccatagtcacctgtagtcagcccttcctcctactcccacaccctggcaatcagtgaacagtttcctgttcctgtggttttgactttgcaagattgtcatataaatggaaacgtatggtagccttttcagtctggtttattttacttagcacaaagcatttgagattcatctagtcacgtgtatccgtagtttgttccttttattgagtggtggtccgttgtatggatgttccagaacatttggactatttctagtttggggcataaaatgactattaataaatattcacgtacaagttttgtgtgtacatagattttccttatacttgagtaaagagcaagcagtggaatttttgggtcatatggtaagtgtaagtgtaagtttaattttgtaagaaactcaaactttttcaaagcggctgtctcaccagcaataaccgagaggttccagttgttctacatcctctccagcatttgttatctttgaaagccattctaaaaggcatatttcaatttttattagatcggtattgaagatttacattattaaactatgtaaacaggccaggcgtgatagtttacacctataatctctgcactttgggaggcgaaggcaggaggatcacttgagctcagaagttccagaccagcctggtcaacatagtgagactc

SEQ ID NO: 309185 - DNA, 1000 bp, Homo Sapiens
cccatgtgctcaccttgtagatggccatggtggacctgtaaaactggtccatctcgggggccatggaggggctgtcccgggtctgagcaggaggctgggagctggtggcgatggcacagccgggagcagtggtaggtagtccctcaggtgcccacgactcagctggcagcgaggaagcctcggagagggacctggagatggaggcctgcctcagaggagtggcagcttaattattcaccaactcgggatgtcagaatgtgatctggggcgtaaccagatccggcagggaaggcatcctgtgccgggcaggctcgtgtgacctgcccttcaattattcaccccttggagctgtgggctgatacaagtgcccatgtggatgagccccctcctgggtcaccccctcctcaaggaccccaaccctggggggccccgccctcccacctgcctataccaggcattgcccaccttactgggcgggcgctgcccgatgccctcccccaggactctctctgccagacccagcagcagcagcccctggaggggaacgccgctttacttctcactgtcctcaggcctgcggctcacagtggggccacgccctctgagcttggctcccacagccgctctggcccgcccagctcctccacttgccggagcaggagcagcacaaacgctggagttgcccagccctgggcagacctcggccctgcacacgcgctgcctgtccacgcggagtccccggcctctctgggtgacaaatggggctctccctggtcctccaagatgaagttgaagattgtggccctccttgggcctgccgggggtatgtgggcctggcagctgcctctgcataccctaagggccggtttaggggaggcctagaggaaagaggaggtgtccctgcccagggatcctggaaaacagagtgtccgggtacaaaggaaaagtccggtcaaggccaagggtcaaggccgaggggagccgggggtcaggggaacag

SEQ ID NO: 309186 - DNA, 1000 bp, Homo Sapiens
cccccacttgctctttctttcactagagaacagtattttttcaggtatgcaaaaatattatctaatgaaagtacaagtgggggttggaatttttaagttttaattatttacaaaataatacttacttattttgtaaataaaacaacattttggttcataggaaaaacttgtaatctgagtgccagcatgactatccccctaaatataccccccagacatgatacatgtagtaagtggataaacacctccacgatggtgctattagctgaaaatataaacaaaccagcagatcctcactttaagtagcacaatgactcttgaaggcgtcataaaactatgacagtaaacgtagtaaaagaattgtgtataacattttacatgtaacattacctcacatcattctcccattatttctattgtaatttaaaagagtactttggtttcagagaataaaaatcatgcttaatgattttgactgtttaaggaaagattttaaaaaggttattaacagagctgagtgcatcacattttctcccgaaggactacagtgaaaattttcctcaataaaatattgactagctgtggtcaattggcattactgtggttcttccggatcttttgtgaatactgattgtggtggctgacccagataaagatcatcagataagcttatattatctactgccatttgataactgacataccctgttagatttcaaaatgaatgtcaaagcattaagatacaaatactacgactgaagtctaacacaaagttggccatactatattataaggagaaaacctataaaccagatccttcaatcatgaccccacccacaaaaacaagaaaagctttaaactcctaaattaaaaagactaaagaaagatgttttttgttttgttttatagtgaacatttcaaatgtgtgatattcagaatttaaatagattcttggcttccttattctgtctttgtcttccattccatcaatcaatactga

SEQ ID NO: 309187 - DNA, 1000 bp, Homo Sapiens
catacacctcctacctcatcagcccaccttagctctgtcctcctcccttccatcctgatcagtgggctttacttgaggctttttcagtttggtaacaactacaagggggctccccgctgcccaacccctctgtagatatgcttatagagatcattttacttatgtttggaggctcacatttgtgcctgaagcccaattcagatgacagtaaaggatctgtatgtacagggcagtctgtccattaaggatgtataaagatctagctagggaggcattgcgatctggtctgtatgtttcactagctttcttaaaatgggatgacctccctgatggttctcctgccagccaagggatcagcaaatgcaacaattgaggagaacgcctttccccaagtttcgaggctccctttgctctcataatttccccagagctgttcacagcagccaaggtggaagacagcaatgggatctcctccactgaggatgaagcccagagccccagactgactgaccacccggggacagcctccagaatccaaaagaggcagttgcagcagggaagacatggagctggccctcagctggaatccaggggttcccctgacgaacccctaatgtgggtgactccctgaactgctccttttgtgggctggggttgaaggcaatgtgggatagtggccagagcccagagtttaaagctaggatctgagatcgaatcctacttctgctgttgatgtgctgtgtgacttttggacagtctcctaaaactttctgggcctcaatttcttggtagataaatgaaggttctccatggttccttccaactcaatcccacaccagcctgtagtgttgccttcataacctcatagcatcctgctcctgtgtggatgctgggactctgagctgggatgtgccaatgagaagggcctgcccacaccccctcctgcagaacttaccagcaaaacactgccctgcctcccacctgacccccatgggagaag

SEQ ID NO: 309188 - DNA, 1000 bp, Homo Sapiens
gatcttttttcttcagggaatagcattaagaagcaggaggtggagtagtatacttgtcctgtttgaaatggcttttatctgctgttgcatcagtgatctttgacagctgatctgcagttctggcttaaccatttactagttgcataaccttggcaaactcacatcccagcataatgaatctagtttactcctttatgaactggaagtgttaatattttccctgacctacctcagaggcttaaagggttgcatggagatgaaaacccattataaaaataaattattactatgaagggttagagaagtttgtcttaagaagaagggtaattttaaaaaagaagtctttgttgccccctgagtgagcacagttcttggggtagaaacgggatataggacaatctggcactgagtctgctgaaggctgtcctgccactgctacatcttgcccttctctcctaacctcactgccccaggggtggagacagtcatgacactgggcaggccagccctcctctgtgctgctggccacctatgcggcacagtcttgtcagagagctgacaatcagctccctgctgctttctcatcttttaaagtccaattaaacatctctggccacagcatgataattgtctgggctccacacagtggaacgtgacctgaggtggcattaggagaccagaaaagaaagaaaagcccttttatcttggaaagatcatgtccccagttccttaaagtgtagaatcattgttcacattgagcaattgcccagctcaattccaaacgtcaagatatcaaaaggcatgcaggagatttaaccgtgtccacgtggactcatgtgcccaagaagcaatctggtggcttaagaattagcaatggcataaggtatgtgtgagaaacagtgagtctgagtggaaagttccagcagggagggatgctggaaggctaggttagggccagattgcagaggaccttgatgccaggggtaaaaaggtgaacttt

SEQ ID NO: 309189 - DNA, 1000 bp, Homo Sapiens
gatcatggcctctgctctttagcactaacggcaaggattgctctacagatctgacaaagttaacaacagctaggccttaagtatgtaagcacttacctttcctttctcctttttgtatctgagagcagtgtgtgcgagtttactctgcttcttctacaccattagaaaagcctgtgtcagaaggtctcatttcactgttctaacctttgaactcgtaaacaagtgattaaaggcaagctggacttccttagcaaaagattgactagaacttaatttcttaaagacatccttgactttttaagtataacaaataacatagtttacttagtttttgtgtttaacttcaaaattttatcaaaatattaacaatttaattttgtggcttaaagtgtaaaatattgagagtatttttggaagatattactgtctaagttagggtttctatccttgcaaagacatcatgaccaagaagcaagttgaggagaaaagggtttattcagtttatacttccacattgctgttcataaccaaaggaagtcaggactggaactcaagcaggtcaaaaagcaggagcagatgcagaggtcatggaaagatgtttcttactggattgctttcccaggcttgctcagcttgctttcttatagaacccaggactaccagcccagggatggcaccacccacaatgggctggaccctcccacccttgattactaattgagaaaatgccttatagctggatctcatggaagcatttcctcaagggaggcgcatctctctgtgataactccagcttgtgtcaagttgacacacaaaaccagccagtacagtttctaaagtaatgtaggttaatattaaagctattttagattttgctagattcaaatgaaaaatatatcaccaaattttatattccactgcctttcaacattgttgtctgttcatttttacgataccttgcttttattagtcactttactgccaagttattacaggggca

SEQ ID NO: 309190 - DNA, 969 bp, Homo Sapiens
tttttttttttttttaaaaatacggaagtttattgtaggacactcagtgtgaataaatggaatggaaaggcctacacatcgagactcatccatgattgatatgaatttaaaaattacaagcaaagacattttattcatcatgatgctttcttttgtttcttcttttcgttttcttctttttctttttcaatttcagcaacatacttctcaatttcttcaggatttaaaatcttgagggattgatctcgcctcatgacagcaagttcaatgtttttgccacctgactgaaccacttccaggagtgccttgatcaccagcttaatggtcagatcatctgtttcaatggcttcgtcagtatagttcttctccaggaactcacgcactgacttggcaccccggcctatggaattggccttccaggcatggtatgtgcccgaggggtcagtctgatagagcctaggagtgccatcaaagtcgaaacccacgatgagggcagagatgccaaacggcctgcgcccattgctctgcgtataacgctgcttcagactggcgatgtagcgggtgatgtactccacagtgaccgggtcctccacagtcagccggtggctctggcactccacccgggccctgttgatgactatccttgcatcggcggtgaggcctgcaaaggccatgcagacgttgtcatccaaagcacagatcttccgcactgttctttcatcctgcagtttggccactgacttcttctccacaccaagaacaacaatgtctcttcctcgaacaccaaccgcggtcgagcccttcttgacggcctcctgcgcgtactccacttggaagaggtggccgtcgggcgagaagacggtgatggcgcggtcgtagctcatgccggcgggcggcggccgggctccttccgccgcgactctcaaaagcgcacactcacggcctgccgcacccgcgactcccggcgcc

SEQ ID NO: 309191 - DNA, 1000 bp, Homo Sapiens
ggatcatatgcatagaaaactctaaagatttcaccaaaaatttgttagcaaattcagcgaagttaaaacaaattcagttgcagaatacaaaatcaacatacaaaaccatttgtttcaatacactaacaatgaacctgtccacatgaaaaagaatgaaattggacccttaccttatatcatacacaaagttaacccaaaatcaaacttaaacactgatacgtaaaacctgaaattataaaactcctaaaagaaaacacaagaactttgcaacattggtcttggcgacgatttcttggatatcattgccaaaaacaaggcaacaaaagcaaaaatagacaagtgggactacatcaaaccaaaaagcttctgtgcagccaaagaaacaatcaacagaataaaaaggcagcctacagaatggaagaaaatatttgcaaaccatacatttgataaagggttaatatccaaaatatattaggaactcatacaactcaatagcaaaaaaaaaaaaaaatgcaaataacccaatttaaaaatgagcaaaggacttgaaaagacattcctccaaagagacatccaaaaactcaattatatgaaaaaatatccaacattactgatcatcagggaaatgcaaatcaaaaccataatgaggtatcacctcatacgtgctagaatggccattatcaaacacacacacacacacacacacacacacacacacacacaccaggaaataccacgtgttaacaagaatgtgaagaaattgaaacccttgtgcattgatggtaggaatgtaaagtggtgtcgcgactacagaaaacagtaagaaggttcctcaaaaaattaaaactagtattagcatatgacccagtaatcccacttctgggtattcatccaaaagcattgaaatcaggatctcaaaaaggtacttatacacttccacattcactgcaacattattcacaatagccaagagttagaaataatccaaatgcacatcagt

SEQ ID NO: 309192 - DNA, 1000 bp, Homo Sapiens
gatcctattctcgaaggcaataatatttaggttcaatgcaggtataaaatcctaatggagccatatctattctgcttcagcagagtcatacatttacctaaaagcaatggttctggtcacaggaaataatttctgtggaggattagatagcattaaacatcacaagcttttaaatataggagcagaatttgctccatacagagattttatgaatgcagtgaaagtggtaaaagcatcagtgataagttattttttatttcatggattcacttcttcacatcctaccatgtcttaaattgtgaagcatcttatgatctggaatgtcatagtaattgtcagggctttttaaatgtgtgatggcactttagatttgagtaattacccttgcctgtatatataattttataatggttttgcataattattatagaaaggattccagagaatattctataaatattagacatttcattgtcaaatattccttttgaatatatgaaaaataagaatataataaggattagtcgaatagtgacaaaggatcttaggggttgtgttgtggactgtactatgtgacatgtactttatatatttataaacttcattgtttacttggaattacacgaagaaacaattttcagggttaaagaaattctcaacataagacaaaatgttgaataattcaatgtagtgcaaataaaatgtttttttcttatgaatcaaaatgtcttgtaatacatatttgactcattattaaggagtctaaaggattataccacgtaagtgtgaattccttatttttgctgtcatttgtagtatttttgcccactgtgatgatccatcacaagtagaagtttacatttttctagagccttataactctgaaacatccaaagattataaaagatttacctaaaatatttaaaaaccagcaacacattagagtaatggaagaaaaaagtgtgaggttatatgaggtgagtttatggctatatatttc

SEQ ID NO: 309193 - DNA, 1000 bp, Homo Sapiens
gatccttcaagtaaaaaaaaacaagtttaaaaaacttcctgttagatagagacttggtggtggccccaccatccaccaaagtgaagtctgtggtacacaagagacatagcataattttaaaggggagagtgatccctttaaagttgtttaccttagttcttatattttaaatataataaattttgctcctttcccatgtaatggaataactgtccttaaaagaattgaaagaaatttaagattggtgcatatttctttgcttcaataccaaagtcagtgtgtgtctatatatgtgtgcatgaaagagagaaagaaaggagggaaggaggaagagagagggtatatttccaggaagaaaacaaacaaaaaaacccacaaccctttcttcaaacataggagcagcccaccaggggcctagttcagattttcacccattatttcctcctgggttttagccgtcaggggcagaatgccatctattcccatactagtaagtgaagaaggctgggcctaattcaccagccatgattctatggcttttactaattgttaagaaaaaaatcctctcaagaaaaaaattttgtaaaatgtcctgtccactcccctctattccactgccccccgacccctgccccagcctctaagctgagttagcatctccacagccctctgggccttgggagcttgaggtgcattctgatctcctcgtgggcactaagccacacactggccctctcaaagtactattattgtgtggcgtcaaatggctttgtacatcactttcccagtcttttgtccccaaatctgatctattacaatgaaagaatggctcttctttcaaggttctaaagtgtaagaacagatcactcaccaggtaactgctggactcactcactcaagcagtctcataatacgcatgtgatcccttaggcgtacatagttcatctattttcttcttcccacaattcttcaagtccattataatcttctatcttgcctg

SEQ ID NO: 309194 - DNA, 1000 bp, Homo Sapiens
aagagactaggtttggagaagattatggagttagtcttggagttgcatttaaagtgactctgagatggatatgtaagtcataagctcagaatcaataacctaagacagcctagaagtcatgagtttatagatggtaagtgaaactgggtatatatgtgagaaaaatgcctgggtttgagccatgaaggcttaaccacaaatttaaccacttctgggtaaattcttaccacaagtgtgtatatacatacacattaaccacacacctgtttactttttaaaagttcaaatatagaaataataaaatgtgaaagtctgctcactctgggttatcagcaactcaatacacacctttgtaatttaaaaataaaaatgggattatgccatatatactttgctacaatctgctttgtgagatattcttctacactagggtatacacagttctatcttattcatttcaatggccagaaagtattacatagtagggatgcatcacaatttaagcaaccctgtagtccccactgatggacaagtacgttatctggcagttacctctacctgcccattcaacatccactgcccccttctgcttggttcactgaacctatttcattccaacggcaacattctcagctgcaggtgatggttcatgactggcttaagccaaatgtgaccatcttgttacccacttttatagcatctcttctatgggtagccatgctatctggttctggctaatgaccctaagaagtcagtttctgagtaagctgttgttttcctaaaaaaagagaactaacactacactctgctctttcttctttcttcttgctttaggtatgaatatgatgtctgaaatttcaaaagccattttgcaactacaaggccataagccaacactaagattagtaaaacagaaaagcagaagagatagcctgggccctgaaacacacagaaatataagtaaccactgcctcattttaaagaatcaaaatccatttcc

SEQ ID NO: 309195 - DNA, 1000 bp, Homo Sapiens
gatcacctgaggtcaggagtttgagaccagcctggctgacataatgaaaccctgtctctactaaaaataccaaaaaattagccgggcatggtggtggtggctgcctgtaatcccagctactagggaggctgatgcagggtagaggttgcagtgagctgagatcgcgctactgtactccagcctgggcaacaaagtgagactccatctcaaaaaaaaaaaaaaaaaggaggaggaggacattcttgacagcaacagtgggtgtactaagacccacagatgtgaaaaggccttgtgtgcacagggagagatgagaggtctggaacatctggagtttatagaggggcaggggtgggagtagtaatggccactcttgatggaataccagccacacaccagcaatttctatcagtgagcctactgaatcttcagaaaaaccttttgagctgagaaatcattttatgaaaggtctggcttccaatcctagttcatccacttaccagatggtgaccttgggctactcacttatcacctctgtgtctgtttcctcatctgtacaaaggagataattcccagtctagttatggggagtacgtgagttaaggcctggaagcccctttcttccagagaaggaaacaggctagagaagttaagttctttgcttggtgctacacagctagagtgtggcaaacctagacactatcttgccaattgatacagaactaaggctgataatcacaaactagtatagccataccaattgtttaaatattaaaatacttccagatgggttggtgtgtcactgctacacaagtactccctgtccctaactgccactttggaccccccttgtggtattatatatataaatatattggttttcatccacagttcctggctggtaactcctacagcctttgttacagtctcttgttataatgttgtgtaccttaggcctggggcaggtctgaagaaacagaatctctctgacctcctcctgccc

SEQ ID NO: 309196 - DNA, 1000 bp, Homo Sapiens
gatcttagactcctcttggtggcaaagggaagggggggcctgcgttcggcctcagccaggaccgaatcagcaggaccttcactccctttttctggcgtccatcccttcctcttgcaggagtactgccaggtctttggggagagggtgggggttattgggagaaaggaggcatttggaaagtaggtggcaggctgtgtcccagttacacctaaatgtgtctccacttattaaaaaaaaaaaacaacctttattttgaaatcattacagattcagaggaagttgcaaaaatcacacagagcaaaaaacatcacatgtatcttcacagtttcccccagtggtgacatcttacgtaaccatagtacaaaaccaggaaatggaccctggcaccatgtatgtgcaaagctctgtgccctttcgcacacatgcagactcggcttcaccttatttatgggtgtgcaggaacattaagtgtccataaatgtggacggagctcctcttactcgtgggcatggggtcagagggaggcgggagtacaaccaaacaaaaccatctagactttgaccgttgatgtgggtgccaggttccaatcaccgtgtgcccccacactgcgttcagggctacgctcttctgtcttctcccactagtctgtgagtctgtgaggtcttgtccactacctctttaggcagccagcccttctggtgggctttgtcgtggggagggggtggcactaggtgtgttctggggctcctagcactagaagacttgtttcaaatccagaagcacctcctattcgtgtgggcgcccaggcaacttacctgacccgtctgtgactctgtgtccttggggacctcctattctaaacacaagagcgtggcctgctgtcaccgtcaccatcctggcatctgcagaagagccaccaagcgctgcctcctgagaatttctggaaggaggagatgactggtagagtggaaagttattgaaagggacatttggagttctt

SEQ ID NO: 309197 - DNA, 1000 bp, Homo Sapiens
gatcacctgaggtcaggagttcgagacaagcctggccaacatggtgaaaccccccctctctactaaaaatacaaaaactagccgggtgtggaggcgggtgcctgtagtcccagctactcaggaggctgaggcaggagaatcgcttgaacccaggagatggaggttgcagagagctgagatcatgccactgcactccagcctgggcaacagaccaagactctgtctgagaaaaaaaaaaaaaaagacacagttgggtctgggtttacaatctcatcttctgggctctgcggcctcagacaaggccctccaccccccagatcctcagtttccccctctgtagactaggccagtcatatttcctgcctcacaggctgctgagaggatgaagaaggtagttggggcatacagtcggtgctccataatgttaggaacgatggaaggatagaggttttcagggacgatggggcaggaagggtcattgagacccaagtgaagtccagtctaagtggtttgtatttactgctattgcaaaatactgtcatttggtcaatcaacaaacgttgactgtgggaccactggactgggtctctgggggtgcatcagggtgaatgtgggtgggcattggaaccagctcctactgtgccacaattggcagggggacggttcagggcctggcacacagcaggtgttcaacgaatgcgtgcttgcccaccctccagccccccgtgggcatggggtcacatgtgggagcaaacgaccgcggagtggaagggaagctggtcctgtccactgcccaccagcccccgactcaagctcatgggcccggggcctttctgctgaggcgtcagaagttggtggtggaagggcctcctcctgcccccacccatccgctggcccatcctttcctcccacactcaagggttcatctgcttcagctcaggcacctaccagaggccttggcggatgcagaaggggtcacagtggatggaggggctggtcc

SEQ ID NO: 309198 - DNA, 1000 bp, Homo Sapiens
tgtaacagatgaggttctggttggaggatgaggcttagacatagtctaactgcagagcttctgtaatctgggatttctcacaagtttagggtcaaaaacccttcgatcgtgtcttaagacagaactcccagtaatgctatttttgttaatattgactcatatttaaaaatacaccaaattattctgggtggattgaaagctgctctgggcttgtttctttgcactggatgcttagctttcttttcatgggaacagtagggaaaagaaagcactgatacccccagcggcctcacctgcgtttccctcgcttcagctttgtgatggtcaacagcgtggcgctgaacggggatggctgtggcatctgctctgaaacagaagcagagctcattgaagtttctcacagactgaactgctcccgagaggtaggagagcatctgaatgccacaggtgccttctgtcccgtgttcgtccgcttcggttgctcactcagccccctagcgcttcttgccctttgatgagggtcaggtgtgcggattaatggcctgacttgtacccagcaggcacgtggctccagccggtgtggacctgggcctctgctgcccacgtctgcccctgtcctcctgcaggtgacgtgggggaggaaagggctcatggcagacacgaggcagcctgtggtttcacgatagccgcctgaactcctctctccaccccggacagcattatcctctgtatcggagaagtgatgctaactgttctggggaagacgctgctcctgcagaggaaaggacatcccatttaaggagaactatgacgtgctttcacgggaggcatcacaaaaggtttgccagggtgtcgtgatgctaattcatgtcacagtgtgactctcatcaccttgcatgtcaacaagcagagtgcccaggctagagcaggtgtttgctgaaacgttcatgacttagttatcacctggggggacaggggtggaggcctggctttcacagta

SEQ ID NO: 309199 - DNA, 1000 bp, Homo Sapiens
ggaattcgcaacgtgcgcctcccgggttcaagtgattcttctgcctcagcctcttaagtaggtgggatcacaggtggccaccaccacggcccggttttttggatttttagtacagacagggtttcaccatgttgggcagggtggtctcgatcttctgggctcaagtgatctgcctgtctcagcctcccaaagtgttgggatgacaggggtgagccacaccgcaccgggccacagctaggaactcctgatgttctaggaggatgtctcacattggaaggaaccccgtcctcccccgggggcagccacaacacagaggcagggacacagcaccgaagcttctcacatctttattggaaaggcacagctaagcccacccttgatacagcattttccacttctctctgtagagatcagacgattgaacacgagataagctgactatatacagacacaggtgtgggtgttgcttttttttaaaaacactttggtcttttttttttttaaatttcccccttttaaaaggaaaagttagttttctggaaaaggaaaaaattattattaatttaaaacccaggaaaattttagtaccctcatctttatttgggaagggggaggggattcctgggtcgcccacccaaccctgctcctcccagctcagctaagttcgtccctcgtcccccccttttgtgggcgatgggagaggaccaggtggccgtggagttgtctggaactaacagaggtggtgagtgggccaggtggaggtgggagcatacctgggacccggggtcgggggagactcggggtgcccaggacgggaaaggggcagctagcattgcgtgcatgcagtaccaggcgagaggctgtggtgcgcagactgtcggttacacatgttcaaaacgggggaaggcccggggctgctgcgcttgccaggtcttgctcccttggacctggtctcccatctgaccctccaggcttagcttgcctcacatgtcagggcagg

SEQ ID NO: 309200 - DNA, 1000 bp, Homo Sapiens
caaaatgcaaagtcctcagggagtcggcagcggagtcggtcccaggacatggctattgctttgcagctctcactgggaccttgggacggtcagcctccctctcctttccacagccaattccatgcgcagagagcgtcctaacccttacaactcgtctgtgctacacacccaccgcccaatggctctgaaactttttgcccatactcttagattgaggtcaccccagccagcgccaaaagaatgagcgcgggagggggtcacagcagccagttcggccaaacatcgacgctgctccggcacgctccagcccagcgcctgggatgtgtcagaggtacctgcgaggaacatttgcgtgcgattccacgcacgcgttgcatccctcttcccaaacccggatcgctgaactgagaggtggcgcagagtgtctcaccaggtgcggggatttctctccgcctcaggccgtacgagcttccctcgctgtccctgagcgcaaatgagcctcttcagtcgccgaggcccggccgcttagctctcggagccttccacagcccaacaccctgagccctggagtaggcaatttgctcccacagccctgtgctggcccttccaggcacagggagtcccccttctaggggtaggggcgggcgggatgaagcgcacccagccctctctcctacccttcctcctttggtcccttcggctttcgtgtaccttatctcccgcgcgcccagctccttggccggctcacctgctaagcggagcgcggacatgcgctggaactccggctcctgcagccacttccacatcctccggaaggtctcccggccggatttgagtttgctccagggtttggggttgcgcagcaggtccgagagggtcccctgggagcggcagagcaccctctgcgcgaagatggcctgtgggatgctgtagcgcttgagctcggtggtgatacgctgcgccacctctttggtattgatctcttccatctgccctgaat

SEQ ID NO: 309201 - DNA, 1000 bp, Homo Sapiens
gaattcagagagaatttttctgggaatcaagtgattcactggggtaccactaatacgacttcattttttttttgactttgacttctacagctctggttaagtgatttggacaaatagaaatttaaaattttgtatttgtaagctcaggtctagtttttaatctgtccctgttagagagcaaaatctatattataaaatttccagctaaatgcagtagcaagaaagaaggcagaatgctttggaggctattcttagttccataaattgattaataccaatagatcaaaagtcttgtcgtccaccagaacactggcttttttctatacagttccaccaattccaccatttctcagttgcacctgctgttttgttgacgtccaagtcataaaatttctgggattggcaataagttaatttgataactttttaggatagttataagtactgaatagctcatttgaataataatgttgttttttaaactttatttgtatttgtaaagtatttaaaagaggtttttgtgccagatgcataaagcaaatataagtcaattaatctaaggatagttctttatttagtgaccttttactaaaaagcattactttgaacaaattttctaatttagttaccctccctgttaaatttagttttctagtgtaaaaatggggtactactttggaaagatcctcaggttttctcagctaggaacagattatggaaccatgtctatctctctacttaagtgacatttatggatcctgaaaaggagtgtgccatctggatgtacacgtgtactgcatcgacctctctgccatgatattaattgcttccctgaagctacattctttcttgccagttctgaaaactcatatttcaaatgcttcaagagtcataaataatagtcatgattctatgtggcatgtgtattacagctagatcagttcatacgtataacttttcatagtatcttgtgtaaaaatagctttggttattaaaatca

SEQ ID NO: 309202 - DNA, 1000 bp, Homo Sapiens
cggatccctgttccctcgaaaggccttatgggaaacgattccctctggaccatgcgcttgagtccttgggtcccagtcatgatcacctcagaacacagggatccctcattttggaagtctctgctctcctgtcccagcttcagtgctgacccaggtgatacgggccatggtctctgatgaggtccttgagtctgattccagcagcacagagcctccaggcagagccgaggtgagggtctggaaaatgcactgtcaggctcacacaagcacatgttggccaggagtacagattccacacgaccccacagtgcacaaataccattgatccccatcctttatcgattccacaaaccgcgggatgtctgctgcacccacattagcagattatctcagccaacacaaggatcctagaccccagaataaagcagcagtggcactcccagctctttagcatctcaagctcctaaattagcatctcaaacctgcactgaatgggaatgttaatgtctggccacttaagattgacaagctcagagtgttcactggggaggcaattgtcagttcagaaaaagtcgggatttgggggctgtccttagtcggatctgtgctctgggatggatgtggaaagtataagcttttggcggaatttgctgtgctcatcacgcgggtaggcgtgacttgagtcccaggccatgacactgaagccctcagagtgtgacctggggccacgcggccgtggatatggcccgatacgaagacgtggtgtggctcccatgagcgtcctattcccagaagacctccgagaaccctgcggcacctggcttgggtgacccaggacgtttccgcgggcgaaccccatccagggagggcttgggctgtgatgtgtgagcctgcactgccgccgcgcggccacttttgagtccacacttacaaccgattctgtgccatccgggtggtgagacagaaggggaagcgtccacaaatacccatgtgctacgca

SEQ ID NO: 309203 - DNA, 1000 bp, Homo Sapiens; identical to SEQ ID NO: 159606

SEQ ID NO: 309204 - DNA, 1000 bp, Homo Sapiens
aagcttttggaaagtctttagaacagtgcctggcatatagtaggtgctctgtgtttgataaatttattcaacatttattgagcacctactggatgccagatgcggttcttagcattagagcagagaataggacagacaaaaatcctggccctcgagaagatggataacaaatgttgcccctcctcacagaggccttccccatacccttgtctggcatccctgtcactctctagcccagtagcttccaaacctgtttttttgtttgttttgttttaaagagacagagtcttgctgtcacctgggctggagtgcagtggtctgatcatagctcattgcagcctcaaactcctgggctcaagtgattttcccaccttagcgtccccaagtagctgggactacaggcacacaccaccacacaactaatgtttttattttctgtatagatggggtctcgttgtgttgcccaggctggtctcaaactcctggcttcaatattttctcccaacctcagcctcccaaagtgctgggattacaggcatgagccatcacaccagcccttcttttttttttatttttttattttttttttataaaccctaatgaaactccagggccaactttaaaattttttatttgcttttaattaacaaaaagaagcacaagaaagataggaaggcaatgcctaatttcctctgctctcagggaggcagaggaattctgcaaattcaaatgtaataatttggtcagctgttaaaacagaagttcttcaggaacacttgttttatgggcagtaaagtatgtgttaatatctgtatccattacagacatactctgttctctgataacataaggctatccttgaaaatgtgctttgaacaaaggagtcttattaagattctacgacttcaagacaatcattgctgtgttatcctgtgaaaacactctccaagagacctgaaactggccaggcatggtggctcacgcctgtaatcccaacact

SEQ ID NO: 309205 - DNA, 302 bp, Homo Sapiens
caagtggtccagtgcttcctcactaagccgaagcacaatgcccatgaatgtggctgactaggacaggcaagacaaacagatgtggcacttacagagtgtatgatgtccaccatgttgtaggctttggttgattccaaagggacaattgtgtcaagctcaggaaccagacggtcactttaggcagaaaaaaggcaggtatagtcaacataggaagagccagttaccttttgtgggaatggggtgggaaaggaaatggggtgacacgtcatagggactgggccagttctgtccctgctgggctt

SEQ ID NO: 309206 - DNA, 1000 bp, Homo Sapiens; identical to SEQ ID NO: 120046

SEQ ID NO: 309207 - DNA, 444 bp, Homo Sapiens
tgcgcctagcctgtctgtagtctgtgtaatactatgactttggttttctcagaagtaaaactacgagagatgcataacattcataatttgaataatagaactataatacacactcttaacccctaggacctcaggatcctcatttgtcttattaagctgctgatctcaggccccttcaacagcagagagggtgtctagtttattctctgtacctggcacagtgcctgccccgctaaaggtgctcaggaaatctttgtggagtgaacaaatggctgcttgacagctgaccttctagttctaatattctaggaaaccaattgctcttaatgtaacaatgataaggggtgtacttagcattgaatagaaaagacttagatgaagagctaaatttgctgagtttttattttgaaataatttcaaatttacacgagaattacaagaata

SEQ ID NO: 309208 - DNA, 1000 bp, Homo Sapiens
gaaactgggtgagtcttcagtgaatggagtaggaagagggtgtcctctttcattgctttcttttctccctagttctgcttgcaaaggatccaccagggtctgattttttatgagaagctgctaggatcggatattttcacaggggagccttctctgctccctgatagccctgtgggccagcttcatgcctccctactgggcctcagccaactcctgcaggtatgaagtaggggcgtggaggatgggggcttgcaggtgtcagagacagagggttgggggttaagggtttagagtcttctctgactgtgtcctatgtcctttcagcctgagggtcaccactgggagactcagcagattccaagcctcagtcccagccagccatggcagcgtctccttctccgcttcaaaatccttcgcagcctccaggcctttgtggctgtagccgcccgggtctttgcccatggagcagcaaccctgagtccctaaaggcagcagctcaaggatggcactcagatctccatggcccagcaaggccaagataaatctaccaccccaggcacctgtgagccaacaggttaattagtccattaattttagtgggacctgcatatgttgaaaattaccaatactgactgacatgtgatgctgacctatgataaggttgagtatttattagatgggaagggaaatttggggattatttatcctcctggggacagtttggggaggattatttattgtatttatattgaattatgtacttttttcaataaagtcttatttttgtggctatatgagtctaatttctaggctcaattgggaaagagaaatcgatggaaaaataaggccaagagactacaatatgcatccctttcttctattctgaagggctatggtggagaatgatattttctcatgaccccctggtgtatagaataactgggatctctttagtattaattcctatatggctgagcaagcagaatgggattaccagatt

SEQ ID NO: 309209 - DNA, 1000 bp, Homo Sapiens
gagaggagacatgtgattccaggacaaatctttcatatcagctgttagttgtgtctagatcaatctgggactttcccaacactaagcaggaggggcctgttatcaggagataccagaggtcagtaaggaaacatctaattccagtgccagcagcactttgtgcactctttttgacactaacttgaatatgtatttaaataaagatgctctgtattgaccacagattagtctgaataatccaaaactttaaaaacttccccacattggatgtggggtctaggggccccctagggatggtctagggtccaagactttaccttggtaggcaaagatagggctttacccagaagagaataaatgtcttcactgccagttaccttcagaaatggttaatcctgggtagcagatggcatcttttgcagcatagtttactgggcaagagcatggattctagagccaggctgactgggctccaatcccagcttggtcactgattatatgaccttgggataaatcactaaaccttgcaatgcctcagttttctcacttgtaaaatgagcataataattgagcccgcatcgtagaattttaaaataagtattaaattaatactttaaaacacgtgtaacagtgcctggcatacagcaagtgctatgggtgtgttcttgttaaataaactgggaggaagttattcttcctgtttctagggctgggggattcagatctgagaaccactttatggaggaacctggagaagtcaggaggtggggtgaactgctatgagttacctagaaatgagcgagaaatcagacaagcttttctctctgttgggtctgtgtctaagctgatgtcttagactctccatcaaaaggatccagccagttcggagggaggaaatcttcagtcacttgctggcctcctgccctgcttctgtacagcatccccgttggcccctgccacccagtctcctccctcccatcaggtctcagccatctttctg

SEQ ID NO: 309210 - DNA, 1000 bp, Homo Sapiens
gacgccataaagaagggagtcggggatcgccgaggtgcaagcgggctcggaaagcggtgggagaaagcccaggatgccctcgcaggggggcagagggggcgtggccccggcctcaaccatcccatccgggggcggcaggcggaaaaggctgggctcctctcaggactttcgcgggagacggcgccgtctgaaaccaaaactgctcctggggaaaccttccttgacctctgtagctagggcgtgagtattggaagagcgagggcctccggtttgttggtccccctccccccgcacacgggaatggaaggagctggtatgtcacgtgaccaagcctgtcacgtcacgtgacgaggaactagccttagcgaggccatgggggaaaaagtctaactggcggaactcctgggaactggggcgatgggctcttagtatcggaggattggagccatctgatttttacctgaaattccttagtctctcctgtgttggggaaatggtaagtaagacagattttcaccaacagagagcgtttctatctcttctctactcctcccttttaaaattgagattctgacagtgtaaaggagttaggacccccttttggggatccggcatggttttgtggctttaaaatgctttaaaattgctgaagtttcttggtattggaactgtttctcctaagtaacattttatcatcgcacgtgaaatactgtaactctcggtgccaaatccaggaaaaatgggcggttaggagaagtccagggaaagccgactgagcaggttgtgaaggtaagcagtcctgttaaatgtacacaaaaatgtcactttgcttctctaaactaggaaaactgataggacttttgaataaggtaggatataagatttaaaaatataaataggtcatcccctccaaaaaagccgtttgtatgtttaactggtgagtgacagatctgtaataattatttagaaataggaatgtcgaggcgggcggatcacctga

SEQ ID NO: 309211 - DNA, 1000 bp, Homo Sapiens
tcaggtttgtttcattactgtatggtgagacaactgattcaccacgatttagtctagagctacttttctattctgaatagtttttggtaaaactattggctgaattattaggctgttatagtaatctgcctccgtcaagtgtattttcttgggttaaggaaaaaaaaatttttttttaactattcacggaagctggatgttcttccttgtcatttgaatcaaggccgtctaacaggaattgaataattcagggactagcatttaacccatatcaggtctaggcaagaaacgacatacattaggaagccttaggatatcattaaactgcctagggtagtcaaaattattgagtagacaccagacctcagtggattacttaagtaaatggggtcagatgttatcatgaagaaaattaacaggaagaaaatgagagtacagaagaaatgttttgaaaatagagtgaaatacaactttgaagaccatggctgagaagtgctaggaatagtggcagcacatcaaccagaaatggtgttgagctgtaagaaacagacgtcaggcttcatattgcccttgtgtccaggggacaaggatgaaaaagctttttgattaagagcagtagaccaaatcaaagctaattatgtcattttggccaggcgcagtggctcatgcctgtaatgccagcactttggaaggccaaggcgctcagatcacgtgagcccaggagttcaagaccagcctggggaacatggcaaaaccctgcctctaccaaaaaatacaaaaaaattagccagtatagtggcacatgcctgcagtcccagctacttgggaggctgaggtggcaggttttatatatatatataaaaaacacatatatatatatgtgtgtgtgtgtcatcattttaagtctcactgtgcaaagctatgagtcctcaatactttggactacttagtgtaatatattagttgttagaatagcatatatatatatatatatatatat

SEQ ID NO: 309212 - DNA, 1000 bp, Homo Sapiens
ttcagtaaccttcaagtatttcctgatatgtaacctgtcttcttatgatttagtgtcattttagagctaccagaaagaacacgacatgtaaaatgaagataatggttatgatgactaaatagtaatggagacattagtagataggactttgtagagaaaaagatttagaaattaggtattttccatttggtgaagccatattctttttaaaaaggtactttatttttaaagcttagccttaaatattaaatcctagtgtttagacatctacattgcagacagagatcaacatcgaagatatcaaacattttaacaaaagccaaacctgtggccaccacattctattccctcatagttgagtgaaattagaaaattttaaagttattatggaaattaaatatatgctggtggaaatgatttatatcatcaaaatattggtttaattcaaagtaacaagaatcagataataaaatgatcacaacatcaactgttccctgagtccatcacttaagcataaagggctaataatattgtttttgtttcttggggttttttttggatagacctacattcattttcttgtgtcacacagttcattctgagaggtgtcactctcacagaggtagatttcctgtaactattatatttgggagatgttaaaaatacttttttcttgggatgacatttgtggggaaaatatattgaaagccttttcaataagatttaatgcaaatgaattactgacacataaaggtgttatttaatatttaaagttagtacctttgtgctgcatgggtatcagtaaaattatatgtaaatgttttgcacctacctagtatatgttgagtgtacaaatattaaaatgcctatttatcaggcactgtaatttatacctactactggactgtaactttcctgagttatatagtctttcttcagctccaaattctcataaggcttattagcacatttttcttgtgctaataccaggtattcaatc

SEQ ID NO: 309213 - DNA, 1000 bp, Homo Sapiens; identical to SEQ ID NO: 120047

SEQ ID NO: 309214 - DNA, 1000 bp, Homo Sapiens
tttttttttttttttttttttttttttttttttttccagtagcatgactctttaatcattgttatttacaatttatcatctgacagacttacagagaataaataaagaaaagaaaatatacaattggtatcacgtttctttttctaatacagagaaattttacatattctatttggaacgtctatgatagttttaagcagaaattaaatccatttgccctttaccccttgacaagacacatcatcttccaaagcctgcagaagggggcccagatgtttcctcatcacaggaagagtgcaccacatcgctgcagaaactcagtcctcagaaaaagttaccaggcaacaaggtagaagaataggatatcatgaataataaaggacatataatggataggctagattacagactcttggtgtgtttgcaggaagccagctttcaattgtgtccaagcctgttttcaagaaaacagtttttcactgaaagtgattaccttatcccattgtgcttcccttgagtctctgcaaattcttccttgacatgttcattgtgattgtggatgagcacaggctagcttgggactcagattattttcctgcaaggcacctgacactgttgcatgttgttgacaaggtgtctgcaggagaaactagatagcttgtttcaaataggctgggtatgaggccagagtctggtctctccttttgattcggtgtcctgtggagaactacctttcattgctgtctaaatgcctcaaaaaattaagcagttctatagatcaatttctccatcaaaaagtatacaaacagagaatgcacttcaccaggaacaagtctgagtaatttttttctctttcctcacttgaaaataaactctccatgttacaagcaaaacaattctccctacattcactctagttaactggatgagaagtttttgtttctatcttatgttcattcaaaaaaacaacattcagcaaatatttatcaagtgctcacaa

SEQ ID NO: 309215 - DNA, 1000 bp, Homo Sapiens
acagacacagaaatgttttgcctgatggcattaggtttattttgtgggaaagcagaattggggctctctgaaaggcacttgtgaggcatagaagtaaaggttgccacatggctaatggtggacgtcttcctggcatccttgggggtaggggaaagacagacagctcccagggccacagaaaatacctctatcagatagagaaatccgagtcccagtgccttatggtggagccaagggttaagcagatggcctgctttttttatacgaagagtttgcttcctccgggcaatcttaaagtctggcattcacggctggaggtatagggcccatccacttctctcctggatgaagaaaacaacagactctgcacactgttctcaggtgttctggcagcaggagttggtcccacaaggtcccaggggttttctagaaagacttttgcttggcttcaaggtatagaaggcttccttttcttttatggggttgaagacagcccctgcccactcaaccttgaacagcactgactgcataacgctttgttactggaagtgccaagaatatttttttgctctgagcccctccttctggtcaactgatatagtgggtgtggagctggggtcaaaggcagctcagggttgaatctttttattttttgagacggagtcttgctttgtcacccaggctggagtgcagtggcgcgatctcggctcactgcaacctccgcctcccaggttcaagtgattctcctgcctcagcctcccactgaggcagctgtagtcccagctaatttttatatttttagtagagacggggtttcaccatgttggccaggatggtcttaatctcctgaactcgtgctctgctcgcctcagcctaccaaagtgctgggattacaggcgtgagccactgcacctggctcagggttgattctttaacttacttacccagcaggtgcgccagcagctccatccggtcagagccaaataacatgtgggtttgg

SEQ ID NO: 309216 - DNA, 1000 bp, Homo Sapiens
gctctagaatgcacacacagagcggccagccgccccgagcctgtgggcaggccagcagggtcagtagcaggtgccagctgtgtcggacatgaccagggacacgttgtacagggtgggtttaccggtggacttgtccacggtcctctcggtgaccctgttgggcagggcctcatgggccaccacgcaggtgtaggtctcccccgtgttccattcctcttcggacacggtcaggatgctgtgggcgaagtaccggcctggggcctggggctcaggcattggggcgctggtcacatacttctccggggacaagggctgccccctctgcatccactgcacgaagacgtccgcgggagagaagcccgtcaccaggcacgtgatggtggccgactcccgcaggttcagctgctcccgggctggtggcagcaagtagacatcgggcctgtgcagggccacccccttgggccgggagatggtctgcttcagtggcgagggcaggtctgtgtgggtcacggtgcacgtgaacctctccccggaattccagtcatcctcgcagatgctggcctcacccacggcgctgaaagtggcattggggtggctctcggagatgttggtgtgggttttcacagcttcgccattctggcgggtccaggagatggtcacgctgtcataggtggtcaggtctgtgaccaggcaggtcaacttggtggacttggtgaggaagatgctggcaaaggatggggggatggcgaagacccggatggctgtgtcttgatcggggacacacatggaggacgcattctgctggaaggtcaggcccctgtgatccacgcggcaggtgaacatgctctggctgagccagtcgctctctttgatggtcagtgtgctggtcaccttgtaggtcgtgggcccagactctttggcctcagcctgcacctggtccgtggtgacgccagaccccacctgcttcccctcgcgcagccaggacacctgaatctgccgg

SEQ ID NO: 309217 - DNA, 1000 bp, Homo Sapiens; identical to SEQ ID NO: 120048

SEQ ID NO: 309218 - DNA, 1000 bp, Homo Sapiens; identical to SEQ ID NO: 120049

SEQ ID NO: 309219 - DNA, 1000 bp, Homo Sapiens
caaggctacagtgagctatcattgcgccactgtattccagcttgggtgacagagcacaaggacccatctctaaaaagaaggaaataaaaagtgaaagtaagtatcagaagaaataggaaaatgagtttaaaataggtgaatggtgaggcagggattactgattataagtcatttagcattatctgattttttaaactgtgtgcatgtattgttttagcaaaaagatcaaatctaaaaagaatacagatgcaaataaaatgataccaaaatataatgaatataattttaaaacatatttgtaaatgttagttctttcctaaatgtggcattgatatggtttggctctgcgttcccacccaaatctcatgtcaaattataatccccacatgtcaaaggagggatttgtaatccccacatgttgagggagggaggtgcttggatcatgggagtggttttccccatgctgttctcgtgacaatgagtgagttctcacaagatctgatggtttgacagttcctccttcatatgctctctcttgcctgctgccatgtaagatgtacctgcttcctcttctgccataattgtacgtttcttgaggcctccccagccatgccgaactctgagtcgattaaacctcttttctttataaattacccagtctcgggcagttctttatagcagtgtaaaaacagactaaaacaagctaatgctaatacattgatactttatatagccttaaggaaacaaataaattgatcacatatatatacatatatatgtgtagcattagcttcatggttaatagcagttaacagacacaaaagtcaaggtgacagacattactattcacctcatgagtttaaggttaattgactaacaatagtggcaaaaaattttattgtaaaatctatttctatagacatgtagaatccagagacatgagcatgtatgtcttgatgaagatactagatgcagcattctggcagtatttgaagactga

SEQ ID NO: 309220 - DNA, 1000 bp, Homo Sapiens
aagcttggattatacatcttaataggtgattctgcctcagtcttttgagctatcccaggaaggctgtgaagattcttaagatcctctcagaagcgtttgataccagagaagtgcaatgatggaaacgcttaagagttaagcagaaatttttaactgttcaaaaatttgggccctgattcaggttaacaagatgctagtcaggcagagatttttaactgttcaaatatttgggccctgatgcaggttaacaagatgctagtcctgcagtaaagaccagtggctactggtttggcctcttgaaatggtctgcctcaagtgtgaatcccagctctactacctagccatgtgacctagagtaagttacctgaactctttaagcctatttccctgctgtaaaatggcagaatgtttaccaggttgcttacataatccatgtaaagtgcttagtatatacccagtactccgtaaatactaatttatgttgtgacatgtcccttttaataatagctaacgacagtatcagtgcttataactaatgatctgaaaacgttatttggaaaaaatgaatccttaatcctagggattccctgcactgaacccaaacccagactatgtgttactgatttgagaacttgtttttctaggatgtagtggtggttaaggaagttgtgccagagactgattctgtataagcacatatgcacattttcttaactttgattccctactttggaacaattattatactgttcaacaataccttgaaataacagaatacagatttaacatgtctactgaaatactttagtaggaaaaatgttaaacagttcttagatgtaaagcataaaagcaaactcaatggtgagtttaaggggtaaaactatcaatcggttgaaaaagaaactatttgcataaaggcaatttcctttttttctttgagacagggtctcactctttcccaggctagagtgcagtggtgtgatcacagctcactgcagcc

SEQ ID NO: 309221 - DNA, 1000 bp, Homo Sapiens
gcgagagtgctgtcagtcatacactgacagtctccacacataaccaggaactatcttttgactatttagaggtagctgggagagatggttgttgggagcaggtggactttgtctgcagacagcagtatgccctgaaggccagaaaggctggatgtgttcaggaacccaggcagggtctgaaagggatagactgcacattcatgatcctccttccctttccaaatgtgcaggctgcactttctccccatgaccttgagtttgcatcgatttcccaaatgcacacacggagggctacttgagtctctctccaaaccactgacatttgatcaagccagttcattgtgaagggcagagaaagacagactcttcagtgctgttaaaattggccttggggttttgaaagctcttagaggtcacctggtctgagtcagtgcatgatcaagccccagttggcgctgtgtgaacacctgccagggtggacctcaggtggctcatatgattgtgggacagctctaattcttggtaaattaaaaatctgccttctaatcatgcctagtgactagcctttgttctgcccccaaagccatgataaggccacatgtaagtctttccatgtgacagcttttgaagtgttttgaagacccttatcttatccccaagtcttctcatctttatccttagtcctaaaaaaaaaaaaaaaagaaatcctggtagaggaatgcaacagcccaaaccaagaggaacttcctgtaataagatgggttcttctgcagtctgtagattccaaaggcccccagggtaactggagtacattgaactccagtacgagtacattgaagcactacagacatttgctctttgggttcttaccatcattcatttattcaatactcgtagatctaccaagcacagaggcaggcaccgaggaagcaaggctggcccggtccctgccctcatggagcttgcagtccatggaggatgcagacaaacggggatgggg

SEQ ID NO: 309222 - DNA, 1000 bp, Homo Sapiens
gacaaaacctttctaaacaagacactggcccttgtgatttacttcgtcctacaatctaaggaattggagagagaggaacacaaataacagtgaagggagagtctgctcttctgctctagaatttctcagcatcgacgtcaagcttgttaatatctttggagaagaaccaattatacaggtggattaaagaacagaccatgagtatgccattctaaattgtaagtaatttactttctaaaggggattaatttatgcaggacaactaagcattaagaagctaccatgtggcacatttacattcctatataacatgttacaaggaggttcaaagacccagaaagtaacggcaaactgaaaacagcatttgtaacaaaagcttttgatagcaccttatactcttcaatggatgatatacataatagttaaaacactattttccatgggccaggaattgttctatgcacttcacatgtatgaaactatttaacactcaatcatgcaaaggaggtattttattgctccagtttttcagatcagaaaatcaaggcccagacattaatttagaagtaactggtattttaaatctggcagtctgactccaaagtccactctctaaaccataaaatgatactagtatatccgatcttcatgttagcattgcaatataaatatacaaaagtatacagaagtcactgcagtactgatgtgtgcactgaggcctagagtggttcagatatatggtcacagaacttttaagggcccaaattagaatagagtcatctcttaacttccatctcaaacctcctccttgctataccataattctttcttaggtggctacagacaaatgctgtccagcaaggaaattttggtgatgatggaaatatactgtattttgtcgtccaacatagtagtctcaagccacatgccaccactgaagattttaaatgtagttactgcggttaaagaactgagtttaacttaattgtaactaatttca

SEQ ID NO: 309223 - DNA, 1000 bp, Homo Sapiens
gatccacctgcctcggcctcccagagtgctgggattataggcgttagccaccatgcctggcccagcttaccaattctttctttccaggatcatgactctggtgtcatatctaaaaagtcactgtgaaacctaaggtcatttagagctctcaacccacagaaaacatggaaagaccttaaatgcatattactaagttaaataagccaatctgaaaagactgcatgctgtataattccaactatgtggcattctggaaaaggcaaaattaagtaaaaagatgaatggttgccaggggttaggagaaagggagagatgaataggtggagcacagacaatatttagggcagtgaaacaattctgtatgatactatagtggaagacacatgtcattatatgtttgtcaaaacctgtagaatatacaacatcaaaggtaaaaagatcagtggttgccaggggttagaagaaagggagagataaataggtggagcacagagaatcgggcagtgaaactattctgtatgatactatagtggaagacacatgtcattaagtttgtcaaaacctatagaatatacaacatcaagagtgaaccctaatgtgaactatggacttttatgtgataatgatgtgctaaggtgggctcatcaattataaccactgtaccactctggtgggggacactgataacagaggaggctatgtaggtatgggggagggagttcataggaaatctgtaccttccactcagttttgctctaaaaatataatctattaaaacaacaacaacaactcctcccacagctttttcacatgctttagtttgggttccctcaaaggcaaatgctgtggcaagtagtttacctgagaggacattccacgaagcggtcctggaatgagtttgcaggggagggaggtgtaagagaggagaggaatatgagccaataaagggcatcaatgaaccagtccagatgggcaactggggttccatcctgctggagac

SEQ ID NO: 309224 - DNA, 1000 bp, Homo Sapiens
ttaacaataggagagggactccctcattttcagaacaaaagaggaaaggttcctaccctacaggaagtatcattcgcactggtctaaccttggctatcacttgacctgtttggggactagtcctgatgggatttattacaattttttttttaatccaactccaacctcatcattgttactctaaagagaattcctcactcctcggtcacgagcctcagcagatacactttacctcctcctggaaaacattttggaatcttaagcagcttctgctgcaggctgcaaggagcgcagacagaccctggctctttggtgagagcaaaggcgacatttcaaaaggaaattgcagccacgcagtctgctggcgctgctatttttgacatgcttgctgttctctcagggcttgacaaccgctgtctccaggagacagacaaacctgctcttggcagcagagacactgctttgaaaaagaacataggaagacagtcctgcagctgggaggggcggggaggacttgccactggaagcgtggcacctggctagtggggctgcagatctgaggttgcaggatttatcctcacctagggaatcctgaccttgcgttgcatccttcccactgggaatagtcctagcaagaataagaatggtgctattcatttacagaacattgtcaaacacgttcagtgctttcagacatcgtgcgatttaacaaagggtttaagagcatagttgctggagcctgatcgtcgcggctcaaatccctcctttgctgggtaacatggggcaagttatgaaacagttctgtggcctcagtttctttctctgtcaaatggaggataataatagtaccaatctgatagggttgttttgaggattaaatgaattaatgtatgtacagtgtttaaatgtacaatgtcagctgttattatcatcctgcagcagtgaaatgaagtaggtaggctaggctttgtttttttctttggcagataagaaaactgaa

SEQ ID NO: 309225 - DNA, 1000 bp, Homo Sapiens
ctgtactccagcctgggcaacacagcgagactctgtctcaaaaaataatactaaaaaccaataaaattggatccctacatcacaccatagagagtacattttgaccttgagtaaggaaggatttcttaagaattgtaaaacacgggccgggcacggtggctcacgcttgtaatcccagcactttgggaggccgaggtgagtggatcacgagatcaggagatcaagaccatcctggctaacacagtgaaaccccgtctctactaaaaaaaaaaaaaaaaaaaaaaaaaaaaaattagccaggcttggtggcacacacctgtagtcccagctactcgggaggctgaggttgcagtgggcagagatcgcgccactgcactccagcctgggggacagagtaagactccatctcaaaaagaaaaagaattgtaaagcacaaccataaagaaaaagattcaactatattaaaattaagaccctctgttaaccaaaagataccacagagaatgacaagccataaactggaagaagatattgccaactcatgttcgaaattgtatctagaatatacaaagaatgactatgaattaatgagaacaagataatccaacagaaaagtaggcaaaacaacaggaatttcagagaagaggaaatcattcctctgcaaaatcgttactaaatatataaaatattgttcaatattattacaaaacaggaaaatctaaattacagtaactatgtcatctcacacacagtgtattggagaaaattaaagattgataatacccagttagtgaggaaatggaacaaagtgctgcaggtgagcatgttgatttgtacattatatatttctgtaaaaataaaatacatagcagaagcagtttgaaacaaaaagttagaaaaaaaagtccatcaacagaataaaatggataccttatatccacgcagattcttatattgcaatgaaaactgaataaggcaccctacaaaacccttgacgagt

SEQ ID NO: 309226 - DNA, 1000 bp, Homo Sapiens
gatccactcacctcggcctcccaaagtgctgggattacaagcgtgagccaccgtgcccggcccgtgttttacaattcttaagaaatccttccttactcaaggtcaaaatgtactctctatggtgtgatgtagggatccaattttattggtttttagtattattttttgagacagagtctcgctgtgttgcccaggctggagtacagtggcatgatctcagctcactgcaatctcctcctctcaggttcaaatgtttctcctacctcagcctcccgagtagctgggattacaggcatgctccaccacacccagctaatttttttgtatttttagtagtgatgggatttcgctatgttggccaggctggtcacaagctcctgccttcaagtgatctgcccacctcagcctgccagtgctgggattataggcatgagccattaaccctggcctatatatatatccttttaagattcacacataataagtcagagcagttttctttttttctttctaaatagactagacagcaattttcaaaaagggaaattatgaaatttccccaccctgcctgccttctagttgcctctctagaaggaaccatagttactagtttctcatgtatttttccagaaataatttgaaatcacataagtggatatgcatatgccaccccccttttgtatttgcacagttcatcagcagagtttataaaaagtaaagtcttttttttttttaagtcttgctctgttgcccaggctggaatgcagtggtgcactctcggctcactgcaacctctgcctcctgggctcaagcgattttcctgcctcagcctcccaagtagctgagattacaggtgcctgtcaccacgccggacaaatttttgtagttttagtagagacggggtttcaccatgctagccatgctgatcttgaactcctgacctcagataatccacccgccttggcctcgcaaagtgctgggattacaggcttgagccacc

SEQ ID NO: 309227 - DNA, 1000 bp, Homo Sapiens
gatctttacatctattaattcatttattcctcagaaaagcctgcaaaacataccctgttatcctcattttctaggtggggaaactgaggcacatagaggctcagcaacttgtccaacatcatgcagataatgtaaggcagagctgggatttgaacccagtaagtcggcttcagagctctcttgtataactgcttggctataccacatctaacaccagtgggtgttttggtcggctcccatgttgctgtcactagctacagcccatggcagagtacgtgttttctgatgaagaaggaagacagcaaaatcagaaaaaatacaaagagagatgcttcttcatcacaccaccccaaagccttgtcaactttccagacttcgtgacccatggacctaagattctgctgaaagagtcttccacaagacgttaatattttctgcagctgggagaaacagctcccaccactcttgcaaattacttccactccaaatgagaagcagtcctgcagcctggctgcttagaatatgtggggatttgcgagggaggcattgctggcactcttctggggccattacttccctttggtgcccatcctgagtgtccaaaatgcatcgcctaatcccccttcacacatcttgatgtgttcctgcattcctggcagactactgctgatgccaatgatggcaggagactcctgagcactcgctgtggtgggctcaccatctccatggtactggcaatgtctttgccttgcactgccctcacatcacaaggctgctgcagcgggctcctgctctggaatccctcagcccatgcattgctgtggttgccctgcaggagacgctgccacagcctcccaggctggagctccatgtgctgacctagccaggaccaggccctcaaggcccaggtaaggatatggtgccagcccttgggactcctctgagaactcaccatgtggagcaactggaacactcatagaccgcctggaggagtgtgaaa

SEQ ID NO: 309228 - DNA, 1000 bp, Homo Sapiens
ggtctaggtgtctgtggtcaggtgttctttctcccgaggtgggcacgcctccaggttggggctcagttttaggactcttaaaatctgttttttccactcagcgtctaatagcttgtagcagtcactggacattttgggggtgggggtgggggtgggggcactgttttgcctgctccgtgggggaaaagctttcatgaggagtctggtcagcccgcgctcagattttccctcagtctcgtttttggagtgctccctgtgtccagccatgccctctcccacatgcgctctgaccaaccttcggtgtcccctggttctattctaacaacaacattgcggtccagttccctaagcttgcagtgatcctcagttaatacaacagttattacaacagtctcttgtgtgttcagacgcagccctgtttgtggtaaacttcacattccacgcaaagcccttctcacccatttcctggggtgggcaagcctggtgggtacagatcttggcttgggacgtggcaaagacgccctccttgaccgtacttcagtcaggatcctctggccgtctcttcaatgaggcctcacactcgacctgtccttggtttgccaaggcagttttagcaaagaatcttataaaccagtgtgaatatcgccctgcccttgatatttgatcaagttgctcgtcccccacccttgatacctaggctcctcttagtaatttcccatctaaggaaactcctcactctgcccatcggctataaatctgcaactgtccctgacgtgtcaaagttgagttcagtctttgtcccctttgcagtagtcttgagtaaaatcttccttgcctatttaactctgtctggtgtgatttttctttgacaaatggctggtcagttctcacaccagtgcccctctttgtcctggtgtggtagggtggggtgcagaagggccaaaggggcatctcattttgatactgccccaggggagagcgctggtgagtctggggagtc

SEQ ID NO: 309229 - DNA, 1000 bp, Homo Sapiens
agtttctttcacaattacacttccagagatctagtagttttacggatctcagtgttcaaaagtgtatttcaaaatgaacaaaaccaaacccacaccaaaaggaaatagcgtttagattggtttggaatgtatagccattgatttcaggtgttctcagaaacaggttaccatttccttggaaaacaggtgggatacagtcaatgcccacagaaggaaatgtcttttaaataagttagttactcggacaatattattcactccttagaaaatatagtaggataacaagtcacagctggcagggtatgcagtacagcaccgatttcacagggggcttatgcaatcctggagtcagcggttgttggcttatggtacacaaaataagagcagtcactggaagtggggagaaaatggtgaaaggcaggcagtctcccgcagtcctacccagccttttaacttgctaaaaggagaggctgtgtttttagcatctttgggagaacatttgagacagttcaaaaacaaaaacaaaacccccagtattattcccagaaagtccttgacagaaaagagggacctggtcagggttcccatgggggactgcgcctcccatccacttctgtctccacgtgatacaagacgtcagccagggtgtgctctaccacggcgccccagcccatgtcactcatctgcaggaggaatgagaaacagaacacggtgactacagcagccacggagatgctgaggacacatgcagccatttgtaatgttactcacagggcggtaagtgagatccttcggaggatacttgaagcatggtccaaagttaatggaaacctggagcgaattcaattcaagcagacatggaaaaaatggacaaaaaatattggaaaagttaatttgacacaggaaattttcactttaaatgtggctacaatactcgggggataaatggaacaaataagatatatattaaatattactaaaagtggtcaacatcctgatg

SEQ ID NO: 309230 - DNA, 1000 bp, Homo Sapiens
gataagctcctattaagtaattatttaatacaatctgacctgatctgtcataatcattatcttcccataacgaagcgtcttcaatgaatcttcatcttcatagtttttcttgtactgaagacccacaatcttgatgatattgttaatctcagcattttccatgatctgaaatggacatataccaaaaaaagcatcgtttataaatttgaaaagaacaaagaaatttaacagtatatgttgcttggattttcttgagctccagtattttgagctattagcttataatttactacatcagaaaggtctgttaaaataggctacaatgtaccttatttctcaaaataagcacaaattgtctaaaatatattttaaaatgccattagtgggaattaaatataagcataaagtcttgtattataaattagatttagattctgaagatcgtcttatattctacctgcttatgagaagcttctcgaacattgagtatttttcctctaagagggaaaaccccatatttgtctctcccaaccacaccaaggcctgaaacagccaaagttttggctgaatctccctcagtcaggataagcgtacactcagtggagtttcggccccctaaataaaaatatacatattaatattagcacattagttcaacctcaaatatactaacttgaacatgctgtttatagccttgtgataaaacacaatttactatataatgagcaaaattatttgttaggtaatagatcataatataaacattcttgttttatactccaaaataatcacctcaatattatttataacatggaaatgacctaaatcttccataataggaaacgggccgatttttaacaagttattctgttgaatatagttattctgtgcaaggaaaaataaatatccgtggtatgccattaatgaataaaataacaactataagacttaaaagtttggaaacattattaaatatatacctgcatcattggcatcatcg

SEQ ID NO: 309231 - DNA, 1000 bp, Homo Sapiens
ccaaagtatcaagagtgccaaggagaaatgcagaatctcacaggaaagcagaattttttttaaaaagttcctgtaagagaatggtgccttgaaacagaaacttaaactgtgatgagttctccaaaggtccgtgagaaaaaaggataggtgagaaacagagttaagagtcggtgacagggcaaagggcacagaggcatttctcaactgcagagatgggagaaccctggaggttggccacctcccttttcatcccatggttgatcgaactccctctacatatcccagactaggatcgcccggcctgtccttattttagaagaagtcacctctcccacccccttctcccaatgccccctttcaagcacgttgtcacccacctccaaggaccgtgcccaggaagatgcatttctttttgtggcgtttcagaaaattccatacagacctcagcatctttaggccctaggggtgtgggctgactaggggtgagggactgcttcaccaggaaactgtttcttcgtcacctggcccagatgacccagcaagagcgccgtcgtcccgttctgtgctctcccgaaatcacaaacgtgactttccgcagagactgtcaccggagcggcaagggggcgtggactacagcaaagcagctacgctttctgccgctgccgccgcgcagccgccgccgctcactggtccgacaagcccaggtccgttcagaaatagctcccgagtgccttttcattagactacccccggaaacggggtcccgggcccgccgcgttccgctgcccgcgctcctcctctgccgcgggctctgtagctgagtggtggctgggtatggaggcgaaggcggcacccaagccagctgcaagcggcgcgtgctcggtgtcggcagaggagaccgaaaagtggatggaggaggcgatgcacatggtgaggagcccgggaggtagatgctgcggggtgggacctttctccagccctcaacccgaccccggcattt

SEQ ID NO: 309232 - DNA, 1000 bp, Homo Sapiens
gatctaatttttctttctgcatctcactattgtactttgtcatgaggaggtctcacataaataatgtgttcttacgaaagtttttaagacacccaaagttggacagcagtgttacaaatgatgtccgacacaaagaatatcaattaatcaaatggtaaaacactacaagaactcacagcacacaagtagcagagggaaagataaattgatttttgctgcagcagtgcgccttttcagccgcacaactgtgtgaaaaataccagtgaaaaagtgtgctgaggcagcagaaccatttaatactccacaaacagttatctgaggcaacgtccaataaccagacagcacagtaatgtgacctacatactaacaaaatcatttttagacatagaagcgagtccacactggcccccgggataccagttagataaccagttatctcttgcaaccttcccggaactttgtctttgccccctttccccatttctacagctaaaatgtgttatcagagaccattcagagagcaaccagaaagatgaagcaaacatatcactccttaagtcatttcattcgcttggcgacctcttgagtctctgcattttcatagcttttttgtttgttttgattccccttacatgtcttcttttgtgtctgatggacttcttgtcttttccagaacttttttcctagaccagggtgggaaagtcttgctgttgcctgaggactcttcttctcaggactcctcagagatcttgccaagtgtggttaagttgggcaggggacagggctggggggacgccacgaatcacactgtcattgaatagcatcataagaaattctcaagcgccattttctccaagctggcctcatcaccaaagatctatctcatggacccttcacaggaaatcatggtgctccacttgggaacatagcctagagtgagaccgcacaaaacacagactgctggactcgaagcagagctctgtgcgaccacagagtgact

SEQ ID NO: 309233 - DNA, 1000 bp, Homo Sapiens
gatcaagcgggaccagtctctgctccacccaacccctgtgaaccagcttctcccagccagccccagcctcctattggcctggccccgccccacctggccagccccaccccctatatgctcagccccgacccttcccagggcctctccccctggagccagtccctcctaactctacgtatttcacccctccctgcagtacctcccctacccaagaccccacccttgcagcctcacccacagacttcagctctggagaagcctcgggcctctccagggctacatcctcagagccagctcctccccacccctgcagccacacctctccccaagggcccacctttggagaagccccacccctccccagggccctgccccacaggccccgccctcagaggcagctcctccccaccctgcagccccatcccctccccaggccccgcccctgcaattccgcccctctccaaggccccgcccctgcagcctcacccacagactccacccctggagaagccccgcccctccccagggtcccaccccagagccagctcctccccatgctgcaggccccaccctccccacaggccccgcccccagagctagcccggcccctctcgcagtcccgccccggcccccgccagtcacctttgctgctgccgtcaggcccccggagcacggtgcactcgtcaatgaccccgaagggctggaacagccgcagcacgtcctcctccgactgctgcttgttcagcatccccacgaacagcttccggtcccctgtgggcggcgacacccacctcagccgagtccccggcctccgggagggcctccgggattcctccctccctccagcagagtggaggcggcagggcaggaagacgcggcgcccgggccctgccggctccggttctgcgcgtgcgagggaggacccagccgcgccctttccctgccccggatctctccaccctcccacgggccctgcacgctcccatctcccggcctttgc

SEQ ID NO: 309234 - DNA, 1000 bp, Homo Sapiens
acattttttttttctttattcaaaacacttagtaaaggaaaaggacacaaggaaattctgattaaagtcttctcctgctctgtttgcaattatacatgctttcaaagtcatttgaaagtaagaccatttcctttggcaggtatcttgtataaagtaactttacaacatatgtttcttgaacagaaactttacaccactgtcattatgttacctatagagacaaaactactaacacaagtaatatgggcttacaattataacacaaacctgtgagagggcatgataaaattaaattttgattgccttcttttattattatcactactactgtctgctcacaaattctgtggccagagtccatttcaaatccttctaagagtccacttcatgagttaaacatatacatatagaacaaagcaggtatactgtaatttttaaaagtaaatctgttttacatagtacagctggaggcagtttaatataatcaaaagttatagctctaaaaaatatgatagtagaatattaaacctcaggttacgttaggtttgttaactcttgatttgctttgagtaatttttttcttcaaaagccacattccaagaagatgccttaagtatcaatgagctatatttgaagtacatcaactctgtttaaagctgtccaacaataaggacacaagcagtaaaatatctgaagcatgaaacatgtaatgttgatgactaatgttctagatcatcaggaataagattaacgaagagcaaagtaaatctaaaacaaggaaagggaagatacatttattaaaaataaaaatagtacacaatctctgataacaaaaaaagcatttagggtcaaaagacatccaacatacattgtaacaatgcacacatattaattaaaaaaaagacccatgaaataatttttaaaaaactttcaaaaggaaaaaactattttggcttccttctgctgaaattcgcctataaacataccacgccagctagac

SEQ ID NO: 309235 - DNA, 1000 bp, Homo Sapiens
ctgataccaattggtcatatttttatttttaagtaatttatatttttacaggtattcacattatgcaataccacacactgcggtgacaggaagaaaaaaacatttcaaaatacagtgttaaattatctgttcattgcacagtatgaaatatcattaattagcattaaaattattacagtgtatcttatccaactaaaggaaatttcacatccactacagaagaaaaataagcaatattgattgagccataggggacccagttacatagtattaaataatatctgaagctagtttgaaagacatccagacaaaatacttttcaaaaatgaaacccacagcctatagattcaaaatattttacagaaaagaatagctcatgcctgccctaagaggcaacaccacttgtatacaagtgccaagaaataaggagaaagttaggattttagctgaagattctataataaagcctggcatgagaaattttcttcattaatgtcaccgaaagcagtctctgtgttgcacctgaatacactttataatagaataaacatagtaagtttcaaagcaaattgtgtataccttgccttaatagattacacttaatttagtacaatacagcacgtcaagttttaaaaatgcaaaatacacttaatacataatttgctttctctgctttgccttaaagaggccaccaaagagtccattaaacagccagaattttctagttattgaagctgatccctctcttttcctggtgtcaggagaacacaactgaggtgttaccacacagagccctttcccagttaagaccctttccccttctgttctcccacagaaaccgcagttttctgttactgtgctccatcttgattggctttgatcttatgctagtcccaatgtagaaagctcgcattcttcttaagagtggcctgcccctcttatatccctttgggaggcccccaatccaaaacacttgatgatctaagctttttacaagtct

SEQ ID NO: 309236 - DNA, 1000 bp, Homo Sapiens
gaatatttatagatttatttataatgaaattatggtctaaatatttacaacatataggaaaccagaggataagtttatacaaagccagcctgcaaagtattcaaatgtgcaaaaatgacagttcaatatctcaaactattcctggttcagcagactagctccttcactttcacacatcaatatttgatacaaaaagttattttggcaaaatctgtaatgccaagaaaaaggacaatttgcaatttcagtcattaagtccaaaatcctatagccagcagtcagatctctctgttttagctgcaaccagttctgggagagagagaccactgtatttcatttctgtgatgagttctgaccagttttagtcaagaagttttctctgacccagctgaagacaggatcttagaagggcaataaaaacagtaatggctatgagaccaatgtgcctgaaggtgccagctttggatcaccccaattaaaaaacacaatgaaaaaataatttcattttcctatccaggatccagctatatccaacagttttaaatgagacagcattttccaaaacagaaataatccaaaacaaaacagggatgcagatctgtcagaattaaatactgaaaaggacggtcttaaaatcatttccccactaataaatagtaaggctctgtttgtaaccagttatatatcaaaattgaccaaacagtagtaaaatacaaataaaactttctttatgtcagaactggggctattcacctggaaaaggctgaccaggtcaaatgtgtatgggaacgaccctgttaggatgctttgttggacaagcacatttcaccaactgttaaaaagcttctgagataaatttgtgattctaattaaattttaacagattctatgccactgcagaaataaggatttttgtggttgttaaggaacccctttaagaaaggggggcactgaatctctaacttctgcaaaggtccagatggttcccagcacaggcccc

SEQ ID NO: 309237 - DNA, 1000 bp, Homo Sapiens
gagctctccgtggcaagcagctacgttcacctgagaacgcagagacatggagttgggaaagaaaaagctactccctcacctcccatgtctaaaggaaggatgttcaaaattccttcctggtcccaaacacggtgcatggaaaatattttttgaaaacgataaaaggatattgagagctaggccttttgactatttggtaggcttaaagtgtattttaaaatgccagccagaaagactgctgcagctcctaccttctcatcccggcagtctgataggttgcattgctgagttacatactttcctgaattcagtggtcaagaaagaaccctgccatttccaggacaagggcctgcatcctatggggactctggtgagacagtaaggaagtgaagcccccacttaggcccagggctcatgcaaaggtcaagagccagcctgagagagcagggagctgtcagaccacaagggtaacctttagcgatggaaatgcgggtggcctcacaggtgcttcctttggttcgttaggcagcattttataagaataacctaaaagtgtcctacccaggttctatgtgcggtacaaatgcaccgatgtatttattttcccactatgttatagattcaaattttaaaattaataagctcccttttatcagtcataaaatgaagaaaaaaaatctcttgactattagacctatgacccagaacaccaaacaaggatgcccattttagggagagtcctgtctgaaattttggatcggagattttcaaatgggctattttgtacttaattttatcaaaacctagttctagtctaggctatgtgacaaaatatctagtgactttgggcacatcccttaacgtttctgctaatgaggctattggacctcaggatttctagtgtctttccaactccaaaattctatcttggaagacactttcttaagccaatgattaaaagaagcttacgttacactacttcactttgttggcaaagaag

SEQ ID NO: 309238 - DNA, 1000 bp, Homo Sapiens; identical to SEQ ID NO: 120053

SEQ ID NO: 309239 - DNA, 1000 bp, Homo Sapiens
cctttcctggatatcttcagccttaaagaacagtcacaaggccacccattggttgaggaagtcattggagaatgggagtttcggaatctggctgccgagtgacagcatccctgaatcatgcgttccctgcttgtcccagctttccttccatcctccaccccagggaggatgcagggactggccagaatggaggaagagctggaaagactcgtgggcctcagtccctcattgcaggctgaaggtgggcagcggagcacatagtcttgtcccttccaaagcatggccagtttagactgattcttcctatctggcttctaaagtctagcaccctcctaaagttactcaccttccctggctctgcggcctggattaagctcatttctattttgcaacccattcccccattttcctctctttcctctcaaatcctagaaaatacatatggtggggaagctaaggaaatttctattggcttttccccctttctgctgctttgtgccaaagctagaatggaacagtcagccccctctcccttcagccctctgttcctccccacatcgactctggccggaaccatccatcttactgttctcctgcatctaaacctttttgccaccatctccctctgccatctcttacttcagtctccctcctgctctgccagcatggagagtgagggaggcttccaaaaatgcacattctgttcagatgaaaggaaaaggctggggtgggactggtggatccatcgtggacctgttgggctcatgtggtgtggtgtccggagactgtgacttcctgagggtttaaagactaaaatgggatggactgaggcgcgtgctgtgtgcaccacggagggctggcctctgcctggctcggtgggtgcagatgaacacacgtggggaatcactgtcaaatccagtactgtgccccacaaaaaagctgagtttattgctcacgggaaactctgcctcgaggcaggcaaaaatgctattacgggttg

SEQ ID NO: 309240 - DNA, 1000 bp, Homo Sapiens
cagccagagtccccgggccaggcacctcccccaccatttttcccgcagagataggggaacctccagacgttgcccaggccgatggcatagcccacacaggacatgaggaagtcgaagcggcccttccacgtgtcccggtcggggaggtctgccgccttcttctgcaccttgaccaccaaggttttgggcttgtcattggccacaggggcctcgctgacctcggtggagatctgcccgtcggccaccttgctgccgttggtcgccatgtctcggaatttggacgcaggggtcctggcagatggacgtgcgatgtcacccccggtccacgtggacagcagttttgcggctcaagggcaccctaggaggacggggtgggtaacaggcacagaaagagagtaggaaccttggagttgcctcaccctaaaatgacaaaaacaaaataacccataaacaagctaggggcttgaaaaggctctctataagccctcttcctctcacccgcccttgctcctggaggaaggaaggtgacttttgtttccaaagacacagcgatgtttcctggcctagcttcaactctggccatctgtgtccaaccctgtgttgtatgtcctgctcagaggagaatctgagccacaactccaacagaatgtaagtacttaatcataaaatcttaacttgcctccaagatgcaattgggagccttgtcacactctgcggccatactagccattcggcccagggtgagcaagaaagaagctccacctgtggctgaatggggagaaaggtgtccccactacggaggtgtctgggtgaagacgacagagcctaggagttacgacctctgatcacagtccactttaccacatttttttttttttgagatggagtcttgctctgttgcccaggctggagtgcagtggtgccatctcagctcactgcaagctctgcctcccgggttcatgccattctcctgcctcaagcctcccgagtagctgggact

SEQ ID NO: 309241 - DNA, 1000 bp, Homo Sapiens
atatttatttttggtgtttctttgagaaggaaatccatcggtaagtttaaaatgagcggattaaaaaatgtggcataccattctcttttcaagaacatatgtgagaagtggtaagaaatacacatggttggccaggtgcagtggctcatgcctgtaatcccagcactttgggaggccaagacgggtggatcatgaggtctggtgttcgagaccagcctggccaacatagtgaacctgtctctactgaaaatacaaaaaattagccaggtgtggtggcaggcacctgtaatcccagctacttgggaggctgaggcaggagaattgcgtgaacctgggaggtggaggttgcggtgagccgagatcgtgccactgcactccagcccgggcaacagtgtgagactctgtctcaaacaaacaaacaaacaaacaaacaaaaacatatgggaggggaaaaaattcaattttgcacttgacaatgattacaaaatcccttattatccttaacatccaggaaaatactcactggcagtttatttccattaagaaagactttgacatctttggtggatccagcaatatcatatgctcttctgaccattagtgcaacaatatctttgtccaggctttgcattttaaacttagacaaatcaggctgaaaggtgatacatgtataatcttctccattgaagggcttgagttccatctcaccagctcttcccatattatccatccatgtctatggaagtaaagaataaggaaacatgaaaaattcaagtcatctcacaaactggaagtaaataacataaatttatgagtcctaataacctaatatatatgcttataattttccatacttcaatagcttataaattatgttaaattaaaccaatcattaatgccattataaatggctatactactaccatttatcattaaggtacaagacacttatttacttgcctgtttgaacattttcttgtattctctactggctgtttcc

SEQ ID NO: 309242 - DNA, 1000 bp, Homo Sapiens
aaaaaaatgaagcactcatagatgctacaatatgtaagaatcttgaaaatattatgctaagtgaaagaagccagtcacaaaagaccacatactatattattccatttaaatgaaacatgcagagtaggcaaatcttagattcatgatggcctagggctggggactaggttaagaaagaaatggagagtggctgctgataggtacaggtttccctttggggtgatgaaaatgctccaaaattgattgtggtgatggttgcgcaattctgtgaatatacaaaaaaaatttactcgtacactttaaatgggtggtttttacggtatgtgaattatatctcaataaagctcttattttaaaaaagagagagaagaaaaaaggaagaaggaagaaaaaaaaaggaggaggatgagggcaaggacaagaagaagagagaggaggaggaggaagaaaaatgaggaggaggagaaagggacgaggaggaaagctgggcatggtgatgtgtgcctgtagtcccagttactcaggaggcagaggccaccctgggcaacataatgatatgccgtctctaaaataaataaacaatgaagaaggcagtgtgaacgaccaactgtgtcaaacaccgctgagaggtcatgtaagacaaggactaagaatggaccattggatttttttgtggggtaaaatatacacaaaacttaccatttagccatttttaggtgtacagttcagtagcattaaatacattcacactgttgtgcaaccatcaccaccaaccatctccagaagttctcacctttcccaataaaaagtgcagtggcgcaatcttggctcactgcaacctccacctcctgggttcaagcgattctcccacctcagcctcacgagtagctgggattacacgcacatgccaccacacccagctaatttttgtatttttagtagaaatggggtttcaccacgttggccaggctgatctcaaactcctgacctcaggtgttcc

SEQ ID NO: 309243 - DNA, 1000 bp, Homo Sapiens
taaatatttctgggtcccatcctgggagttctgattgtatagttcagagttgggagccaggaattcgcatttttaataaatcatccaaaatgactctgtgatatatggtcttcagatacttgagaaacactagcccatggtaaagagcaaacagctatatgattatagtttacccaccaatgtgtaagcatacaaaaatgtaaaaagcatagctcttgccatctgggaactcacaatctaatagagaagatagacacataaacaaataaagggagttaatgtgttttagatattcaaatatagatatgtagatggtaagaatcctggagttgaggagaactcatccaagaatgtgagttcttcctgacctgcctgcatctccagccctgcctctcacaacccctctccagcatgttacgggtcaacccttcacctgaactggccatgttcctttacccctttcacatttcttggatgatagtaatttttccagtaatgccattaaacccttcttagcttagcaaacttcctttaaggctcaacttgagtaccatcttcttggatgagttctcctaaactccgggattcttactatgcacatatctatatttgggtacctaaaatgtattaactgcctttatttgtttatgtgtctgtgttctctattagattgtgagtttccagagggcagtagctatgccttttgcatttttgtatacttatacattggtggtattttatatagtacatatactaacatgtattgattggatgtaagaattagtaaatatattaatatttatattttatagataattaaactgaagctctgatatgttaactgacttgtttgaggtcaactaaattgcagacacaatcaaggatatcacactttttggactttcgttgtttttctgatcatacatacttcctttctaacatgatagggttattccctctgctcaagtgagtcttgaatccgggaagtgttcaacaggac

SEQ ID NO: 309244 - DNA, 1000 bp, Homo Sapiens
tgcacaagcccagtgtctcaacctgtcaacaaggtcactttcttagggatcactctttgtccaaagacattctgacatcattgttagaacacctacaatgaaatttactagagacattcaaccagtgaaaataccttggggtacaatggatcattttcagagtgtatctcataaggagaagactataataataataataatttttgttatttaaaattatgaaagtcaaatggcaatcaaaggtatcatattttcatgcattactggtggtttgttactaatgggaaggactactttcttacatttatttataattattttagaggaaaaaaacttaaatataggagacaaggcagttgtttctccataggactatataaataattgtttcagttataaatttttaccttgaataataaagtgctttggtgcaaatatttaggttttaatcatgcaaagctgtcaattcaacttcatcgtgcaaaccaatttgatattatatttatattgtacttccccaaatgtataaccttgtaaaagcttgcttaaattaccattttttaaaaaacttttgagaaatctttttattatgaaaatattcttcaggagttcctctgtgtgtgtgtgtgtgtgtgtgtgtgtgtgtgtgtgtgtgtgtagaggagcagccctaaggctttgtttgacttcagtgcttctcttctctggtgctcaacttgcctgatgcagggcaaggatttggaactatcctctcagctctctgatttatatacaatatatacaaggatagaggaaatagtgtaatgaatttccatgaaccaatcatccagttttaataatctcatcaccttttagtacttttagtactctttaggcttctttaggagaacagttgatgtattaaaagatatagcagcatttgagacttagaaaaacgtcaagaaacttgtgaagactcagttttgacactggaagcctgactgaaagatcatacattttt

SEQ ID NO: 309245 - DNA, 1000 bp, Homo Sapiens
ttcccatcaggctttgttgtttttctttttctaaataggccattagaaaaattttggaatttcttatgtaatcagagagaatccatagaacacccaagctgttccaagtgctaagaggaagtgagtagtgcaagatgaagtctgcagagaagactttcgcaatctgcgtgactcctgcagtgtgtggggagctagccaggggccgggggatcctgatgaaccgtgtctgcgtgacctgtttgtgggggccatccctctctccctggctcttagtgttctcatctgaaaagcaagattgttgaatgatgtgatttttctgactcttgtaattctcaccctaaaattttatgagtctaacttcccattgctgctttttattttcttctaagtgaaaagttccaaagtaaattgaacatttacaatttgatcttctatgactgtggtatatttaggagtctctctctctctctctctgtaagtatgtaataagtgatcagaacacaagattatctaggatacatggatggtcatcttcatcgtgtttattttatgcagctggaccaaagatattttaagattgaattaaaccattaattcttcttcatagtacttttagcattgtttaaaaggacatagcagagctttgtaaaagaggagtctagaagtattttctgtggctgaaatttttagagaatataagaatgggatatatttttacaattaaattaaaaaaattagtttataaagggagaaaagcaagttttgcctagtcgtaaactctagacctattgcctatattctgatcaatactgcccatatatccagtttctatcacagtcacaaagggagtcactatgtgattatgtgcttgctatctaaattgttaggcagctcttagaacatgaacccaagacatttggtgtgggtattcctgataaaaatttatttgctattgaatcatgctggttcagttcaccatatctttcctcagtgcaggccg

SEQ ID NO: 309246 - DNA, 1000 bp, Homo Sapiens
gatcttccttgttagaaacaaaaaaaaaaaacgcaacatgaatgatatgttgcataaagacagaacaaagatagaaaggaatttaccatatttcagcaaaaaccttttctgaaaaggcaaataagttttagtaggcataggaaaatttgcaattctttcatttatgcctttttttatttttatattcactgcaacaaagtgctgaaataatttgaatttagaaccataattccaaatcaaggtgtcaaaccaagattttttaaattaataaagacattttaatcacatttttctcattctaaagtataacaattaaaatattttagtgagaataaatgtactttttatagttaataaaaatatattctagattattctttttttatgttctttttatttttatttatgtgcattccgcaatatgattaatatattcatacaacatacatatgtgtaatttccaagaaatgaatgtgtgtatatttttggagagtactcaaaactttttattgcaatggtgaataattcagaagattgggagattgctagattagagcagtaaacagtcccatagaagatatgagatctgctattttcatgtcaggaaggattttcagctgtctttgtaaatgtagtcacatctgaattagctataaattagaagatctgattaacctgcaatggcagatatatgagaacataaaagagacaggatacctactaagggtttaggggaataagagtgagaaactgagactcttaacccattatgaagaaaggccaggcgcagtggcaaaattatcatgcctgtgaatagccactgcactccagcttgggcaacatagtgagaccttgtctcttaaaaaaataaaataaaaaatcaaactattctttctccatgcttttactgaatattttacgtgtgtgcttgggtatttattaccctctctgtcagtttactttcagtaaaattaggaaaaattaaaatatatatgttaaa

SEQ ID NO: 309247 - DNA, 1000 bp, Homo Sapiens
tcatctacatgtttcaatacagcaaactctccaattctcagagttccctgaactttaatctgcatattaagagattttccctttcatcttactttcaacagcctggtaaaattatcacctcttagaccacctttttataaaaaaaaaaaaaaaagagggtttcactcagttgtccgggctggagtgcagtggcatgatcatggctcactaactcctgggcttaagcaatcttcccaccttctcttgagtagctaggattacaggtgtgagccactgcacccagcaccttaagccactgcttaacagggttttaccatttccccttttgaagaaatgaattttataatgatatgtaggttgatataactactattaatcacattcttatttactaccacgagtaactttcttaactcctgacctagaatataagtttacagaaggaataaatgtgctttaaaaattattgcaacatcggccaggtgcaatggctcatgcctgtaatcccagcactttgggaggccaaggcgggcatgtcacctgaggtcagaagttagagaccagcctggccaatgtggtgtaaccctgtctctactaaaaacacaaaattagcggggcatggtgtcacctgcctgtaatcccagctacctgggaggctaaagcaggaaaattgcttgaacccaggaggcataggttgcagtgagccaagactgtgccattgcactccagcctgggtgacaagaatgaaactccatctcaaaaaaaaaaaaagaaaaaaagaaaaaatatattgctacatcacttaccatagatagaagaaatctgggcatatatacaaagttatcagtaaaatataaagaaatttgtattgaagagatgatactgagagaaaacctgagggaaaaggtggtttcaagaaaaggcaaaggaagggctttccttttctatgtcatccatagcaaatcatcgactaatccaatatttcctaagcaattataca

SEQ ID NO: 309248 - DNA, 1000 bp, Homo Sapiens
actatataaagccaatattaacagaattgaagggagaaatagcaatacaataatagtagacttcaatatcctacttttaacaatgtacagatcatctggaaagaaaatcaatagttaaacagcaaacttgaacagcaccatagacctaatacacatatgcaaaacatcccatccaacagcagcaaaatacacactttttttcctctatgagagtttataaaattattttagaaatttaaacatcattgtcttgatagaagaagtgttaagtacatccacagaacaatgtatagagtcaactcatgtacacacaattctttagaacatgatcatgtctattttaagcagtgagaaaatgatgtactattcaataaatgatgttgggtcaatttgttatctatctgtaaaagtaattaaatagctttctcacaacattagaataatatccaaataaaaaatatacaacatatatgaatattgtggggtaccaaccctccaaagtaaaatatagaccctagaagctatgaaatgtgattacataaaaataacgttattacataagtattaaaatcttgaatatgacgaacaggtcataagcagtttgtaaaaatcgacaaggtttctatttcaagacagtgcattgctcacacattaaaacttccccttttgtttaagaacttaggaattactacaaataaaataaaaaattattcataatgatatgccaaaacaatatggggaatcttcatttgatcagaaactaaggaatctctggaaattgaaaactctgcaggtggtagatgacatataaaggtcactatattaatcctcctaatcactgagatttttcaatgtgattcaacgatagtcaaagattaaagtgtaaaatttaatgtatttccttccgaaagtgctctcttaggattctgtgtgctcagcttagaattctatacttcatttgtatcacagatgaatttcatttgtatcccatattccacat

SEQ ID NO: 309249 - DNA, 1000 bp, Homo Sapiens
gtagagatgaggtcttcctatgttgctccagctggtcttgaactcctggccttaagtgattctccctcctcagcctcccaaagcactgagattacaggcatgagccacagcacctgtctacattttttttttcctattaggctatattttatttcatctattgatattagttgttctttatatactctagatattaaccttttatttagcattttctctccttccttccttccttcctctctctctttccctctttctctctctttctcccttcctccctcccttccttcctccctccctccctcccttccttcctccctccctccctcccttccttccttcctctctctctctctttctttctttcttttttctcccctccttccttcctccctttttttttttgacaaagtcttgctctgttgcccaggctggagtgcagtggcatgatctcagctcactgcaacctctgcctcctgagtttaaacgattctcctgtctcagtctccccagtagctgggattacaggtgcacaccaccacatccagctagtttttgtatttttagtagagatgggatttccccatatttgccaggctggtcttgaactcctgatgtcaagtgatctgcccgcctcagcctcccaaagtgctgggatacaggcatgagccacctcgcccagccaggattctttctttttagaacattttctgtcttgttagttccacatgcctacttgaggctctgtggtagaaaaagtcttgatgggccgggcgtcgtggctcatgcctataatcccaacactttgggaggccaaggcaagtggatcacctgaggtcaggaggtcaagaccatcctggccaacatgggagaaaccctgcctctactaaaaatacaaaaattagccaggcgtggtggtgcgtgcctgtaaacccagctactcaggaggccgaggcaggataatcacttgaacctgggaggtggaggttgcagtgagccg

SEQ ID NO: 309250 - DNA, 1000 bp, Homo Sapiens; identical to SEQ ID NO: 120054

SEQ ID NO: 309251 - DNA, 1000 bp, Homo Sapiens
agcttgttcatggatgaggtaaagtagcagccctgtcatggcgtgaacaatgaacaaactagaacacttgtgcttgcgtgaaaaaggcaaagagccaagccgaaattactagggcacgttgatcattttggggaagactaaggggacatctcacttgtcagtcattctttggaacaaagaaataataaaaaaaaaatgtacagatttaactggccacccaatgtgtgtttttataaaatcagaattctagtaaattcataaatgaaaaaatggcaaagctgaattagatgaaaagcctctgttattgtagttaagaaactaaaagcatgtgaacaaagggaaagcaagtgtcctagttggtcccagctttataatgactgtcactgaagtgttcatctaatttgtttctagagggcaccatagatggtgatatacaggccatagggtcaacagcatagggacctggttcagaatttagtcatcttggacatatttcttaacctctctggtcttgtttctttacagaggtatttggaaggataaatcaaatgcaaacaatattgccaaagtttgaacaaataagagaaaattaattgtacacctcccactctgccttaggcacgttggtcccttctctgtttccggaatatgcttggtgctctacctcagggaactttgatttgttatttcctctgcccgcagtgcttctccgttggatagcctcaggtcttgctccctcagctcttcacctctttgctgcgatgtcaccttcatattatggccttctctaggaccccctgtaaaattacacacctctaacacatcccatctcctctttttcctgctttttcttcttagcacttatcactctctaacattcaacatatgtctgtgtcatgtttatcatctttggtcatctccaccagaatgcaaggtccttaggcaggcacttcggtccgttttttctacttttgtgcccctagatcctgggatcctgcaa

SEQ ID NO: 309252 - DNA, 1000 bp, Homo Sapiens
gatccacccgccttggcctcccaaagtggtgggattacaggcgtgagccaccgagcctgcccccatttttaaaactaggttgttttttgggtattgagttgcattaattccttacatattttggttattaactccttatcagatgcatggtgtatgccagcatcccccagcttcctggcctatgtgccatgggcgtttccctcctgggtgaggggactcggggcaggctgtggttacctgtgggtgtgtttgtctgcatgagagtggatgcgacagtatccatttggcatgcaaagagctggctggaggtgtgtctttgtgaccatacgtgtgggtatagtgttgtgggttgggggcccctcccttcctgtgactatgtgagattacatgcatgactttttgttgatttgttttgagagagtctcgctctgtcgcccaggctggagtgcagtggcgtgatcttggctcactgcaacctccgcctcctgagttcaagcgattctcctgccttagcctcccgagtagctgggattacaggagctcgccagcacacccggctaatttttgtatttttagtagagatggggtttccccatgttggccaggctagtctcaaactcctgacctcaggtgatccactcgcctcaggctcccaaagtgctgagattacaggcgtgagccaccgtttccggcttcatgcttgagttttagtctggtgtatgtgtggttgtgttttgaatgtgcctgtggatctctgtgtttgtgtgtatggttttctatatgtatacatgtttgcataattgtgtgttttcagaaatactggtggggcttggtggcttatacctgtaagatgggaggattacttgaggccaggagttcgagaccagactggggaacatagtgagtccccatctctccaaaaagaaaaaaattagccaggtgtggtggcacatgcctgtggtcccagctactcgggaggctgaggtgagaggattgcttg

SEQ ID NO: 309253 - DNA, 1000 bp, Homo Sapiens
gatcatgtcatctgcaaatagagatagttttgtttctttttttttttcccaatctggatgctttttttttttttttttataacacaatcttccctaattgtcccggcaagatgccttatattatatgattcctttttgtaaaatgtccagaaaggaaaagtttatagagacagaaagtaggttagcagtcatctaggcctgagagtgggaatggaaagtaagcgcaaatgggtacaagatatatttttgtaatgataaaaatgttctaaaattggaaggaagaaacaattgtacaactctgcatttactaaacatcacttaattgtacacttaaagtaggtaaattttaaaactgttaaaaacatttaaaaaatataaatatgttaaattcatcacttaaaaaaaggagattctcagattgggttttaaacatcctgctatatgttgtttaagatgacacacataaaataataatttctaatatttactaagcatttacattgttctctatgtttaatccacacaagtttatgaactagaactattattattctcattttataggggaggaactaaggcacaaagggttcaagtaacttgctaaaggcttctgaaccaggtaatgacaaagatgggcgttgaatcctactcactagtttatatggctctcttaagtgggagtgtttaaaataaagaaatacaaaagataattcaagaaaattgtaaacaaaaataaaacgtgttaatatcataaaattaaagtcaaggtaaaagacattaaaagagtagtatttcatattgataaaaagcccaactaccaaaagatacatcagacataaacctttacacttacaatatacaaagcaaaaatgatagaaattcaagggggggaaatctacaagtttaccgttggaggggaatatttgtttatctctctcataaattaagcaaaactttaaagacatggagaatttggggtttttttgtttgtttgtttgtt

SEQ ID NO: 309254 - DNA, 1000 bp, Homo Sapiens
gatcacaaggtcatgagatcgagaccatcctggccaacatggtgaaaccccatctctattaaaaatacaaaaattagctgggcatggtggctcatgcctgtaatcccagctatttgggatgctgaggcaggagaatcgcttgaaccaatgagccgaggtcactccactgcactctagcctggtgacagactggcaagactccgtctcaaaaaaaaaaaaaaaaaagaataaataaataaaatttgacaaccatcagatgttgaaaacttgaaaccatctgaatggacttccttcttggccagggcactctaaaatttaacctgaaagactggttcaggccatgatgggaagttggggttgcacatgcctcactatatccctccagcgttaacatcaacacagaccttaagtctgataggaaacatttacaatctattttctctgaaacctgctatccagaggcttcatctgcatggtaaaagcttgatctccacaaccgcttatcttaaccaagatattcctttctactgataataactctttcaacacatcaccaatcagaatatgtttaaatctggccaggcgcggtggctgacacctgtaatcccagcactttgggaggccaagacaggcggatcacatgaggtcaggagttcaatactggcctggccagcatgatgaaaccctgtctctactaaaaatacaaaaattagctggacgtggtggcacgcacctgtagtcccagctattcagaaggccgaggcacgagaatcacctgaatgcaggaggcgggtatcacagtgagtcaagattgtgccactgcattccaacctgggcgacagagcaagactgtgtctctgaaaaaaaaaaaaaaaaattgaatttagagaaactcttctgtaaatggttttcaaacgttagatttattcaaagtgagagtcactagaagattttacttacccgtctaatctttccagatccttctgtcttccatccctat

SEQ ID NO: 309255 - DNA, 1000 bp, Homo Sapiens
aattcttggtggaaacagccatttcattggatttcctactatacttctgtgcaatctcaacaaataccaaaattcaaaaatataccttatgaatattaaaagaactatatacaacattgctaagacacagttaataggctgccttatgtgaatattaaagagaagacattattcaagtttgacagatatcgagatgaaaggcctttgggttggaagcattttaaaagacaacagtgttttaggctgagaattgtctgagcccagtttatgactaaggcattgcataataaaatagacatttctatttggtgcaacgttatgtttggaatctatagtgtgtcaaatggtgtattttcttgtcactttagtaagcactataaagcacacatttccaacatttgaaatcagacttataaacttataaggaaaaagccaaacactaaatctataatgttttatattaagctgcttataaaaatactttaacaaacatctgctttttacgaggacagtcacttgatagataaacagattctgaatgaagaaaaccggcaatgccaggaattaacctgcccccttgaactcatgtccacaatgtcttgtcgagtatgggagggaaggtaaggaggctggggagaggaaagagttccaactggggtttttactttattgtagttttttaaagccttcagaaacattccacctaagagtttctgttagaaaatacttcggcaacaaccgtcaagcgtgctgtcccctatggccatctcccatccctgatctcctcctatctcccctaaatggtcgccctctgacatttcgatggtactgataaccttcatcccgacttctgcttggctgtcctttccaggactcctcacttctcacatgttgatatccgcccctaccagaatagccccaatcacttttgtacttcctgctcccataagtttgattatagaactgcttggatctaccacttctcaaaatatgacacttc

SEQ ID NO: 309256 - DNA, 1000 bp, Homo Sapiens
gatctccgccaccgacggcccgctggcaccctgccacggccttgtgccgcccgcgcagtacttccagggctgcttgctggacgcctgccaagttcagggccatcctggaggcctctgtcctgcagtggctacctacgtggcagcctgtcaggccgctggggcccagctcggcgagtggaggcggccggacttctgtcgtgagtactgctccatgcatggtccacatggttgggtctctccctgcccttcccaggactgtaggacagcagccccttcctcctccatggggctcaggggccactttccttcctctgagcttggtatctcctgtcaccaaacaccttggcactcacacactgaaatgccccaagaaaggtactgcagtgagagagagttagaaacacctagtcagagtgtgggcgtggtggctcacgcctgtaatcccagcactttgggaggccgaggcaggtggatcacctgaggtcaggaagttgagactagcccggccaacatggtgaaatccctgtccctactaaaaatacaagatttatctgggcgtggtggtgggcacctgtaatcccagctaatcaggaggctgaggcacttgaacccaggaggcagaggttgcagtgagccatgatgtgacactgcattccagcctgggcaacagagtgagacaccatctcaaaaaaaaaaaaagaaagaaagaaaagaaacacctagtcagaaacctggggtccaggacactgttgaggattggtgatccatgctctcagatatccaaggcatgtagattgggatggctgactctgcctcagtcacacagcaaggtacccctggttaggaagacctagtgagttacagctggtcagaggcccttggtctgttgcacacactgaaatacacctagtcacatagaataagtcacataccttcagtggtatctgctcagattttgtactgagactaactggttagatacactcagatagaatcagga

SEQ ID NO: 309257 - DNA, 1000 bp, Homo Sapiens
gtccgccccgttgttctcgggctgcacctgcgggttcatccgcgccagaagcatggatgcggctggcgagaggaactttaccggtcctgggggcacgccgaggctctgcttggataaagggaaaagaggtggttacccggccgttcctccctacttgcaactcccaagaccacccgggagcgccttagacactgggatgagcgcgcgctgagcggacgcagggttcccagaaaagagcgcgcgtccgctggaaaaattgggaaacagaggttggggcacgccggaactcaagagttggagacttctgacagccttgtgggggcggctgaagaccttgcagcacttttcctcgtttcacccactttcgcctgccccaaatggctgggattgaactcaccgaggctgagggcagcgtgccgaccccctccccaagctcaggtccgcgacacttcaacagccacaggagccttctcggacacttaacgtcactgcactacaaactcgctagccctctgctggcgcgtctcggcccgggcctcccaggcagacctagccctgtcccgcgctcagggcgcactcacgtgtccggcggcgaggggatccctggtgccttgcgccctgccggcccccgaccggcggcgccttggcaggctctagggcgcgggctggggctgggctccgccgtgtggcgttcgggcggggccggggaagagctggaggcgcggggcggccggcagggcgcgggctgactggttctggccgtgcctggcgggggccgggctggtaatgtagcctgcgccccaggtaacgcgccgattgcattaacccagcgcccggcccgctccgtctggagcctgttagcgctaatggagactgacagcgcggccggggatgggcaggggcgggagggtggcgcgggttcccagggatctgggggactcgggcgcgcactccctttctatcctgcgccgagcaccgctcgccgctcccaaggacacca

SEQ ID NO: 309258 - DNA, 1000 bp, Homo Sapiens
tatatttgggtggtggtttgtggatgactccagaagaggttaacgcagtcgccaaaaagttgatatcaccagtggtgaacgaaattgatgaacgagccagcagacaacgtgatgttgataaagatattgagagaaggtcaagagttcttgatcaggaatatgaggatgggaattctatggaacgtgcaaaagagcaaaacgacgggcaattattgttagcgatggcttcaaaacaacaacaggagaaagaagctaaaaaggccgaggagggacaacggtatgatcagttcgtacaaaagatgaatatcaaattacagcagaaggaaaaagaacttgaaaatgctagggaaaatcgtgaaaatctaagaaacgaactacaggaaaggttgtccaagaacctgtcaggagagaatgatgaattgaatgattggaacgatgcatgtgaaagagatctcaaaaattcgagcattgaacactattatgccgtcagatcacactttgacaatttgggaaattcggaaagagggtatgatgagcttttggaggagcgcagcaaaatacaggtagaaatcgaaagacttgtcgcttccattgctgaacataaaactgcaatccatggttttggggaaacagcagatgctggtggagctataccagctgtacagaaacagaaaattccaacaaggaaggaccttcttgatgctaccgtgaatgatcctttggttatttctgcagaaatggcaaaagaagaagcagaaatggctacagaagaatgtatgttgaaagaattacaggtagatgaaatgattataatcaggaacattatgctgcgggagtgtgaaaagaagctcgaagaggagaaggaaacggctaagaggtctagaaggggcactgaggagtcaaagaataattctaatttttctcgagatgttatcatgagtacacctgataacaatgaaaaagtgactcctatagggaagagtgcatctccaaaagatgt

SEQ ID NO: 309259 - DNA, 1000 bp, Homo Sapiens
gaattcagaagactaagtctggagagtttagcttctaggagcaggaggttgttgcctctggaattcagaatggaagatgcactgcatccattgtgaggggaaacaagtgcctcaaaggggtcttatagggatgcacaagataagttccatggctttaaacaccatcctcatgctgaccatgcccaggtttctttctctagcttggaccttgcccctgaaatccagatgtgtatctgcccagtgacatctctacttgcatgtctaatagacttagacttaccacacccaaaatagaattttttagtttttccatccatcagaatcctgcttctctcccagtatctacatctcccacccatcaatccatcatctagtcctgttgtttctacccctggaatgtataatatatcccaaacttgtctacttctctccatctccatggctgccactattttctcttcaccatcaatgccactgccacctgtctcctaccagccagcctaaacacaggagccacagtgatcttttaaaaacaagtccaggctgggcgcgttggctatgcctataatcccagcactttgggaggccgaggtgggtggatcacgaggtcaggagttcaagaccagcctgcccaacatgatgaaaccctatctctactaaaaataccaaaattagccaggcacggtggcgcatgcctgtaatcccagctactcggggggccgaggcaagagaatcgcttgaacctgggaggtggaagttgcagtgagccaagatcatgccgtagcactccaacctgggcaacagagcgagacgccatctcaaaaaaaaaaaaaagtccaggcaaggctcagtggctcatgcctgtaatcccaacactgcgaggctaaggtgcaaggattgcctgaggccaagagttgaaggctgcagtgagctatgatggtgccattgcactccaacctgggcagaaaagtgagactccatctcttagaaaaaaaaaacc

SEQ ID NO: 309260 - DNA, 1000 bp, Homo Sapiens
ttcttataggtgccacttgtgtgttaaagaagaaattttcagcaagccagttttggagtgactgcaagaagtatgatgtgactgtgtttcagtatattggagaactttgtcgctacctttgcaaacaatctaaggtaggcgtaatcattatcagaaaaaaaatatgtcagaaagaataagtattgagatagaaaaggttatttttatttctttgtttatactctacctttgttactggcgggtctttgttcttagagcttccaagatagtggcaggtgctacctagatggtggcgggcagctcccaagatggtggaaagccttgtgttctctgatctggggttcttggcctcacggattccaaggaatggaaccttgggccatgcggtgagtgttatagctctattagaagccatgggtcatggaagagaaccgtggaacccagcgactagtgttcagctggattaggacgaacctgggcacttagccattcaggaacaatggcgagcctctagcccgattgggagcggcaatgggcaccttgctggatcagaagcagagcagacaccctgctggatctggaggggtggaagtcagcagcgggtctgcgatggcggagatcagcagtggtggacggtgagcaaaagctcagcttgagccagaataaacacagaccagaagagtatgcagttgcaagatttaatagagtgaaaacagaactctcatacaacgggaggcgacccaaagcaggttgccactgccggctcaaatgcctgggtttatatctggatctttgtccctccccctgtgctctcaggtgatagatgattgactatttctttacctcctgcttttagcctaattggtattttagtgagctctctttatgacctgattggccgggtgtgagctgagttacaagccccatgtttaaaggtaggtgcagtcaccttccccagctaggcttaggaattcttagtcggcctaggaaatccagctag

SEQ ID NO: 309261 - DNA, 1000 bp, Homo Sapiens
gagttcctactgagtctaagctcttttatttttaaaattctgataaaaatttactcaattacattttatacattaatatttagtgaatttgtccaaaaaggctatgtttaatttatgtgtaaaaataacaaaagatgtatcagtcagtctctgggcaataagaaaggaagaaagccttgctagaaataataaataatcctcacgcaaaaggccaggtgacataagaatactacaataatcaatatgttttctttgtatttacaataaaatccatctgttaacactgtgatagaaaaaataatcagtccacatcatgtaataaaaacaggctttgaggatgattatacctcttataataaaaacatacaaggatttctcacagctaaagtacttttcaactttgacaactaatgacagtcatgggtgaaggtaaaactgacagagtactttagatcagctatgtcctacagtcaaggaatcaagggcattacccatttaccaagcagcaaaaagcactttcatttttccagaactatttaaatacagtagttgccatgtgatcagttaattttactttgtgagttagataaagtaaagactaaattgggaaactgcaataagtaatcaaaagtagctccaaacaacaaagccatcaatagaaacaaaaggcatttttctaggtgtatcatgcataaaaagaataattacataatattattaaatatattccttaatgaccagattaataaatgaggtaaaatttagtcattggaacaaataaactatatttaatcacttgtgttttgctgtcactgtttaaaataattaacttaatgtctaaaaactacatactcttgaatgtttgctttttagagccccttgtgggatattaaagagccataacaaattatctgaatataaattatcaataccaggctgggcacagtggctcatgcctgtaatcccagcactttgggaggtggaagtgggcatatagcct

SEQ ID NO: 309262 - DNA, 1000 bp, Homo Sapiens
tcaacccagcccaaaatagcaaagatacacctcagcccaaggaacacactgccctaacgattaaactacagaagaactctaattataatagaacaagaacacttctttgtgaacagctgcaccaacatttttcttttcatttgcgtttatttaaacacagttctcaaaacatttgagtgaaattgggcctcctttggtaagcaaaggacctgaaaataatatttaaaaaatgaacaggcaaagtcttcagttcatccatgacaggtatagtgttcccttatcatgtactttgaagcacccggttttttcatatagtctaaaagctagaagaacaagagtgtatttgtggtggaatgtattgtcacttgctgataactagttgaaataccattatccccttgtaacacctttaagaaacagccttttaaggcatacactgtgtaactcttcgtatttcctgctatacatattacagattacataaaagccgacaaatccacattgatataagcattaagcactggctgtattttaagatttttagttctaatactagcagtacagagttacagagcataattttaaacacttagttgcaggtatataagtatggtatgtttcatggactggaggaaaacgggcatttgtctttaaatttactactgacaatctgaatagttctgctaagcattgatatgttagaaagaaaagtaaaaatcaaactgtttattgttgctttttgccatttggtagcattttacacaggcttcgatcttcagaataccctggattcagtagaaaaaccttttaaatgaagttttgtacaatagaaacttctcagcagtcaaaatttagactgtaaaaaaatacatgcaaaacatacttttctgaaaacacttaacttggaacaaagcaccaaactacacaaatgcagaatgaaaacagcatttcaactccaccaaaagtagtcatcgtaaaaggtgtaaaagtcacctaactt

SEQ ID NO: 309263 - DNA, 1000 bp, Homo Sapiens
gatccccatcaactgtggaggcctctgggtgaagcccccacccccaaggtgtcttggacacagggcactgcttggcctgcttcctccaaagtcactgccactaaaaataggagcctcgctggaattgctcagacaaagaggccacgcggtcccctggctcttggaattcttagacaacagcaatcgcagaatcatcaaatctgggacgcccggaatcttgggagcttggggtcctagaacctcaaaagcaggatgcccgggaccctcagacccacacctctaggtcatgctagggcaggttatatgtgaaccggctgccctctcctgaaaaaagtcaaatctatgactcacatgttctctagagcccctgtttcttggctgggccaggcctttctttcccaactctgaacgccctctccaacacccccatcctaaaaccagcccttgcacccaggcacagctctgctgcccatcagtgtatcctggtggttctcaaatgggggtgattcgcctccccctccaggggacactttggtaatgtttggtgacaattttggttgtcatgaccgagggctggggaggtgtggaggccaaggatgctgctcaccattctgcaatgcacaggatggaccccaccccagaaaatgatctggccccaaatgccaatggtgctgatgttgagacaccttgcgctgtagatgatgcaaatttccatacccccaccaccccttccagaggtcacacaacagtcacaacccttttcttgggttcagaagaaggaccctcagccagtgaccacacctttctggtcaacaccctctccccaccctacctccacttttatcccttgactctcagcagtcagctctcaatttctcgggccaattggatgatgagggattggaaaaagaattcgccccagccctatccctttttctggaccatcctcaaattgaggctaatccaacaattgcatctgtcgggctctggacggggcaca

SEQ ID NO: 309264 - DNA, 1000 bp, Homo Sapiens
ttgagtttatgaatctacggtaaaaggtaacttcttggagaataaggcatcataaatacaatgttgtatagaaaagttaaaaagaaatggaagcaagaaaaaagggagatgacctaaagggaaattgaagtgagagcaaagaaaagcaatgactacagaaacaaaggcattacaaaagtattaaaaaatacataatttgtttcttagtcattactgtttctaaatgtcttcttccaatttggctacaaccaaattttattttcaaatattatttcgtcctatgactaaaattagaaatttaggtatagtcatgacgagaacaacagtttatctctcccactgtcgttgcaaaataccatgatggtctaagatttttttttttaattgttgactaattttaacttgatcccgctggaactttctctttaaggtcattgttggaggtagaaattttaaaccatataatcaatgattttaaatatgtataagaaaatttcttattcaatgtacaggtataatctgaatcactgtattttgagccaacattcttgtattttcaatagataacattacattgggatgtacattctaagaccttctctacactatttgaaggtgatagtcatagattgatgaaacgggtgttgaaatggatgaattatcaccatacgttctctttctctatgtaaggaaaatgaagattttattgctagttcttgtttttcataaaatgatcacttaaaattcatagcattgtgagctagtgaaagtgataaaaagaaataggaatacaagagaaagagtcaaattaccattggttccaatttaaattttgtccatctacctttccttctgccattattctcagataggcaaacatcaccaaacccaaactatcagtcaaccttcctactggcctccttgtacccacctccacctccaccaccacctccacaccatcatctctcctacatttttactatgctgattttcttacttt

SEQ ID NO: 309265 - DNA, 1000 bp, Homo Sapiens
aaactcaaatccactcttaggaagtaaatgggtaatgttctcacgactttatttggccttaattgggggaaaggaaaccaataaaaccatcactttaatttctttattcatcaatagtatccgaaaaggaagaatcaggagttacaaaaacaagttaaatgcaatatagaagcctactaaatacaaatacaagttcacaaacacatatgcaacagaaacttgtttagattgtttcttgaagtttgactacttaaaaacataggtgtaaaggaaagacattcagactggtccacgtgggcttgttagcaggcagaggaaccctgctttccaaaaactgatatagtccagagtcacggcatgtgggaatgtttccatggacactggatcttaacagatgctatagtgtttacaaaactacacacacagagaaagcccaaggaagcctgcaggctaagccctatgcttttagagggctgaaggaaccaaacctagtttaatcctgtttgtttgctccatgcaaaactttatggaagactccccagactaggctatttagcagcttccatgaatggtcctcagatcatgtgattctacggcatagacgacagctgccctatttacacagaagctgcagaactcaagaggaatgtggatttgctcttgggagttcaatgttgcagggtagagtagtcttggatgataaccatgttctaaatgactagtgaagagacactgtggtttcttgcttttaacaaattggtgtactcttgccctcctcccatagtgtccaagggctggtaaaacctttgattaaggcgtgctgctgtgagttctccaaggcacttggacagggagctgcatttcagactgaacaagtggagtttgaagagtttttagatgggatggatacataaaagcttgaaatgctaaacaaagtggaattttctcctttcaaatgagaacaagaaaaactagaaggaattctatttttggcacaaca

SEQ ID NO: 309266 - DNA, 1000 bp, Homo Sapiens
tcagtttacagctttttggcacagtcgggacaatacacttgctcctggtggaaaacaaagcgcttgttggccagattcacggagcattttttgcagtggaagcagtagtcgtgccaggattgtccttcataggccaccacactggagcctttaccaaaccctgggggaaaaaaaaagaaaagaaaagaaaacaagagaaacagctgaatgaatacaggtgaggaaaccacgattcagagagataaaatgacgacctgccccactcacagaccgacaagcacgcaagagccaggtctgcctggctcccagaccccctcctccactccatcgtgcacagtcccccacgccgccattgtcccccatgccgccgcaaccctgctgtggctctcaaggacctgagaagatgctgaagcccggccaagggcttccctgatgtaaagaccccacgttcccatgccaccacgctattgccctgtgacgcgcaccgacctcccagcataaccagtttctttgatttaggtcagggccatgacatcaaagtggccaccaggaggcaaacttgggctgttcgtggggtgtgcacttaccgggcctcgaggagctgctaagcttcgattttttctataaagaaccaccacccacgagggacaagtcctctctccacccggatgcctgccccggaggttggcgctgggaaacagggtgagaggcaagcgtttcccgtggcacactgggggcttcctagctttagagactgggtggctcactcttgacacagtccttttccctgaggatggcaaaagtcttctcaaatgtacatttcaaggctccccgggaagatgggaaaattggaggcaagggaaagggcccagggcacgtggatcgcggccgcgagatgaggaatgaagtgattagctttgctgatcgcaaaaacaaataaacagcaaaccaaaaaaaaaagaaaccctgccaacaggcatctctgaactagccttcagct

SEQ ID NO: 309267 - DNA, 1000 bp, Homo Sapiens
cttatgttaggctgatttataagtgctgctttgggcagttacacagtttgtttacaatgaggagttatttgactttgaacatactgtacatggcaattagaagttgtcatggcaaaagaaaaccacagctggcctgccacagccaacacaagaaccagaaaatggtagatgaaatgaaggaataaaggtggggtttattccttattataaaagaaaaaaaataattcttcagcagtcttaacaaagacatcaagatacaaaattacaagtgttttgactccagccctgtccccatctcctccaagagcagaggtaggagacagttgaagcaaacaagcaattctgtaaaaattacctagaaaccctacaaatttgattaaaatctaaacttctataattttgctttttaaaaaatttaatatcaaaaggcctgctttagtgacatgctattcctaccagaaaataaccccaataccccctctgtcagtaacatgctcaagttgaccagccaactcttatctctaaacctatgtggacaagtgtgtcttttaaaccaaagccacggagatcaagtgactgctagtaacgtgttgtctgttaactaatccagtgcccaccttctccagagggtgggcagggcagaaacccaaaagggtcttgagggcctaatcccagatcaccatctaagaaccacttcccttgctctctactcaaaatgagatgctttatttctaatccgactatttgtctcaaatttggtgccccgtgacctggatggttttttcctttagcaaaacacacataatccacaaaaccatacatatagttttttgtctttacatttaaatataaaaatactattctgctttgtgtgataaatcaaggaccaagcagtaagaaccttttcttctttcaaggtagggatatccatcagtttatactaagcttcgtgttcagagcagggcatttagtcccaagccaggctagtcccacaagcaag

SEQ ID NO: 309268 - DNA, 1000 bp, Homo Sapiens
ttacctctcatgtgagccactactataacttgcacatatttctatgacaaaatttagtccaccatatttcaattatttgctatacttaataaattatttaaatttacactgtatttcaattattttttcccatatgaaactatgatttataggggttttaaccatcaaatatctaacttcatagaagacagaaactattttcacatatttgcttattaattgttgatagcacaaatgtacaatttgataaatgtttactgtaagtaaatcatccccaggcttattaaattgtctgcattgatagttgtttataaattctacagaaaacatttctaacatgggtggtttaactaaagaaaatacttacgtctaatacatctagtaattgtagaaatgttcagcctgattacatgaagtcacatgatagttttaatatttatttagcagaggggtaaattgaaacatcagttctctagaccagtcaggaaatgtatgctttgtgctttataagcttacattcaacatagatgacataagttaccatactcaaatgtaagatagggagaggtagaagaaatagctgagaacttgaaaagatgtactgttattgtcaacaaaccaatgtcttctcccttcataaaattgtgtttagggaatattaacaattaagcttgtatacaatagtaattttgaatgtatttttaaatttattttttcaaaataatgacattagtaaaaattttacatagcctgtattgaattcacacattcaaatgaggctttaccagtaatgatggggattaatacagagctagtgtttggcatttgactttatctcaaatgagctaactgctcaatgaattacagaagactcatactctttttattttttcctggaaattaaaaaagaaaagctttactaaatattgacatatatatttactccaaattttacatttagtgaaataagaatatctctagtagctcagttaacatcaac

SEQ ID NO: 309269 - DNA, 1000 bp, Homo Sapiens; identical to SEQ ID NO: 120056

SEQ ID NO: 309270 - DNA, 1000 bp, Homo Sapiens
gatctaagaaggctgcagagaaatgtaggagcaaaatcaataggacttggtgatgagttggatgtgaaggggcgatgaagcagcttcaaggatgatgccactgttcagccttggataaatggatggatggtgcagggattcacagatatggagaacactggaagaggagataagattgatcttgagctccatcttagacaagttgaatttgaggcacctttgagacttggttaggattttgcgatgattagttttagatgtcaacctgactaggttaagggatactcaggtagctgggggaacattacttctgggtatgtctatgagggtgttcccagaagatattggcatttaagtcaatggactgagtaaggaagatctgtcctcatctaatatgcgcaggcaccacataatagaacaaaaaggcagaggaaaggcaaattctctactctggagttgggacacccctcttctgcccttggcatcagaattccccgttcccctaatctcctaactctaggagattaggtagtagagtccgtccatttattcatttagcaagtattgagcctttggactccaagacttgtaccagtggttccccaggttctcccggcttggccttggactgggagatacaccattcagcttccctggttctgaggccaagtctaagacagggtagtcttgaactgaagcagtctaccagcctccctggttctccagcttgtagatggtctattgtgggacttctcagcctccataactatgtgagccagttcccctaataaatcccctcccatatatctatagatatagatctatattgtagatatatagatatcacattggttctctctctctggagaaccttgactaatacagatgtcaacacagcaggtgcatatacaggttgcaggtcaatgtagaggtctgggctgaacacagactttttttgaggctgagtctcactctgtggcctaggttggagtttagtggc

SEQ ID NO: 309271 - DNA, 1000 bp, Homo Sapiens
catactgcgttcttgggcttgcacagccgacaacagggaggctgccccaggggtgggcatggtgtgggttgctgcctcctttcaccagcctcactctcattgcccaggctggagtacagtggtgcaatctctgctcactgcagcctctgcctccccagctcaagtgattctcccacctcaacctcccaaatagctgggactacaggcaagtggcaccacacctggctaatttttgtatttttagtagagatgggtttcgccacgttggccaggctggtcttgaactcctggcctcaagtgatctgcctgccttggcctcccaaagtgcttgggaccacaggcaagtgccaccacacctggccccattggagtttttgatgtaggagatcagatgtcctggattacaaggccacacacatctccaggctgtacatgagaggaggatgtccagaaatcctccagatctcatgcatgcaccattgtattttctcactgttaaagtcatgataaaactgtggtgtttttttcttcatacatgatttaatatatctctaggaattctggaataagaaaatatataaccgcacagcaatattctttgaaacaaaatttctagagaatttataaaaatttgcttggatcttgatttacaattgaaatacaagaaaggctagtgtacaaattaggcaagtttctgtgctgtacatccagctactggtaccacaaatagaggatatgttgtgactttttgagttgaggaggacttttatgatcatgtacactctactgtcctttaagaggcattcattcattcattcttcgtttattaattcagtaaacatttactggctatttactacattccaggtactgtggggatattgattgtaatgacatgatcctttattgtcaatatgcttacagtccactagggggagccaaatatataaataagcttaagaattacgttgaaggggccagaatagaagtctgtggaagg

SEQ ID NO: 309272 - DNA, 1000 bp, Homo Sapiens
acatgtatatcatcaagagggttttttgtttgtttgtttgtttttgagacaaggtctcactctgtcaccgaggctggactacggtggcatgatcagggcttattgcagccttgacttcctgggctcaagtgatcctcccacctcagcctcctgagtagctgggattatagacacatgccaccatgcctggctaacttgtatttttggtagagatgaggtttcgctatgttgccgaggctggtctcaaactcctgggctcaagcgatccacccgcttcagcctcccaaagtgctgtgattacaggtgtgagccactgtgcctggccatcaaaaggatttttataaacaatagtggctcagtcctcagtttttcagatttccctgagatcaatcatgagttaaaacaggatgagggatctgggtttgctataaaagaaacatttgctgataggatgggctattcagtagaccaggtctttaaatctcaaaatgatctcaccagatcatctctctagatctgcactgatctaggtataaccttgcacggggctggggtagtgtttactagacacatcaagatctttcccatgctgaagagtctggaattcttctgagtgactcagttttacttaagtatgtctattttaagaaaagaaaaaaaaaaactactatctctgaattgatcacaaaatcagttaagtgcaatgagttctttaaaaagagcatcttactaaaatgttacttataatggtttaaaaaaaatcccttgaatgaagaaaatgttattggaatgtctattaatgtttactctttaagagcagtttttacaaggacttcaagattgcaggtgcgttcctgtagttaacataacagaaattgtaagccagtaaagttcctgtagatttgtccctgtttattaggttgggaacagagaaactcaataccctgcaacccataaaggaagggcgtgcaaaaatataaactcctgttgctctcagtgc

SEQ ID NO: 309273 - DNA, 1000 bp, Homo Sapiens
ctggaaagagacttgggatgaatatgtagattttggaactttattcatggtaaataaaggagtccgtgagagcagatagaatgtctgagggtcagtgtagaaaagatgattgaaggttgtccattggcccacagtactaaatatgagaaaggaatagggttataaagatggattcagataagggataatccatggagagtatagtattgtgaaagcaaaatgaaggtcaagtttgaaaaaaagatattcgtattattaagtagtagagagataaaagggaaggtagtctgagagatcaaaggggattagacttagattagacaactgtgagtagtgatggaatttgagcactttaagcaaagtagttaggacaggagacagtcgtgtgaaccataaagagctcctttctcttcttctaccagaagtatctttctggtagaaaaaagctttatatggggaaaacgtctaatttactactcctgaaaggaacaaaatgaaacatgtcctatgagagttttttttttttttaaggaaaccaaatagaggaagcaactcatatattaaataatgaattattttgcatttgaaattgtccaattttgggggaagagaggagccattttggtattctggccctaaaaaaatcagcgttaatttcgacagcttagtctgtggtcctgaaaattatagattatttttacctttattattttgtacttttctggaacaaaatatttacttaggattcacatagatcatacatatcttttatatatgtgacatataaaaatatatatgacatgtatattggataatttgaaatacataatgctaagtattgacaaaggtaggtcaccatataacttgggcactatatcctttaacaaatgggtttaatttaaaatttcttactggcagttttaaaaaatcatatttaaaaataaattctgacaagtgatactgtggtaaaaaatttgtatctaatctttagggatttagg

SEQ ID NO: 309274 - DNA, 1000 bp, Homo Sapiens; identical to SEQ ID NO: 120058

SEQ ID NO: 309275 - DNA, 1000 bp, Homo Sapiens
gatcatctgcactgagatttctgccttaagtttgggggaggagcacggcagtcataacttgaccaatggatcagcccagccttgccacttgggtgaccagcaataaaatgacgtcaataaaagtacctgccttttagagctctctagggatccaaagagataataaggtcatacctactctgtacctggcccatggtaagtgttcagtaatagacaatggtagtagaagtggtgatatttatctacatcattgaattagaggttcaaaatcccttatctgaaatgctgtcagccaaatgtgcctcagaattaagatttttttgaaattaaaagaaaatagtgcatttatctaactaggtctgggatattacttggtaattttactattcttacagtaaaatatatgaatactcatttttagtgagataaatatcagttcaattcaggttttacagtgaaataaattatgaaaaaactttcagttttcagagctttctggacttcggatttgaacaagaaggattgagaatctgcatttataatagagaaacattagaatctatctaaatgtataataagagatagcttaaatacattataatacattcataaaacaaaaaactgctcagctataaaagtcactttttcaaatagttaatgagatataaaaatattcaagacaaaaaatatatgcatattgatttgaactttgtaaattatataaatgtttataattccaaaataaaagactgcaaggaaccataccaaaatattaaattagccacattatgctctttatacttttctgtatgttctaatcctctgtgatgattaggaaaacaatctaacaacttttaagtcatttatcgttgatattcctgtgcaggactaggctagttatcactctaaagggttattaagtccatttttgccctcaaggagtcaacactctcatcctgaaagagctctggccaatactcagttctctctgcctgtgacc

SEQ ID NO: 309276 - DNA, 1000 bp, Homo Sapiens
gatcttcttggcacatgtgtaagagcagccccgggagaaggagaagccagatcggtagacacagctcttcctgggtgtgtcctggaaacggggacaggcaggaggggtcagccagtggcttgggcaggggcagggcagtgaatggggagacagacagatggactacaggtgtcaggcagctgagcagaacagcagaagggtcagagagggaccaagacaggcagactgatgggagagggcggacaggatccaagcctcgggccgcaagtctgagagagtctcccctcagcagagccaggccagccctccagacctctatggggacgtcagccacccagttccctgagcctggatgcctgggccaagcaaaactgggctggagggtgaggggattgggcaccttggaagaagtgagggcaggcaacacagggacagagctgcgctaagcccagtctcacctgcagctggaagccctgagtgcagcggaatctcctggtgcagtttacacatttctcctagagggaaaaagggtggggcatcaggcagtccaggcctggatccctgcccttcctccaggacagactgaccatgcgcccctccccactagtcaggtcagctaggccctcccagctctgaactcccgtgccggccttcctgtggccccagcctctcacccgcagggcctcagcgtggctatgcaggcagcgacttgagcccaccgtcaggacccccgacagaccaatcagcgagcggccaggggcctccagcatggggccttccagtggcacatggttcacctcaggctggggagagggatggaggctgaatccacccacctaccaccctcacctggcagggctgtaaggtcaggcagtactccagggccggggggctccctggagcagaggttagaggttggaggctcacagctagggaaactccaaagggaagggatcttcaggggtaggggcccgggctagggtctccttgctccctgacc

SEQ ID NO: 309277 - DNA, 1000 bp, Homo Sapiens
gatcctggaggaaatgacttatttactcccaaagtaagagtcacagaaaacagaagtgacactgagaaatgaaaacagtatacaagaaactctattgtgtcattgtacttgggtttagtcttttgttctcaaggtgagagtcaaggaaaacaatttttgtcattgtcgtttttgttaagagttctgaagagcatagcagctttctggtcttcggggatagcaagctggtggagtgttctttcattaacctgtgattattgactgactggatggtttctcccctctcatgacactctgggggctttggccagttagtcagtagcaggtactattggtgcctcataggtactgagtgagcctattgcttattgcacccaaaacagacagattcttaataattggaccaacagtggcccaccagtgcttgtggtgtggctggacattactaatgttggtattttctgagcaggtttggatttctttgagtaagttgtttattttagagaactaaatggatttagaactcagaacaaccaaagcagatcagtgaaagcatctagcatgcccaattaatagtcttcagaattgaattatagataataaaaggaatttattttctacatggaaatagctttattgctttttcaattttttcctgattagaaaagtagtctatgcttattgttaaaagaaaaattcagacaacatgcaaaggaaaatttttaaatcatttataatatcaccatgtaaagataatcactgttaactttttaatgtgtatgtctccggacttatttcttggcacatattacatatgtatatgtctatatttctcagaatggcagctttccagatacattgtttgtaatcttctttctacttattgacaaagtgcaatgtctgtgatatatgaactacagaacttcctcttaaaacttaaaatttaatggttcttcctagatattcatccatctaagacttattgagcacctactgtgtg

SEQ ID NO: 309278 - DNA, 462 bp, Homo Sapiens
tcatgctcttagcagacattggaaattggagatggataattcctgatgtggcggaaggggactgtcctatgccttgtaggatgtttggcagcttccctggcttccacctgtgtgatgccagtagcaccttcatttgtgacagcccaaaatgcctccagacattaccaaagttcccccaagggcaaaattactcctggctgagaactactggttcaggttaacactgctgctgctacatcttctccttgggccctcatgtggcctttggtcccctgagactcggtctcatcctagccaagtgaaatgtaaccatgtctggactaagagtgcaaaggcttgtgctctgtgtgtgatcttgctcacgttctcacccaatcctgactggagaatcacttctcccagcctccaccaatctctagctctttctagtggaactgctgtggtgatgctcccggctgccat

SEQ ID NO: 309279 - DNA, 1000 bp, Homo Sapiens
tatctcttttatttgtatcaaatgcttattgtccaaaagtttagtatactttaggcttttgatttgtgactttgaaccagaagtaatatgataaaactagttaataatattataaacatttctggttgcatgatatattttacatgtgttcagcattgtatgcaaatatgtgttttcacatttactttcacttacatttctacatgcatttctcattagcagtctgtgtgctaagtaaggcaagagttaacatttccaaattaattaacaataggctgaagttcagaattatcaagtcacttcttttggccatgcacaggaaacagagaaggcacaattaggaactctaagctcctttctccctacccaaaatctttctatcacactcgattatggtgttttaaaaattttagtcatttacaattaattaacaaatacttaaagtccatgaaaagcataaaggtagtactttgcctatgtttgaaatgaggtgatagcataccttccctccatctggctggcccccactttttgtccagatgaacttaaaatgggaacacgttttcacatcacctctacttacttatccatgactttggtgtttcctggatcacacacatctttgtttgtgggcaactctacatctggaagctcggggagttgggcagctggcatgaagtaagtgcacacaaaaacgtccatggctgttttttcttgacaacagtcttcaaacttagaattctttgtggataaattgtcacagagttttactgtgtgttcaggcagctacaaaacgaatggttagtttgtgcattgttagtttcctgatagtctaattaaaaataagaattacataggcttacaagctttggcatcacatttatgaaagtcagtatgaagactctcagaaagaaaattggtacaatatttggaaaggcagtttgtcaatatgtactaaaagtcttaaaaatgtacaattctatttttaagaatttatact

SEQ ID NO: 309280 - DNA, 1000 bp, Homo Sapiens
ttgcttttaaatgagcatagcatgaaatcagttatgtttcttactttcattgcaaagacagccaagttacaataacaccaggaaaagcctgtcacataatggcatctcaataacaggaaagaaatgagtagattggagtgcatacgttcttaaaagattctgccatgttaagtggagggttacattttcctacctctgaatcacagtaaagaggaggtgagtttatggaacagcagttggaggcaaagtctgagcgcttgttaaccagctttgccagttccgtgggtgtggcctcaggcaattttgcttttagtcgctctgccagtctgaaaaaccatttaaatgtaaggtcttactacatgtatttattttatacaaatttctaatgcaaaataatagccatttcagatcttttacaataaaaatgaaaatagaaatacttgcctgtctcaagaaaattctatacctgtggtatagaatagtcaatttgagatcagaaagtgaaacatgcctcttcgagatcataaaaataaacatacaaatcgctgctgaattggaagtccagtcttctttcatttgctcattatttcaaaatggaagagtacctcttctattttatcctaacctttcaccttctcttcagttttaaatttcaaattccttaaagaatatttcctttacaggacctcataccagcttaatgcctttttttcctctcataatttatataatttcaccctcaatttatctacttctcaactcactatgttggaaaacaccaatacaggagtaaggaaattttcgctcttatttttagctctactaaaaacgaactctccatttctctttcaggatggtgataagacttgagatctcctgattctttcaatttgtacaatcgatgatctcggcgtgtgtccactcccatgaacaactcagcctggttttatgactttcttcaggaaatgcttgccagcccagcgggggcaatgggaggtaa

SEQ ID NO: 309281 - DNA, 1000 bp, Homo Sapiens
gaattcagtgcttgagggcagaaccaatgagaaaatctagtcacatttctacagcgcatcaccgttaaaaaaaggattctctgttatgctaggcaaggagggatgattatttattagcttctacagattagacaatggggtgggggtgggctcaaggtgagatgattttttgggtccaagtctactcaagacaggcatcccagtcttcggtctccaaatccacctcctgtctgtccccccacactgctcctcaggccttgtggatccattgactgtgatttctgtggttcagctcccacatcaggcaggaagggcagctactgggtctgagatcccacattgcctccaacccttgcttcctagctggcctcccagggcaccacgaggggctgggccaggctgctgtgctgcacgtggcaggagtagggggctgtgtcctgcgggggcactgccaccaccacccaggactggtaagtgccatttccattgtgaagaacatctccccgtaactcaggctcctgcacctcgccggcccgagtccagtgcacatcaattttccctgggtagaagtcgtaggccaggcacttcagtttcttcttttctcctggggcctggtggctggtgaccaccacagagggaggatctgtggagggatagagtgtgacactgcaggcttgaggtggacttctcccggcccaggtctcttcctacccccacccctggatgtcagcgatcagcagagctcgaagctctgtacctgcccacccccagccccgggagactttccagaatatcagggaaggctgacgctttccctcttgcccaatccccacctcacccatgtattgactctgacggcaataagttgtgaatgctccgtgtgcttctccatgttttcccacatctcagtgggctttggagttctgtcccccagtctcagtccagctgcttggttcagcccatgcctctatccagcaaccacttccctgcagacactgca

SEQ ID NO: 309282 - DNA, 1000 bp, Homo Sapiens
tgcaggtgggtggtcagctgcaacatggcctggcagcctggcccttgaagcactacacaggccacttcctacaggaagcctccctggatctccatatcctcccctgagctctgaacctttccatcataccttagaaatacaataaaatgattaaagaaggtgtgtctttaattgaagcatgatttaaagtaaatgcaaagctaaatcagatatatgaaataattatttggtattatataggcagagtcatgttagtctggttctccaagaagcagactggagatgggattagacccaatccggtctgcagattttattaggagaaatgcccatgagaggaaatggggagggagccagggaaggctgggtgaaccagcagactgtgttgcaagtataaccccacgtgaacgagggagggagggaaggttgggtggaagcaccctgggtgccatggagcctaaggaagtttcagcaaggccctaaggggttctggagccaaagtcagtcatcagaggagtcccatgactccctggaattggcctgccttagtatttctgctgtgctcagccattgggtagggcagcttcagtgcaatcacagcagtggatttgagggtgcagctgggatcttggtcagttgtgtttcctatagttggagaactgccaagccacagagttggagaagagccacatcatgaaaagatctctaaattggtgtctggggatctgtgctctaattccgcctcttgttacttacaagctgagccatgaggaccaggtcacaggacctctttggactgcagtttccctctctgtaggcagggatggtaacctcctgccctgtttccctaaccactgccactccccaccctctagggttgtcaatgaaatgaattcaccaacataaaatggttttgaaaaatcctaaagagctctaccaatgtgggtgaccattatccactcctacatgtggaggatgttctggaaggcaaactccatgg

SEQ ID NO: 309283 - DNA, 1000 bp, Homo Sapiens
gatccgcccacctcccgaagtgttggaattataggcatgagccgccatgcccagccttcatgatatcttaacacagctttcctcctcctctcggagcacaaggatggggtctgtgttgttacctgcagtgtcccgtgtctcccaccatgcttggcacatcataaatatttctcaatcatctgacctgacagcgaaaaaaaacatccattcaagccacttctgtggctgtatactgggtgtacaggagatggagttaagagagattcctggcttattttttccaccaactgagtactgagcatcatcatgttcccagaattgtgccagagacattaggatgaatgaaaatggctcctgtcctcaaggagctcagcgttcaagagtcagacaagaagacaaggagagtccagtggtgaagtgcagtaacagaggcagtggccgagggggctcaacccagctacagcagggtcagggaagccttctgattgatattgatagtggcaagaggcagacaaatgcctaggcagataggggcaggtccctggtgaaaccccacctccaagccaaagacagtttaaagcctgaaagcaaagctacaagtcaaatccagggactggacagagaatctgtcttctatttggcgtgctttcctcagattgatccccaccctccacctagtttgcatatacctaccctttcctaattggttttctatactgttggacccacctttgagtggtgtcttcgctttaaccttttttgcacactcacaatccaatcagcacacattccccattctgagtccataaaaagccccggatccagccacactgaaagataaaccacacccccacatctcctctttgctgagagctgttctgtcgctcaaaaaaattctcctcccatcttcacccttcaattgtcagcatttcctcattcttcttggatgcaggacaagagcttgagaactgccgaatgcagatacaagctataacacagg

SEQ ID NO: 309284 - DNA, 1000 bp, Homo Sapiens
gaattctctaaagcatttgcccatgtgtgggagaaagacggcagagagtatttgtaccacacatggctctgacatctgaaaccagaaccccaaactgggtgataatgatttgtttccgcagatacagctggaagaaccaggatgtttgaagaggaggcagcttgacgctcaatacatttaaagaaccatgagatgcgggctgagggtgggaggggagcatgcttttccctgttctcaaacttagtgttggctctgtgttcctgcagtttcccaggaaggcccaagggcaaggccatccgggtcctggcagtgaggggtgctgctgtgccacacttcacattggatggagagacctggggactcaggaccaagagggccctcgtgcagagcagccccgcctcacccagacccctcctcagacagcctgctctcaagcccctgccacagctgactggacgaggcatgaatggctgagccgagctgtactcactctcctggaattttaaattggacagggagatcctgagtgctggactgaggggtcatgcagggccgggcaaccaacttcacccccaggcacagggaggcaggaagatcgggctgtgaagtttagggtgagcagagaccagagaccacgtaccaagagagaaacaaccactcagctccaagacggggtcagggagacaaagaaacaggcaaagagagggaaagggggatggagagaaaagccgggcctggagcaggggaaagcaggtggggtgcccaaggcacacatttaagcaagtgcagggtcagcaccaaagaggaagcacctccctacatgccacgcccccgggcacctcacccaggcttgctcacctcaccaggccctgagacagagcactcccgacaaacaggcagacagacagagacagtgggacagagaaacacacagaacacggagatgaagaaggggagagagagacacagaggcagtgccacagggagagaaacatgcaga

SEQ ID NO: 309285 - DNA, 1000 bp, Homo Sapiens
aaaagcaatggattttattagtattctaaaaccaatgtagccacatggcatcaaaaatcactgcaaaaaaattcacagtaatgaaaatatacaattaaaaataaaaatgtactgatatcagtcaaactcacagtaaagatctaagaagccaaaattcccatttgccacccttacaatcaggaatgtttactaaaatgtacaacttattgggtacagattgtatattcatggcattcattctgtagatggtcttgtgtagcaaatctagattagaataagaaaacctatttttatattatgtatatttaatggtgtctaacttcattatggttttattttttggaataagaggtagtcgatagagacagctggcaagatggccgaataggaagagctctggtctgcagctcccagcgagagcaatgcggaaggtgagtgatttctgcatttccaactgaggtacccggttcatctcactgggactggttagacagtgggtgggtgcagcccacggagggtaagctgaagcagggtggggcatcacctcacccaggaagtccaaagggccagggaacttcctcacctacccaaggaagccatagggactgtgctatccagcccagaaattatgcttttcccatagtttttgcaacacgcagaccaggagattcccttgtgtgccaatgctaccagggggagacagaaccattcactctcctggagaaggggctgatgccagaaagccaagtggtctcgctcagcaggtcccactcccatggagcccagcaagctaagaaccactggcttgaaattctcactgccagcacatcagtctgaggtcgaactgggatgatcaaccttggtgggagaggaatgtccaccattactgaggcttgtgtaggcagttttcccctcacagtgttaaggaagccattgggaagttcaaactgtgtggaacttactgcagtgctgcaaagcaactgtggccagactgcctctc

SEQ ID NO: 309286 - DNA, 1000 bp, Homo Sapiens
atcctatatgtggaaacgttaccgtcccttgtttactgatactactgtcttaaaatcctaacaatcaaggcccaccagttaaacaagcttgttatttttgctactagccagctttcatgggcctccgttttggcatcagtgaaagagcggagactttctcttcctcagaggctcttatttgagcacaggtgaccacgaaaggaccacttaaagcagatggcggctgacagcaaaggagagatgcagtgtacaagtcccagcctgatttcactctgtctttttctctaagcccctccgggatcttatcaaggatatcatgggcagaaggcaaggaagaggattctaaaacctgagaagcccatgccagagaagtcagctttggtactgctgttctgagattgcagctggaaaggaaggtggggggagagtcagttacagctgttcctacatttgtctgtgaaacaactcatgtggattccagacaaagaaatcaggaccaaagcaaacagcacatcaaaagcctggggctcgcttccagaactgtaaattttaattttccctttgtgttgtttgatggagttcctaatagaaacagtcttccttggggctctccttgacgtcaaagtctgtttttcttttagaaacttctaaaattactagatttaatgtgctcagctctttccacaaaacctaaatagccattccaccttccttcttcttggaaactgtgaaccttccttctcttttgctgctattgtctagggaaaggctgctgcctcacgcaagaaatgtgctagaattgtttgttcttccttttttttctttttaagctctcaccccctgtagggcatggttagtattttcagaacaaaggttgagttttatcttgaggcacagaaagaaaatgcccttgcgttcaccatgtagagggctgcctgcacaggctgcttcagaagttgggcaggggatctttagatttgtgggctttgataagcacact

SEQ ID NO: 309287 - DNA, 1000 bp, Homo Sapiens
cagctcactgcaacctccgcctcccaggttcaagcgattctcctgcctcagcctcccacgtagctgggattacaggcacgtaccaccacaccctgctaatttttgtatttttagaagagacgaggtttcaccatgttggccaggctggtctcgaactcctgacctcaggtgatccacctgcctcggcctcccaaagtgctcggattacaggtgtgagccactgtgcctggccaactgtattcttttttatggctgtacagtattccattttctgtatccagtccttcattgatgaacacttagcttgattccttaactttgttattgcgaatatgctgcagtaaacatgagtgcaggtatttttttacacaatgatttcccttggggtagatacccagtagtgggattgctggatggaacggtagttttatttttagttcttgagaaatctccattctgtcaggaagggggtttttatctatgcagtaaataccagtgtctgcctcagagctgctgctggccctgatctggaatgcattatttgaacacaagcaaatgtagattgtcgtcttcaagtggagcttctcagggaggtaacaaaatgttgccattggcctggaagttcaaatgaaggctctgcatgacatggtgtgacctgtgatgctgacacgccggccctccccttccatcccaaggagagaaagcccaggattgggaacagagcccatgacttcaaccacttcccagagcacccctggacggcaaggaatcctcgtgtggcaggtccatggaattgcgttgtcccctctccaggacacatgcacggcacgttcagtcattcttcgtgcagggctgattgtctaccacgtgtcttacactgggagaggtattgggggcagcggtggcctccgaatggagagcagacccaggtccagcctgcacaatctttctgggactgtggtcagccctcattaccaccctgcagctctcctcccctcca

SEQ ID NO: 309288 - DNA, 1000 bp, Homo Sapiens
ctgatcaaaggatccagcatggaaagatctggaaagactgctgcactaggaactcaccacaactccgcccctcactagctgcgtgacctggcaagtcacttgaactctctgggctcaggcagccaggctctgagtgtgcacgcttcaccaccagactgcctccctatctcagcacctatttattagtccctaacttctgttccaagcatgatctgaatctccttgtatatttcatttcatccactgcccataacattcccatgaaatagttaaccctgttatcctcactttacagatagggaaaccgaggctcggcaaggcgaggtagctagcccacagtccaactagggatagatatggaaccaggcagtattccctagttccttgcttctctatcagcctccttcagccctaataccaccagtttaacctcaggggaaaagcagctgcttgtgagacaccgaacatcatcttttatgaaaaagacaggatcagcactactcaattccctgccccttccccttggcagtggaggaaccatgagctggaaggcaggagatacagactctcctgctcctgtttaccttgactctgtggttcccatagtattacctgggcacttcacccttctggatttctgtttcagcttctcttttagaaaaagagaataataataataataacaataataatagcaccgtgcctgcctggcaacagggagctgagcctctgggcccctggaggctcagatctaccggtgcccaacaatcaccagagccagggccgctttgctgaatcatccccagactctacttcagaggctgccactgtggtcctcccatcatcccataaatatggaggcaattagcatggagctcaggtccaaagggaattctcagagccctgttcatcttcataatgttgaagaaaaccctctaggaggcccgcgtcactgctgcggcaggctagctgcttctgctctgattagggatccaagaga

SEQ ID NO: 309289 - DNA, 1000 bp, Homo Sapiens
tgcagtggaggtaggctctgcaggagctgagttgggcagcaagtctttctggaagggaaatctgcacagcacacctttgggtgtaccacggaaacatgcctactctgctgatggcattgtaatgtaacacaagcattttggaccccagtttggtaaaggtgaggatgcatgtgacctattactcagcattctgctcctaggtatgcatcctagtgaaatgcaagcccatgtacactgagataaatattcatcacagtactgtccataagggccccaaactggaaacagctcaaaagttcatcagtgatagaacacattacataaattatggtacatttatatcatggaataatcaataaagaagcacaggtcaataaaagtacatctacatatacatataaaatgtacagaactttatggatcagtaaaaaatgaactagctacaccagtaagcaaaaacatggataaatcacattaacataacattgagcaaaaaaaaaaaaaaggcacaaaagtgtacatataggatgatgtcacccatgtatagatttaaaatgggcaaaccatatggtttggaaatgaatatataaattagaaatctatgaggaaaagcaatggaatgatttgcacagaaatcagaagagtggttactttggagggagtgggtgttctgattcgggtcatagctccaggtaaaaccacccattttagccatccctgggtgtccactttctgaatatgaatcaagccacctatataggtttggagtatttttatttgcatttatttcccaaaaagaaggagacatgtcacatatgtaattgttagaggaactgggcatgtttagcctgaaaaaaagagaaggcttaggggccatataacggttgtcaattacctagagaaaagaaagtacacttaccacctgcttctccacagggcacagctcaaaccttggagagagaatttttttttgttgttttggttttacgtttgtagagat

SEQ ID NO: 309290 - DNA, 1000 bp, Homo Sapiens
tccgcctcttgggagssctcaggaaacttacaaccatggtggaaggcaaaggggaagcaaacacatcttcacatggccatcaggagagaaagaaagagcaaagggggaagtgctaaacacttttaaacaagtggcacttgggtgatggtgctaaaccgttagaaaccgcccccatgatccaatcacctcccaccaggacacttctctgtctaacactgaggatcacaacagaacatgagatttggacgtggacacagaaccaaacaatatcagaggtgcaagagaaatgttggggatgatagagaaattagttatcttgattgtgatggtggtggtggttacatggcagtatatacatttcaaatctcctcaaactgtacgtttaaaatgggtacgttttatggtatgcaaattatattatgcctcagcaaagttgatttcaaaataaacatatgcaattaacattcaaaaatttaaaaagctctaaagctttcctaatatttccaagataaatatcaaaatcctcaatgtgaactccaagatgctgaatgtctaaccctctctacctctcctccatcacccacagcacccatccctctctctatcccaggcattctgactttcttttccctctggaaaagccagaatctctccaaatgccagattttttttttttttttttttttttttgagatggagttgtcttctggtcgccccaggctggagtgcagtggcgggatctcggctcactgcaagctccgcctcccgggttcacgccattctcctgcctcagcctcccaagtagctgggactacaggtgcccgccaccacgcccggctaattttttgcatttttagtagagacagggtttcaccgtgttagccgggatggtctcgatctcctgacctcgtgatccgcccgcctcggcctcccaaagtgctgggattacaggcgtgagccaccgcgcccggccccaaatgccagatttttttaaaacctg

SEQ ID NO: 309291 - DNA, 1000 bp, Homo Sapiens
tctgtggggagaccgtgtgtgggcacagagtaacagaaggcaggagctaatggctgagctaacgggaaatgcaatctgtcggtttgagtaagctggggagtcggggtttcctgagccctggtaccttccaagacccctgaagggacctctgggtgtttagaagaaaatccaggtgggttcaaactttgtgaagtctggagtaactgatgtgatgttctcatggaatggaatatggaaggggaaaaacataatctccaaagctagtaataagaaaaaacataatctccaaagctagtaataagacacacacaaattaccagatagatttgtccctccttgactgagggaggtaaatttctcctgactctctgaaaataagttcattcacttgtgaatggctgagatgttgtatatctagagaaagaagattggggtaacggccctttcccaatttctacttctcctgtccctctttctctggtcaatcacgaaatctctgaatcttggcattgaatagattagagagcctctttctaggctcagttctgtcgaccactagctatgcaatccaagttaagctactttctctccccaggcatctgtttcctcctctgtaaagcgaagaagccctgggctgggaggatgacttgctacatgaacttgaacatgggagtgatagcaagggatctgctccagtcactgaaagatcaagctgtccatagtccttggggtaggctgaataatggcccacatcctgaagatgttcatgttctaatctccacaaccttacatggcaaaaagaactttgcaggtgtgattaaattaaaggtcttgagatggggagataagcctgctttatccaggagagcccagtgtaatcacaagagtctttgtaagtaaaagaaggaagcatgagaagcagaggcacagaagttatgatgatcaaagcagaggttggagtaacagcattaccaagcaaaaaatattgagaagccaatat

SEQ ID NO: 309292 - DNA, 1000 bp, Homo Sapiens
ttgtcaatgttattattgaattttcaaatgccagtagtacacataaatcaatggctttcttctccctactggcatatccctgccacatgtggtcattcatttttttaataagtcctcctctcttttcacccatttataaaaatgcatcttgttcccccaccaccgtccatcactcggtgagcccagctatttgttgcccctgagtgcttattcatcaacgttttcaaaagcaaaatcactcttcgcctcctgctcttattgtgccatcaatcttgactggaggatcaataaacttcgcttctgcaatttcccctccaccccttcggagctgactctctccaaagtgcagtctttttatttacatttttaactgatcatcagcagaggggggacggcggtgtcagggaagcgaagggctttcatttgctcccgaggcagcaataaccatccatgcatcggtcatttaacacggtaacccagtgaaattgatactcgactcttccctgcccagggtccacccgcgtaaatcataaccagaggaaacaaaagccctgcctgagcagtgtgtcttgccggcaggcaggcaaggaacgaggctgagtgactcactctctccaagtctggttggaggagaggcacatggtttccaggaatttctttgcattgttttatatgtattaagggaaaattaaaataaaaggatctgaagtgttgagaaaggagaagaaggctgaatttaaaatgggcagacatataaggccaggctagcaaaggggccttgaattgactggctcattaaatctcctcgaggcttgtagacacatcgagttcacagggctcttgcctgctgttaatgcttgcagagagatgggcaatgtccaaattgcaaagctccacgaggcaagtgagtcgcctatgaagtcagagggatttttgtttaacccgccctaagagcatttcctcaagtctgaactaaaacacaagtaagataatatggatt

SEQ ID NO: 309293 - DNA, 1000 bp, Homo Sapiens
ctgggtctgacatgcaatcacaaatattcttaaaagagaaaggaagcagaaaattagacacactgaatagaaagcagagattgaagtgatatgaacacaagccggaatgcctgtggtcactagaagctgcaaaagggatttttctctagatcctgcaggggaagcatggccttgctgttgacccagtgaaactactttcaaacttctgaactatagaactataagaaaatatgggctttgttgttttaagctaccaagtttgtgaaatttgttacagcatctatagcaaactagtacaggtttaacttatcttcacatatgtattgactactgtatttcttcctgtgtttaaaatgtctattcattacatttcttgctccatttttctattatgaaaatttgttttttcttcttgatttttcacaatatattgatagctttgtatttatacatttatagctctatcttggtggtgcaaataatccccaaatacacaataataaatcttttaagtttgcttacagtttttggatgaatatgggttttgagttttttatgttttaaaatctttcaatgtgttcatctataatttcttattttgcttttatgtgatgtcagatggatacctacctacattttcttatagctcattagtaatttcatattttatggttatctttttctttcatctagaatttactttggtgggtgatatgaggcaggtatctagctgttttctttaatagttatccaattgttacagaacaacttattcaataatcatctctgttcattgatttaaagtactatctttatcctttgattaattacaaattatggtctatttcagaatctttttattctattctattatcatccacacttaattatagtggttttataaaaatcctttaaagtctagaaatacatgtctccatatgtattgttctttttttaaatgtttcaaaaactttccagatgaactttatgattcctttgt

SEQ ID NO: 309294 - DNA, 1000 bp, Homo Sapiens; identical to SEQ ID NO: 120062

SEQ ID NO: 309295 - DNA, 1000 bp, Homo Sapiens
aatgaattttgaacttgtttgagctcactatggcattagtagccactgggaggaaaccaagaaggaaaagggtaatagaagggaaaaaagtgagtcaaaactttgagatttgggtgcccccatatagaaattctttgcccacttccagcctttaaaagtcagggtatgattttttacacaaagccttagtcttccttctaaggagagtaaaagttactttagccattcattgttctgcccagctacagttcttcacagagcagtgcctgaatactcttctgatttctgcatgagctactaaatcatctctctgcttaagggtatttttgttgtattatatttattatatcatatcatatattacattagtttatcctaatgaaattttttccctttcctaaacagttaggaactggttgccatgcaagaaatatctgtggaggtagttttttgggtgaatagaagaggaaatcaaaggaactgttctatcaaagacaatgtctccagcctcagaggtgccacatttgtctttccaatggccctcagtaaaggctgccatcagccaagtctgcacaatgactttgactttcaaatataaacctgaccctgcaggctcaccaccactaccgctatcacattatcaattcagatgaacaggacatatgcatagaaagaagacaatatagcatagcaaagccacttgcaaatgtagtggaatagaccatacatgtgaaagagaccataatggtgggaagaatcacgaacgcacacatagagggctttagagagcagaggaatcttgggatttgaagaagagaagaatgaaaataggtgctgataggtgggagtgggctgaatgctaacaggtattatacacaaactggttttaggaaactaaatttggcattgaaacagcataaattggagggaggatacttaataaaagaaactcaggagtgtctcaaaaaaggaaatggcaagagtctgggtgatgatactt

SEQ ID NO: 309296 - DNA, 1000 bp, Homo Sapiens
tcattagtaaagtaaaaacaaataatgagataatagatgtaaagtgcatagagcatatatagacatatatatatgtgtgtgtgcgtgtgtgtcaataaattttagcaataaatgttagttgattattcttgataatatttcaattactggctgggtgcagtggctcatgcctgtaattctagcattttgggagactgaagtggtaggattacttaagacccagagtttgaggacagcctacgcaacatatcaggtcaccttaaataatccacttggaaaataacctcaggataggactgtggttttgaacaaactctgcgggaatgcaacatcacttcaatgtaaattgggttctaagataaccatatttatttccttgaaactcttctctgaagtacaactatgcatttatctttaaaagttgtcttttaaacaaaaataagaaacacaaaccagagttcccttaagccaactgtaatgagcaattcaggattgtaaagttgccaagcagacacccatacctctgacagaggtgacagaggactcaagggggtcccatttctacaccccaggagcacaacgggatgctctgttgccatgactatgaaggtcagaactcagcctgctgcccatggtaccaaagatcatgattctctcttcgtgcatggctgttcccaatagcctgcacaaagacgtgtctgcagttgccacttctatccatctgtctacttttagcaggtactttaacaaatactttgtttttctctctcctttatttattttttcttttttattttcttttcagtgttgtagagttagagttattatttttttctctttttctcacacaattccttctctgtagatacaaagtccaaatccctagccgttgtaattattagcatattcctggagaaaattgcaacagtctacattaaaggactccctgcagaaatttacacagtaggtatacaatttctcttgaaataaaaggcactca

SEQ ID NO: 309297 - DNA, 1000 bp, Homo Sapiens
actaaaaatggttcaaagacctagatataagatccatgtattagcccattctcatgctgctatgaagaaatacccaagcctgggtaatttataaagaaaaaaggtttaattgactcacagttctccagagctggggagaccccaggaaacttacaatcatggcagaaggggaagcagacatgttcttcttcacatggcagcatgaagagaagtgccaagcaaagtgcgaaaagccccttataaaccattagatctcatgagaactaactcactatcatgagaatagcatgggggtaatcgctcccaatgggggtaatggctgtcatgattcaattacctctcatgtggtccctcccatgacatgtggagattatgggattacaattcaaggtgagatatgggtggggaaacagaaccaaaccatatcaagccaaaactataaaactcttaggaggaaatggataaattctcatgatcttagattaagcaatatgacaacaaaaacacaggattaaaaaaaaagtgggcttcattaaaatgaaaaccttttgcgcattaaaaggcattatcaagaaaatgaagtaacaatccatagaattggaaaatatatttgcaaatcatatatttaataagagtttattatgcagaatattaaggaattttttaaactcttacaacaaaaaggcaacccagttaaaaaatacacaaagaacttgaatagacatctctttaaagaaggtttacaaatggtcaataaacacattaaaggatatttggcatcactaatcattacaaaaattcaaaccataatgaaatacaacttcacacccattagaatagcaataataataataataataatatatgttggaaatattgtgacaaatttagaatctctgcacattgctggtaggaatgtaaaatggtacagctgtagaaagcagtttgttggtctcccaaaatgttaaacatagaattgccatatgatccagcaattcca

SEQ ID NO: 309298 - DNA, 1000 bp, Homo Sapiens
atatcaagtatacaatacagtattgttaagcatagtcaccatgctctacattagatctccagaacttattcatgttgcgtaacttaaaatttgcacctcattgaccaacatctccctctttcccttatccctcagaccctggcaattcagcattctactctctgcttctactcatttgactatctcagatcccacatatgaatcagatcatgcagtatttatttttttttgcacctggcttatttcacttagcataatgcccttcaggctcatccatgttgtcacatctgacatggttctttttttttttttttaagctcaataatatgtcactatacacacagacagacagatagatagatagataggtagatagacagatagatgatagacagatagggcagattttctttactcatatccattcgtactttgatggacatttaggttgttcccatatcttcactattgtgaaacatgctgcaggtaacaatggaagtgtggttatctcttcaaagacaccgatttcagttcctttggatatagaagagggattgctggagtttttatggaacctctgtactgtcttccatgatggctgtgccaatttacactccaaccaacaatgtatatgggttcccttttctccacatccttgccaacacatgttatctttttgtctttttgatagtagctatcctaacagatgtgaggcaatgactcataatggctttgatttgcatttccctgatgattagtgatgctgacaacctgttaatgtacctgttggcaatttgtatgccttttttggataaatgtatatccaggtactttgcacattttataattgggttttatttgggatttacctgttttcctattgagttgtttgagctttttatatgttttgggttttttgtttttgtttttgctttttttgagacagagtatcactttgtagcccacacttaagtgcagtggtccaatttcactcatctgc

SEQ ID NO: 309299 - DNA, 1000 bp, Homo Sapiens
gtagggtaaatatcactagccatcaagaaatcatgtgtgtctattaaagcagctgctcagttgattatctcttctctttcctttatctctgtttcccttgctcccaacttctattccattctcagtcttagcaattcagcaaacttcacatcttcttttacctctctccgagcccagcatcctttcctaaggtgttgattgtcagcagatccagcccctcagactggaagcacttgttccttttgtttctgctccatgcagacaagttgactaaagagaagtaggagtgatgagaattatgactgagatctgtcccattgttctatatccatctactgcacagcttgcttctcatgctttaatctacattcttaatttagaaaccatctcatatttgtgtctgtgaataaaagttgaaggcaaaaattttttttgaaaacatttttaaaagaatgataaataagatttctgaaaacactttagtctttaacatcaggtggtatatttaatgtagtctattagtgctcccttgctacataaaaatttacattactatctcacagtttccatgggtcaggagtctgggtgtggctcagttgggtcctctgctcaggatctcacaaatctgcaatcaaggtgtcagccagggatggggtcttattgtggtctgggggtgctcttccaagctcatgtggttgtaggagtggagctctcagctcctatgccaccccataggagttttgaagatttccaaatctcttggaaattttcaacatggctgttgctttcttaaggccagcaggatagtatttctttgactttcttccatctctgaccttgatacccttttagtggctcaccagacaaggtcaagcttacccagaataatctccttattgattaacttaaagttaactgattaggggccttgattacatctgctaaatctctcatctatgtcatgaaatataacataatcattggaatatgtcttttttgt

SEQ ID NO: 309300 - DNA, 1000 bp, Homo Sapiens
cagtgagtaaatgagcatctgtttctgcactgctgaacaatttgtcgtattttgttcagaaagtatttactaagtagtttatttatgctctgtactttgataacagctataatgaacaaacatataacaatagtaacaaaaaatgggagtgggtgcagggatacttgggtaattttagccaaataatgaaaacaaataacacagaaagctggcacatgggaacccggcagctcctccaagattgttcccttgaaattagatccatctcacaaactttgcatctctacagcttgctagtgtgtattgagcaagtgcataaggcgcaccctttgcttgtcctcctccaggtgcaagatcaaaaaccaaagcataaaacacaaacacaagccacagaagagtttatttctgaccccaaatgatgtgatttttaaaagggaaagagaagtaatggtctgttagtattgataaaaagtgagtgcagtgggaggaaagtagaaaaaatgttatcttatgtactttccagggttactgcatcaagaaagagtatacgtgtacatggactttgtaaagtggattacactttgcaaggtagtcattatgtgttaggtgtgaggagtgcagacaaatgacagataggaagttgactcaggtgtaagtgatgcttgcagaaagagtgctaaagaggaacatctcctgtcgggagcatgtacagtgcttgcttggccttgatgttctctggcccatgctcttcctacttgcaaagcaccaagcaccgaccagcacaaaattgggacccaataaaagctgacttgtttgactgttttttatattattagcattgaaattcaaatcatgaccttgtaatctctgaaaagcagtatcagacccccagctgaggtcactccaagatgtgacacaacaaaagactttagaataaaagcatcgatttacaagcctataggtgcaatccaaccatgagtgatgctgaaaacaaaaagca

SEQ ID NO: 309301 - DNA, 1000 bp, Homo Sapiens
ggatcctcctgctttggcctcccaaagtgctgggattacaggcgtgagcaccgcgcccgaccgctgcaacctttcttgctttccttccccttccgcgtctctgggtaaagtccccgctacagaatgcctagcagagcatcgtaggagtcccgcatggcccgatccaagcatgcacctgtgcagttctctctgtgccccagggccttgcactgggaactccccaaccaagagtgtttccgattcaaccacgcaaaagctaaggctggtgcccgacagccgggcttccaggcccagctgtcctccgcaagacgctttgccaccccggatgggcaggacgcgaccgcacaggaacagagaccagtcacacgaatggagactcgtctttattgccttttttctgggggctgacgctgggtgggcagagggcagaggcctgggccaggacagggcccgaagaacgactcagatcccggactgtcctccgggcgcgacggaggcggcggccggggcggaacagcggcgcccgaggcaggggcgcggcgctggctctgcgcctgcgcggcggcccatggtcaggatgcccgcggcgtggttgccgctggcctgcaggaggcgctgcagccgaccctggaggcccgggggcccggacctccgcttgcccagcgtgaggatgccggccgcgtgattgcccgcgccgtgcagcagctcgtagaggcggcaagagcaagtcttttgacgacagcagtcgggcaggggctgtgcagccgccccggacgacaacagcgcgggcggcagcagcagcagcagcagcagtagcgtcacggcggcccaggagacctagggagacggagacagggcgctgggggggtcttcccacggcgcccgccaccagctcccacgcccaggacctgcccctctggctccgcgccccctccaagcctgcactcctttctggctgtcacttagttctccttgctttgcgcccttgctggtatcggcc

SEQ ID NO: 309302 - DNA, 1000 bp, Homo Sapiens
ctggagatgggtgggaaattgaagtcggtgcgagctaaggctggatacacggcgcgtaggggagatcaggcactcggttgaagtaggccccgaggaagatgaggctggagcccacgctgaagagcaccagagcggcccagaagcagatgttgtcaagggcattccccatgcgcacccagtcggacacttcctggggaagggtcggcacagtcagtaaagaggcagctgcaggagccagcggcatgggagacagtggtgggcctctgcctcgctccacccgcctctggctcctgtcccacctcgccggtggcctcctgatctctcgtgctctcggccacgaagttcacggcatccacacagcagcggacctcgggggcggcggcgcccaggctctggcagaaggcagctggcggggaaaacaccggggtgggccttaggagcctcccccctggcaggcaccccgcgcggccccccgggccagggccactgtgctcacccgtccaggtcccctgccggtgcctctgcccctcaaacacgagctcgctccgtggctttttcagtatcagctcctccgcgcggagcaataagcccaccgacgacgcccgccttgggggcgaggcggcccggggggcctcgggcggcggcggggagcccaggaggcgcggcagcagctccaggagaacctggggcaggggcggggcttaggggacgaggttagtacgaagccccaccccgacccgggctgcaccgccccctccgcgcttacgtggcgcagccgcggggacatggcgtgggtggtgggcgtccgctgggacacgttgagcacgatgacgcaattcatgacaatgagcgtggcgaccaccatgacgaaaataaggaacctgaggagcccggaaggcatgacatcaccgttcctcctcccagctaccgaaggcgccgcgcgctgacctcacaaacacggcttctcctggtacgggctggttacgccctccagctgcgc

SEQ ID NO: 309303 - DNA, 1000 bp, Homo Sapiens
gaagctcctcaaacttagcatttttgtagcagattgtctacaaagatgctgccaataattcctcttgtctcatgtttcctaatgatttgagtcaggttatgaatctttggcaagaatattatgaaagtggtattacagtcttctcattgtcttctatcagaaggcacatgatttcagtttgtcgtggcactgatgattttacctttgatttcttgtttaaggttgtatctgccaggcttctccactgtagttacttttttcctcctttgtaaataagtatttttgtaaggaggtatttaaagaccatgtcaacatcacattctgcttcaaattatttgtttatttattcattttgcttgagacagagtctcgctccatcactcagctggagtcatctcagctcactgcaacctccacttcccaggttcaaatgattcttgtgcctcagcctcctgagtagctgagattaaggcacctgccactgtgcctggctaatttttgtatttttagtagacagggtttccccatgttggccaagctggtctcaaactcctgggctcaagtgatctgcccaccttggcctcccaaagcgttgggatcacatgcgtgagccatcatgcctagactgttcatttatttatattagcattgacccatggcttatcaaatgagttataatccattattatttattttgatgttgaaattgtctctgatttggccaatgggagccccttcaagcaggcttctgtgtcctttggacatgtcctcctcaagattctttgatcacttgtctgcttcctggaacaagatgtttcaggctcatcttatactttgccttggaattagccatttccaaggaactttgattccttttaatggagaatgggtatttagaagccaaggtctgggtgctaggtgagctcattgctaataaggtgttaatgtttccaggttctctcactaattcattcccacctcagggcttctgacctcaatg

SEQ ID NO: 309304 - DNA, 1000 bp, Homo Sapiens
ggctctgtatttgcattttatttttgtgttcttgtcagtttgggaatgattaatattaaacatttatttgagaaacaacagcctgtaaataatttaaacacacactatattgcagccaggcaaagagacctttaaaagtgaatattcgtgattctaaaagtgtttttctcccacacgttcacttactcattttcccagcaatgtggtctgttcctttaggcaaacaaagagtctagccaggtcaaatgtgtgggtgggtaatatgtggaaaatttgtttttaagtggttggggagggacttcccccacccagtggcagggcttgtggttgcttacagactcagggaggtaacccaaatccctcacagataggtgcactaatctacaaacagcagaaggccaacaagagtaacaattttgtggttgttcatttgccatttattgttctgcaaagacacctcatgagcaccaggtggcgatgtcctttcacggagcaacaccaaagacttcaaaaacattccagttacaaacagaacaattcacttaggacattcacctgcctctcccagaacccccaatctaatgccggggaccacagagaaggaaaggggtcaggggtcctttcttgtaccagtgagccttcccccagttttctcatgcacacaacagtgcaataccaagacgagtacttttgaccaagtataaaaccacagagaagaccaaaatgtacaaaaatgggaagagaatgaaaacacaaaggcacacgcagccacaaatacacaattaaccttttaggggatgagcatctgacgaggtttgtctccaatccaatttgtcatccctggagactctggaagggagaaactaggctgctggtgctaagaccatgaaagggaaggcatggaatcccctacttgggccaggagagcagagcagagcttctagtgggaaaacactctgtgtcaaggtagtagatgcacagggctcagctggcagggttc

SEQ ID NO: 309305 - DNA, 1000 bp, Homo Sapiens; identical to SEQ ID NO: 120063

SEQ ID NO: 309306 - DNA, 1000 bp, Homo Sapiens
ccactcctaaaattaattttaatagtgaactgaggtaacattttttgtcttagcagatagctcaattccattgacaactgacttgtcatctttattaatttttacaaatgcatgtctcctaatatgaaaaggttgattttcactttattgtgtgctttgcacatttacagcagcaacaggaagagcttctactgaatagattttagtcttcaaaaatgtgactgcatcttccatctctagtttgtccatctcccagttattgaccttaccaaagaaagaggaaaataatcagtttgtgagacgatactaacaaaagagctagtttagagatccaaacatagtaaagtaacatgaggacaatagctttttgaaagcaaatgtgaccttataactactcatattttaaaggcataataagactacatgctagggtttaagaaagctttaactgtgaaaattatacaaattttaaaggtcctctaaatggtgcaaaaactgctttcttgagaaaatcttccttagaatatatataatcagcaatataaaaaacaaagtcttaaatagtagcccactaagagaaaggagtcatcttaatctcaatagtccacacgtaatccatttccaatactaaagtataataatagaagacttggaatgtttacatcttacattatgcgcaggaccaaatgagtggcatttagatagattccaacagcaacatatatataaatgtatttgtaaggttcctactacctagaaacatcagaagaggctgttcaagagaagctgtggggtacaaaataaaattgaagcataagagggaagagaaagacccatcttcttaaaaccatccagccttttctggcaacaaacatcctgtaacagcttcacacaggccatgaaaacaaagctttaacatctttccttcccttgttcaagataacctggaaattaaatatggttttgtgtatcttaaatatgaaaatatattatttgcatt

SEQ ID NO: 309307 - DNA, 1000 bp, Homo Sapiens
ccagtgacagatttttttttttatatttaaaaacaaaaccaacctccccccaaataacccccaaacaaacaaaaaaacagattaaataaaatttacagtgaatatacccagcaaacatctgtatgtgcaattaaatactgtgtctgttactgcggcacgaacctcaaacaaacaatatacaagtgttctgggggggccaggggaatcccaagttttaactctgtggggtctaggaagacaagatggggaagtgagagaatggggcaatcaattttgtttatcttaattctgtccatataaatatattcataaagaccaaaaaaggaaaggaagcttgggatgttaaggtaataggaggacagtgtgggactttcccaattctacctgaccaaaaaatgagaaattaattttatgataggagaagagatttaaaaaaatgatagaagaggatggaagccaggcacagtggctcacgcctgtaatcccagcactctggaaggccaaggcaggtggatcacctgaggtcaggagtttgaggccagcctggccaacatggtgaaactccgtctctactaaaaatacaaaaattagccgggcatggtggcgcgtgtctgtagtgccagctacttgggaggctgaggcaggagaatcacctgaacccaggagctggaggttgcagttagccaagatcgtgctactgcactccagctggggtgacaagagcgaaactccgtctcaaaaaaaaaaaaaaaaaaaaaaagaagaggatgggaagaagagtgatgcaaggggggtcaaccagggaaaaagagaggacccatggcaggggagcaagaaggagtccaatgccagtgtaggtatctgtgtttccatcttcatcactgtcttaggttccagtttaacatcagtttccttacttcctgcctctgtccatggtctgtcaggatccttcaaccccctccaccctgcccttgcttcttctgtgacagtccctttcccc

SEQ ID NO: 309308 - DNA, 1000 bp, Homo Sapiens
ctctcttgaagatggctcctttcctgccacgtgagctgaaagatcttggaaaaaaggaaagcatgctatgggacctaaaacttccttctccttttttctctggatcacagtcacgccgtccgccagccatcccacattccaagctccactaggaactgatatgcacctcaggtttggagtgcctgcatttctgatggaccctgttcaagagactgattgcactggacaagactccctaaaaaacagtggagagctttatccccgcctccaagcagacccacacttcaacattccacggaatcaagatggaccagttttctcccttttctacaacatccaagggttggccatgtgcacacgtgttccgaggcttctacagtctcttccatcttcatgtacctgggtgtggccttttcttcctcacccagcacatgtcctccctgacatttgcagggcagaggaggtggcaggtaaggtgtctcccccttcgattgccaacctcccatcttcagctcagaatccctcaacccagatctatctatagatggatgcaactgcaaatagcgaggtatgttgaagatgaaggtatttgcaacagatgaaggattgtcttgcaggccggggcccccaagagtcgcagaggtcatcaggtcattttgtaactccatggttcacatatgccaaaaatatttgcactctgatatggctctctctggtttcagatttaggaacattccaatggttcaggaatctgaaggctccgggcagacaacatttatagtcacttggggaacctctgctttaaatattctcaaaggacaggaggcagaaggcactgtgcagcaaggagctgcttcagcttggctgcttgactctgtgggattatcactcctcttctactgcagggaggaagagagcacaaactctggaggtcacggtgcccattctgctgcatccaggcacagcgcgtatgtgagatgaggatgagcaagaaggaagt

SEQ ID NO: 309309 - DNA, 1000 bp, Homo Sapiens
caccacgcctgcctggcctattttaatttttaagagtcaggttcttgttctgtcacccaggctggagtgcagtggtgcaatcatagctcactgcagccttgagctcctgggctcaagtgatcctcccacctcagcttcccaaaatgctgggattacaagcatgcgtcaccacagcaggcccaattagataaggtttgaagtatgtctacacctgcaagaccaccaccacaatcgacataatgaacatcacccgatgctcgtgttcatcaaagtctctgctctctcttcctatgatcacagcatgtcactgtacactcatttgtttgccttcgtgcttgtgatgtcttccccattaaactgggtgcctggtgaggacacggaacacatctggttggttctcctctatacccgcactatctggcacaaatagtgattggatggatggatggatggatggatgaatgaatggatgaatgagtgaatgaatggatgaatgagcaaatgaatgaatgaatgagcaaatgaattaagtcctcaatgaatgaatgaatgaatgaatgaatgggcaaatgaattaaatcctcacttccagactgacagctcctccagggcagggtccttgtccaggtcatctcagtagcctcccccaccgtagagtggtcactcaatgaatgggggttgaatgattaagtggcccaaggtggcccagggctcaccactgcagaaatcagaccaaaagagctagaaccaccccagagagcccttcaggggacctccaagataacacaggaggaagggtaccaccttcctctctgccagtaggccactgtgcacagttgagagtccaggcctcctggggggaccggatcatttccagaacaactgctatgcaccaggtggtgtttggggtaaacggcatccctgcaagggatcctcacccccttttcttccttcattctctgctggtgtcaatcacagcttctagcagagggaaggcagg

SEQ ID NO: 309310 - DNA, 1000 bp, Homo Sapiens
gcacagcaacctcattaacaatgagacagatttcttgcctcatttgatgctcaatcttacttacctgagatcaatacattacattagcagggccaagggaccgatgatctccagcctatggcaattagaagagacggaaaggcagtattgattaatgctgtggtgatcccagccctaatcttttaaccctcaggaaaccagacagactcagtgccttcatggcacaacatcttcattagataaactggattcctttcctcaggagacccaatttggtcctctaagtaaaacggccatttcattttctctcaggtcaatttcactgtcttttatttgacagctagcgcagtctttggggaaatttgtgggtgatttgagtagtaacagcaaggacatcactgtaattatgatagtgccttatatttttctagcacctctcccaaggacttatgaagacttttagattcttcatcccttcacacaacattgcttcaaggtagggccaaggcagaaattatcatcactgttttacaaggaaagacactcctgtgcggtctcaaagcaaatgcttttaagagctaaaaattcatttcctagttctgttcaccaaatgatgccttctttaaacataaatacaaattgtaatgttagcaggtgctatttacagagagaaacaaagagaattttacaatagtcgccaacactgcagctgccaaaaaatccctagctcagaaatttaaagcagcaatcccattttccctacagaaatgaaaacatattgaactttcttttgtatttagcagtaatccagcaaaatataagctttaatatagcgactgaggagtggtagtttgagccatgaggtacgggggagccagaatccacttagtgaggacagtgatgaccagcaggtggcagaagtaaattccaagcagccaaaaaaccaaaaacattcggagaattttccccccgttcctgagggacaggatggagtttggac

SEQ ID NO: 309311 - DNA, 1000 bp, Homo Sapiens
ctgacagtgttcagtttcttcaggatgtctgtcagaagcccattccttgatccatcttcttggttgcctgctggagtaacactggcattctctaaatctagaactagagagatgtatctataaagtatttattccctattttccttcatatgttgttttctagtgctaagcctgttattttccttaaagaattgcttcagtagggtccaagatggaatcagctaatggctaacacatgatgtgttaaattcggaagagtaattttgcacatggtttatgcttaaatagaaattctaaaccatttacatctgttttctggtcatcgttcttgctttataaaaaaactatgcgtatgctctccaaataagtttttattttgcccattttgaactcttccatatattaattttttaaagcactcaaaacagagatcgagaacaattgtgtccttttagttcattgtcttctacagaagaaaaaatcaggtcagattaaactcttgaaactgttgcaattacttgttttccaaacttcagttttttaattttctctcttttaatttgcaatcactttcctaagatcatgcctttttactttagatagctaaaacatcgtttactaaatatttgccttagcactgacctttgtggttactttgttgaaaactgtgctgtaacttgacacaatattaactacttctgattacttatctggtatacgtttggtaatatctacctttcaagaaaggaagacagttcagacacataatttgacaaaattaggaatcagcaacatcagttcttcgaacataggaaaaaatctgaacagagttgacatttctatctggtgttagtgttctttaaagaccacagacaacatgcacaaatgtaggcggaaacaatacatctgcagatactggcagacagcattacccgccaaatttggccagtttgttaagataaataacttttcagtgacgtgcagggctgaaattacataa

SEQ ID NO: 309312 - DNA, 173 bp, Homo Sapiens
  misc_feature (13)..(13): n is a, c, g, or t
  misc_feature (28)..(28): n is a, c, g, or t
  misc_feature (129)..(129): n is a, c, g, or t
atcaattaatttnttccctcaagcgtanctcaaaagttgaccatggcctccctacaccgtccctgatttcaatctgaatccacaggaagagtctcaccttactctaatgacttgcattgaatatcagancacagaagtaggattttttccaatttttaaacaatgtgcagagg

SEQ ID NO: 309313 - DNA, 1000 bp, Homo Sapiens
agtgatcaggtaaagaaacaaagcttccgccccatagctacagtctgcatttctgggataccaacctgggaagaaatctcatccttaggcaagggtgaaattagaaggaagaaaaaagcagaatattccattttctttatcttcagattttatcagaaaccttagcccatccagttgagtcagggttgtaatgtctctccttgccttggaattggaaggtggttctagcaaatttatgttaaaaaatggttttgaatgaaaaacgttgacaatgaccttatttattatttactttagaatgtcttattttaaaaataactccctttattgtgtattctgtgtagagtctcaaagatgacatggaagaaacttgttcacacacatgacatttgtggaaaaagatagatcaggtcctacttgaagacaaagttgctctcaacatgccagataattcgtactaggagctggtattaagcagaaacaatgattgctgagaaacagcctgatgagcaaaagcaatactatgtcatctcttgggagaaaccatcctagcccatgaaaagcatggattttcctcctcagttatttacatacaaatattacattgtgttctgtttgaattatccattttacttttggaagctctagtagtgtatatatgtaaatatatacaccctagtacacttatttaacattctaaatctttttaaggtcctagttttagttacttttgtcagaaaatataaaaaattaaacataatgtatgtctattatggaacataatatttgagaaatggagattattacaagcaaacatgaaacttcatcagaaggaaacactaaaaaacttattctggcttttgttttttcccatctactggatacgtgggttgagtccacataactatagccaatagatctgagagtaaattcagttattctgatccatgatagctgttttctagaaacattgcttttgtatatctggcacatatttgtg

SEQ ID NO: 309314 - DNA, 1000 bp, Homo Sapiens
agattgttctctccactgcacatgggaatctctaccctacccagccttttattctactctgacgggggctctggtacagacccacagtcttgtacaactgaagaccctagaaataagggtttcaaccctggttgcccattagaatcatgaaagagcccccgagatttgggttgaattggtctgcagagactccaggccccttcttttgaagctccacagatgattcttttctgcctgaggggaggtgctgagttcccatcacccaccagcttcatcctacacaagtgcaatcagaggcctagtgagagtgggtggcactggggggtggccccccagcgagtgccaagtagatcccaccaggcccttcctttaggccagaggttctagaaactttgatgaatgttgcaataaccagggggtgctctgaaaaggccctacggctgggctgcacctgagaaaatcaagccacagtctttctggttgggaccagaagattcccaagggcagccgcccttgagaaccagtgcctttcctgctaagcaatccatagtccccttatgtctgcagttgtgaggcaggggtggtaagtcacaacatcaagaactttcagcaaacacctaagctttggtgtcatcagctggagtgcaataggatgcatccacagtgctcccccttacaacctggactcacagcgaatatagagtttagaagactcatcccttctctgatccctcatggggtgacgggcatggtgtaattagaggagctccttagagatgatgcaagaagatgcacgaaggctggcggcacctatgaatgtgagctctcagctccttactttccttcgacctctgtttccaaagaccacatctgaagctggggtcatggggtaaggtcttccaggaactgactgaggaagaaacagccaatggacaggctttctgtagggtattaaggccaggctatcaatcaggaagaccttcagggatggagtccaagc

SEQ ID NO: 309315 - DNA, 1000 bp, Homo Sapiens; identical to SEQ ID NO: 120064

SEQ ID NO: 309316 - DNA, 1000 bp, Homo Sapiens
aaaatggaacaattcctttacattatagcctctggttttaatagttgttttgccctgcccctacatttactatcttcttggtaaccacaggtctcagaggtaaactttgttgccccggtttaatttatatttttgtgagtagcttggatgctagaggcttgagctgagacagacccacttctggtcttggtccactcttaaggaccaacccaacactcttttactctcatttcagcttttacagataataaccaaaggatgaaacatttttcttccttattagcttgccttcccttatgcattcagggaactaactccctgggagtatgagtaggatccatctctaattccactggtaacttttacttttagtaactgactatagcccagctgcagctccttaagatgggcaaccacatggctactcaagagtcaggatttctcatttcacacccttttatttttttctttatccatttagttttatctatataattttttcctttattttagagtgactcataaatagtctctagaaaaaaattacattttctttagcaaaaactagatccttgtgttttcagaaacctcaccaaaaacaccttttattcacctactagtttaagtcttattaactcaaattcccagtggaaaaaaaactcataggtttacttaatttaaacattacatgacttattaacccaaatccccagtgggggaaaaaagtaacctaggtttacttaatttaaacataacatgactttaagattttaaattactggaaagaattgagattaaatttaccaaattaatcttaccaaagattactagtcatgtgagctaaaaggcatctgagctaggttccatcagtctgataagcattaacattctccaagccaattgattagagctcttttgtaccacttgttagtgaaatatcacttccacatggcacatgtaaacatgtagatataacagacatatagaaaacggcaggtcc

SEQ ID NO: 309317 - DNA, 1000 bp, Homo Sapiens; identical to SEQ ID NO: 120065

SEQ ID NO: 309318 - DNA, 1000 bp, Homo Sapiens
cagatgtggaggcagcacagggtgagtgggtctgcatgtccacatgtggcatttgtggactagcaagtgagatctctttgttcaagggtgtgagaaagatttccagagccagtacagcaatgcatacccccagaccctgggtatggacccctctcatatggagatgaattctagagaacagccatagctgtgacaatcagtattctatacaaccttagtgatacggcttcctttaagaatttgtaggccaggcacggtggctcacacgtgtaatcccagcactttgggagaccgaggcaggcagatcacaaggtcaggaattcaagaccagcctggccaatatggtgtaaaccctgtctgtactaaaaatacaaaaatcagctgggcgtggtgggggggcgcctgtaatcccagctacttggcaggctgaggcacaagaatcgcttgagcctgggaggcgcaggttgcagtgagctgagatcacgccaccgcactgcagcctgggtaacagagcgaaactccatctcaaaaaaaaaaaaagacaagaatctgtggttaaggaaatagctttctgaggtttctttaaaaaccatcctgaaatgcacacagctgatgaagccacgtgacagtgtataaagcagtttaaagatcttaataaacgaggccctcataggccccttgcttgggcccactgcatggtgaaccatgtgcagaaatgtcttcccagctgtgatggtttcacattgtcatcgtcgtccccccgggaggttggagcatcaggggcctggactcactggactctcccctctcagaggtgcggaactatatctgtgacgaatgtggacaaaccttcaagcagcggaagcaccttctcgtccaccaaatgcgacattcgggagccaagcctttgcagtaagtgtgagtcaggaccccctcccagggctgtggccctcgcaccttcttatctgcctctgtcccccaggtgtgaggtctgtgggtt

SEQ ID NO: 309319 - DNA, 1000 bp, Homo Sapiens
tttttagagagatgggatctcggccgggcgtggtggctcacgcctgcaatcccagcactttgcgaggccgaggcgggcagatcacgaggtcaggagatcgagaccatcctggctaacacagcgaaaccccgtctctgctaaaaatacaaaaaattagcctggcatggtggcacgcgcccgcagtcccagccactgaggaggccgaggcaggagaatcacccgaacccaggaagcagaggttgcagtgagccgagatcatgccactgcactccagcctgggtgacagagcgagactccatctcaaaaaaaaaaagatgggatctcactgtgttgcccaggctggcctttgaacacctgggctcaagtggtccctcccacctcggccttccaagtagttgggactaaaagtgtgtgccaccgcaccagcctatagtttatttttatgaacagaagtacctaattttcacggagagatgtgtggtcttttagttagtgctctttgcgtgttatgaaatcttgccttagtcacaagttgtgaaattattctcctatattatcttacagctgtatagttttgctttacacagtctaatatacctggagttgattgattttttaatgtgatatgagtaaaggaccatttcgtattttctcacatgaatatccaattgtcccagcaccttttattgaaaagtctatcttttccctttgttcacagtgctacctctgtcataaattgagtatatgtgaatgggtctgtttctgggctcttttctgttcttttggccccagttggctccctgcactagtaccattctgtcttagttattacagcttgaaaatgaactttggcgttgagtaggcggctttctaccttttgtagttccatgtacattgaatctgcttatcaagttacacacacaacctgttgatttattgggctttcattaaacatataattaatttggagagaaatggcatttgttgggttttccaacct

SEQ ID NO: 309320 - DNA, 1000 bp, Homo Sapiens
tttttttttttttttttttttttaacatcacagcttctgtttattaagcacctaatgtgttacaactgcacagatcccattgaaccatgggccctctccctcacctccccaaggaggcagcatgcaggagctcaactaggcagagaatccaggagtcctgaggtggttgcatgaatggacagcatacactaaatgaagaaatgctagacctgccctggtgtactgagcatgagggatttaaaggctttgggtaatgggaacacgatcatacattcatcattgtgacctgcacacccaccctgggaggctccagagggcgcacctttcactacaacaggagaaatgaatttgtgaggggagtaccagcatccttgaagagctatatgatccctcacctctgtaggtcagaaattatgtgggaatggctgacactgaagcaggaaatctcaattcagtgaggataactggataccaagatggttgaggccaagtgacgctaatttcacctaaacatcggcatggttagtacaatagacagcacagtcaacacagtaatcatgatagtctgacttcggagaactatggtgctggctagttgatcacagtgttccgggtgatgcagtgagcagtagtgagcacccagtgaggatgcagcaggacgtccttgcactggaagttgccgaaatggtacaaccctgccagggttgggaaagcttctcacactcccagcctcccacagtctgggactggatggcaatcacagcatttctggaggcagtgtgcagccgacagcacccactgtggatgctctaagatgccccagcgtcttaaagttttccactgacggtgctggctgcctgccagggctgcaagtgcagactgtattcctgttgccaccaatgaggactttgctggcactggagaaagtgcttgggaatggagtctgggatccttcagggggaatcacagctcacgttttcccctgctggatgcttcctga

SEQ ID NO: 309321 - DNA, 1000 bp, Homo Sapiens
gtagtgacaaaacaaaaacgccataaaaactgcgataataaccttgaagtttttatttcaatattctcgttctggacaatttcttaacagctttaaaatgcagtattttatttattaacattaaatgcgctagaactcaaacagccagaccaaactgtaaatacagaactaggcacatctcaatgttctgtctctgtgtttacattactggataagaaaattaagcattcttcaacttttctatgggtcttaaaattcatggaatatgtgcattttcctaatgaccctttaaaactaataccacatatgaaatgttatcaaggcagaaaactacattaatttcgactttaataagatgtaactcatacaaccactaagctaaagaataatctgaagtctcaagtgggcatgatgatcttatttccatcaaacactaaaaactggctctgtgcagattgagctctccttacctttactgctcagttgagaggctcttaattctctaaagttagacaaactatgcaaaactgtcaattaaacagtgtatcattaaatacataataaactttaatgtgacactgagttgttctccaggaagttgcaggctgcattttgtcaggagtcagtgtgtcttcaaactacaggagaaaacccaagtctggcttgtagttagacaggtctgcctgtaaaatgaagatctcaaaagttttcagtaaaatcaccaacactttgcaagcagctttaaaaagaattcctaaaatgttaagtgctttctttccaaatataggctaaaaatagaaagttgtacatgcaaacgccaaaaaaaaaaaaaaaagttgacccattttttcccctccaaatagttaaggctatttattaaacctaaagcaacatgacctcttaagtctcaagcaacttcaaggttaaagcattttaagaacaagggtcaaagttgttttttctcaggtcagagatgaggccattatcaacttgctcactc

SEQ ID NO: 309322 - DNA, 1000 bp, Homo Sapiens
agtgtccataaataaagttttattggaacacagaatatgtaatatattcattggtttatgtatttgtctgtatgcctacatctgatatgcaaaactatgaaatattcatacatataaaaggcaggtcaaaaatacaactataaaaaatttataagtaatttacttttagccctttggagaatttatttaacaattaacacatggctaccactacaattttttttatttttttgagtcaagagttactttattgcccaggctggagtgcagtgattggtgtgattgtggctcactgtaacctcaaactcctgggctcaaagaatcctcctgcctcagcctcacaagtagctgagactataggcatgtgccaccatacccagctaagtttaaatttttttttttttttttttaagaaatggggtcttgctatgttgcccaaggttggtctcgaaccctggcctcaaggaatcctctcacctcagcctcctgagtcactgtgattacagtgtgagctactgcatctggagactttatcacttcttaaattagtttattatatttaatgcttttttcctattataatacttttgggacatcatttttcagagaacagtatttgactgtgtgtgtgtgtgtgtgtgtgtgtgtgtgtgtgtgtgtgtgtgtgtctgtctgtctgtgcgtgcacgcatatcttcactgagatggctttaatctgcaataaacccaggaggccctaacttggtgaagtccttttacatagtttgaagctggtaaacttttgggccttttttcaagaggtaaccctggtcatttagtgatccaataaaattttcaaaatcagcaacctgaatgtttagttctttggcaatctgccgaagttgatgaaattgaaatatattattataagttctttcagcaacgttgttgagagcagaaataaatcttttcgctgttgacctgttgctcattccagaaccatgctgggatcgctcaaaat

SEQ ID NO: 309323 - DNA, 1000 bp, Homo Sapiens; identical to SEQ ID NO: 120066

SEQ ID NO: 309324 - DNA, 1000 bp, Homo Sapiens
gatcactctgggccaggatttggatcaggatctgtgatcagcatcacaacactaccttgccattgttgctaagtcccttcccactctagaccagaactgctccgagcatgtccatgaaataaggaacttgtgacttgtaaatcaacatttactgctcccttcactgagaaagtattattatcaaaacaccatcaggtggggttaacagttcagagtgacagctgacttacttcctggcatgagctccttgtatcacttctcctattatggggatatgctcataatacagtcctaaaaaaaatatgtcatttgtacagtttatcactggtacaatttcaattgtataaaacaacatacaaaccacagaaaaacagatcctggattggcagctggcctgctctaaatcatcctctagaagcagaatcacataagcagagctcaccggagatggtctgctgtattgttgagagtaacaatgtagaaaatcacattggagcgagtgttgtgctgaatgctgtttatagctgcaatggcccccccaagcctgtcttcagatgcagcgatgaccacaggaatctcctcttgtctcccatctactgcatgtcggagagcatttgggacaaagtctataggttgaggccctacaattcctgaatctgaaaacacaaggaaggcactgtgattacaatctcatgggcttttgatatagagtccaagacatggaaaaagggaaggtaaggattatggtactgatctacctcattctcccccattaaactgaagcatatagccctgaaactttccctgtatgtaaataagcttttggaaaagtggaggaagcattttttaaaatacactgacagcactttggtacactactggtaggaaaataacagaacctgttagaatgtattatggcaatttgtatcaagagtttcctaaggacaaaatctgaaatataatcaaaagaaagaattttatttaaattgtgaaaacttag

SEQ ID NO: 309325 - DNA, 1000 bp, Homo Sapiens
ccatggggaagcccagaagaggaggatctgaagcctcctgctgggaaacagcagcaggtgagtgagctttcttgggaacaatcctaagcttcgtccaacccttcaggtgactgtggtcctggacagcatcttgactacaacctcatgagagactctgagccagaaccactcagctaactgttcccaaattcctgacctgcagaaactgggagttaatacatatttattgctattttgagctgttatgatttacagtaatttattacacagccatagactaatacaaaattagctagttatggttcttttatacttaatgcttccagtggctatttttttcataccaagcgccttaacattcaacatattaacaataaattatttcaaaataactcgtgctctgttatgtgtcacttcacataatataaatgctggtcataatatatatacataatataaatgctggacacatctcaatgtgtcactgagttttgcagttttagtaggtcacacaatagaaatgaaagggttagtttaaatatctaacctgtaacacaaatagctttttttaggcattttaaaacttactaaaaagaaaaaagatttaaacattgtgttaggatggatatagcaaattatggattttatgtttttagtgaattttcctatggatttttctagttttcctttcccccattgattaaattaaaacctctatattatccatgagttccttaacagaagtcctggtgcctggaaattatttatataatgaataatagctgccatttttgagcacttatcggggtagaggttgtgctaaggcttttatattcatttcctcatgcaattagaagaattagatgagaaaggaaggcaatcaccacagaaaggaaggcaatcaccaggaagaggtattatccagaaagtaggaatgagaaagggaaagataaaatgatgttatttgttttccttatgttttttgactttgtttttttag

SEQ ID NO: 309326 - DNA, 1000 bp, Homo Sapiens
ggatctttttaatgtgctattgaattcgatttactagtattagattgaggatttttgcatctatgttcatcatggatcttggcctgtaatgttcttgtagtgtcctcctctggttttggcctcataattttctcccagattttgggaaaagttggagcaggattgttattagttcttcttgaaatgtttggtagaattcagcagtgaagccatcagatcctgggcttttctgtgataggagaccttttattactgattcaatctcctggctcgttatgtaatggtctgttatgtctgcctcattcttcaaggtgcaattcaaacctggcctcttctgagaagccttcctgaaatccctccaggcagaactaatcccttcttctctgggctccaatagctggtaatgcagccctgctggtaatgcagcacgtaccacgcccaagaacagttgtgagggtttccctccccatagatagaaagcagctccaagacaagcagagtgacttgcacttccctctctccctagccctgtatagggagctatccagtcaatgtgggatgattgactcagggctcagcaaactttctcggtacaggatccaagaggaagtaactgaggttttgtgagccatacatggggtctctgtagcaattgctcaactctgccttgccgcacagaggcagccctggataatatgcaaactatatgcaaatgagcagcctggctgaattccagtgaaaacttacagcatcaggtgtcaggctggagttggcctaagctacaaaagacaggttagggagatggacaatgggtaggaaaatacagttagatagaatgattgcgatctagtgtttggtagcacgataaggtggctgtagttaacaatattatatatttcaaaataactgacggagtgaaattggaatgttcctaacccaaagaattgatgaatgtgtcaggtgatggatatcccaattgctctaatttgattattacaca

SEQ ID NO: 309327 - DNA, 1000 bp, Homo Sapiens
gatctatccaaatttcatcccttctcagaggcccagttcgcatctgtggcagctcccaggaccaccctcctgcccaccgagtctcctcttctgagctcctgtgactccggagtcggtgagaattttaagtaaaaacctggatctgtgttttggtttcaccctctccctagaataacacttcatatcatcatggggttttaaggggactcctaggtgccggacagttgagagtctgtcctcagacccactctccttccctctccccaggcctggtgctccaggaagctgaccttgcttcctgcttgggccggcccatgggcagcactagcaggacgtccgtgggtggacccgaggagagagaggtggggcgttcgctccccaactgcagcacacagggttggtgtagactggctgcttcttgctgcccaaggccacatgtctgccccatggccctctccacatagctgctctctgactctgaggctgcccctcactttgttcctccagcctttaccggtaacagatccacacagctgctaccctggggtactgtacttgctggcttccttaaaccctgcctgcatctttatgaaaccctccttaagtccttaaaccctgcctgcatctttatgaagccctccttaagtccttaaaccctgcctgcatctttatgaaaccctccttaagtccttaaaccctgcctgcatctttatgaagccctccttaagtccttaaaccctgcctgcatctttatgaaaccctccttaagtccttaaaccctgcctgcatctttatgaaaccctccttaagtccttaaaccctgcctgcatctttatgaagccctccttaagtccttaaaccctgcctgcatctttatgaagccctccttaagtccttaaaccctgcctgcatctttatgaaaccctccttaagtccttaaaccctgcctgcatctttatgaagccctccttaagtccttaaaccctgcctgcatctttat

SEQ ID NO: 309328 - DNA, 1000 bp, Homo Sapiens
aggatcaagaccatcctggctaacacggtgaaaccccgtttctactaaaaatacaacaacaacaacaaaaaatagccaggcgtggtggtgggcgcctgtagtcccagctactagggaggctgagacaggagaatggcgtgaacccaggaggcggagcttgcagtgagccaagatcacgccactgcactccagcccgggcgacagagcgagactccatctcaaaaaaaaaaattagccagatgtggtggcactcacctgtggtaccagctacacaggaagctgaggcaggaggatcacttgagcccaggatgtcgaggctgcagtgagtcctgttcatgccattctactgcaacctgaggaattgagcaagactttgtctaaaaaaaaaaaaagtaaaataataaaaagcaagctctgaaattaaaaataaaacaaataaacttaactgtaatcttcttggtgactagagaagcagtactccaagtgacttgaaagtacaaaattcaactgtacatccctagtgcattctatctcaaggaagagaagacatggggaaaattgtaagtgttttcaatgatcatatcattgaagataatgctggtattgtcattccggaactgccgagtatgtactgcgggataaagcaaaggcctgcgtatgttctatcatccttagggtacttaagactgaaattcttgacatgagacaaaggggacacaggtgtgagatagaagaggttaagtaagaacttcatagtcttgagtttgaattggaaatatcagattttatggttagttatgtagcaattgtggaccgataccatcggtcttttacgatcgaagggattcatcttcccctaccgctcactcccccatctacccaataaatcaccagagctctacagctctaattcagaactcctcccagctctgaccctgctctccagcccgactgccactgcctcgatgacggcccaccagccctgacccgcactttgttt

SEQ ID NO: 309329 - DNA, 1000 bp, Homo Sapiens
gaattcttctgatatcccgcccatggggagttggtgatgggacccccaggagagggactgcgggggtgtccctgcgccttcgggtggtcaatgctggtgaagttcggcacccaactgtgagcaaaggagaggccctttccaggaagccccaggggcactccagggtcgggaaggggccacaggggtctggcgaaagcatgaggcaagatttggaaacgaggctccagggcagggtcagggccagggtcaggggcacccctaggatggctctgctgccacccaatcagagtctcctgcccagctcctgggctgtgggcgggggtcgcacaaaggaccatgggcagccaggtaggaacaagggtcaccaggcacttggcaggggaccggcctctgggaaatcatccaggccaggggccatggagccggctttccccaagccccagggacccagcttctgccgggagggtctgggggatcagggggctgaggaccctccacacaggctgggtggggcaggggctcgggctggccctgctgagcttgggtggctggagtcctcgaggagggctccctggaggcaggggcgcggagagagctggggcgggccaaggcagccagcagcccacggcaggcggggggcctgacccgagcagcggcgttagggctggcctggggcgcagcgtgcgcacgggagcgcgtgtctgctggactccagcgaggtgctgtagccagctagccaagacaagctgtccctgcgggtgtctgaccggcggggcccaggctgggggggtggtggcggcaccccactggggacacagtgaggcccggaacagagcccagagcctggctgccgcgctccaaccacaatggccggtgcctccccaggctgtacctctgggccctgctcccaccagggccctgcccccaccaggggctgtgcagggtctgggaagggcacagctgtttgcctccccacattccagacacagggtcaagcagt

SEQ ID NO: 309330 - DNA, 1000 bp, Homo Sapiens
caggttctccagacctccatctccactgcagggaggtgagggccaggaggaccatccggctgctctggcaaaggacctccaaggtagctgctctgccccgtctttcagttgatccacttttagactctgctccatgccagggcctcccggtgtggccagcttccccctcagccctcttctgctcagcagccacccaccaacccacttcccaccttccaaaatgggttcaaatcctttgtgggatgttggcttcttccccatctttgtccctgggggaggatttttttttggtccattcctctcatttcacagttccatttcgttttaagtgagaagagatgacctcaatcaatctgttttaacaaactgcagtgacccagcaaaacctgtcacatacaaacaaatccccaaatatagaagcccagtatgttaaagacaaaacttcacaatcattagacgaaaacatgacagtggtttccagcctcagggaaggtcaggatgttctgagtcagtcggaaatagcaccattcataaaggataagatcagctgatcatgtgtaaggcttaagcttctgcacatcaggagcaacagaaacgcagttcaaagacacaaccgagaatccgtaatcaggaatatcaggaactcctaccaaccagcagaataagacccagaccaacaaccagaagaaaaatgagaaaaagacatcaacaggcaattcgcacgggagagaatccaagggagaggtaaacgtggtaaagacgcctgactccgccgagtcatcagagaaacgcacgtgacagcgatgccacttcacttcacacacagcacgctgcagcatctcaattccaacaacacgaagcacgggcagggatgggagggatgggagggatgggagtgatgggaaccctccccctggtgctggtggaaggaccggatgcagcccctctgcaaagcaagctggcaactgctaaaaaggggaggcctagaaaccaccaaccc

SEQ ID NO: 309331 - DNA, 1000 bp, Homo Sapiens
ctttcaggtccccacagtaggtcctgcagtggatcacctgtcaacaagcaagaacctatcctggaaaagcttaccagctcttttctgttcttgtaagctgggaactacataaacaagtttcttaaaactcaatgtaaaggttgaatcatgctattttaatacaattagtatctattgtggctgctatatagtcttctacctactattcttttgactagcttgaagagtgatgaaatggtcagcaaagtcaacctgatattacagctattatcacaatggtaggtgcacatatccccccactctgtgcctcagtttcctcagaggtgaaggacagactaagagtcccattgacagaatgtttgcctttctagaacaaatcacttgaggagatccctaagaactcctagaactgttcttcatagctgtaccccatcagtagcacctgacatcctcatggtcctccctggattcctatatctctgtgtgtgccctcatttggtatataatcatacttaatttttttttaataaagacagggtctcgccatgttgcccaggctggccttaaactcctggactcaagcaatccgcctgcctcagcctcccaaagtgctgagattacaggcatgagccaccgtgcccagctgtacactttatattttgaaattttcaccaacatattgacatatccccagcctagaagcctcagagcagaaagcgccacttttgcacccactgctatacctagcacaacttctgacttattgccaatgctcaacaaatggcaaattcttccttctggtaccactgcactctcttttgaaactgtgctctctagaccacttccagtaggacttagatctcgctcgcatcagtgagggggaaaaaaaaatcccagataaaacagaattccccaataattttgtactactccctttaagaaaaaaatccctttgtcctaacgaaccaaagaatatctcctgctttgtggtaaaggatca

SEQ ID NO: 309332 - DNA, 1000 bp, Homo Sapiens
ctgagatactgtggcagtcttcgcttctgggacagtgcaggatcggcagaggaaagccgagatctgagctctacttcctgctcaggaatgccagctcagaggtcgcgaagcccagagatcccttcccaaccacaagggaaactgctcgttctgccaggccacagtcaggggctatgctgctgggagccgttcatggcacaatgcagcctgcccagggcaaagactgagctgctgaggcccactcagtaccgcaccacccaggaccagtagagggcccagggccaagccgtacctgtatgccgggtgcaggccagagcgagagccagggcccagagcagggccagcttcctccggccaacactcattgtgtggacggcggggaagagtgccctgtccctcagcagcctctgaggagggacccaaggtggcaggagctttttgtagccccagagctggctccagccccgtgcttcacgtgggtgggcagggcggggcctgtggttccccctcacccaagtaaacagtgggtgctcactgcgggctggccagcggccggtggcaggcggagatgggtgtgtctgccgggtagagcccagtttccgagggcccccccaagccctggcctgcaggggtcctccccacataccccaccctagactctccctgggcaccgtgccatgcccagcagcctgtgagttcctggtgcccagaagtgagtgctcagaacagccttaaggcacctctttgacactaatccctctgcagcaggacagggggcccagcccagcctttccctttcctgccattcctcccatggccgacctcctggttggaccctccacatgggcagtggagctgccgaccttggctggggaatgtgtggctgcctgggagggagaggccagccccagccccatccaaagctccttatggtcacctatttctccatttctgtgccttttactccccatgtcttgtcttacccggatgcctagagaga

SEQ ID NO: 309333 - DNA, 1000 bp, Homo Sapiens
tgaagctgcagctctgcactgaagctactgttattgtggcataaattaaataagaggaaaatgcagattcatttgcttttctcctggaataagaccccagtgctcctccaagtttatataaaaggctgaggaatctgtggtacaaatactttaattagctgacagcatgtgcgatgaattacatttgatttctgtctaagatgcttgtataataaaggatttaattcattttttacagtgtaatgaatggatagacgaggatatcttagaaatttgttcatttaaagcaataattgcaatattgtacgcaaagtggaatgacatgaagaacattgtagataaagtatgtaggagccttcagattctgtggattctctgtacccttgccctcctgcctgggtatgaagctgactccatctaaaagctcgagaacttctggccccacctttggcccttgccatcttttgccagcaagaatgtaacagactcttaattgacctttctgctcattaaatgcttattcaatgagtgagtacatgaaaatagatttccttctattacttcaacaggattagagtaaaagtaatgttttaccaaatattcaagtgagacaggtgtaaacaaatcacatactaacgtgtggcaaatgtttgcaagataaaatgccactaagaattaaattgctgagtaagagacttggatataattatttaatataatcacatgtgtttaacatttcactcaattgtagctatcatccaaaatgcttctttgccctacctatatgctggtttagagaaactgaccatttagctataaatattcaaggaggaggaaggtgccttgcactaccagatctgacaccagctcctagcctcacaaacaccattatgcatagacacagcctggggatcctgtcaaaatggagattctgagtccataattctggtgcagtatttgggactgtgcgaatctatcaaactccctggtaatgttgatg

SEQ ID NO: 309334 - DNA, 1000 bp, Homo Sapiens; identical to SEQ ID NO: 120068

SEQ ID NO: 309335 - DNA, 1000 bp, Homo Sapiens
tttttttttttttttttttttttttttgagactccataatcagatttattttcctctaataagacagtttagcatctccgagttttgcattctacagtcttacaaactttagttattagcatcagaaacacaaaaacattgcaagacctcaaaacacaaataaataccaaataaaaccacacataatatacaataaacaaaactagaaaacagtaatgctatcaggaagtcaggcatgttgctaactcacagtaacaacatgattattgctgggcaataactcacggtctttttgttttttcttagaagagcggaaaacaggacccaaatcactggtcacaaaatcacttggactgtcaagatgtgtcttcacagcaagcggctactacagacgcaacttttaaaacaggcagattaaaaagacagggtcaaatgagagattggccttctttggtctttgtttttgggtaacagaaccgaacagaggcaccggcagagaagaggctgcgaatctgcagatgctgtgcagcgtcgacactgccctccacacttcacagaccttctcctacaggcatttcttacagaaatcaccggacatcatgccagcttgtgtgttttccaattaagtcattgaatttgctgttggagggtatcttacttgtctgaggggactaagttgtcaaatccagtcatcacctaattacaggagcggtacagcgatcctggacttctagcctcttttcacggtgagagttcacaagacagactagacacagtgcagcaggagaaatgaaacgcaggctctgcttggccaccggggcctcctcacccgcacacctgccagccccgagacggccgaggcttcacacgtctgccctgccaccgcatgtggggcacaccaggatcaggtggaaaatgcccttgcagtgagctgctggccccgcctcacgccgcctgctggcccggctccctgatgccaccgtgcctgtgaccatcagca

SEQ ID NO: 309336 - DNA, 1000 bp, Homo Sapiens
atacaaccggagagacccaagtccccaaagacaagaagggatgatgaaatggcctctgcatgacatgacttgcctatgagccctcccattgctataaggatggggatcttagcacagtgccttgtgtgaacagtaatgctagccttgattttaccatggcaagtttgtttagggaaaaattcaacccacccattgaaattccaacctcaaccaaatgagggatggctggggatgcaaccacagaagatactgtatcttaggaggggagtttttttttttttatagaaactcgtcaggatattattgctaggatgtgttgttactgggaaaaaagctgatggaatacaaaagagtagacatccccacagggattatttgaggcaatcagtgactaacatgaccactttgctttctctatgcaggtgtcatctattgtgatatagtgccaggaggttgcctttgctgtggctttcgaccctagatttttaagttgtgtgacaaacccatcttttatttatgtaaataaaatgtccgtgtttattggttattgttatattgtgaaattgtagtagatctaaaattgtaatttcttggattcctagaatttctaaatctgtggatttttagaattctctagaggtgacaaaggtttattatctaagctaccggagctatgtacttttggatataagagtgtctccatctccattgccttacaaatcaggtgtgagccaggcatgtctctcagactggaaaaggtaactaatcagaaggaaccattgtcctagaatggggcaagtgtacaatacacagaaagaccactggtgccgtagcatataacatattcactcaatccttcataccctttgtatcgttttttttctgttttatttattttatttatttattagagatcatagtgtgtgcaacacctatgtccaggttctgtggtaaacgtcagcgtggagaaattagtagctattagatcataaaaaggtga

SEQ ID NO: 309337 - DNA, 984 bp, Homo Sapiens
aagttacaaacacagagtgtttgaagaccaaatgggagaaaaagaacaaagagacatacgtgatagaaccagcagttgctcctacagtaagagtccttgaattagtgggctctcttctaagatttcaaagcaacaaggagatttcagttcaattgacttgaaaaagaaattggaacttgtcacatgaggtactcaaaatgaggaagtgaactttcatttcagtttcatttaaaatctagctagtacagtcacctctagtcatttccctatggtcttggggacaaagtggatacagtaagccatcaagaagagcccttgtctgagcccagtggctcatgcctataatcccagctctttgggaggctcaggcgggaggatcacttgaggccaggagttcaagaccagcctaggcaatatagtgagaccctgtctctgcaaaaaaatttttttttaattagctgggcatggtggtgcatgcttgtagtcccagctgagggggagggtgaggtgggagaattgcttgagtctaccaggacaagactgcagtgagccatgattatgccactgtgtttcagcctggatgacatatcaagaccctatctcaaaaaaaaaattaaattgaattttaaaaacaccaacttttacatggaaaacatttagttataaagagatttagataaagctccccaaatcccagctccttgtatgatttcctaggaaaacctgtcttactgcttttaacacaactcattcatgatctgatattgtctggttctcactcagccattccttcgttcatcaaactcaaaatgtctttattaatatatactatatgtatagtttagtaatatgcgtgtgtgtgtgtgtgtgtgtgtgtatgtgttagtatatcatggaaaaaaggatacactcaaatatatccaattgagaatgattacctgggcggggcgggagcaagatgaactatcatcttttaaatttgca

SEQ ID NO: 309338 - DNA, 1000 bp, Homo Sapiens
cacagaaaacatttaggtggcaacattatcatttctgacatataggctgtttcaaaatttacggtaatttgcctccaatccatttaggaactaggcattgcataattaaataataaaataatgggcggtttgtctcacaggtttaagtgtagcacagagtccactagaacccaattctctgtcccagcaggagggctctcatctgctccagcctgtaaattagaaaagtgagatgataccatgcttggaaatttttttttttttgagactgaatctcactctttcgcccaggctggagtgcagtggcgtgacctccactcactgcaacctctgcctcccgggttcaagtaattctcctgcctcagcctcccgagtagctaggattaacaggcatacgccaccacacctggctaatttttgtatttttagtagagatgcggtttcgccatgttggccaagctggtctcgaacttctgacctcaggtgatctgcccgcctcggcctcccagagtgctgagattacaggtgtgagccaccacgcctggccggaaatttcctaatacatcaagaggacataaagttactagttctttcataatttcccctccttccccagggaaaaattataccaaaagcaataaatggagttaaataaaggaggacacggaaaaatgagcttgctcttttccgtagtggtaggggaaagggggttgctttgttttaaatcaaagggtgacattgccccaggaagattaggagaggtgatttattatcatttacttactacttttaaaaaggctaaggtgttagttaatttcatgatttcaggatcagatactgtacaaatatgaacaaattggggaaaggtgaaccacctaggctggagaacagggaaggctgaccaaggaggcccaaaggaagcctcattcatcagagtccaagtcactgtccccagcaatggagtggaaatcctcactgtcctcctcgtcctctgacaggt

SEQ ID NO: 309339 - DNA, 1000 bp, Homo Sapiens
atttccatgacaactggtgaggttgggcctcttttcataggtttgttggccacttgggcactttcccttgctggcagtcattcaaggtctctgtccacttttctgatggggtgtctgcctcttccctatggacttgtggagttccttctacattcagggtgtaagtgcccctccctcacctgctccctcaggcactccctgagtaaatcactcggcacgaggaccccgcgtgcacctgcagtatgctgttccggttgcctgcagagcctgcaagctcgccagcggccagcgggcatggggctggtaccagatgccatccacagctcacacgccagagaggcgggatcccacatgtggctcctcactcctccctgctcgaggactgccgtgcctttgttttggggctggggaatgtcctcagctggttcttcccccaatgccctgatcctgggctcacatgtgaccggtccctgcagaccccacacctctgagaaaggcttcagtggcatgggcctaggctggaccacgacgcactcagcaaagcccagctgtctctgtgaccaacggccatctgggccggcccctgctgccgagctgctgggaccacaggcagaggagacccacctggcagaggagacccacccagccccggagcccacctctccgattgctggggcttaatacagtcgcccatgaggctgtcggagtccttcaagtctcagcccacatagtgacttatggccacccacacagtatctgcctggaccccagacctgagtggtcagcagggatcacacctgggggctccaggtgtgagctgttagggcggcacctgtagcaggcggggtgtagccacccctgagggtaagggacatcctatgtgacgatggggacggtgggaggcactagttaggctgcaggcaggttcagcccttgtaggcagcccagcacttttcctgccacagagttcactgacccagctgaaaggtgcgagcgtcct

SEQ ID NO: 309340 - DNA, 1000 bp, Homo Sapiens
ccacggagtcctgttcagcttatatactaacaactggtttaattagactcaacatattaatggtttaacatgtcactgaagaaagcatagaagtaaaaacaattttcaaaatacatttgtgtatagttggtaaattcatgttcctgctatatttgaatcacatagatagttttcccaggtgtgttttgagatttataaatcattttacatctaaggataaaaaagaaacaggtaaactcaataggtgagaaatctgctgaaaccagctaattgatttgttttttttactttctttttcataaaaacccaatctgtacaaaaaaagatttccttctgccctgtgaaacaggttcattaattcataagaaatctccttctttaagatgtggtcctatgaaaaccttggtaccccaattgtttcatgcagtgttgttaggacagctatttgcagatcccaattccaaatgtaaaactaccttctcacccacaaactttcctttgcattctaaaaaaaaaaaaaaaaaaaatttaaggaaaaaaaaacctcagaaacatcataacccaaagagatccagtttactatataaaatatctccaataaatagtgtagcttcttcctcccaaactggcttttcagggcatagatccaacaggtgtgaggtttcttctaactgatttctataatttctcatttaggaaaaatggcattctttttcaaaaggaactggtgatcaatcacacaatagtcatcagtagtcataaatgactaagcaggacccaaaacactgatcaggatcagtattttattgacagtaaaaaaaataaagggaaagcaagcaagaacctaacattatatgatttttgtgaaattcaaagtataaggtttctgtgagctcactgtcatgtatttcaggcaatggccacaacctagaaagtcaataaaagctaaactaaaatccagaatagagatcttgaaacactcaaggcactgaccacactg

SEQ ID NO: 309341 - DNA, 1000 bp, Homo Sapiens
agatatatttcatctagcttttgttttgttttgtttttgagacggagtttcactctttctgcccaggctggagtgcaatggtgtaatctcagctcactacaacctccaccttctgggtttaagcgattctcctgcctcagccttccatgtagctgggattacaggcgtgtgccaccacgcccagctaattttgtatttttattttatttttttgatacagagtctcgctctgtcgcctaggctggaatgcaatggtacaatcttggctcactgcaacctccgcctcccaggttcaagtgattctcctgcctcagcctccccagtagctgggattacaggcgcccaccaacacgcccagctaatttttgtatttttagtagagatggggttttaccaggttggccaggctggtctcaaactcctgacctcacgtgatccacccgcctcagcttcccaaagtgctgggattacaggcgcgagctgctgtacccagctcatctagcatttttatgtgcttaaagcagggagtgaggtggggagggtgagcagctacccattaatgtcatctcagcccaccacgctgccagaggtctaaggtgttctttattctaagctcatattaatacctccttttacattcctgaatgaaggaggtttgattatgcaggctgaatatcccaaatcctaaatcttaagtgctccaaaatctgaaactttttgcgtactgacatgctcaaaggaaatgctcactggagcattttgggttttggatgctgaactgaacttgttaagtataatgcaaatatttcaaaatctaaaatccaaaacacttctgtttccaagcattttggataatggatactcataaaactcttcaaagcctgtgagcacacacacgggcacacacacataatcctgcaatgacatagttctaaggtttgcaaaccaagttttttctggacatggactttccccccatatctgcatggtaattttgtat

SEQ ID NO: 309342 - DNA, 1000 bp, Homo Sapiens
agcaacacagagtcttccctactagcactgtggtgtcggcctccgctgagggctttgatttctcagttccagtgtaagatctcatacatctttcattcggtgtattcctgggcgtgtgttctccgtgctattgttgacggcatgtttttaaccttctggttgttggttgcgagtacacggaactacagacacctccagctaccggcctcgcctctggccctctttgggagttcacgcgccgtgctcagtgttgtgtttgtaagttcgtctggatttccaagacacacagtcgtgtcacctctgaatcctttgttcaccttcttcctctccatacttgatgcctctttttcttgccttttttgcccaactggagctgcctgtacgtggggagcagaggcagcaagagtggccgtcccagtcatgttcacatgaggctgctcgtgccccaggcctgggcaaacacccagatcagactgagggcagccagcaaatctgtgatgagatgcgaaacagcagctacgggtctcaagaacagagtacaacaaacatgcctgcagacccggtcttctggcagtgcccggctgaggggaatctctctcatgttggcctaagcctcaagtcaccatgaccgtcccacacagactgactggacccgacagaagagcagaagagctggaatgaaatcaatcatacttgcagaaattcaagtgcaactgccctttgtacctgattaaactaatttatttcaggtcaagaactttgtgaaaggcaggtatgggtcatggatggaaagcacagatgtgatcccatcagtgaacgaccctggcacggcctagagcgggaagctggagagggcgccccccagtgcttcctgccgagactctcagtgtggccacgtatccagggtgaattgtttcctccctaaaaaagatacggaggactctttacccccggtcctcagaatgtgactctatctggagttagggtctttacagagata

SEQ ID NO: 309343 - DNA, 1000 bp, Homo Sapiens
gtcctaggaatcaagttgtgggttccagatcccacctccattctgccactaggactgtcagtcatcctttttgagcctcaggtaccttctctgttaagtaacaggatgggccagatgattttttttttccttgagacagggtcttgctctgttacccaggctggggtgtagtggtgcgatcagggctcactgcagccacaacctccaaggttcaagcgattctcctgcctcaggctcccaagtagcagggaccacaggtgcacatcacaatgcctagctaatttaaaaaatttttttgtagaaacgatgtctcatcatgttgcccaggctgattttaaactgttaaactcctgggctcaagtgatcctcccgcctcaggctcccaaagtgctaccattataggtgtgagccactgtgcctggccccagatgatctcaaactgcagtcctagggtcctcagttaggtattaagtacctgaactcactacataatgggaacagggcagagacggcaaccagactccaccttgaataccaactccaactgactggtagtggccccctggagtgctatattgagaaaaacttctaaaaacactttgacttccacaaaaaagagtgcttgtgcccgattggtcatgtctgctgtgggctgaagatgcccaaatagtaccttgagtggcaagaatttgcaatttccagcttcatgtattgcatcttactgtggttgcaggaatgtgccaatcacccatggtataaagatactgaagattaatttctcctgaggtcttctgtgaaagcaagcgctaggattcccccaggcttaggcttaccaaccctgtcctgaatccaacaccctggtgccagtttgccactccttcccaatcctccatgattctatccctgttgcattcatcacctctaaatgtcattactttctgagtgtaactcggaccctcctttcctgcagccaagacataactgattaattacacaacag

SEQ ID NO: 309344 - DNA, 1000 bp, Homo Sapiens
ccaatcatacttccaccaacagtgtaggagaatgctcccataatctcaccagtttgatatcagaaaaaatagggtctaattttaaactttccctcacccattggctatctccattatcctcttagccatggtcatcttcttccctcggttattgtcaaacagggccatgtgaatgttaatgggtatcactagggacttttgatgaatttactccccagacctgtgttctgcttactggggagaaggaaaagcttggtagggagaggacagaggcaagtgctttttggatgttcacgagagctatatatcctgaatatgaatcacatttgccaaccaagaccagccagaggccctcagggtggtgctaatttcagccaagctatttaaacagtagactgcaggactagccatagctcttcagtggcttgaaatctaaggggtccaaggcagtccaggaaaagctgccttctaattccactgggactgagtttctggaaaagccacatgcctctcaaacacacacactcaaaatcaagacacccataaattactcatcgggctggccaggaagtactgatacgaccggaagatgactactctcttaaaaacactcatgaatcacatttgattattttggaaaatgttaaaatttattaataatagttaacatcacatagttaattaaactagttatgtattgtacataatgacaacatcttcactagactgagtgctcaaggatttgagatgattcgctattcatcacaccccgaagattgagatccactgtatttacacaaagcaaagccatgtcagcaagggactgtcaacctgattctgagaacataaacattcaaaatttattttccagtgttcctttttggaaaccaacaacacatctttaatacctacacacacacacatctctacctttaaaaaaaaaaaaaaaagtgtaacttcacagatagtacctaatcttcaagcttaaaatttaagttaa

SEQ ID NO: 309345 - DNA, 1000 bp, Homo Sapiens
attacaccaagatacctgtgtgataataatgacgtgtgagaccaaaaaaaggaatgttctagtctagttctgtgtaatagaactataatgtgagacacagatgcaagtcatgtatagttttaaaatttttggcagtcacatttcaaaacatttgtaagaataggtgcaattcatatacaccgtggaatattatgcagccataaaaaagaatgagttcatgtcctttgcagggaaatggataaagctggaaaccatcatcctcagcaaactgacaaaggaacagaaaaccaaacaccgcatgttctcactcataagtgggagttgaacaatgagaacatatagacacagaaaggagaacatcacactccggggcctgtcaggggatgggaggaaaggggaaggagagcattaggacaaatacctaatgcatgcagggcttacaacctagatgatgggttgatgggtgcarcaaaccaccatggcacatgtatacctatgtaacaaacctgcacgttcggcacatgtatcccagagcttgaagtaaaattaaaataaattaataagaataggtgcaattaattttaatgttttatctgctcaatatatccaaaatgctgccatttttacatgtgatctatattaaaaatattgagatattttgttttatgttgtactaagcctttgaaatccagtgtgtttttcagttatagcacatctcaaatcagactagcaacatttgttgttgttgttgttgttgttgtttgttttgaaacggagcctcgctctgttgcccaggctggagtgcaatggcgcgatctcggctcactgcaagctctgcctcccgggttcgagtaattctgctgcctcagcctccggagtagctggaactacaggcgcccaccaccatgcccactaaaaattcttgtatttttagtagagagggggtttcaccatgttggccaggctggtctggaactcccaacctcaggtgatccgccca

SEQ ID NO: 309346 - DNA, 1000 bp, Homo Sapiens
gaatttcagtgatggatcctttcagtagcttttatagcccagtgacatggaagggcccaccgtgaggcataagaagcaatacaaatatgcccagcaatccatctgaccctggctgtaaaatcagcagtatctgtgacttgcagctgacaacatggccctttagctccattttcttgataatttcaataaagcagaatttctcctttagttgagcacatcacgttcaatgtaggtgaccttttggtgggggaaaaaaccctagcgggctttcataatgcaaatgctacaaacaaattctgatggtctctcacctgagaagctcccgggcttggggtagcagctagtctgggatttggagctaacttcacaacctctgaaaagggcacatctgttccacctgcaagacctagaagggaaaggtcacttcacattagtgcatgttgcaagtgaagacgttaaccaaaaacaccacgaaggatctcactggggtggcaaactgttctaaaactggattatagtgatggttgcacaattcagtacatttatgaaaaatcaatgaattggacacttaaaatggatgatttttatgtcatatagattgtacctcaataaaattacaaaacaaaacaaaaaaatggcaagtgcaggcttgtctccagcaggacccagcttgtctttctctttgtggttgtgcctttcatggaataggtcgggtaacctcgacatatgatggggaagggtctgcctgcccctcctctctcccctcgttcaccacattctggacagcctggtcttctctccactcattctgcctcagagccttttcactgtatggaatgttctttccactcttcacatgcctgttcccttctcctcagctaagatgcacctaaaaacatcacttgctcaggaggccctccttagcgctcaacaccatctgcttttcctcagagcacttttcccaacttgtgcccatatatttcagtgattattggtttaa

SEQ ID NO: 309347 - DNA, 1000 bp, Homo Sapiens
gatccacttgaggttaggagttcgaggccagcctggctaacatggtgaaaccccgtctctactaaaaacacaaaaattagccgggcatggtgtcacatgcctatagtcccagagactcaggaggctgaggcacaagaatcacttgaacctgggaggcggaggttgcaatgagcagaaatcgctccactgtattccagcctgggcgacagagtgagaccctgtctcaaaaaaaaaaaaaaaaaaaaaaaaagacagagtgcactggagattggggggctgtgtccgacttgggcagggctctgtatacagtccagccacagatgtctactctggccaaggccactttccaccagggaagccactcaccgaatcctcccaccaataaggaagctgagattcggggacactgaggcatttgcccatgatcgccccgccaggaaagcacagcgggccacagcatggctggagcccagcctccatcacaggcgtcccttgcctccccatcccccccactgcatgcccttggccatgccaggcccacaagttcattcccagaggaggtcttccctcctgcagtgccagacgctattttaagcactttacttctatcagctcgccactcacaacaaccctctagggtagacgatgtcaagatccacaactgacagccaaggaaactgaggcacaaagtggtcaccgggatgctaaggagtggatcaggacttgccagctggcccctgctagagctcttaccacaagcacgactctgccctcagcctccctctaagcagagcccctcccccagcatcctggagcccctcagcttgttttaagtgattgctgatttagcgctcctcagacaatgtccccaggcctgcaaatgtgggaccttgtgtttatctcgggtgtcaccacatccctgggctcctaaaacagtaactggtgcacagcagacgcttggtgaatttctgctgaccatttcaagctggctggatgggag

SEQ ID NO: 309348 - DNA, 1000 bp, Homo Sapiens
ggcactggtcttatacacacgggctgacctgaaaccttatcctagagaagttggttgacagcctgatcacttgacaagaggctggctggtgagggcagtgaggtgagaggggaggtgagtgagttccagatctggttcagtcctcttgacttggggtgctttaatatagctcctttaagctgtggacgcttccttggtgacaagggtgtatgggggggtggacctgctgccacttttgagtccaaaggtcaaggcctcccacgataggctgggcacagctctcccaggtctcttaataataatgtcatttctttgtgcctactatgtgctaaatattttacatacattactactattttccacaatcctatgagataggtactattaggattctattttttttactttttttttttgtaatttaaaattttttagtagagacgaggtcttgctgtgttccccaggctggtcttgaactcctgggcttaagtgatcctcctgcctcagtctggcaaagtgctgggattataggtgtgagccactgcacccgacctaattttttttttttaaattacagatttattgatatagaattcacataccgtacaattcatctgtttcaagtgcacaattcaaatggtttttagtatattctgagtggcacaaccatcaacacaatctattttagaacattttcatcaccctctcaccctggaaaaactccatacacattggtagtcacctcccttcccccgctccccagcctcaggcaaccactaatcaatctactttctgtctctataaatttgcctgttctgaacacttcctagaaatggaatcatccaatatgtgcttgtttgtgactggcttctttcacttagtatagtaatgctttcaaaattcatccatgttggagcctgtatcagtatttcgtttctttttagtgctggggatcctaaaatcttaccacttattttactgaggaggaaatggaatctca

SEQ ID NO: 309349 - DNA, 352 bp, Homo Sapiens
gacctggaacaggaactggacctggagtaggattgttgatatttccttgacttttatcttcaggtttttcattcagttgtatcatttttattccaggtagtggaaaaggttctggaattttcattccaggtatttgggtgggttcaaggattttcacaccatggtcttcaagcttctggtttttctcaccatggtcttcaagcttccagtttttctcactatggtcttcaagcttctggtttttctcaccagggttgtagacatagatgggttgaaaatattctaggttctcaatacagttttcggtttttagtccacctagaaatgcacactcataatggctgcaggtctt

SEQ ID NO: 309350 - DNA, 1000 bp, Homo Sapiens
tggccaccatcctgctgcccaacagaagaagctcttctgtctccgatttcctgaacggtctaaggtaagtctttacaactcctatctacaacttcttcctccaaacttgtctacttaaggtgcacctaatgcatacaacagatgcttcacagggagacttgtgtgcatggggtgggagtgggccttgtttttctaactcttgccactgcagacagcatggtacacaatacttaagagagttagccacttttgccggacacggtggctcacgcctgtgatctcaaccctttgggagaccaaggtgggtggatcatgaggtcaggagttcgagaccagcctggccaacatggtgaaaccccatctctactaaaaatacaaaaattagccaggcatagtggtgcacgcctgtaatcccagctattcgggaggctgaggcaggagaattgcttgaacctgggaggtggaggttgcagcgagctgagatcgcgccactgcgctccagcctgggcgacagagtgagactctgtctcaaaagaaaaaaaaaaagccactttcttaccagcagtacagggccccaactgcctcccatgtagctgggattataggtgcctgccaccacactcagctaatttttgtgcttttagtggagacaggctttcaccatgttggccaggctggtctcgaactcctgacctcaggtgatctgcctgcctcggcctcccaaagtgctgggattacaggtgtgagccaccgtgcccagcctataaatggattttaaatacatatcctttgaacaacagagcccgacagtactgacacaatcagatgacttgcgtgctcagtagataacattactattgattaatcagttaattctctttattgcccacaaatccctgccttggtcaacacagtgtgacttgtcacatataaatgaagtgctaatgtgccttctgcaaatcccccttataacttttatatttttgagacagggtctctt

SEQ ID NO: 309351 - DNA, 1000 bp, Homo Sapiens
acactcaatgacagaaagtgatttgttaatttataatgctcgttaattggtaagataaaaataatgtattacataacctgcaactaaaatatctaccttacttagcaaacagtttcttttggataacttcccttattgttcttttaacatttttattcctcagacggtagatcaatgggtttaacgtaggactcacaaagatataaaaagcagctacaattttcccctgttctacagatgcctcagaagggggcctcaggcacatgtgaaacagcgttccttgaaagacagtgacggcagtcacaagggacccgcaggtggagaaggcattgtaccttccctcagcagtgcagatatgcagaatgtctgtgaagatgaaagtgtaggaaataaagatgatagtgagagggcagatgaggttggaaccagccaccatgaacatggcagtttctttgacataagtatccaagcaggcgaggactaagaggggtggttctgcataataaaagtggttgatctccaattttacatcagagtcagccctgggagatgcttcatactgagaaaataatcatgaccttatatgccataataagaatatggaaacttggatcaacaggttcctttctcccattgtatatactttctgggtggtattctctccgttaatatgtatttctcccttcctctccaaccgtccattcaaaaatttatagtggaattaaatgtgcatataatgcattttctccaaaaaaaaaaaagtggttgatctcattgggttcacagaagaacagacaaagcatcaggatgacctgtaccagaccatttgcagagccataaatatagggagcagcagtgagacagaggcagacacacctggacattttgcttccatataacaaaggcttgcagatggccatgtagtggtcatacaccatcactgtgagcatatgataatctgtgatcaccagtgcaatgaaaaggtgaaattggataaagc

SEQ ID NO: 309352 - DNA, 1000 bp, Homo Sapiens
ctaaaattgcatgcatgggtttataattccaatttgtggtaaattttctagactttgaaataagcctttataggagtagtacatgttaaatatgaattcccttggaacatacaaatttgagcacagctttctgaatctgctttgttttcacactgtagatgatgggggattcatcacagaggggatgagcaagtatacgttagcaatgggggtgggcacatagggtggggcatgttttccaaatctgtgaacaaaggacaggctgatcaaagggatgtagaatatgccaacagcagtgatatgagaaatgcaggtgctgaaggccttcttcctctcctctggggatgcaatgctgagacctgagcgaatgatcagcagataggagagcaagataaagatggagtccactccggcagtagagatgattgcacttaatcgtagtgcactgttgatctttgtgtctgaacatgagagtttcatcacatcagggtggaaacagtaggagtggcagagcacgtggctgcggcataatgacagtcacttaagaagtaggattagtggtgtcaaaatgacagtccccctggtaatgactgccaaaccaatctgtgctattcttgcatgagttagaatggtagcatatcttaaagggttagaaatggccacaaaatgatcaaaggccatagccaggagcactgaagattccatgaaagtgaagaggtgaatgaagaacatctgtgataaacaagtgttaaagctgatctcccgagcattgagccagaatattcccagcactgtcaccagtgtagaaatacgtaagccaatgtcagtggtggacaacatggagaggaaatagtacatggtctcatggagggttggctcagtgaggatgacaaaaaggatcagggtattcccagaaagggcagttaaatagaggcagcagatggggatggagatccagacatgggcccattcaagtccagggatccccgtcaagaggaaa

SEQ ID NO: 309353 - DNA, 1000 bp, Homo Sapiens
gatcatgaagtcaacatgcacgcaagtcgtctcaggaaactttttaatgaaagtgtcggccacggtggtgtgtaggtggctgagctcagattgcagctgctaagacaccagccacttaccaagagaaagccaggctgcttcaaacccagggcccaaggcaaaaaagcatcacttccggccggggagtctggaagccacgccttgtgggaggtcacactggcatctaggccttcgcctgcattgcagaaggagagccaggtccccctcctggagaacgctgcgttccccagccccacaccggctttgccaccacacaggctgttgaggcaggaggtgggtaagacgtagctgtagacccaaagcaaccaccagccctgggaccctgcgggagaggagcacttttagaacatggaaaagtgtggtcatcccatcattagacagcacacatcctacataaataaaaagtcgtatggggaaggaggttggggagggaataaaaaattggcacagacattgatagactggtttccagtttcaaggtaacagatgcacatcatgagaccagaggaggcagagacaaggctggatttggcttttctaagcaacacgtgttcctgcgcagggctgaatggtcgctgagacagagatggaagccaggacaagggagcccaccgggcccagataggtacagagagcagaggctcctgttctgtcctcgccacccacgacggtgacactgcttgtaaatggtggctgtgctctcccagcaagaaaaaagcacaactaaatccacactgcacacagacgcagacagaaagccttcaagtggctgttttctgctccctgccttgccaggtccacaagcagagaggagtgtcaggcgcatggccccactgtcaggctccctagtgagctgcgggttcagcaggagctgcccactgacacacaggggacacccactcctcccaccttgggagcgggtgccagacagagccgcact

SEQ ID NO: 309354 - DNA, 1000 bp, Homo Sapiens
aagactgaattctgggtaatcccagggatatgctgcatatcagcacatccaggctacaaaacacatgctctgagcagtttctgattctgaagttccccttcccttcttagttctgattgttaaagcagatgcagagttccgaaaagttgtaaattgagtaaaaaattaatttactgagaatgaaagtgtatcagcagttccactcacatattttaaaatgtctaagaaagaaaagaaaaataaaggaagaaggaaaggagggaagggagggaggaagagtgagagggatggagggagggaggggagaaggaaaaggggtaaaaaagaaagcctgggggctagggtgggaaacacacaagactcagtcttcaaatactatcagcaatttcataatatggtaatttttaatattaaaagtaaattgtaaatgtgtctttataaacaatatgcataaaatagatcatattctaaaaccttttctttttaaaatgctttttcacagtaaatttcttaggtgtcagattttccctcagaatagtgcaactggaagaagggaaatgttggcagtggctcaggactctctgctagtacaagtccttgtagatctcctgcaggagcgggtgaagactcatgtctgtctccgtcttcttgatcacctgcagtagctgcacgtgttccgtgacaatctgtctgaggtctgtcattttctggagcagcttggcaaacagctgtgaggactcagggtggttcagcttcagctggagctccagggcttgtagcaggttgtcttgaatgtcttcaatgggcttcacattcagcaaacctgggcggtctggggaagcacatatggaaaacacaacagggggttcagtcaaaaaatcctctgggccccgccttggaggcctaggcagctctaccaagcaactcatctgtatttttggtttgttttgctttgtatcttaaataggtggggaggaagggtaagcagataatgggtaag

SEQ ID NO: 309355 - DNA, 1000 bp, Homo Sapiens
tctagaagcactgctttacacaaagtaaataaccatgtaggtcctttttgttttccctttaaagaagcaaacactatcatagcatggttttaaatagaaatgtttccctttctgtaatttaaaactttgaagcctttcccccccatacatgaagagcaaatggctcctagttgtgtctgatggcaaaacacagagacacagctaactcttttcttcaggggacaaaaggaaaaaatatatgcatattgtagatataatatcagaactctgggagttcagagtccaaagcctatccgaggagagtgaaggggatataaataaagcaaaactgcctacttttttgtccaaagggggtacagtcggagatttgttttgggagagtcgggataggggcagctgtgtagctgacataacgtttgcaagtttccggtacctgtctgcgccttgggtccgggaggacgccccacccttccccctggaagagagaggaaaagtctgggtggtgtaagggacagcggcagggctgaccccggaggcgtctgcaggccggggctaggctcagaggacagggtgcagacccggctttcagaccacgcctcaggtccgggccgggctgggggttacatggccgtagcgtgggctgacgaataagggtctatgccagtcttggtcatgcctgggaagaggatgtaggcgacggggggctgcagggtggaggcagaccaggcggtacagttacagggcaccacgtagccagggttggtgggggacgggtgcgtgtgcgtgtgctggctggggcagctgaggctgccgaaggcgccgttctggtagcccagggtggacgcgtagggcagagcgccggtagccaaggtgtggggcacttcgcccatcttctggatggcgctcgagctaaactgcgcggggtccagcagggagtagggcgccgaggccggcggcaagaaggcccgggctttctcgggcgcgctcaggaggccgtcgg

SEQ ID NO: 309356 - DNA, 1000 bp, Homo Sapiens
ctccactgatcttttatatgagtgaagtgatcatgtattaaaataacaaacaatgctaagaaagtccagtttctggactactgtgagaactaatttagcagtccttgcacaataaattcagcactgtggcaaatttataaacaataaatgtttgacatctcctgtgcctttttttttttttttttttgcaattttattaagagtacccagaaaacctttcaaggtttcagtagatctgttcaatcttgccagaagcaagttaacacagtagaagaaattagagccttatcagtcaagacataattgctagagcctcagggacaccgatgcggacacaagtcaacaaacagcatacaataatgtgccaagatcttcaccagatctgtaagatgcactcataaaacttcttttgaagaacttaaaaatatttttagtaaaaaaccagcactaccaatttataaagtgattctatccaaattggctttttatttattaataataaagtctactgacacatactgcttgcaaatagtatagacacaaaaattataaaaataaaccagtagatatttagggcagatgcaaaaatttgcacattaggtcattataaactagatatattaagcaaaaaaagcaaggtgcaaaccagcaagtatgatatattaccaattgtgtttttaaaaggagaaagacagatacttttacatatgcatagacgatatctggaagaatacttaagaaaatgctatcagtggttgcctaaagaactgggtggatcagggagtgggcaggaaactcactttcactgaatatcctttggtactattaaaaaaatttttttaaatcacatttatgtacaaatttgtttaaacattttgactagaggttatatttaagactaagcccttggccaggcatagtggctcacccctgatcccagtactttgggaggccgaggcaggatcacttgaggtcaggaattcgagaccagcctggccaa

SEQ ID NO: 309357 - DNA, 1000 bp, Homo Sapiens; identical to SEQ ID NO: 120069

SEQ ID NO: 309358 - DNA, 1000 bp, Homo Sapiens
ttgacacagagtctcgctttgtcggcgaggctggagtgcggtggcgcgatctctgctcactgcaagacccgcctcccggattcacgccattcccctgcctcagcctcccgagtagctgggactacaggcaccccagacaaattttttaaaaatcatttttcctatgtagcaaatatctttaggcctagcatctgttttcttatcagaagttaatatatttaagatgaaaattcatttgtatgttatgcttgaaaaggatattaataccctttcatatggcaaacttactttttaagtaaattccattagtaacaggcgcactattaagacagcccgatttactactttttgagttctcaacatgttggacacaggtaaaacagtcacagttgttgttttaaaactaatttagcaaccacatttctaaaccttttcaaacatgagcgtaagaaataagtatcatgctctcaaaaaataaaaaatttccaaaagtgcatggtatcaaaagtacaaattaaaaattttgtatatttaaaattgaggattaactttaaagctcatcatttatacagagacatagaaaacaacaaaatgtgtgaatgttttgtagcttttctgtttttttttttttttttttttgagacagagtctcactcactctgtcgcccaggatgcagtgctgtggtacgatctcagctcactgtagcctctgcctcctgggttgaagtgattctcctgcctcaccctcccgagtagctgggattacaggtgcctggtacacaaacagtttttcttaggcttaatcatttgccaacatcaccatacccattcaacaaaaattatgtaacttctcgtttctttatgcctatctgaagaactcagactgctgggtactgtgagttggatgagtccccccgcccctcaagaccaaaattacagcaaagtctctgtcaaggtttcatattaaaatgttgaaagtggatacaaaatcaagagacta

SEQ ID NO: 309359 - DNA, 1000 bp, Homo Sapiens
ctgtgaaagttcagaagaggaagatattagatataacggcatcattctctcgttttttaagtgttcctattatgtgccagaatgctggtccagtgagggctttatgaaggccatccagactacaggaacagaattgctaagcacatggggcgggaggcggagggaatcctccagggagaccaaagtaagtacttcagtttccttgaaggcttgtgtgatgggaaggagtgctatggtaggcgtcactacatattctgttcgttttaaattaaaaaaccatgggcacatattgccaaaaataaaaaagggaaggaaaaaggtatagttgggagatagatgaatacaagagaaattaaggacattaatggtttaagccttgaaaggctagaggtggaactataactggacaaggtggactagggttgtaaagtcctctaacccagcggacggggtgggggtgtgtgtgggttggggatgaaactgttccacttcagatcatcaggcattagattctcacagggagccggcaaacctcacatgtgcagttcacaatagggttcgcgtgcctatgagaatctgatgccactcgctaatctgacagcaggcagagctcaaggcgataatgctcactcgcccgccgctcacctcctgctatccggcttggttcctaacaggccactgtctggttccggtccgcggcccagggcttggggacccctgccctcttgggtagggaagtatgggaaagcagtgctttagggccaatgaatctataaaacggctgaaagtggagacagactgttggcaaggaagtcaagtggttaggaaactgcaggcccagggttacttagtagtggaagtaagaagaggtaaatagaatcaatccgtcttcattaaagcaagacttcccagaccactctacccacacccttcaataaatacacttacctgtatcattcatttgatttttattatctaggaatgtctgggaccttatctg

SEQ ID NO: 309360 - DNA, 1000 bp, Homo Sapiens
cctcaagtatggaatctccctgctagtttccaccgggttgggaaaagacctagagtctacaaagagtgatggttcaaggtcaccatcacatcccagcctcaattcagcccaggcacaggtcagtagagctggtgggatgtcgtgggggtttcacagtcagaaaccagtgggcacaccccagctccacactcatgagctgcatgacctcaggacagagcttgaccatctctgaatctccacgtttccaatgtaaaacaggaacaccacccccatggcagagtcagcgtgaagaccagagacacctggtgccatgcatggcgcatgatagggcagcaggaggagcctgcactgatcttgagcattcctcaattcagtcccctccagacaacttcagtaatgacaaaatccaatcctgaggggacttctgcctcacacatgccatctccctggcttgcagaactggctgctggcatccagggctggagggactcaggagcatgggggcaggtgaggtgcagggaaatgaggcactctgtcatagcggggtccccagagttctgggatgcactggaaagccatggtcagcctccgatgaggtcaccaccttgactcgtgcaccctgtagcaagccccacctccggaggaattcttggcccaggtgtctggaggaaccatccaagtccctttacctcacggcaggccctggcccggggaggggaggcccacgcacctgggagccgctgacctccacgctgtgcatgctcgtggtggtgtcgatcaggttgtgcgcctcgtcgatgatcaccacctggtcctgcagccggatgcccgcagcctgccgagtggccgcatgcagcagcatctgatagggcagcaccaccagctgggaggggagatgaggccacctgagcagggcggggctcccctgcaggaggcttgcctgcctgacactgagctcctgatgtgagtgcttctacttcctgcctggactgtgtagaga

SEQ ID NO: 309361 - DNA, 848 bp, Homo Sapiens
ttttttcacttttattttttaatttaatttaatttaatttaatttaatttaattttttgagacggagtctcgctctgtcgcccaggccggactgcggacttgcagtggcgcaatctcggctcactgcaagctccgcttcccgggttcacgccattctcctgcctcagcctcccgagtagctgggactacaggcgcccgccaccgcgcccggctaattttttgtatttttagtagagacggggtttcaccttgttagccaggatggtctcgatctcctgacctcatgatccacccgcctcggcctcccaaagtgctgggattacaggcgtgagccaccgcgcccagcctttttttcactttttaaaaaatttatttttttccccataagtaagaaacaatgtgatacttacttttcaaagagaactatgtcaggaagccacagagattctgatggaactttaatggaatggatcccaccataatcatcaggattccagcgtaacttgtggtctgtccattcctgcatgaaattagtacactgtgattttattccgaaagttcaatgtattagatcttgaaatcttcaagtttctgttagctttaccaagccactgttttattaagaaaaggaaattgtcccggttggactgcgtgaccctactggggactcagtacaggattcaccttgagccagcctggcctctgatctcacccaggcccacacactttgcatgttacatatttccaaaattactgtatctgcctcaccatgaagaggctctacaacaaacgccactaattcatgatctatcttttcatcctattttctcttaacaaacaaacaaaag

SEQ ID NO: 309362 - DNA, 1000 bp, Homo Sapiens
cagagtccttcctcagatcccaaggtccagggatagtcttccgtcttatctctacctttcagagtcttgtgtttgtttatgtgaccaaggagtttagctgtacttactgagaggaaaaaatgtatctatctaatctttttggaagcagacatactaactcctggattttcactttttttttttttttttgagacaaagtttcgctctttttgcccaggctggagtgcaatggcacaatctctgctcactgcaacctctgcctcctaggttcaagcgattctcctgcctcagcctcccgagtagctgggattacaggcatgtcccaccacgcctggcttttgtatttttagtagagacggggtttctccatattggtcaggctggtctcgaactcccgacctcaggtgatctgcctgcctcagcctcccaaagtgttggaattacaggcgtgagccaccgcgcccggcctggattttcactttttaatcaattacactgtttcagccataaactttttttttttccattttttttctttcttttcacaacttgtcctgtaactgaacagccataaacttttaaaatgactgctttggttggcattttcttcgtcaaaattcttcagtggctcagttgcctgtaacataagctcacagcccttagcccaacatcctttccctccccaatctgcccgtccttgcctttcgggtgttatttcccactgtcatttaccagggtttccaaaattgtgctttattaaatgctagttcattggaatgttaatacatgtttcacacacacaatcagcaggagaaaatgtttctatagccaaatgacattgataaacagtgttcttacacaaagttaagcctgtttctttattataagacttttcagatactttcccagtgcatagtgtgaatctccacaaagcaagtgaaacatgaatagctccctaaacttacttgaccacagaatgcttcattctatctccatggaa

SEQ ID NO: 309363 - DNA, 1000 bp, Homo Sapiens
cagtgcccatcctaaatttggaagaggaaggatgtgggccaacttttggcttaggccctcatgtcagggcttctcttagtacatatggtacctttctgagattttcaaactggcagccactttggactgatcaagtcgcaaagctgaattaattgcttactattgtaagggagagctatgccagtcaggcccaggctcccttaggagagcagactgctgatcttctgtggggttttggggaagctggaagtttaaggacaggaagactttgaaaagtattaataggatgatgtcatctggggtggggattgatttgggctgtaatagaagccctacttggagaagtgaacaaagggtttaatctgcttcaggcagaaaaacacctaggaataggacatccagggcaggcatttcagctcactgatgccttcgaggaaccagggcccttctgttttcttgctctaccattagtggcccatgcatttgcaccctcatggttgtgttacttgggggtccttgctcacagagctcccaagatggtggcaagcctcgtgttctctgacctggggttcttggccttatggattcaaggaatggaaccttgggccatgcggtgagtgttatagctctattagaagctgtgggtcacagaagagaaccatggaacccagtgactagtgttcagctcaattaggatgaacccaggcacttagccatgcaggaacaatggcaagcctttagcccgattgggagcggcaatgggtgcctcgctggatcaggagcacagcggacaccctgcatgatccagagggatgggagtcagcggcgggtctgcggtggcggcaaacagcagtggtggatggcgagcgaaagctcagctcaagccgtaagaaacatggaccagaagagtgcagttgcaagatttaatagagtgaaatagcatgaaaacagagctcccatacaaagggaggggacccaaagggggttgccgttgccggct

SEQ ID NO: 309364 - DNA, 1000 bp, Homo Sapiens
agataaatgttaatattatctacatttcacacttgtgaacactgaggtctaataaagcaagatgactttcccaatgttatgctgataataatatgatgaagtcacttttctcactcttcttccgcctttgctgtgctgcttcccctctttacaactccccccacaagatgttgaaatgataacctcctttttaaaggcattttttcatgacactccccaagcagacctactagcctcagcaagtcacttcacctctctgtgcctctctttccttaactgtgaaactgggggcaacagtccctacttcataagggtgttaaaacccttgttgaaagtacgcagtgagatcatgtattaagagtgttcagcccagagctcatattaaggactcagcaattgcgcattcttactgcttttggaaactgtagcttgccccaccgcccaatggtaccaggcaattccttttacccccaaatcaaattaaaatcacaaagaaactgtttgcattttattttaaagttttattatgaaaacacatggaattaacggtgttatccatgtatttgcaacagcagagaaagagtgagagtggaccatccccataggggacacttatcctttggctaaactaatataaataatggaaataacacctaatacaataatacagcacataaaagagattacattaagagaagagacaggaactgcggagaggagtcctgagtatggaggagatgcggctcatggagaagcatccaggctcaggtgaccttccctgaagacttcctgtctctgagcagctcagttcagttccaggtcatacacgtactcctggacccaggactcactggggtcagcgcagacttgcttgcctcttttggtttggaatctgtagaacaaggagcagacagattagaatcccatgggacctttgaggtcatctggctttatcccttgcctgtggtaggcatcttcctctgcctgaccatggtccatg

SEQ ID NO: 309365 - DNA, 1000 bp, Homo Sapiens
agcacctgtcgatgggatgtagcagggggtaaacctggtagaagaaagtgatcctgggattcacataggggagcctctcattatcccaggaggaatttatagcagagagccttatgcaaaagcctcctgttagtgaataactatgaacagcttaatatggaggcagtctctcttggccaatgtgggagctcttaaaaaggcatttctcaagggacaaaattaagtcatcttaatatgagtggtcttatcaggtctaatcaagagactcagtctttcagctgtgccatagcttcttataatggccctgcagggggctgcactggtcagtgtagtggggaagggggtccccagggatgggagcagctcaatctgttgatgtctagacagcacagaaataaaccaaatgagagccgacatggagccaaattgcaagtcaggtaaaatttatttctgctatcctctctttcctttcccctaaactaattctcagccatgcagggcctttgtgctgctccctagctgcctgtaattccactgcaagaggagccctctccaccctcagtaccccatgctcctaccttcttttgcattccacatccccctattctcctcgtcatcagagtggctggtcttggtcaggtgttgtggaagaaagcaatctgattaagctaattcacacaaatttgtcaattttcacaaaggtattctcattttggaagcaagtgtcttgttctccaattggcatacttttaagaagtatgacaaatggaaggattttaagcaatagaaaggcacagagaatggtagtgctcacctgttctatttagcattatgtggtgatatatttcaataacgtcatcatttattgattaagtttttaaacctgaggactaaggtcaccccatcctttaaaaagtaccagaggactcaggttccacactaccagactgggttcttggaatgtactaggctttttcacacctccacaggtttgttcaag

SEQ ID NO: 309366 - DNA, 1000 bp, Homo Sapiens
ttttttttttttttttttttttttttttttttgtatgagtctatcgaactcagcacttgtatttcattgtttgtatctggtgcattattttatacaagtaatatgtgcatgtggtctaaagagacaagaagccctaaaaggctcacacgaaatacctctgctctctgaacagccttttccttctgccaggtccctttcccagcagcagtggtgtttgtctggtttggtgtttcttattgctaagccattgggtgtagctgctttggcttcttccatgtgagagatcatccgctgatacatttcatgcctgggcaaacatcatcctttctcatggctggctctgccttaccctccactttcccagggccaggataggtttcttgacctttcccctctggctgcccaggctctccagaaagacattttgccttctcctgggtggagggtacagatctggcttgcagtgccctggagatcttcagtagtctcttaatctcttccaggggactgggaaacccctgtccaaaaaccttgtctccatgttccagagaggacgcctctgcagtggtgtgggagcagcagcaagccagccccacactcaatcgtgccctcacaggctccagtggcatctgctgctcagctttcagctccggctgcccaagtctcctctcgctcaggtccctcatccagctctggcttccagaggtcagctgctgcagtctcctatcctcctattcttccgggtctaggctttcatgaaacatcccgctgcaatctgagaggacctcataacggggctccaagctaaggcgtcaaggaagcagtcccactgcttctcgctgtcagcaagaccacaaggcagatgcccactgctgtcctctttccttgtctactttctcatctaagtgtcgtaagacagccctgcactggtccctgagtaacagagcagctgtcatgagcacaggctcattttatccgagagcattcttatctttgagag

SEQ ID NO: 309367 - DNA, 1000 bp, Homo Sapiens
aaagtctggaattaataaaggattaaatgaaacttttgtatatctcactgaaattctcagaaaaaaggggggtgtggggagggggaattgcctggggtagtgagtgaaaattgtgaccaggttcttactaaggaatatggcaactgcataatcaaatgtcagtggttaccaaacttatgaatcacctggtgttgtgtcatagattgtctatccttgcctctcgcccccagtgatttagatcagtggaactatgtggggtttaagaaatatacaatatatatttgtatatatttgtgtgtctcgaaagcttcagggttaaataagttttaactgtttaggaaacactattgttttaggtatccagtctcaaagacgaaggcctttaaaacttacttaatttttcattacatttcttgcccagaaaattgtaaaatacccaacgataacaatggggaattgtctatcagcacttgactaaaaagctttactatccatgacagcagcctttgcattactcaattctgatggcatttaacgtcttgaaacccagaaataaatacctatagactcacagtacctgaaaggaataccaaattgagacaagagagctatataaaccaaaaattgcttcaaccacagaatggaggtctacaggtgcggaaggaaagtttatatggtgaggcttggtcgcaaaactattaggaatattttcaggttactacacaattttgcgagctcaatatgcagttaacactttttccctcgactctcctgagcagatttacattgaccgcacccgtagcatatcgtctcactttggaaaaggcaaattatgtgcacatgaccctgtcactacaaggtagttctcgaccaagctacatcttatagctttatcttatattcctctcccatcatctgcaggaaaagggataggtgctgagggaaaacccctaagtagaactcacagtaagcagtgggaaaacagcttatttcactaacg

SEQ ID NO: 309368 - DNA, 1000 bp, Homo Sapiens; identical to SEQ ID NO: 120070

SEQ ID NO: 309369 - DNA, 1000 bp, Homo Sapiens
caggtgacattttcatttattctgtttacagatgccacttagttacactgttttttttttttcagtctcatctgggttggatccaaagacattcagaggcatggtaagaggcaaagcatcagacatctcattggtggcaggtacttcctgactactgtaccacctgctgtatccttccccacctcatcacccccaaagccatttagtgccaaatgctacagtaaaaacccaatgcatttacataaaataatgcctaactgcatatttacattttttagaaaaaaatcccattaagctcttctagaaagttatggcaggaaaggtaaggaccaaggctatgagcaagccatatgtggaaacttaaagtagatgagcactgagtttctccatagttggaaaaaagccacactgagcccactcttcctgtgaggcaagatgagaccttccttttataccctgttgagaatctcaggtggacaacgtgactgcatgagtgttgaaaggcagcttgccggcttagttatcaccttgcagaggtagctatgcactacacagccacactgcccaaagcgcgctactaagaacactggtcctacaaagggctccttgtaagagaactttaggaatcacaagtatttagaaaatactatacactatcatttccttcctagagatccgcaatgcacattatcacatggaagtttccagaagttctttcataaagaaatgcttaactttatttaacctagagtttccatatcaacctgaccttggaatctcttacttttttaggtgacacatatcatagaacatattctgagaaatgctcctctatggctttgagaaaatctttgcagaaacaaaataataataattttttacttaaaaaaattaagtaactagtaggatcaagtgttggtcaacaacaaagagatcaaagagtcaggaagtccacgtcatagacccccactttctaattccagcctagcactgacgccat

SEQ ID NO: 309370 - DNA, 1000 bp, Homo Sapiens
gatctcaccaaagacgacatcctagagatggagaggagaaaaaaaaaacttaagtcccataaagaaggcagaaacatgtttttggttgatcaagatgagtttgggccaaatataaggaggctgcttcactggagggaatcacaaagccatctggggcaggaatgttgatggtgaagtgacttccctgctaaagctcgcttgctgggatccggatgcctctgcagagacaaaggtggttcagagttcatggggaaaagaggcagggtttgtggctgagaagcggtgccaatggggagagtggcagtgtccagagaaagccatcaatagtcagtggatccttgtgatccaatattcagtggacagagggttagaggggctgtgttttttcctccatcattgaaaccaggactgaagaagggccgcagaggtcctgtaaaggcacattcagagaaggagtagatgagggagccatggtcagtgatgttgtagaaggagaccatgccagcctcatagtccaggaaaatcccaacttggcatggaggcacctgaaggtggaggggagtctgggggtaggtgccagcctcatatttttgtttgttccacaaccaaattgtccagaagccactcttggaactaagcaaaaagtgccccttcctgcgcacagagtctctgcagacacccaggtcccaggcctcctttcctgtcacatctacctcccagtaatgttttccagagtgaaagtgctgggcacccaggaccataggataactatcaaatctctcttcatttccaggtatgctctgctgggtgtctccaagcctcacttgtctccgatcttctgaaagtatcagccacggattggctgtgtctggatccagagtgatgtggactgcagagagaggaccacagtcaggccttgcatggggggagttcactaagtctgtgcctgtggtggggggattttgtgtaaactccagggtaagcatgaggggtgaacctc

SEQ ID NO: 309371 - DNA, 1000 bp, Homo Sapiens
tttttaatttttttttttttaagcagtaatatctcattttgctttatttttttttttttgatcacaccaaggctcagtgccatttaatatgctattttgccattttagtttcctcttccacgaatttccatcattgttcattttcctctttggttgtctatttttaaatgaaaaagcaccaggattttagaaatatctttttttttggtcaatcatatatgacccaaatcaatatgaccaaaaaaatgaaaacattttttccttatctatatttttagattatttgtttataccagaatttgaaatttttctccatgctcagaatttcattttaaatatgttcgtgatattattgaagtcacccccccccactttatttgttttcatatatcatgagaagtcaaagaatcaaagcaatatattctcacagccatgcacattttctccctgtcttcagtcctgtgtctgtcactctcataatcctgtttcagcacctatgaaggcacttctgtggaatacttgattacagacccagccaatactttctacactggaatacatatatatatatatatatatatacaatcaacttaactatatgaaccacttgccccatagtgtatatatatatatatatatatatatatatatatacaatcacttaactatatgaaccacttgccccatagtaaattttcttttttcatagtgcatgatgcagaaggctcccacatgccactcccatcccatggaggacttgccactctatgacaacactggcagagcccacctaatggctcccactctacctgctccccgaacctgggaggaaggcgggtgggagctggatgtcagcttctgtgtcactagcaggatttgatgaccctgctgtgagatgggcatgtagaactccattttctttttctggatctcacacaatcagcatcagtgtaaaagccgcagagcacccagcaacaggtagtgtcccatgatgatgtta

SEQ ID NO: 309372 - DNA, 1000 bp, Homo Sapiens
aaagggagaaacagcaaccaaatgacacaaaactgtgtggggcttgctgtggggtcagacactgtccactgccctcccagagcaacctcggctcacacagcctctctcttatcactaagtacatgtgtcagggcgaaagactggcctcagtaactgtgtaacaaaacataataactctccatgagtcggtgcaatgtgtttgaacttccactgacacatgtgaatttcctacttgcatttgcagaaacctgagtcaaggcgtgaggatttaggctagtattattttttaaacagagcaacaatcaaaatcagattagagaagctgtcaattgttcttccctctgaccacctctatcttttctttttttaaacaattctgacaagagctcttgggcagagaggacatgcccattgtttctcaaacacaggagcagggggctcgcactggtaagaagccgctgtgctagaaggttctgtttacttgtctgttcttcacctccagccccactagcccctgagtgcctgctggatggagagtgagtcttattcctgttatttctcccagcatacagcaggtgcccaatacatgcttccaagtgaatgtggacagcatgatttgaatgcagcaataggccaaggtgcccttgaaaagagggtcctgctgccagccctgagctctgagagccaagccagccatcaccgacctgtgggaacaggaggggagatggcataggggatccgaaacagcagccggttcgaagccctgcccctcctgtctttgggcatgtattacatgatgccatttttcttctgcagattggcatgctcattcctgtcgagcatggctcatgccctgactcactgaatcaagacaaactccttggaccctgattccctattcagcaaaatggacacaagccatgtggcctgtctcacctgtgcttgtgacaactcaatgcatgatggatgtgaaggccctttgggaacagacgcaccaact

SEQ ID NO: 309373 - DNA, 1000 bp, Homo Sapiens
ctgcagcctcaacctcccaggcttaggtgatcctcccaactcactcagccctccaggtagcggggactacaggtacacatcaccatgcctggctaatttttgtattgtttgtagagatggggtttcgccatgttggccaagttggtcttgaactcctgggctcaagtgatccacctgcctcggcctcccaaagtgctgggatcacaggcgtgagccaccatgcccaggcagcagaatcatttcctaatggccacaaagcacgggcgtccctcagtgtctctcaccaggccctccctgtgagtggaacacgtcctaaccctgttagaagtagcgtggcagggagggagtgcgccaggagcctcgcctgcactcagctccctcacagaagtccttcttctaaacacagtcacacttgagtcctggtttgcaccttggttttcacttcctgctttatcttgggcagtctgtagagcccagtggttctcacccagggcagggagggtactttgcaccccaggggaccctgggcaatctctggaggtcattttggttgtcactagcactagtgggtagaggccaagaatgcttgctaaacatcctacaatgcacaggacggccccacaataaagaataattcagcccaaaataacacagccaaggctgagaatgggatccatctactggttctttaagctcaacagcacccgggcgatgaggcttcacttactcaagccaaccctcccaccaggaaaagccctcctagacacctggccatctagttccccgcagaagactcctttcttttctttttctttttttttttttttgagatggagtcttactcggttgcccaggctggagcgcagtggcacaatctcagctcactgaaaacctccgcctcccaggttcaagcgattatcctgcctcagcctcccaagtagctgggattacaggcacctgccaccaagcccagctaatttttgtatttttagtagagacg

SEQ ID NO: 309374 - DNA, 1000 bp, Homo Sapiens
gatctagttcctttgcttctctaaaatggggaaaggtaggcatctcctggcgtgggtgggagtattggggttggcattgaatctgggtgtaaagtctacccatctagggactcaggccaagttaaactttccaccatgcttctgaaagtgaccagttcagctttgtgagtgggctatgcagttggctggtatcttcaatggggcaccaaagctaggagaaacacagagttatgacgaatatctacacactggtcactatgaactctgtttcctttctttgtttttacctgactcttgggtgtctagccatgctgttacctccagtgaggtaagaccacagtggtcttcctagaaaggattcaagtgccagggaagctgaatgacctcctctagttcttttttcctcatgtagacaccatgggcacagggggatttttgtcttctgatattgtgcccacttgggagaggggaatatatatcatttgcttaatattttctcccatttgatgagttgtcttttttatattcttggtagagtcatcctttgacacaccatttaaaaaaattttgatgaagtctaatctatttttttttctttgcttgcttgtgctttaatttaggtgtcatatctaagaaaccattgccaaatcaaaggtaaaaagtttgcaactatgtttcctcctaagaatttcatagttttacttcttacatgtaaatttgagttcatttttatatggcatgctgtaggggtctaaactcattcttttcattttgatatctagttgtccaaacaccatttgttaaaaagactattctttgacaattctttaaattgtcttggcatccttgttaaaaatcaattgaccataaatgtatgggtttatttctggactctcaattctattcatttgatctatatgtcaaaccatgctgtcttgattaatctagctttgtgttaagctttgaaaatgggaattgtgagtgctccaactttgttttt

SEQ ID NO: 309375 - DNA, 1000 bp, Homo Sapiens
gatcagaaacagttctgggatgagcaaaggtgtacattcacaggatttcccaagaactatgttagcgttccctccctctgtcataatatggttaaagtgacctgagccatgaggacatcttgaaagacttttggaaggctattaggtttagatgaggtcatgaaagtagagtccccatgagggggattggtgtccttataaagaaataaagagattagagactgctcactctctctccaccatgggaagaaatagcaaaaaggcatccacctgcaaaccaggaaaagggacctcactaaaaaccatattagtcagcacctggatcttggacttccaagcctccataactatgagtaataaatttctgttgctttagtcaccccgtctgtggtacttttgttatagcagcctgaactcactaagacagaggctttgacaagacacatgcattgcagagggtgagaaaagaactccttcaaagattcaaaggagtcggctacatcactaacattcttaggagttcagtggtcaaaggcatgacagtacatcccttccatagtaaaagataaattatgagctcccatcataaaggatggagcatgacatctggttctagactctggattctagaggcagcattttccacatgtggaaatactgttgtcacctatacgccaggtaatatgaaaagctgctggttttgtatgaggcccagaagagaaaagagctctgtagcaggtccagcctgtgatgcagatggacctatgatctggcagaccccaaagcataaaaattgtcagtgaaggaaatgatgtcatgtggagttttaaaacaaatcccaaaggaagactcacaatgtagacccctagggttttggatcaaggccataccttccacagcagagaatgtgcctttggaaaaatacctcccagtgtagccaccaagacctgataaagaaggagtgcctgaccatggggccccaagagagaggacccatcat

SEQ ID NO: 309376 - DNA, 1000 bp, Homo Sapiens; identical to SEQ ID NO: 120071
  misc_feature (918)..(918): n is a, c, g, or t

SEQ ID NO: 309377 - DNA, 1000 bp, Homo Sapiens
gaattcaaatcactaaagtcatccttttctttctccaatttgtccagtgcaattaaaagcaaccagccaatcttattagtgtgacaaaaagtttgaaggtatcatatatctctgtcaaaacaataactgaacatgcactaaaggaacaaagactttggcaatcatacgtgacaaagaatagtctgaaaaattagtttgggctggacgtggtggttcacacttgtaatgccagcactttggggggctgaggtgggtggatcagttgaggccaggagttcaacaccagcctggccaacatggcaaaaccacatttctactaacaccacaaaatatagccaggcatggtggcacacacctgtaatctcagctactcagggggctaaggcatgagaattgcctgaatccagaggcagagcatgcggtgagccaagatcacaccactgcattctggcctggggtgacacagcgagacactgtcttaaaaaaaaaaaaagtttggaaatgtctcaaatggagtactacagtcttcaacatagcaatgaaacaaaaaacagtaagctctggagtaggagaatctgattactggagttacctcttataacagtcaaatgcccatttttcaacaacaaaaattacaaggcatactaaaaaaaaaaaaaaaggaaagaaagaaaacttggcccattcaaagtatcaagaaaaaatgatagacccatccctgagaaagccaagacattggatttactcaacaaagactttaaaacaactgtattaaatatactcaaagagctaaaggaaaagatgaacaattaagtaaaggaaatcagaaaaacaatgattaacaaaatcagaatatcaacagagacaaaaattacaaagaagaataaaaattctggagttgaaaagaataactgaaatgaaaaattcactagaggagcacaacaatagatttgagcaggaagaagagagaatcagaaaactggaagataggacactgaaa

SEQ ID NO: 309378 - DNA, 1000 bp, Homo Sapiens
aagcttagcgtaattattcacacagctatgaattttagaagatgtttaaaagcaaaccacagtgacctgggaaaggagggaaacttactggagcgcttagccaggagcttaaaaagacattgctagtgagttttatgtcacatgaaatctacatttgataggtcattttggtaagtttttgttgttttaaatgactcctcttgacacagtaaccagtggtgctgggaacattcattcacattcattcatttaagctcatgactcaaataataacttagtcgtttcctctctgaaggtaggggaggtaatgaggagcaccgattaggctccaagatccgttctgagattcagataaggtgtcctaacaaaaggtttatggtgaaatgaaagagtgagaaaataattgtgctttttctagggtcatgcgtcaaatgaggctcaccaacttttaaaagactttacatagctttagataatcacattccctgccatgtaagcattgtgatgtaatggcatcatcatgctacttaacaattaatttatgcattttgtttaaacttcctttagaatatatatagtccatataaagaaaattccagggtcgttttggattttgtataaatagctcccatgtttacatgtgaaaaaaattatttatgaaagaaaaacagagctttcaatatcctattttggttacgtctccataaaaactctaggaaacagtgggatcatctgtgaaacagtggaatcaccccaagaacaaactgtcagacagaccgtcctgtcgtggcatgacttgaacataaccgtcccacgtggggacgcattccgcaccggttgctggaactgacgggggctgcagtgctgaatacctctgggacgcttgggaactgtgcccctgtttacagacggcaagcccttagtggtagggccctgagattctgagaaacataaggtctgctttatttaatttcctctcgtttaccaagagtcacaacct

SEQ ID NO: 309379 - DNA, 1000 bp, Homo Sapiens
ctcaattcccaaaatgcaataatagtctttccccatttcgaatgccttgaaattaacttagatttccctttgtaaaagaaaacagcgtccccagtcttagcaacagattctaagaaaaataaaccaagctgggtattttaaaagttaatcagcaattcagctagctgtcttaaggcagcaagcagacagcgtctctgtattcaatccttccccaacggctcacttacagataaatatacactacacaggagacagcctccttctagatcctcccattttcactacgtgtctctgtactttctagaacagcaaatgctacaggacgtcactttcccagctgcctctagtcaaagtactgagctatgttttctcctcctccacgattaactattcattttccgactagctctaccgtctttatttcctaattaaacaggacaaatgggttaacatgccaatatttcaacacagaatgtcacaactatatatttatgtactccatactaggtgaaaatcatcacagtcattaaacaccctatgttaaaagaagttaaagttaatatacagataaaaggaacgacaattctactttagggattttttaattttaagctatttgtctgttaagtatataataccaaaacgcaggttgtttaaattaggatttccaagtaatttacgtcgtcttcaaaattcctggggtctatcaatcagaaacgccagaaagtttgtgtactagtttcacattgttaagggagtatctataataaaattcaaatgcgttattttaaaataagtaaaggacttaaacatgattttagctaactagttatttctagtatacatgagttcatagttctggcaaacaaatacttatttttgaaattttagtatctgaacttagttacttcaactaaactaaaactgaatgaggtccctgccacccctcaacccccgtcccctgcagccgccccacaggatccctatttaaagaactgtg

SEQ ID NO: 309380 - DNA, 1000 bp, Homo Sapiens
cacacactggggcctgtagggagtgggggactaggggagggatagcattaggagaaatacctaatgtaggtgacgagttgatgggtgcagcaaaccaccatggcgcgtatatacctatgtaacaaaactgcacgttctacacatgtaccccgtaagttaaagtataataaaaaaaaaaaaaaaagaaaaaatagggaaaaaaagaggcaagtttagtaggaaaggtttagtgtgtggggagcagggggtggtggggaggaaaggtgaggcaaaacaaaggtgagtggcaaagtgaattatggaaggtttctggagctggcaccccgtgggcatttccccgaggccactgccggccacatccgcccagctaggtctcaccagctctccgctcaccagtctcaggatcttcaacattccagtgggcgagaaggagaaacgtttgaggctgtccctgaatttgtacgggactttggctcggccctccacgcgctctttgatcgccatctcatttaagagtttggattcagtgtgtgcagagggcgtggggggtgggagtgtgggctttgggggtgggcgtgtggtggctttccttgagggtgcggtgccctcactgccttggggacgtgcggcggctgcggactgcgcactgcgaattgagactgcggggtgcttccggggtgcggtcttcgctgagatgttgcgctgtgccttgggtacagaactcactacgctgccgctacttgccagggctgcggcagtctccggttgtttcaagttccctgaaggtgcctcggatgactcaggtttggcgtgttcaggatccatggtgggtccctagggcctggccgtctgaaccagtgccgcggcagcggctggctctcccctgggaaccagcgtcgcgtcccaacggctgttggctacctccccggcgcgtgcacccggctctcgctgccccaccgacaagccgagcccttcagccaccctcattgccacagggggt

SEQ ID NO: 309381 - DNA, 1000 bp, Homo Sapiens
ttagtgacaacttgcagggcaaaaggagaaaaagtactactacattaaatgtacaccaatgttaacaggtatcctaattacaatatgaaaatgtgagaaaaatacacctcagaatgaaggaaatattacaattgttcttttaaaccacaatccttttcttcccctttagaatacactccccttgtggcataaagtccagcttgaagaacatcgctttaactataaaatctatttctggccgggcgcggtggctcacgcctgtaatcccagcactttgggaggccgaggcgggcggatcacgaggtcaggagatcgagaccattctggctaacacggtgaaaccccgtctctactaaaaatacaaaaaattagccgggcgtggtagcgggcgcctgtagtcccagctactcgggaggctgaggcaggagaatggcgtgaacccgggaggcggagcttgcagtgagccgagatcgcgccactgcactccagcctgggcgacagagcgagactccgtctcaaaaaaaaaaaaaaaaaaaaatctatttctaggatgttcagtaaaacacttataaatagcaataatatattaacatcgtattaaatactataaattctgacacaaactaagcctgtaaggactattttcaataaccctttccagcctctaaatcatactccctggagaatatcactcaccttctaagccacgactataagcaagtttgttacgtcaaatagaaaacaatatttaaatggaaaacctaagctgcatccacttgctacccaagttcttctgacatgcagaaatcaatctgaaaatatttaagaaaacattagcttcaatcaatccccatcatccttgttcttctgatacacggataattcgttgacacaactgtatgacctgctttatttcacttactcatttataaaataatatacccatccaatgactacttctagagccatatcatgtcaagcattgctttaggacaaagat

SEQ ID NO: 309382 - DNA, 1000 bp, Homo Sapiens
tagagtgccagggactactttgcatattttgactcatatatttaaggctctaaatatccttaggagataaaaactgccattattccaattttataaaggaagacactgagacagagaatgaggatgagggaatttggtcaacatcacacagttgaaaatagaagatctggagtttgaatccatcagtcagacctgagagcatatgctttattgctttcagtgaattcattgactagtgaagtgtcttctgtatgcacgattctgggctagtgctggacatgaggaggacatctggctggttgcgtgcagcactggatgtcctcaggctggtgcttcattgtcatgtggtccctgacacagttgccagaatgcatgacctccatggatcatcacactactttgatctccttcttttttttaatgtaacagctttatcaagatatagttaacataacatataattcactcatgtaaagtgtacaatttaatggcttttaatatattcacagagttgtgcaaccatcaccatcatcagttttagaacattttcattatcccaaaaaaaagaaccccatacccattagtagtcactccttataaccccctcccccaactactgacaagcactggtccgctttatgtctccatagatttttttattgtgaacatttcatataaatagaatcatacaatatgtgaccttttctgtctggcttctttcatttagcatgatgttttcaagcttcatccatgttacagcatgtgttaggacttcatttctgcttattgtcaaataacattctgttgtctgaatttgccacattttacgtattcattcattactcaatggacatttttccactctttggctattataaataacgatgctatgaacatttatgtgcaagttttttgtgtagacatgttttaatttctcataggtatatacttaggagtgaaattgctgtgtcatagggtaagtctacgttaaatattttaa

SEQ ID NO: 309383 - DNA, 1000 bp, Homo Sapiens
cagccacactgtctttaactctcagcccacccacactgaggagggtgcctagaggttctatttccaaacctttgcatgtatcttaaaaatctcaataaaatgagaccttccaccatccaaacagagctgatattctcactaccagtccctctctaatattcctatttggctgaaaataagtagcttcaaaaagttttaaaaaagagattacttgcagcattaacacttctttgttgattaacaagtttcctatggagttttaaagctcatactttgttcttgtccttgtggacacaaattttctaactgcaaatgggacctttgtgtcccacattcaaatcctctctagtaatttctgcaaaggttgagaaggctggcatgatggagagaacggtaaccatgaggaaagcttcttggagtaaagcactcctctctccaatgcagagggtaaaactattaacatataagcaaaagaaacttgggctaactgagacccttaaaggagttcccctttagtccaataaaaggccaacttcaaatcttaacaccagataaggtagtcaaaatcatattatatacccagagaatgactgcttgaatggacatttcttacaagggaccttggttaggtgcagatttaattcctagactggggtccaggtaggcagtggaaagagctaatgtttacagtgagaagtgaggcagctttgtaagtgtctccacaccttcacattttgtgaacgtggactggagataactgaaaaccatctgctatccttacctggggatccagattttcctgcaaaatctccaaatatttataaagtggcttcactttttgaaacgctgtgctgaccaaacaaaacatatgtttagagtgcctgaggtcatagtcctgacaatgatagtattgtgtagttgaaatcctcttcatcaggccaaactgtgcttgagcaatcaggagcccagaaagatggaacccattggtgtttgtatagaa

SEQ ID NO: 309384 - DNA, 1000 bp, Homo Sapiens
cctgaggtttatgagctggatctgtctgccaaggtatgggtggcccgcatggtattgaaacagttttgaatcatttatcacgttttaaaatcaggagtgagaagaatctggacctctggcctttcctgaggcaatgaggcaatattctgtctccttttctgaaccagcagttagtgacatttgagcagacactgtgctcagctcaaagggagcccctgccgtttcatccagttcagcactgttcctcctcaccctccactgctagtcacctggctgcttcactcatttccatgacctgcctggccactaagcgtttgcacacatgacctagagcacagctgggaagacagctgggggaatacagaaagcagggcagatggctgctagggcatggtcttgaaataaaaaccttcctgtcctacctgtttaaaagtccctctgctgacttgccagttgactctaatgtatttggaggtaacagtctaaattttgagtagctggagctgttgaagtcatctctgcaagtcttcaatagtgtgagcacaggaatggttatttgaaatatagaacactgaagcaccaggtcgagaggacatcgaaggtgaaggagccactcaccaaagatgaagcattaggaaggtctaaagtagtaaagtagaattaattcagttttagagaaactaagttaaagtgtatgtagttcctccaagtagagatgtccacctcacgacgtactttagaattagaatccaagtttaaaaccttgcccaagtgcgtgcacctaagcggcctgaatgaaagccaatgttatcttcatcatacaaatgttagctgcttttcaaactgcttttaattagctcatagggttttcacaactcttggaaatcggtgggactcgactttcacttttagacccagatacagaatgacacttatgaagtttcaggttctataatcaaattaagattacagcctggggcctaggcctctggcccattgc

SEQ ID NO: 309385 - DNA, 1000 bp, Homo Sapiens; identical to SEQ ID NO: 120072

SEQ ID NO: 309386 - DNA, 1000 bp, Homo Sapiens; identical to SEQ ID NO: 120073

SEQ ID NO: 309387 - DNA, 1000 bp, Homo Sapiens
tctggcatcaagttccccgtgctcagtttccctacacaagagtccaagaggagaggtaaggagtgggaggcagggagtccagttcagggacagggattccaggacgagaagtgaaggggaaggggctgggcgcagcctgggggtctctccctggtttccacagacagatccttgtccaggactcaggcagacagtgtgacaaagaggcttggtgtaggagaagagggatcaggacgaagtcccaggtcccggacggggctctcagggtctcaggctccgagggccgcgtctgcaatggggaggcgcagcgttggggattccccactcccctgagtttcacttcttctcccaacttgtgtcgggtccttcttccaggatactcgtgacgcgtccccacttcccactcccattgggtattggatatctagagaagccaatcagcgtcgccgcggtcccagttctaaagtccccacgcacccacccggactcagagtctcctcagacgccgagatgctggtcatggcgccccgaaccgtcctcctgctgctctcggcggccctggccctgaccgagacctgggccggtgagtgcgggtcgggagggaaatggcctctgccgggaggagcgaggggaccgcaggcgggggcgcaggacctgaggagccgcgccgggaggagggtcgggcgggtctcagcccctcctcacccccaggctcccactccatgaggtatttctacacctccgtgtcccggcccggccgcggggagccccgcttcatctcagtgggctacgtggacgacacccagttcgtgaggttcgacagcgacgccgcgagtccgagagaggagccgcgggcgccgtggatagagcaggaggggccggagtattgggaccggaacacacagatctacaaggcccaggcacagactgaccgagagagcctgcggaacctgcgcggctactacaaccagagcgaggccggtgagtgaccccggcccgg

SEQ ID NO: 309388 - DNA, 1000 bp, Homo Sapiens; identical to SEQ ID NO: 120074

SEQ ID NO: 309389 - DNA, 1000 bp, Homo Sapiens
gatccgcccgcctcggcctcccaaagtgctgggattataggcgtgagccactgcgcccggccaaaatggtttaattttgaaataattatagatgtcagagaggttgcagaagaagtaaggcgctggttgcggtggctcatgcctgtaatcccagcactttgggaggccgaggcaggtggatcacctgaggtcaggagttcgagataggcctggccaacatggcgaaaccctgtctctattaaaaatacaaaaattagctgggcgtggtggtggcgcctgtaatcccagctactggggaggctgaggcaggaggatcgcttgaacccgggaggcgggggtctcagtgggccgagatggctccactgcactccagcctgggcagcagagcaagactccgtcaaaaacaaaacaaaacagaagagagaacaaaaccttagcactgagtcagccgttggaagctcccatttcccagatgggaagcttgaggtccggaccctaataatggtgggggaccctcagtctcggctggatcacaatgcaatctaggagcccagggccctgaccctttctccccccggcctttgtctctccgcagagtgcatctccctcgccccctgagagtctcgtggaggaggagcgaccgagtggccctggtggtggcgggaagcagagagcagatgagaaggagccatcaggaccttatgtgagtgggggcaggtgcaggactgggatgggcgtgcatggcccagaccagcctggcccctcagagccttccagagcccagctctggccataattctctcactccggagcctcccatagctccctactactcagagtactgaccaatcagaggagatcctgtaatgcaaggcttaactccagttgcttgaagtctctgcggcctcttggccgtacagccattttcccaccctctagcttttgctccagctgttttctttccctagaacacacatgttttagaaacccatttttctat

SEQ ID NO: 309390 - DNA, 1000 bp, Homo Sapiens
gatcacttgaggtgaggcattcgagaccagcctggccaacatggtgaaaccctgtctctactaaaaatacaaaaattagctgatggcgcgcctgttatcccagctactcaggaggctgaggcaggagaatctgagaggcagaggttgcagtgatttgagcccgggaggcagacattgcagtgagctgtgattgtgccactgcactacagcctgggcaatagagtgagactctgtctcaaaaaacaaaacaaaacaaaaaaaactcctttttttctgaagtctaaagcctgaattgggtttcagcgctgacaatggatggaccctgtccaatacaatggggccgggttcagttctggggaagaactgtggtccacgaagggtttgtggggtctcggagggggaaaaagtgtcagacagttgtgaggagcggcatggccaggctgcgggcagagaacgaagccagggccttccccagggccaaagacgaccccctacccaccggatgtactgcttccggttcatcctgcagaacatgatgaagccgttgacacacttcttcttcatctggggtgggcaggggcctttcttcttctccttgggcttcacaggggccctggctacttggcccttcgtggcctttttctcagctgccagcaggggtgaggccagccgggtgggggtccatgtggtgtcttcgtcctcttcgctggagcccggcgtgcccacagggttggcctgcatatcctgggggagggagagggtggtgagagaggaaggaggccctgctggccctggcatgcggccgtgtctctcacctctcgctgcttccacaggggctccgagtcgctgtcctccgagctggagctggagctggagctggagctggagctggatggcgccttgctgttcccgctcagcgagaggtagcagtggtccagcgagactgaggaccggtgcaggctgtgggactcaggagggtctttgggggccttggaggctg

SEQ ID NO: 309391 - DNA, 1000 bp, Homo Sapiens
cgatgactgctgttataacctacagaactagtgatttcccaactttgttctattaatccaaattcactgaattaaaatattaaatgctatgaagggaagcattaaaattttttactatcatatttcatcaattataagacatattttcatataatatgtctgaatctgggatgcagcttacaattgatgacgtcttagcattgtattgtggcttaattggcaacattttttcttctaagtgacatataaaagactagtatgtctcacagtagtgctgtgtaaggataatattagaagttctagttcaaattttcaatgtcaaagcaacaatttccctgtcctcccagccactctcccaacataaatatataactgaaatgtttgattagaaaaactatccaaacacagttcaattttatataaaatatttaatttttaaaacacaggctattcatgtcacataaatatcttcaactgtaggttagctgcttatggtcagcagaattatcaagtgtgactattaagaataacttagatactgtcacttataggaaagtctaaagctctaagactcaccatattaaaatttcagatacttgaatactgttgctattttgctaatttcaaaatatttcttcatttcctgcaatgtagtttataagttgttagtaatcaatattcaaataaaagcaacatatttttttcttccattcatttctttctcccaacaaaaagagtccatcaaaaaataaaatggtcaactgatatcaacttattttatagtagtaaaatggtaaattatcctctttaaaataattttactcttatcaaactacaggacttcccacatactgttttgaaatgaaggttcataagttagagggcacagggttaactggctttagaactggagcaatatacattctgtaacagttgttccaatttaagattccaataaaaaaaaataagttaccagaacagttgatgaacaaaatgatta

SEQ ID NO: 309392 - DNA, 1000 bp, Homo Sapiens
ccgccgagcccttcctcactcccatggagccccctgagactggcagacacgtgccaagcagagctcgaggggcatggccaccacctaggtttgggagagagaaaaggggcccagaatctccttctccaagaggaagctggagctcttccttgcagagcctgagaaaaggaagaggaagaagcagtaggtggcctaatccaaggtgagcagactcagtccaggaaggggtcccagcccaagaggagcaggggctcttctgatcaaagctgatgtcgatgcacataaatgtttttaggggctgggtgtggtggctcacacttgtaatcccagcattttgggaggccaaggtgggaggaccacttgagctcaggagttcgagaccagcccgagcaacatggtgaaaccttgtctctacaaaagatacaaaaattagccgacatggtggtgtgtgtctgtggtcccagctgctcagaaggctgaggtgggaggatcacttgagcccgggaggttgaggctgcagtgagccatggtcacgccactgcactccagcctgggcaaccgagtgagaccctgtctctaaaaagaaaaacatgtgtttaggggctcaactcggtgactcacacctagaaccccggcactttgagaggctgagataggaggagcccttaatgccaggagtttgagaccagcccagggaaaatagcgagattccatctctacaaaaaatacaaaaatttggccaggtgcagtggctcatgcctgtcatctcagcactttgggaggctgaggcaggaggatcactggctgaggccaggagtttgagaccagcctggccaacacggtgaagccctgtctctactaaaaatatagtaattagctgggcatggtggtgcatgcctgtaatcccagctattcaggaggccgaggcaggaggatcacttgaacccggtaggtggaggttgcagtgagctgagatcacgccactgcactccagcctggg

SEQ ID NO: 309393 - DNA, 1000 bp, Homo Sapiens
cctggtcgtatacttggattattgcatattgtaaaaatcactgtagtagcattaacctttcagtgatttctctgaaatcagctgcttctaaaatcttgaatatttacactatttatgcctttattataattagaaaaccctttccctttcataaataccacacattaaaatgtacatcaaaatactgcctaaaatattttgtgatttattaaacattttattcctgaaaccctaacctcacgtgacagacccaaagcaaagatgatgattgtagcaacaagtagaaaatctaccaagcaggactgtgggagctggaaggaggtctccgttaccagcaataacctagggtgtgagtatttgtttccgaaccaagtgcggacagtctcggttctgctttgctggtctgtgtcgtcattggctctgcccattaacagcagtgttcttgtggagcttgggccttgtacctaactcctcacaggcaaacttggttcttctcaccatggtgctgagagagtgggggtgaagggaaggccccagagccaggcgcggggacagcagtgctgcaggcctctcatcctgagcgccaaaatgcactggcagggaggtgttcttaccatcagcatcccgtctcctgcttggcagcgggagggtaaaaggggattatgctcaggaaatgcggcctcagtggcagaggcaccatggagaatccgcatctgtcccagtgacacatcacatcaatagcctaaagttgtggtataaatttttattttaaaaagtgttaaaaaatgccttgccctcttgcctttgaacattaattattcaacctctttggaatctaagagatttgataacaccatttggatggtggtacaaggagcaaacagaactcacccaggcccctccagcaaagcctggagcctccctccattctcccttttgggctgtaggagccaaggctgcgtggtggccaagtagtaaccggacaggtgcagacaggaga

SEQ ID NO: 309394 - DNA, 1000 bp, Homo Sapiens; identical to SEQ ID NO: 120075

SEQ ID NO: 309395 - DNA, 1000 bp, Homo Sapiens; identical to SEQ ID NO: 120076

SEQ ID NO: 309396 - DNA, 1000 bp, Homo Sapiens
gatccggacgcagggccgaggcggcagcgcgctcgcagcccgcgcccccggccgaccccgacggcagccccggtggagcggcccggcccatcaagatggagcaaaccgctttgagcccagaggtgcggtgaccgcacgcggcagcacctctgagccggagggcaccagggactcggcccagggccgtcaaggaaagggcagtggacgtgctgcgcatgttcgggagcgaactcccccgaagaaggaccagtgaagacgtcaggggcaaggtctcgggggtccggaagggtgatcatcgacccccaagggacccgcagacccttaaaaaaatcacccacaaccctctggaagtggccttgcccggtccccttcccaggggcgaggtcggcaaagcaacatggcagagcagtcataggacccaagtggtgcctcattttttccgggctggggtcgcggggggaggccaggaggggctggggaggcttcgcttttctcaccgtcggcccctccgggagacccaggggcagacgctcgtcgacggcgtctgctgcgctcccggcgcttggacagaggcgcagaatccaagtcggggacgcaccctaccgaccccgacccagtcccgcacggtcgcgttagcgaagggtcaggcgctctcgcgtttgtttttctttatttctttatttcacatacacattagccattcaatggagaagccggagagagtcaggcaaagatggtataacagaagcgcagtgacgggggcggggcggggcggggcggagagggaacagacgggctggctgcctacttgcattccgctaggacactgaaaacccagaaaacaaaacagacagtaaactacccttgtttcttatgtatctcagtgcagagacgggggtggagggcagagaagagggggagaccaggctgaaggaggaggagcagagggagggggacgctaagggggaagcacaccaaatccattagtactatatataga

SEQ ID NO: 309397 - DNA, 243 bp, Homo Sapiens
ataaatttgattatgtaaaatgataaaaactgaaactttaaaattcctacccttcaaacagagggtcagggattcaaatatctgtgtgaaagcctaccactggctttactgtcagcaggatttcctcgccccacagaagggaatttcctctcttgcactgctttggagtgttcattgctattactctatgaaactggaagagataattcaactctgttacttaacaaccaaaacttttgaatc

SEQ ID NO: 309398 - DNA, 1000 bp, Homo Sapiens
gaagacccttcaggtggacactgctcacgactcagaacgattttacgtggcccctccagacctgggcccattgcacactcagcccctcccccatcatcaaacaagctggttaattggtcacatttcagtctgagacctttccaagtctcttccacacacaaaaggcagtcgccagaagtcacaaacgtccctcaagccccctttcagactcaatgcaaatgcatccagaatgtctctggggaagtggaaaagctgctgctttccatcttgaaaggccgtggccttcgccgtccaaaggatgctctagtaaaggcctctgctgggcattactgtgtcaacaacattctggcgagcattgattgtgtgcaaaggaacgtcaggccgctaaatttaagtcttcaggaccccttgtttatcctcaagggaaaggtggcagatgacatagcctcaacaaggcacagcaggtacagaaagtgggtatttacttacacatcaaaacttttcaacaacatcgtttgtgggtgacatcagctgctttcttgtctctaagcagcatggctgcagttgggacatcctcctccctcagtgagaatagtggtcctggccacggcgggaagcagacattctaaggacctggggcacagacattccagaaggtaggcaccatttcagtgcccaggccttctctgtagttgctgggaggggtacggctgctgccctcctgcacgggagccatgtgcctcaggggcgtctcaagaatcctggggaaggaagtgaagtctgaggacaggagtgtctgcatccccttctcagccctccagcagcctctgaggaccccttcaggtcctgctcttactctacaacccacctcgcccccagcagaagatgccagattagagaccccatgtgattatcctccagagcttctctctggccttaggaagccaacctctgcccgtggccaaaaaaccaaggctccgactggacttgtcttctgatt

SEQ ID NO: 309399 - DNA, 1000 bp, Homo Sapiens
gatcatggagtgggctgggggaagcccaggagtctggggctcttaccttaactcacctgttaacatgagaaagaccttctgaccaaagattgcaaagtaaaacaacctagagaagcttcaaggaattctgcattacctggaaggaaactaagggaactaagagaaaaagaacttgcaaattgatcatcagtgaattagaatacaggcctctgtgcttcccctccagggctcagccccgtgctgtgagctttctcttgcagattttctatctcccctgtcagatggcccggggagaacaggcacctgctctgcggatgagaagcgtggcctggagacattgcccaagaagggatgtttgtttcctggggatggaataagatgagttctcccagatcttatacctgccgtgagatgcttatggatcaatgaatatttggaatattgccatcttcatttgagagggcatctgggacctttgagtctgtcccatacagaatttccctttgctatgtcagaatccttgctaccctgagctcacctgccccacccccacctggtattccatgacgttctctcaaaggcaacagaaagaccacaggatattctaggcaatccattggtatgatcaaatattttggagatctattggcatttgcttcctggccactgcggggtaatattctctacggaaaacattgactgtctccaagagccaagcccatggtctaatgaataaggttggccagcaggaactgagaattacgaaaggagccatcacccttgctgggactgtagccttccaagacctgctctttctattttttgaaagcccgaggtccaactttctatgcaacaactctggcatttcaaatgcaatctgtgtaaaatgccttaggaactccatgcagttaaaaagaaactcgccagagactcacatcctacccacaaaccactggtttgctacttattttgattttacagtttaaagtcacagcactct

SEQ ID NO: 309400 - DNA, 1000 bp, Homo Sapiens
gatccaggcaaatctgaatgaatgtgtcttctttggaggtgagctggagaagcccacacggtgtcttacctctttgaagataatcacattttccagttaacatgaccttgctttgctgttttcttttccactaacccttgaactcacaggaaacacacccacagtggggagagccccaggtcaatgttgcagacgcctcgcaggcactacccatggattaggtggcctctcacttggccccactgtcctgttcttccacttctacaagagcagtggcaaaggtcttgttcttatatgtttttttaaaatccaccttcccttgggatcaatgttgaagtgtgttaccaaatcgtgttgttttttcaactgtgccccacttcacctccctctcagggtctttgcctggcctcctcctggttgctgtggttcaagagggacgtggatgtgccgacagaagcaaatggcagtggagaagggctcaaggttcaggtatcaccaggagcccactatctgcctccccgcatgacagccccattctcccaggatgactccggccagaacaggaggatatttattgatagcacagagactgtatatttcaccatcaactccattcaaaaaatccccgggtgattccatgattgtcccaaatggctccagtgctcacgtgtggatcagccattgtgtccaggagtaggtagtaagaaagcctaaagggtgggaccctatgaattaggggacattctcctggaggcgctgctgaaaggagcatttcccaagggttggacagaccaagaattaatgtctacttggctggcctccagccatgctcccctgcaccagtccaagagaggtaaaaactgtggggttggagaaggtcaaaatggaccagttattctccagcagaaaccaggagcactgcctacacaacgccacctattcctgagggcacaaatggcaggtgcgtaacaggagcacagcccacacaacaccatctatc

SEQ ID NO: 309401 - DNA, 1000 bp, Homo Sapiens
gatctaatctgtgggctgggcaccagggaggagaatcaaattactcaggtgctggtcagaggtgtatgttgcaatacagttgcaggaaaatgtagggataaaattaacaatcctgcacatgtcccatttctaggtattagagtcaacactttttgtatgttgagtctgagtacatcagttacaatctcaaaggtggactgaatacatgcataagagcctcaatctatgctgtggactgtgtccccttagtggagtcacagcctcagcggtatgttgaatcttggtctgagagtcatcaacccacatatagcccaaatccatgtatgagagtcaattttccagcttttggctacctccaaatatgagaatcagaacttcaacagtgagctgtattcatgtggaaagatgacaatctttactgtcggctgggtgtgcatgtgtcacaatgtcacctgtgttctgggcctcattataaaactctctgtaccatctgaggtctttatacagtattcatgaaagtcacaattttctctgaaactttcttcctggtatggattcataatcatacctgtgaacctaagtccatgtatttgagtcaacatctctccaaatggctgggtcccaagaagagactcttcacctgcctatgagctggattttgaaattagtcaccatgttaactgtagtggcatgatcacatgtaacagaatttttactgtggactgcatgcacctgtgaaattcaggatctctccagtgggcactgtccatgggtcagggtgacaatgctaacatttggtaggttgtgcatatgagaaacacagtctcacctgtgtgcttggtcttgtgatgacactctctgtaccatccaaagactttatataaaatgtgaaagaaaagtaatcctttatgacattatctagagaagacccaggaatttacccatttctccaagtatagttacaagtgccagtaactctccttttggctggtttgtggta

SEQ ID NO: 309402 - DNA, 1000 bp, Homo Sapiens
gatcgcgtcccggcgccacctcgcgcccgaacctccagccaggaccccctcgggccaagcggatgggggaccccgaaggctgggggaagtggaggggacgtaggggaaagataaagggacagagttttgaaaaggtggagggagcgctcttcctccgccgcccaggcagtccccagttacaggaaaaaaggaactgggggaggcgaggccgggagtggaaggcagacccttccctagggggaggctcagcgccagtcactcgcacacagcaagcggcacccaactgtcccctggaacgcggccactcgacagttctccactccctggcgaccccccccaaccgccacacacccacacggggacaccccacggtcacccagggacacgcggctccgcggacacgcagcccagccatagtttcacaacaccgtcccgcagggacgcgcgcacagtcgcccagttatccaaagacacaagtgtcccgcagccgcacaatgcgggcggcgctcacaacacaacacgcgccagcacgtggatgtgcagacacacgcggacacagaaagcggcggagccgacgcgccgggacccgcggccccaaggcaggtacactaccaccccgccgcgcacaccccagacgctcccccagatgccaatgccggcccgttacggagcgcaggggctcccacgcacccctcgaggtgcgcacgacaccgacgccagtcgaccggacaccggaaccccaagtgcagccaccgccgctccagggcctggggcgcgccgggccgagacccgggggtccctcccagctggggaccccgcgcgcgcggcagcggggccgggggtctgccgaggggcggggcgggggcggtgcgagggcaggcggggcggctgctcctgcgcggcgccgagcgcggccgcccgcccggctccaagttcaaggcgcccggcggcggccgcggcgcgctctccgcccctctccgcagcggccattttccgctag

SEQ ID NO: 309403 - DNA, 1000 bp, Homo Sapiens
aactctaatttcctttttaacccaaaatgtctttttttatataaccatttatatgtattcagtattcaagtaaaattccctaacagttaatgacatttaaaaaatgtgcaaaactgcaaaattcattgtaatagaatgtgtaaggtcaaaagggtggaacggctgacagctattgaataagtgcatcataaatcttcaaggaaaaaaaacgcttactgtagaatctcaaattgaaaatttctgtgcagcattacaaaatattttatatttaatgagaaaaaagaagcttgcaggcagcacatgaagcatccacagcaggtattatgattgaaaactagtaaaataagtgtaagttgttgactgatgtaggtactaccagcatctgaattttagcactggccttgattacacaggagatggagaagtcgttacaattgagaaaacatatttaataaatcattgtcaatttttataatgtttcaagcccattctttgttgatagcctccacatttatatggttaagtcattgttgctgtgtttcttacctatgacattatttttatatcccttcatttgtggatcttaagatgttgcagaaggttcattcctgtaccccaatacagattcacttcctttagctgccttttctagcaccaatatgctttaaaaaaaaatgcgcaaacaacaagcagtgacagcggccaattcctcgaatgtccagattaataactgtagcatgctaaagaaaggtgtgtgtaaatagctggagatggtatatggtccagagtccagcataaaattatttcctttctgagcattcccctccattgccctaacccgaatacatgcattagaatggtagcaaaacctttcggaaacctctcttagccaactgcaaacttatctgttgccacaagtgcaaaggggtaggatgtgaaccagtatatcacaaagctctttagccacttcagttggtgacagaacacaaaaggaaaaaat

SEQ ID NO: 309404 - DNA, 1000 bp, Homo Sapiens
acatcaatggcttgaaaatttttatttaacccctcagcaaatattggaaatagaaaaatgaattctgcagaatttcacaaataaattttccaatttccactaacaaatgttatcattcaatggctaagcagttataatgctatgaacattcaccacaatgaatgtgctgaaatagaaaacaggcaaagagacattaaaatattacttacaacagcattattacaacatattttctttaaaattccaacgtggatttcatcacttcaaaagatatacagcatttccattatatttgcaaacttaaccttatacatcttttaaaatcttgaaaattttttaagctgtctaaaaagcacttagcaaagtcgataagtctacctaatggaatactatccaccccggtataaatttcgttttaggagaaggtggctgtaaacactcatcatcacacaacatgcatagcctctgctgaccttcccttcttctgaatgcgacgccactgcaattgtgctttactacaggtaagacaggtaagagaagctgcagagattcagggactggcagaaagagcatcgcacaggaccactaggtttaggtgacctggctacctggagtccatctgaggaaagtttcacttgacaatagaagcttgaatcctggatcattcggtttagaaacaggctagacaagagagaaaaagaggccctcgttggagttggctccatctttccttagctcacataaaagcagggatccagttagcgtaatgcactgtttggcttatttttggtgtgcaattataccaatagtacatctgatatttagaatgacaaaaatagggtatcgttgaaatttaaagtgacaatgagcacacttaacagtggtctgtggtatctgaggaaactttagatgaacagaaagccactgttttatgagtccaccccagtaagctgttacaacccaactaactaccttttcatgtttgttttgtgtgttgaat

SEQ ID NO: 309405 - DNA, 1000 bp, Homo Sapiens
gatccaacgcccttccagaggagggcagcgccctggtaagagccgggggttccctgggccttggccttgcctccccgggcctccgaagcccatttctcttgtttgctgctcctgaagcactccctctccctggaggggccgcgggtctctctaacgccccagtgggggacctggcccaagttcctttccccggtgataagccctgacccccattcccgggcctgcctaattcagggcgctctcggctcgccttcccccggcgacttccttctcctgcagccttcgggttaatcattagatctcagtctcacacctccaactgccccttcccgttaagagaggaagagaaggcaaggcctgcgcatggccattttaataattcgctgcccgtctcatgcctgggggtccgggcgagtcctcgcaggccccgggcagagccgaggcggcttcgcagctcttcccccgctcgctgggagccaagcgcagagaggggcaggcggtgccggtggaggatgcgcgaggccctcccgccacgcgcatccacgggggccgcagggtactcacagttgaagtcgggcatcttaggcaggatcatgcccgcggtggacgcgcgcagccactggtccagctggaaggtgccggcgcccagcttgatggggtcggcggggtgcgcggggtgcgcgccttgcacctgcgggtacgagtaggagagcgccgggtgctggcccgccagcgcagccgccgccgccgccgcggagtagccgtagaccgggtggccgtagagcgccgcctgcgccgggaggcccgcgccgccctgcgcgcccccagggtgcagccccagcgccaggcccccagcggcggcggcggcggcggcggcggcggcggcggcagcggccgctgcgcccggatgcgcgtggtggtggggccccccgtgcccgccgcccgtgccgccgccgccgccgcccgcgcccaggaagcccggcttgggcagcagcgcgca

SEQ ID NO: 309406 - DNA, 1000 bp, Homo Sapiens
tttttcaattcgttcggttgacaaggcgccgtttcttttggtctttgttttctgggatttctgagggcttacactggatacgcttttcaccagcaaggcattagcagagagcacttctgatccgaggctaagttagcacctttcagatgtctttctttattgtgattactatgctcattttcccactgtgttagaagcgccagacttcaaccagtcctgatgctggcctaataagacactgtcccctgcatgacccaggcttttattttctctactggtttaattcatggcagccctttgtttcccttcctttctttcaaccccatctgtgctgtgttgtggcaggacagcctttcataacatatcctgtgccatattatccacaaaggatggtctttaatttccatgtatgagcgttttgtcatttttgcagataaatgtagtagattaatcatttttttgtattcctactttgctgagagtacgtatcatgactgcatactgaattctgttatgtagttttatacattttttgagacaattttgtttttccctttattctcttaatgtgattatttgcagctatgagtttcaaatatttaactaaccaatttgtttctaataagaagcccttctgtcgtgatatatcattttatatattattggatttttttctataagtttctttgaggaaattttgttgcctaaatctgtaaagtggaaacatatctgaatatttataatcacccaagtcaacaaattaaattataattaagtaggtaaaagcaatgaaagcagaatgaagcaaataataagggcaagaaaagcaatgaagaaaaacaaatattaaataagggaaataaattaagtaaaatcccttaaactgcttattgaagccagataatttctggtgaaatttatcaaggaaaaatgaagaaggctctaatacccaagatcagtaatttcaaatatgttatcactacattaataacagacatta

SEQ ID NO: 309407 - DNA, 1000 bp, Homo Sapiens
tctacagaatgcctcgagtagctggagaggctgggggatggcgttctccactccatcagtctcacagacattctgtgcaccccatggagacatggggtccctatattccccactaagaccaggagttacaatgcccagagatcatgttctgtaaatattccttgactgagaaagggttaaactatctaatgcctccaaaatacttcaatgctgaagaacagcgcttgtatagcccaagttcttctctgcctgaatcaacttgtcctctaaagctttgatgccagactgggattctgcttaggtaagaggcctgcagtactgggctgactcttcacaatagaaatacaaatcagaaacagatcacttgaggcacccattagaaatgcacacgcccaggctgctgggcaaaccacaaatctgctaacgcagaaactctgatggtgtggggcacaaggacctacactttcagtaagtggcaggggctgggtgattatttgagcctcctctcatttcccctcaaatcaccttagcaggggtcctgtgaaatagggttcatcaacaggaacagtgcctgcgtcctggagatggcaggagcccacatttctaaaggacaggagcatgtgactcttagcaggaggcagacctcaaggctgtctcactgcagaggcagaaatgtgaataaccagtgaagtggttctcaaagtccagtccctgcgcaggcaaccgcagcatcacctgggacctttttggaaacgcaaattctcaagccccatcccagagctacccagagtcagaaacgctgcgggtggggctggtacctgttttgacaagactccaggtgactctgatacctgctaaagtgggagaaccactgacacatggaagtgacagccagggaggtgggcgcctgagacctcagcacatcactccaaaggcctctcaacatatcactccaacactgaagacacctaagagattcctgcaagtttttgtcagaaaa

SEQ ID NO: 309408 - DNA, 1000 bp, Homo Sapiens
aaatgccattccttctacttgaagtgtgttttctagttttgtaaacctcagatttactttaacttttttccaagaagcttcctataccacattcatacaaaaaaaaaaaaaggttaaatactacctactttgtgccaccactttacttcgtacatgcttccactgttgcacttttcaaaatttttatttctttagcatgtggagtttactttgagctgcactgcctaaataattttttatctcctcgcaacatataaaaatcagtgcatttcacaattaacaaatcagaacatatggcaatactggatacaatattcccccatgacaattattcaccttgagcgaagtagttgtccaggttaaacagtgcatgccatctccagttcactagaaatatcactagataagccacaatcatcacccattttgagtctgcaatcactagtacaagtttatctcttttactaagtaagtagttttttactttgtgagttctttgaaataacgaggtgaattttaatcattttgaatcctgtactacccagcatgttccctgggatatagcaggtgctcaataatgttatttaattgatagattgggaaatttatttaaaaagattaatgcttttctgttgatatttaattttaattaaatttccatttttatgagatccactgtgggaacctactacaggagattaattaaaataatgaatatgaactcaaggacagttctgaaatatacatgtttaacattgaatgaattaatacttatttaatccacagagttaggtcagctgtggcatcatttccaaaagaagctatttcatacccagcagtagagaattgtacattgggcatttgagaatatcatcgtaatgagaaactaagatcttgagttagaaaaactgagtagtttctagaaaggaaaactcgttctaataccaacaaccaatcctaatcggggtcctagtatctgggtactagtgctattacatat

SEQ ID NO: 309409 - DNA, 1000 bp, Homo Sapiens; identical to SEQ ID NO: 120077

SEQ ID NO: 309410 - DNA, 1000 bp, Homo Sapiens; identical to SEQ ID NO: 308877

SEQ ID NO: 309411 - DNA, 1000 bp, Homo Sapiens
  misc_feature (61)..(61): n is a, c, g, or t
  misc_feature (265)..(265): n is a, c, g, or t
  misc_feature (752)..(752): n is a, c, g, or t
ctaagtgcaatgggaagccactcaaagggctttaagcagggaagtgacattatctgatttncgttttataaagatccctgcggctgccgtcagtgattgtaggagggcaggagtggatgcaaggacagcaaacattagtgcaggagttcaggtgaaagatgataatagcttggacagagtggtagcagtggacatggagggaggtaaacagatttaagatgtctcggagacagctgatggaatttgccgataactggaatgggangtgacaatgacaaataaaggaacctagaataagccccagcaattttgcttaagcaactgagagttcagccatggcagatctgttaagcacaaaagttaaacacaaatacaaattcatactgcattggactcttttaagcagtgtcttatagaaaaaacattttatctagggaaaaatgcaacaacaaaaaccactgaaaacaaaagcctatgaataaaagcagacccgttttagactggatgcacaaaacaaaaacacacaggattcttgtggtggcgatgggagtaagtgaagaggtaacaggttgcaagttattttaaggactaagacccaatgttcagaaaccaaatcttgttcttccagtgtggatgcttagtcaaagactgtaaattgtcttcaagctgagagagaccatgaagagagaggagtggccacctaactaaccttcccagtttttgggagccaaacctagaccagaatgtaggtntaagtgactcccaatccagagctgtctccattaggccaggctctcaccccagctccaaaccaacttctaaaaacttgtccaagagtcctcctcttctttagaattggtaatcttggcaattaaattcagcgtagaaacactctcctgaacataatcagcatgctggttcttccttttctgttgccttgctcttcctaacagctcctcctttcgtctttgcaggttggttgtctgtcacaggaactcag

SEQ ID NO: 309412 - DNA, 1000 bp, Homo Sapiens
gctgtggctcacgcctgtaatcccagcactttgggaggccgaggcgggcggatcacctgaggtcaggagttcgagaccagcctggccaccatggtggaaccccgtctccactaaaaatacaaaaaaactagccggtcgtggtggtgtgtgcctgtaatcccagctattcgggaggccgagacaggagaatcgcttgaacctgggaggtggaggttgcagtgagccgagatcgcgccgcgccactgcactccagcctgttggagactccatctcaaaaaaaaaaaaaaaaaaaaaaaaaccactggaattagtaaatagatttcagggatttgtacgtttgatttcacttattacccctgctgaataagcttctccggagtatcctacaacaacttttgggtcttcattgctttccagtgggttaatttagaaacattgtaaagagttgctccagcccaaccgcgaaagaagcgctttacaatgttatctagcgaagcaaacatgaagtgaaacaaacatgactgtgtccagctttctctaagacagtgtagaatggctctgaaaagagcctttgttttccagttttcacaacctcgctccttatttggccttatggtggctctcagtcttcttaggcagcagcacggcctggatattgggcaagacaccaccctgcgcgatggtgactttgcccagcagcttgttgagctcctcgtcgttgcggatggccagttggaggtgacgcgggatgatacgggtcttcttgttgtcgcgggccgcattgccagccagctccaggatctcagcggtcaggtactccagcaccgcagccaggtacactggcgcgccggctccaacccgctcggcataattacccttgcggagcaggcggtgcactcggcccacggggaactgaagcccagcccgagaagagcgggtcttggccttggcgcgagctttaccgccttgcttgccacgtccagacatactggtcacaact

SEQ ID NO: 309413 - DNA, 1000 bp, Homo Sapiens
gcaaataattttttttttttttttgagacaggatctcactctgtcgcccaggctagagtacagtggctcgatctcggctcactgcaacctccacctcccggattcaagcgattctcctgcctcagcctcccgagtagccgggattataggcgcgagccaccatgcctgcctaattttaaaaaaacttttagtagagacggggttttaccatgttgtgttgagcagggcggtctcgaactcctagcctcaagtgatccgcctgcctcggcctcccaaagtgctgggaatacaggcatgagccaccgcgcctggctatacatttttttttttttgagacggactttcgctcttgttgcccaggctggagtgcgatggcgccatctcggctcaccgcaacctccacctccctggttcaagcgattttcctgacttagcctcccgagtagctgggattacaggcatgcgcccccacgcccagctaattttgtattttaagtagagacggggtttccccatgttggtcaggctggtctcagactcctaatctcaggtgatctgcccacctcggcctcccaaagtgctgggattacaggcaggagccaccgcgcttggccctataaaatcctaattaacaaaatcattcacacacacacacacacacacacacacacacacacacacacacagatgtaagggcatggtctctcttccttgaagctacggaattacaattctccttcacaaagacagtcaaaggatgtgatctgatgtgttagattttctctctcctgttcaatatggagttttgcatcttagtttctttgggccgctataagaaaatacactaaactaggtgactaacaaataacaggattttacttcttacagttctaaaggctaggaagtctaagatcaaggagacaccatattctatgtctaatgaggctcactctctgcttcatagatagcatcttcttgctgcaacttcgtatggtacagg

SEQ ID NO: 309414 - DNA, 1000 bp, Homo Sapiens
gacacatctacttgtaccctcaccacaagaccagaattgaagccagcatcttccccccaaacctgccccttcaagccattcatccaagctgtgggctgaagaatcctttttgaatccctcagtttttctcactgccccattctccttccagttgctagccaagtctggacttcccttaaagatctcttgaactcgccccccatctccacccccattgttgttactttgtccaggtcttcactacttctgctctagcctcctaacaggactcctgccttgagcctttacccctttcagtgcattcacacacaagctcaggggagcgatgggattgcattatgcatctgctgaaagctcttccagggctcccgttgcctgtgagataaaatgcaaacgttttagcacagcactcaaaaccctttgtggtttggccttgccttctgggccaggcgcatgtcttatctatttcatcccacatctggaatggcctttgctctggtcattctggattccttagttttcccttgatgcctcatgtcgtctgcctttgactgggtttcttttgttgcaagggacagaaacctactttgaaaaggctgaagccaagggggaatttagcagaaggatcaaagggtatctgatggtccccaaggtcctgagattccaagagggaccagcaccaggagtaggaaggtggtgacttcgtcaggctcactctctttggggccactgattcctcacctctacttcatttagcggatccatgtcactcctctttctaagcacactatctttccctgcccttttctgcccacagacactccctgagtttacatcaccccagatcacctgaaaagtccaggtagcatcgcagtctcccatttccaggaaagcaattgtgattggcccagttatggtcagggaggcagcctcatggagaacaaacacagcttggagaaagaaggcttggaggacagccccagaaaaatccctaaactct

SEQ ID NO: 309415 - DNA, 1000 bp, Homo Sapiens; identical to SEQ ID NO: 120078

SEQ ID NO: 309416 - DNA, 1000 bp, Homo Sapiens
gatccgcccgccttggcctcctaaagtgctgggatgacaggcgtgagtcacagcgcccggcctacagtgttgatttatcaagtgtctattattttaaataaagttttgagaaccataagtggttttacctgatggtaaatatttttttttttttgagacagggtcttgctctgttgcccaggctggagtgcagtggcgcaatcacagcttaccactgcagcctcgaccttcatttcaataaaaggcaactctattcttccagttattcagttcgaaaacctgagagtcacacttggcccctctcacacccccatatcccacatctaatccgagagcaaatcttgtcggttctgaccctccacccagtgccaccactttggtccaagcatcatcactcttacctggctctgtgcaatcaatgcccccgtggaatccctgctcccttgtcctccttcagatcatagcagccagagagattctatttcatactgaaacatacatcagatagtatagtcccctcggaaaattctccaaggccttcccacatcatatgaatcaaagtcaaaatccttgaaatgggccaataaggccaccctctccttcagccattctcttcccaccctccattttacctcctgcatctctccttttgctctttgctctggtgcagtggcctctaggctgctccttgaaactagcaagctctgcctcaggtttctgcatcctggttccctcggcctgaaattctttcacatatttcaacagggcctgctgctcatcttcctccttcgggtctttaatcaaatgccgccctctcagtcaggcctctctagccaccctaactaaaattacacctcctaccccattccctgtccccttctctatgttattcttctcctcagcacatatcactaacatatctgtattttatttacttagcttatttatgatgtgtctcctcccactagaatgtaagttctaggagggcagggattgtttt

SEQ ID NO: 309417 - DNA, 1000 bp, Homo Sapiens
catcgtgatgtcttatttaaggggaacgtgtgggctatttaggctttatgaccctgaagtaggaaccagatgtcggatacagttcactttagctacccccaagtgttatgggcccggagcgaggagagtagcactcttgtgcgggatattgatttcacggaggatggtggtcaagggacccctatctgaggggggtcatccatggggacgagaggggatttgactgtaatgtgctatgtacggtaaatggctttatgtactatgtactattaagggtgggtaggtttgttggtattctagtgggtgaggggtggctttggagttgcagttgatgtgtgatagttgaaggttgattgctgtacttgcttgtaagcatggggagggggttttgatgtggattgggtttttatgtactacaggtggtcaagtatttatggtaccgtacaatattcatggtggctggcagtaatgtacgaaatacatagcggttgttgatgggtgagtcaatacttgggtggtacccaaatctgcttccccatgaaagaacagagaatagtttaaattagaatcttagctttgggtgctaatggtggagttaaagactttttctctgatttgtccttggaaaaaggttttcatctccggtttacaagactggtgtattagtttatactacaaggacaggcccatttgagtattttgttttcaattagggagatagttggtattaggattaggattgttgtgaagtatagtacggatgctacttgtccaatgatggtaaaagggtagcttactggttgtcctccgattcaggttagaatgaggaggtctgcggctaggagtcaataaagtgattggcttagtgggcgaaatattatgctttgttgtttggatatatggaggatggggattattgctaggatgaggatggatagtaatagggcaaggacgcctcctagtttgttagggacggatcggagaattgtgtaggcgaata

SEQ ID NO: 309418 - DNA, 1000 bp, Homo Sapiens
tttgtttctcactgcctgtataatcaggtctttattcaaaagaagctgtccacaatgatttgacctttatggaataatcaaatttaagagttaatgcagcaggcttcttttcctctacagtaggtttcttttctgcaggcttcttttcaggggctgatttcttggtagctgctgccttttttcccaccagaggcttcttctgcttcttcacaccaacagcagccttctttcctttcttacctaccacaggcttcttgcctgcaaccgccgccttctcatctggtttggcttctagtgctgctgcagcagcagctgccttatccatccggagcttgtgattcctggcctggcgaagaatggtgttccggcgcatggtctttgcatatgggtttagcttcaacatgattctcaagtttttcagtgggttcttctttaggactctgcgatgaatcttcttgcttggtgcccgaaaggctctttggatctctgggcttttcaagattctgctaagatctgtattaatcatcttgtgcatgggaagattgtagttactcttgagggaagcggctttacgccaagtgccatacaattcatccaacttccggaaagcacttccagtccaaatgcagaaacgtcccacgtgcccaccaggagcaagcttcgaaatggtcagcttgcttacattaagcagagtaattgcagggatgtttctgaaggccttgataccattatcctcattatagatgatgcacgggcccctgcgctggatacggcgacggtttctcattttgcctttgccagctctcattcgctgagaggcatagacctttttgatatcgttcctggctttaagtttcttaaggagcaaaacagcttccttggtcttcctgtagccttcaactttatcttcgactaccaaaggaagttcaggaacttcctcaatacgatgacctttagacatgaccagtgctggtagggctgaggcagccagggcagaaca

SEQ ID NO: 309419 - DNA, 1000 bp, Homo Sapiens
tttttttttgagattttacatatatctttatataaatgcatatatatttatagagcctctgcctagaacagccgggcttgcttcttcagttcattcctcttccagagggccagccggtcaaactcagagatggtcatgccaaagacttggtagaactcttcctgggacaggtggcgctctaaacgggtcctgtctacatccttgggcagtcggtttcttcctcttgtagtcaccagcagcagttcataagggtagatcttgtactctcgcatgccccagttgactgcgttcatgctgtcgtagtggaagaggtctgcgctgggtgtcctgtgcagcccatttcttcggtaggcaggcagggaggcagatttggagatgagaggatcactgtcagccaggtagtgcgaccgaggggagccattgagggacatctcatagccagctgtgtgcagggcttcccggctgctggtggagctccggggaggggtccagggatctgcataggagctcgaccgggccttcatttcttccttcagaatcagccggccaattccactttggagcttgtgcatgctgcggtcaaaatcatcctcctctcctccagacgagaaccttctggctcggggcactttgggggacccatggtaggtccagtactcagactccgaagcatagtaggggtctggcgagtagatgggactgtacttggaggtctggctgatgtcttcacttgttttgctcttggttgctgtagacaaatcacctgcagaggacccaaggagagcacttcaggaaggcagagtgaccgggatgggactgtgtacccttttcctatctttaccaggctccagcccaggggagtgagtccacttcaagatcagggctctctgttagaactgggccatggagcatcggagctggaaaagcactggggccaaaccctcattttgcatttagtaattggagcaccagagaggggaaggggcttgcttaagaccac

SEQ ID NO: 309420 - DNA, 1000 bp, Homo Sapiens
acttgactattgaaactgatttttccccatgtacacctgttaacaacttgtcaaactagcatttcatgggtcacaggcacttcagttagtccgagaacaagaaccaaggacagtttcctcctctttctgctgagaacagcttttcagaattggggaggatttatttttctcggatcacagaggaaaagcaagggaaccacctgctgattcagagtcaagctaatccagcaaaccttacagggggatctcagactagctccatgtgctgggttatatacacacagcaggaaaagaccatgtctagtgataaagggaaaggcatccggggtcgagagacctgggttcaaattctgtctccaccattccatctgtgtgaccatgggcaagatgcttaacctttttgtgcctcaatttcttcatctataaaataggaataataagttttacaaaactttatagaatggttgccagatttggcaaataaactacaggatgcccaaatattgcatgggactaaaaaattatttgctatttatctgaagttcaaattcaaatggtcatcccatattttatttaacgaccttattttagaggattgttgacaggcttatgtgatacaattcatattgaacactcagaacagtgccttgtaagcactcaattgcagtaagtacttgcagtaagcactcaattgactattggttattatcattaatattaccactttagttatgggcatcttttaaaacaattctggttctcctaataattttctaagagttatctcatttgtataaattaaccacttatagtcaaatattctctttagtcaataaaaataagaaactgatgtttattggcttaagtacttagatggacgttgttttataagggccaagaaagatgtattaaatggcccttcatctaccattaatggaaggaaatcatggtaggaaaaaatagttaacactggctttgtgcaatatttgttaattttttt

SEQ ID NO: 309421 - DNA, 390 bp, Homo Sapiens
atctctgtgcacactaatctgtactgtcctcagtaccttgatggctgtttgtggtcatacactccgtggaccagtcttgagggatcacagggccaaccagctcagcaaacctctccagaggacagctggggctgcagccaggtagcatgaggggatacggctcgtgctgcgtctcattccggtagtacatctccacaaagtactccctggcagacaaaggcagaggagagagctctgttagttctgtgttgttgaactgccactgaatttctttccacttggactattacatgccaagttgagggactaatggaaaaacgttatggggagattttagccaatttaggtgtgttaaatgggagactggggcaggcggagagatttgcaggt

SEQ ID NO: 309422 - DNA, 96 bp, Homo Sapiens
aattcacgacacacacacacacacacacacacacacacacacacacacacacacacacaccctctcattccctccttcctatgaataaatgtcctc

SEQ ID NO: 309423 - DNA, 1000 bp, Homo Sapiens
tgtgataaaaacaagctcaggactttattctatagagcaaacttgctgtggagggccatgctctccttggacccagttaactgcaaacgtgcattggagccctatttgctgccgctgccattctagtgacctttccacagagctgcgccttcctcacgtgtgtgaaaggttttccccttcagccctcaggtagatggaagctgcatctgcccacgatggcagtgcagtcatcatcttcaggatgtttcttcaggacttcctcagctgacaaggaattttggtccctgcctaggaccgggtcatctgaatggaaatttcagaatggagacccacacagggtgggggtgggctgaggagaggcatgccctcccaatggccttactacctcttccagccatggattctgaatccctccagaaatctgtttctttttctgaaaagcggtacccatgtaatcaggtgattatgaaaatttacttggatgactgtaaagtgaccacacagtaaatccttaatagatgatggtagatggggtggttactgtcatcagccatcaaggcaaagattcttcctatcttgaagtccagcaacacattctgaatcccacatccaatacagctttcagcagacttctcagtggaaaccctgtaatcccagcactttgggaggctgaggtgggcggatcacttgaggccaagagtttaagaccagcatggccaacatggcaaaatcccatctcatttgcagcaacatggatggaactggaggtcacgatgttaactgaaataagccaggcacagaaagacaaatattgcatgttctcattcacatgtgggagctaagaaagttgctctcatggaggtagagaatagaatgatagttaccagaggctgggcaaatactctgaggcaaataagcccaaacagttgttctctctgattcaacatcaaattatgactcaagttcctcctaacacttcaagaaggtttttcactctgtt

SEQ ID NO: 309424 - DNA, 1000 bp, Homo Sapiens; identical to SEQ ID NO: 120079

SEQ ID NO: 309425 - DNA, 1000 bp, Homo Sapiens
tccaatggcagatattgtacagggaaatgatggtggattcagataccagacaaagccaagggaaaaagtaccaaaattcagctgcataactggtacattttaaaatttaatttaaattttaagtaactattatacatgcagagtttgaaaatcaaatattactataggatgtcatgatttcatgcaaatatatgtttggtctttgctccaactcactttgaaagttgtcacctgaaagcaaatataagagggttgtaacttttagcacccctttccacttctgggggttgggggaagaaaggcagtaaagataatgttcaagcaccaatggttggcaatttaactaatcatacctatgtaataaaacctccatactaacctctaaactttggggttcagagagcttctgggttggtgaacacaatgaggtgctaggatgatggtgcacctggagaaggcatggaagaaagagcccccataccttgccccatgaatctcttccacttggctattcctaaattgtatttttcattataaactggcaatcatatgtgttttcctgagttcccgttaattgtcctagtaaattattgaacatgaggaagaggtcaagggaaccctcaaatttgtagtcagctcggtagaagtcatagccagatactggaggaaattagaattcaggatccagttcagtttacaagtagataacaaaacctcaaagacagtgaactaggctagaatctaacaatgggtgtgctatagttttctactaatatatagtttttctctttatagtcatgcccattccaaaaataatcacagtaaaactgatttgtttgcaaaataggcctagtcccgttacacttggcctgattacttacataagtatagtaagaatagtgattcattacataagctttttcaaagtatactttgctgggacttttaataaggagtctcaaattagaatttaaaaagtctttccaagctaggaaggcaa

SEQ ID NO: 309426 - DNA, 1000 bp, Homo Sapiens
caagaatttgttcaagccggtaatctaggaattattcttaataccttccttttttctcagaactctatctagtttatcatgaaatctgaatgatgttgaaatatatatcagggctgggtatggtggctcaacctgtagtcccagcacattgggaggttgaggtagatggattgcttgagccctggagttcccaatcatcctgggcaacatggcaaaagcctgtctctaccaaaagtacaaaaattagttgggagtggtggtgcacacctgcagtcccagctactcaggaggctgaggtgggaggatttcctaagcccgggagatcaaggcttcagtgagctgtggttgttgcaccactgcactccagcctgggtgacagggccaaaaataaaataaaaataaaaataaaaaaaatccagtcatgtctctcaatctacccagaggtcccctgtccctaccacccttccctgtcatttttaacctgttccaacttttgtcgtcacttccttccaactctctccagctaaagtaatcattcaaaaatataatggctggcataacttatctgtttaagactcactcgatgaatctacaatgcactaaaagtgaaatacaactctttagtatactgtaaagacattggatgatttgattgtgtctacctgtctaatatcttattccacccctactctccaacatgccaataggcactcatctttcagttccttgaacatgccaaggacttttatttttttaaacccactgggcctcaacactaatttgcattttctttccttagagtagtctaaatcctcctacccattcacccacctggccatttggatttagatgctttgtttttaacattattttcccagagagactttctctaataaccaaactttaacagataacccttcctccaacagtactcttctttacagctttgtcgtttctctaataacagctttataatttgtagttatacattaatttatgt

SEQ ID NO: 309427 - DNA, 1000 bp, Homo Sapiens
tgtacataaatacaccctatatgccagaaaataacagtattaatcttagaggtaggtacaaaagtaaatttaatcataggaaaaatatatagaagatattaatttctatctttatatttcatttatgaacatgcatttttagtattcatataaaaagtgcatagtttaaaataaaaaactcaaattttgattatgaattcagacaccacacaaaactagtagatagcactgacactcaactgaaaaaaagaagaatggactgtttttgtccctttctcattgatcctagatgtagacatcggggaaaaaattcctgtttgaaagcagaaatatttttgagacacagtgcaatgaattatacctcttttggcttctttctctttcaaagaaagcatcacatttttaatcaagaattcactgccagttatatttcaccagtctgtttcattcctttctttttctaatgtttaaaggctaacacgcaaatgagtcatacattataaaggcagataaagaaaaccagtctcatattcttgccccaaaccagacaaatgtggcaaacaccactaggtaatgtgtttctttttggacctgttttaatagtaaaagagttagtgattaataactcaataaggtgcacctaaaccttactgtaatcaaattctattttatacctacttctaccctcttctctccctttaaaaagaaataaaaacctaaaaaaagaatgaaagggacttaggtttaactttctcacctgtcagccataaaatataaatcagctcaaagaaccaagagttgactatcacacaagacccatgcccaagtcacacaaaacacgcaaacacacagatgactgatgaaaatcaacattttaccaagctaaatgcaaataaggcccttaaagaaactttactactaggcaatatactatatcaaatattaaataaacaaaaataaataaaataagtaaaaataacacctttggggggctgagcat

SEQ ID NO: 309428 - DNA, 943 bp, Homo Sapiens
ttttttttttttttttttttttttttttcagggctggaagttgatttttaatgataaagtacaatgaagggagggcagaggggctaagcctagctgtctggggtgctgtggtggtggtagactggctacacaaactgttgctgctgctgctgcttcttggtggccgccttgctggcgaggtccttggccttctctgtagctgccagtgccgtctcctttgccttctccttggcttccttggctgtctcaacaagtgttttggaaggggcctcgccttgcagcttagccaagatatattcaaaacccttcatagtcttggtcacgttgcttttgaaccgggcaagaccaaattcctggacagctctggagacaccaaataagctagaggagacccaggcttcccggcggatttcagtccagccactgttgtcagagttcacacagtaaacacatcgttcctccaccaccatcagccgggcgtggttgatgttccaggtgaaggtagtcatggtctgattctgtgggtccacaatagagtcctccaggacgtacaccgagtgagcaacattggcaggaaatagtcgctcggcccagcgtggcatcctgttggtcttggtcaggagtcgccgggacagcagtttctggtcaggggtcacctcccggtgtactatgtcttccgtcaagacatgtttgctatagggattcgggtaccgctgccagaaggcggcgaacacttggtcccaggaactccggagcacgctctggcccaggaaatacttcaccatcgtcccggccgaaggggctcagcacccgcgcagcatcaggggtgcggagcctgggaggcacgcgagggtcgggccgggccggggctcggcgcacacccgccgccaggctcgtagctcagtcaccacgcaccgcgcccaagagtgccgccgccgccgcc

SEQ ID NO: 309429 - DNA, 1000 bp, Homo Sapiens; identical to SEQ ID NO: 120080

SEQ ID NO: 309430 - DNA, 1000 bp, Homo Sapiens; identical to SEQ ID NO: 120080

SEQ ID NO: 309431 - DNA, 1000 bp, Homo Sapiens
gatctcttttctttcaaagatgcaatcactttgttaaaagtatggggaaagaggaattggagctaagaaagacataggctcaaatcaaccaagtcacacctgaaaatatatttttcgtaataaaaatattaataaatttttaaaaatttagccaggtgcagtggcatgcacctatagtagcagctactcaggaggctgagttgaggagattacttgaacccagaagtgagcttgatcataccactacactccagccttggcaacagtgagaccccatctcttaaaaaatatatatatggttttttatatatatgtgtattatatatatgtatatatgtattatatatgtatatcttaatatgttatatatgtatataatacacgtgtgtgtgtgtgtatgtgtgtgtgtgtgtgtgtgtgtgtgtgtgtatatatatatatatatatatatatatatatgaattggtcttcagtttttcccttcctacaatttatattctaagttcaggcctaaacagttcgtggcctcaaacagtgaaagggaggaaatattttgtaaatattttactaattctctgaggatcaaaaggaaagaagtttgaaacagatttcatttattttggggaaaaagatatctacagccctatgatatttggtctcttttgtgaaagagaccaaatgaacatatttataacattgtaatactgttattacactgaattagtatcagatattttgtccccttgcattagatttggttaagcaacatgaactactttactctcaggaacgaaggaaacccaagagagaatttctaccaggttaaatgatggcccctagctctggggagtgggaaggagtagagatggatgattagatgaatgactggacacacttcagctggtgtcatggtagaagtgattaaaaattttcatgttttagcagctgaacttgaaagatatgatgtgccacatttatagccctggccatcttttagaag

SEQ ID NO: 309432 - DNA, 1000 bp, Homo Sapiens
tgcaacctgggccaatgcaggatgctgctgcgcggccatcatggggtctttttctgggtcagacaggtgcttcttctggctctagagcttgataatgagcctcagattattccatttttaaattttaattaatagacttttttagagcagttttagtttcacagctgaattgagcaggatgtatagatagtaccccatgccccctgcctgccccaacccccagccgcccccattatcaacatccctcaccagagtggtacattagttacctaatgatgaacctacacagacatgtcatcatcacaaaatccatagattacattagggtttatttttggtgttgtgtattctatggatattgacaaatgtatgtgtctatcattacaatatcatacaaaatagttgcactgccctaaaaatcctgtgtttcacttctttatctctccctccacacaactcctagcaactgctgatctttttactgtctctgtaattttctagaatgttactgtttctataattttccagaatgttatataattggaatcatatactatgtagctttgtcagattggcttctttcacttagcaatatccattcaagtttcctccgtgccttttcatggcttgatagctcatttctttctagcactgaataatattctattgtctgggtgtattgcagtttccttctccattacctgctgaaggatatttagctgcttcccatttttcggtaattatgaataaagctgctataaacacccatgcttgggtttttgtgtgcacataagttttctatccagatgcttttaagcatttttattcttcgtggattttcagcttaacatactttaagtaatttctactgatgagaacactgtggctgacaaatatttaccccttagcccatccaggacaagactgtgctcaggcaatctgaccaatgcccagtggcccctgcagtgagaaccggtgtacaagcgctagaggcagacag

SEQ ID NO: 309433 - DNA, 1000 bp, Homo Sapiens
gatcccgccactgcactccagcctgggcgacagagcgagactccgtctcaaagaaaaaaaaaaaaaaaaaaaaaaaaaaacctcttgtaagaaaagttctccaagtccccaccccacccagaagtccagctggcttcacctctcactagggaaactgtgtctgtttctaaaagaggattaaaaggtattacctgttggctgaagtccagagtgtcctgggaaaaagaggaaaagatatacacttaaaagttattgaagcaaatctgtcctccaacacaatgtcccagccccagatctcccacctgagatttctctaacaccacaacccacaccaaccagggcagaaaggagcagaaacagaccatgtgacccatgaagcctgaagtgtctgtcacaggatccagtgtaattccattagccttagtggctcttccttaatttgctccaggatctcaaaccaaaggacccctacttgttaaccttcctctcgtctctgcaggccacaagctattatgctttcacatagtaaccatgcactgatgatttctggattagcaggacattagagccgtttggggaaagaaaggctttattcagggccactcatatactgagaactaacctcagcaaagccatagttcctcctccagaaaagcctatggagagagccagctcccaaaggctcctcacctttctgattcctgaagtagatgaacagcccggccccaaggaagagcaggcccagcacaaagcccccgactccactcagcatcttgctctgtgcagattcagaccgtgctcctgagagaggaagccaggtttagtgatgtttattccaaattgaacctttttacttgagactctaagatttagagctttgaaaatggggcagaaagctgcctcacaagaactaaaataactagccatttcaggagaaaaaaaggatttcaaattacactgaacagttacgacgttcagacatcaaactcattcaaatatt

SEQ ID NO: 309434 - DNA, 1000 bp, Homo Sapiens
gatctcagggattcgagacaagcctgggcaacatggcaaaaccctgtctctgccaaaaatacaaaaaattagccaggcgtggtggtgcatgtctgtaatcccagctattcaggaggctgatgtgtgaggattacaggagcctgggaagcagaggctgcagtgagccatggtcgcaccactgccctccagcctgggtgacacagcaagactccatctaaaaaacaaacaaaaaaagaaaaaaaagaaaaagaaaaaaaaagaatgccatgatggaacattttataataatgtttttactggatatacattctaggttaacattcttttcagccattaaaatatcttgtgccacttttgtctggtctgcatgatttctattgaacaatccactgtcatttaatttattttctcctgtgcatgagatgtcatttctctcttgttgctttcgagattttttttggcataaatttctttggatttattttcgtttgggtttgcacagattcttgaatttttacatttaagtctttgtccgaatttggaaaatagtcagtctttcttcaaacactctttgtgcatcacccatttgtcatctccctctaagactccagttacacaaatttcatagcttttgttatagtcttacagatttatcagcatgaaataatactaaatattatgaacaactttacaaaaataaatgtgcatgtaataaataaattattcaaaatgtacaatgtactgaagctgacaaataacataaaacaggaagagttccacatgtcatagagaaagtaagtccattctataatgctttcccaagacaaaaccccaggttcatctagcttcagtaactatttaaaaatatttaaggaacaaacaacactaactttatacaaacttcaaacatatttgaaaaaaggaaaagcacttgcagttatgtttgatgagatctgtgtaaactttacttcaagacctgaagggaactctacaacgaata

SEQ ID NO: 309435 - DNA, 1000 bp, Homo Sapiens
gatcacgccactgcactccaacctggacaacagagcgtgattctgactcaaaaaaatataataatggctaggcgtggtggctcatgcctgtaatcctagcactttgggaggccgaggcaggcggatcatgaggtcaggagatcaagaccatcctggctgacacggtgaaaccccgtctctactaaaaatatgaaaacaaaattagccgggcatggtggcaggcgcctgtagtcccagctactccagaggctgaggtgggagaatggtgtgaacctggcaggcggagcttgcagtgagccaagatcgcaccactgcactccagcctgggtgacagagcgagactctgtctcaaaaatatatatataataataataataagaagaagaagactagaactctgggccacctgggcttagtagatactcttaggggcaactgataccctaagcacttgcttacctccctagctgcagacttactttggtctggctccagaagatttctttttgcaaactaaataatatgttttggccgggtgcagtggtctgtaatcccagcactttgggaggccgaggtgggtggatcacctgaggtcaggagttttgagaccagcctggccaacatagctgaaaccccatctctactaaaaatacaaaaattagccaggtgtgcttgtgggcacctgtaatcccagctactcaggaggttgaggcaggagaaccgcttgaacccaggaagcggaggttgcagtgagccgagatcatgccattgcactccagcctgggcaacaagagtgaaactccgtcccaaataaataaatgaaatatttttaaaggtgttcttgtttaacattctaacaggcttcatatcaaagtaaatactttctaaaattgagtctgccatattgccaaaaaatagaagtctacaaattctatctcttcctagccgtctcacaaatccaaaacttcagtagttactgattccagtaccatatctaatt

SEQ ID NO: 309436 - DNA, 1000 bp, Homo Sapiens
aggtgacactatagaatactaggatccagtactgcggccgcgatcctaagcttcatcgtcccgacactcggtgggaacagggtggcagggtttggtgaagccacagatgtagcagcggagccttccccgggcaggggacatggtgagacctgttgaggcagcagagattaggagagcaggagaggcaaaccctccctgtggggcaggcagaggccagatccggagagggatcacagagagaggtgacacatgaagcagagagaggaaagctgtggaataagggaggaaagctgacagaagtagaaaaaatagctgggcgcagtggctcacgcctgtaatcccagcacgttgggaggccgaggcgggctgatcatgaggtcagaagattgagaccatcctggctaacacagtgaaaccccgtctctactaaaaatacaaaaaattagccgggcatggtggcacatgcctctagtcccagctacttgggaggctgaggcaggagaatctcttgaatctgggtggctgaggttgcagtgagccgagatcatgccactgcactccagcctgggtgacagaacgagactctgtctcaaaaaaaaagagggagacgatgcaggaaaagaaacagagatggaggcaagaggggtacagggattgagagatgcgcagacatgaacagaagccacaagaatcagagaccaacataaaaagagtgagacaaaaagccagacccagcagcagggaagttgagggggtcagtgaaaaagttaagtaaatggcaccagagacagataggaaaatagaaattgacattgaccaaagggcccagcacagaagcaacacgtgaaataagggataggggagacaggggtggatcaaagatgcagcaagggggagacagttattctcaaatgccttgaaaggaaactcttcctttcccacctcatcaggctggccttcccagtggctggtctccctgaagtcccccactcccccagct
